(19) United States
(12) Patent Application Publication
(10) Pub. No.: US 2024/0209406 A1
(43) Pub. Date: Jun. 27, 2024

(54) ENZYMATIC SYNTHESIS OF NTP AND NQP

(71) Applicant: Codexis, Inc., Redwood City, CA (US)

(72) Inventors: David Entwistle, Dublin (IE); Stephanie Marie Forget, Redwood City, CA (US); Anders Matthew Knight, Mountain View, CA (US); Mikayla Jianghongxia Krawczyk, Palo Alto, CA (US); Marissa Greene MacAvoy, Emerald Hills, CA (US); Simon Ng, San Francisco, CA (US); Nicholas Porter, Redwood City, CA (US); Philip Provencher, San Francisco, CA (US); Amani Shoubber, Santa Clara, CA (US); Leann Quertinmont Teadt, Redwood City, CA (US); Jonathan Vroom, South San Francisco, CA (US); David Watts, San Mateo, CA (US); Leland Ken Wong, San Bruno, CA (US)

(21) Appl. No.: 18/486,140

(22) Filed: Oct. 12, 2023

Related U.S. Application Data
(60) Provisional application No. 63/387,908, filed on Dec. 16, 2022.

(51) Int. Cl. C12P 19/34; C12N 9/12

(52) U.S. Cl. CPC C12P 19/34; C12N 9/1205; C12N 9/1217; C12N 9/1223; C12N 9/1229; C12Y 207/0102; C12Y 207/02001; C12Y 207/03002; C12Y 207/04001; C12Y 207/04003; C12Y 207/04006

(57) ABSTRACT

The present disclosure provides enzymatic methods for the production of 3′-phosphate-nucleoside-5′-triphosphate (NQP). The present disclosure further provides enzymatic methods for the production of nucleotide-5′-triphosphates.

### CROSS-REFERENCE TO RELATED APPLICATIONS

[0001] This application claims the benefit of U.S. Provisional Application No. 63/387,908, filed Dec. 16, 2022, the entire contents of which is incorporated by reference herein.

### REFERENCE TO SEQUENCE LISTING, TABLE OR COMPUTER PROGRAM

[0002] The Sequence Listing concurrently submitted herewith as file name CX10-260WO1_ST26.xml, created on Oct. 12, 2023, with a file size of 9,199,375 bytes, is part of the specification and is hereby incorporated by reference herein.

### TECHNICAL FIELD

[0003] The present disclosure relates to an enzymatic method for producing 3′-phosphate-nucleoside-5′-triphosphate (NQP) nucleotides. The present disclosure further provides an enzymatic method for producing nucleotide-5′-triphosphates.

### BACKGROUND

[0004] Synthetic biology offers a diverse range of high value, high growth markets. From food and agriculture to therapeutics, diagnostics, and vaccines; tools such as gene editing, DNA sequencing and gene synthesis are being used to build value-added products with advanced functionality (e.g., cell bioreactors, etc.) and desired end products (e.g., drugs, chemicals, etc.). A barrier to widespread implementation of these technologies is the ability to efficiently synthesize RNA, DNA, and other polynucleotides.

[0005] In therapeutics, silencing RNA (siRNA) is a promising class of drugs that have the potential to treat numerous difficult to treat conditions in a highly targeted manner by binding to known mRNA targets (Hu et al., Sig Transduct Target Ther., 2020, 5:101; Zhang et al., Bioch. Pharmac., 2021, 189:114432). As these therapies become more common and are targeted at larger patient populations, the ability to produce large amounts of the oligonucleotide active pharmaceutical ingredient (API) becomes critical.

[0006] Another technology incorporating synthetic oligonucleotides is CRISPR (clustered, regularly interspaced, short palindromic repeats) technology, with increasing use of modified CRISPR RNAs, such as the guide RNA (gRNA) to improve activity and specificity for in vivo applications. Use of modified guide RNAs can reduce the levels of off-target activity (see, e.g., Hendel et al., Nat Biotechnol., 2015 September; 33(9): 985-989).

[0007] Phosphoramidite chemistry has been developed extensively over the years to synthesize small amounts of DNA and RNA, but suffers from several cost, processing and sustainability issues that are potentially limiting as API demand grows to triple-quadruple digit kilograms per year (see, e.g., Andrews et al., J. Org. Chem., 2021, 86:49-61). Additionally, RNA synthesis using phosphoramidite synthesis chemistry is limited to producing short oligonucleotides of approximately 200 base pairs (Beaucage and Caruthers, Tetrahedron Lett., 1981, 22 (20):1859).

[0008] New oligonucleotide synthesis techniques are being developed to replace to phosphoramidite chemistry to meet the growing demand for large quantities of DNA and RNA necessary for modern medical and industrial applications. One promising is template independent oligonucleotide synthesis using various polymerases, including terminal nucleotide transferases (TdTs) and polyX polymerases. These methods often rely on modified nucleotide triphosphates (NTPs) that incorporate blocking groups or other structural or chemical elements that allow the controlled addition of a defined sequence of NTPs. These modified NTPs include NTPs with blocking groups on the 3′ or 2′ positions of the sugar, as well as NTPs with modified bases or thiol derivates for the formation of more stable oligonucleotide phosphorothioate backbone bonds.

[0009] A limiting factor for the enzymatic oligonucleotide synthesis is the availability and cost of natural and modified NTPs as substrates for the TdTs and polyX polymerases. For example, NTPs with a phosphate at the 3′ position of the sugar (nucleoside tetraphosphates, pppNps or NQPs), with or without additional modifications to the nucleobase, sugar, and/or phosphate chain, are useful as reversible blocked nucleotide substrates for template independent enzymatic synthesis applications. However, these NQPs are not widely commercially available and associated with high costs at an industrial scale. Desirable are efficient methods to synthesize natural and modified NTPs and NQPs on the scale required for modern synthetic biology applications.

### SUMMARY

[0010] The present disclosure provides enzymatic methods and processes for producing 3′-phosphate-nucleoside-5-triphosphates. Further provided herein are enzymatic methods for producing nucleoside-5′-triphosphates.

[0011] In some embodiments, a method of producing a nucleotide triphosphate with a phosphate group at the 3′ position of the sugar moiety (NQP), the method comprising at least: contacting a nucleoside diphosphate (NDP) with a nucleoside diphosphate kinase, a 3′-O-kinase, and a phosphate donor under reaction conditions such that a NTP with a phosphate group on the 3′ position of the sugar moiety (NQP) is produced.

[0012] In some embodiments, the NDP substrate is an unmodified or modified NDP. In some embodiments, the NDP substrate is a nucleoside 5′-1-thio(diphosphate) (NDPαS). In some embodiments, the NDPαS is (Rp) or (Sp) diastereomer, or a mixture of (Rp) and (Sp) diastereomers.

[0013] In some embodiments, in the method for producing NQP, the method further comprises contacting a nucleoside monophosphate (NMP) with a nucleoside monophosphate kinase in presence of a phosphate donor NTP under suitable reaction conditions such that a product nucleoside diphosphate (NDP) is produced for reaction with the acetate kinase and/or 3′-O-kinase.

[0014] In some embodiments, in the method for producing NQP with a nucleoside monophosphate kinase, the NMP substrate is an unmodified or modified NMP. In some embodiments, the NMP substrate is a nucleoside 5′-O-thiophosphate (NMPαS).

[0015] In some embodiments, in the method for producing NQP using a nucleoside monophosphate kinase, the method further comprises contacting a nucleoside with a nucleoside kinase in presence of a phosphate donor NTP under reaction conditions such that a product nucleoside monophosphate (NMP) is produced.

[0016] In some embodiments, the nucleoside substrate is an unmodified or modified nucleoside. In some embodiments, the phosphate donor NTP is a nucleoside-5′-gamma thio-triphosphate (NTPγS) for producing product NMP-5′-O-thiophosphate (NMPαS) and NQPαS.

[0017] In some embodiments, a method of producing a NTP with a phosphate group at the 3′ position of the sugar moiety (NQP), comprises contacting a nucleoside with a nucleoside kinase, a nucleoside monophosphate kinase, nucleoside diphosphate kinase, and a 3′-O-kinase in presence of a phosphate donor under reaction conditions such that a product NTP with a phosphate group at the 3′ position of the sugar (NQP) is produced.

[0018] In some embodiments, a method of producing a NTP with a phosphate group at the 3′ position of the sugar (NQP), comprises (i) contacting a nucleoside with a nucleoside kinase, a nucleotide monophosphate kinase, and a nucleoside diphosphate kinase in presence of a phosphate donor under reaction conditions such that a NTP is produced; and iii) contacting the NTP produced in (i) with a 3′-O-kinase enzyme under suitable reaction conditions, such that a NTP with a phosphate group at the 3′ position of the sugar (NQP) is produced.

[0019] In some embodiments, a method of producing a NTP with a phosphate group at the 3′ position of the sugar (NQP), the method comprising (i) contacting a nucleoside with a nucleoside kinase, (ii) contacting the product of (i) with a nucleotide monophosphate kinase, (iii) contacting the product of (ii) with a nucleoside diphosphate kinase, and (iv) contacting the product of (iii) with a 3′-O-kinase enzyme, wherein (i), (ii), (iii) and (iv) are carried out in presence of a phosphate donor under reaction conditions such that a product NTP with a phosphate group at the 3′ position of the sugar (NQP) is produced.

[0020] In another aspect, the present disclosure further provides a method of producing a nucleoside triphosphate (NTP), comprising contacting a nucleoside monophosphate (NMP) with a nucleoside monophosphate kinase, and in presence of a nucleoside diphosphate kinase and a phosphate donor under reaction conditions such that NTP is produced.

[0021] In some embodiments for the method for producing NTP, the NMP substrate is an unmodified NMP or modified NMP substrate. In some embodiments, the NMP substrate comprises a nucleoside 5′-0-thiophosphate (NMPαS). In some embodiments, the product NDPαS is separated into R or S NDPαS prior to reaction with the nucleoside diphosphate kinase.

[0022] In some embodiments for the method for producing NTP, the method further comprises contacting a nucleoside with a nucleoside kinase in presence of a phosphate donor NTP under reaction conditions such that a product nucleoside monophosphate (NMP) is produced.

[0023] In some embodiments, the nucleoside is an unmodified or modified nucleoside. In some embodiments, the phosphate donor NTP has the same nucleoside structure as the nucleoside substrate. In some embodiments, the phosphate donor is NTP or NTPγS.

[0024] In some embodiments, a method of producing a nucleoside triphosphate (NTP), comprises contacting a nucleoside with a nucleoside kinase, a nucleoside monophosphate kinase, and a nucleoside diphosphate kinase in presence of a phosphate donor under reaction conditions such that NTP is produced.

[0025] In some embodiments, a method of producing a NTP comprises (i) contacting a nucleoside with a nucleoside kinase, (ii) contacting the product of (i) with a nucleotide monophosphate kinase, and (iii) contacting the product of (ii) with a nucleoside diphosphate kinase, wherein (i), (ii), and (iii) are carried out in presence of a phosphate donor under reaction conditions such that a product NTP is produced.

[0026] In the methods herein that use a nucleoside kinase, any suitable nucleoside kinase enzyme can be used. In some embodiments, the nucleoside kinase is an adenosine kinase, guanosine kinase, cytidine kinase, or uridine kinase. In some embodiments, the nucleoside kinase is an adenosine kinase. In some embodiments, the adenosine kinase is an adenosine kinase of an even-numbered SEQ ID NO. of SEQ ID NOs: 66-1204, with or without amino acid residues 1-12 (i.e., His-tag).

[0027] In the methods herein that use a nucleoside monophosphate kinase, any suitable nucleoside monophosphate kinase can be used. In some embodiments, the nucleoside monophosphate kinase is an adenylate kinase. In some embodiments, the adenylate kinase comprises an adenylate kinase of an even-numbered SEQ ID NO. of SEQ ID NOs: 1206-2504, with or without amino acid residues 1-12 (i.e., His-tag).

[0028] In the methods herein that use a nucleoside diphosphate kinase, any suitable diphosphate kinase can be used. In some embodiments, the nucleoside diphosphate kinase is an acetate kinase and the phosphate donor further includes acetyl phosphate. In some embodiments, the acetate kinase comprises an acetate kinase of an even-numbered SEQ ID NO. of SEQ ID NOs: 2506-3058, with or without amino acid residues 1-12 (i.e., His-tag).

[0029] In the methods herein that use a 3′-O-kinase, any suitable 3′-O-kinase can be used. In some embodiments, the 3′-O-kinase comprises a 3′-O-kinase of an even-numbered SEQ ID NO. of SEQ ID NOs: 3060-3370 and 3376-5126,

[0030] In some embodiments of the methods herein, the method further comprises a NTP regenerating system. In some embodiments, the NTP regenerating system comprises creatine kinase, pyruvate kinase, polyphosphate kinase, and/or R-acetate-kinase.

[0031] In some embodiments, the NTP regenerating system comprises pyruvate kinase and substrate phosphoenolpyruvate. In some embodiments, the NTP regenerating system comprises creatine kinase and substrate creatine phosphate. In some embodiments, the NTP regenerating system comprises polyphosphate kinase and substrate polyphosphate.

[0032] In some embodiments, the NTP regenerating system is R-acetate kinase and substrate acetyl phosphate. In some embodiments, the R-acetate kinase is same or different than the acetate kinase used for the conversion of NDP of NTP in the production of NQP or NTP. In some embodiments, the R-acetate kinase is an engineered acetate kinase of an even-numbered SEQ ID NO. of SEQ ID NOs: 2506-3058.

[0033] In some embodiments, where the enzymatic reaction and/or NTP regenerating system uses acetate kinase, the method further comprises pyruvate oxidase and substrate pyruvate and inorganic phosphate. In some embodiments, the method further comprises a catalase for removal of H₂O₂ generated by pyruvate oxidase reaction.

### DETAILED DESCRIPTION

[0034] Nucleoside-5′-triphosphates (NTPs) and their analogs are building blocks of polynucleotides and are important compounds in both pharmaceutical and molecular biology applications. Currently, commercially available base or sugar modified NTPs are mainly synthesized chemically. Even unmodified NTPs, though readily available, has associated high costs for preparation at industrial scale.

[0035] As an alternative to the time consuming and inefficient chemical production of NTPs the present disclosure provides an enzymatic (biocatalytic) synthesis method for the production of NQPs and NTPs, including modified NTPs. The use of efficient enzymes reduces side reactions and simplifies scale up.

### Abbreviations and Definitions

[0036] Unless defined otherwise, all technical and scientific terms used herein generally have the same meaning as commonly understood by one of ordinary skill in the art to which this invention pertains. Generally, the nomenclature used herein and the laboratory procedures of cell culture, molecular genetics, microbiology, organic chemistry, analytical chemistry and nucleic acid chemistry described below are those well-known and commonly employed in the art.

[0037] Numeric ranges are inclusive of the numbers defining the range. Thus, every numerical range disclosed herein is intended to encompass every narrower numerical range that falls within such broader numerical range, as if such narrower numerical ranges were all expressly written herein. It is also intended that every maximum (or minimum) numerical limitation disclosed herein includes every lower (or higher) numerical limitation, as if such lower (or higher) numerical limitations were expressly written herein.

[0038] As used in this specification and the appended claims, the singular forms “a”, “an” and “the” include plural referents unless the context clearly indicates otherwise. Thus, for example, reference to “a polypeptide” includes more than one polypeptide. Similarly, “comprise,” “comprises,” “comprising” “include,” “includes,” and “including” are interchangeable and not intended to be limiting.

[0039] It is to be understood that where descriptions of various embodiments use the term “comprising,” those skilled in the art would understand that in some specific instances, an embodiment can be alternatively described using language “consisting essentially of” or “consisting of.”

[0040] It is to be further understood that where descriptions of various embodiments use the term “optional” or “optionally” the subsequently described event or circumstance may or may not occur, and that the description includes instances where the event or circumstance occurs and instances in which it does not.

[0041] It is to be understood that both the foregoing general description, and the following detailed description are exemplary and explanatory only and are not restrictive of this disclosure. The section headings used herein are for organizational purposes only and not to be construed as limiting the subject matter described.

### Abbreviations

[0042] The abbreviations used for the genetically encoded amino acids are conventional and are as follows:

| | Three-Letter | One-Letter |
|---|---|---|
| Amino Acid | Abbreviation | Abbreviation |
| Alanine | Ala | A |
| Arginine | Arg | R |
| Asparagine | Asn | N |
| Aspartate | Asp | D |
| Cysteine | Cys | C |
| Glutamate | Glu | E |
| Glutamine | Gln | Q |
| Glycine | Gly | G |
| Histidine | His | H |
| Isoleucine | Ile | I |
| Leucine | Leu | L |
| Lysine | Lys | K |
| Methionine | Met | M |
| Phenylalanine | Phe | F |
| Proline | Pro | P |
| Serine | Ser | S |
| Threonine | Thr | T |
| Tryptophan | Trp | W |
| Tyrosine | Tyr | Y |
| Valine | Val | V |

[0043] When the three-letter abbreviations are used, unless specifically preceded by an “L” or a “D” or clear from the context in which the abbreviation is used, the amino acid may be in either the L- or D-configuration about α-carbon (C_{α}). For example, whereas “Ala” designates alanine without specifying the configuration about the α-carbon, “D-Ala” and “L-Ala” designate D-alanine and L-alanine, respectively.

[0044] When the one-letter abbreviations are used, upper case letters designate amino acids in the L-configuration about the α-carbon and lower case letters designate amino acids in the D-configuration about the α-carbon. For example, “A” designates L-alanine and “a” designates D-alanine. When polypeptide sequences are presented as a string of one-letter or three-letter abbreviations (or mixtures thereof), the sequences are presented in the amino (N) to carboxy (C) direction in accordance with common convention.

[0045] The abbreviations used for the genetically encoding nucleosides are conventional and are as follows: adenosine (A); guanosine (G); cytidine (C); thymidine (T); and uridine (U). These abbreviations are also used interchangeably for nucleosides and nucleotides (nucleosides with one or more phosphate groups). Unless specifically delineated, the abbreviated nucleosides or nucleotides may be either ribonucleosides (or ribonucleotides) or 2′-deoxyribonucleosides (or 2′-deoxyribonucleotides). The nucleosides or nucleotides may also be modified at the 3′ position. The nucleosides or nucleotides may be specified as being either ribonucleosides (or ribonucleotides) or 2′-deoxyribonucleosides (or 2′-deoxyribonucleotides) on an individual basis or on an aggregate basis. When nucleic acid sequences are presented as a string of one-letter abbreviations, the sequences are presented in the 5′ to 3′ direction in accordance with common convention, and the phosphates are not indicated.

### Definitions

[0046] In reference to the present invention, the technical and scientific terms used in the descriptions herein will have the meanings commonly understood by one of ordinary skill in the art, unless specifically defined otherwise. Accordingly, the following terms are intended to have the following meanings.

[0047] “EC” number refers to the Enzyme Nomenclature of the Nomenclature Committee of the International Union of Biochemistry and Molecular Biology (NC-IUBMB). The IUBMB biochemical classification is a numerical classification system for enzymes based on the chemical reactions they catalyze.

[0048] “ATCC” refers to the American Type Culture Collection whose biorepository collection includes genes and strains.

[0049] “NCBI” refers to National Center for Biological Information and the sequence databases provided therein.

[0050] “Protein,” “polypeptide,” and “peptide” are used interchangeably herein to denote a polymer of at least two amino acids covalently linked by an amide bond, regardless of length or post-translational modification (e.g., glycosylation, phosphorylation, lipidation, myristoylation, ubiquitination, etc.). Included within this definition are D- and L-amino acids, and mixtures of D- and L-amino acids, as well as polymers comprising D- and L-amino acids, and mixtures of D- and L-amino acids.

[0051] “Amino acids” are referred to herein by either their commonly known three-letter symbols or by the one-letter symbols recommended by IUPAC-IUB Biochemical Nomenclature Commission. Nucleotides, likewise, may be referred to by their commonly accepted single letter codes.

[0052] “Nucleoside kinase” refers to an enzyme that catalyzes a phosphoryl transfer from phosphate-donor molecule (e.g., a nucleotide triphosphate) to an R—OH acceptor, which is typically the 5′-hydroxyl group of the sugar moiety of the nucleoside. This process converts a nucleoside to the corresponding nucleoside monophosphate (NMP). In some embodiments, the nucleoside kinase is also referred to as a “5′-O-kinase.” In some embodiments, the nucleoside kinase catalyzes the transfer of phosphate from a phosphate-donating molecule to adenosine (A), guanosine (G), cytidine (C), thymidine, or uridine to produce adenosine monophosphate (AMP), guanosine monophosphate (GMP), cytosine monophosphate (CMP), thymidine monophosphate (TMP) or uridine monophosphate (UMP), respectively. In some embodiments, more than one nucleoside kinase is used in a reaction mixture.

[0053] “Adenosine kinase,” “AdoK” “Adk,” or “AK” refer to an enzyme that catalyzes the phosphorylation of adenosine (A or ADO) to adenosine-5′-monophosphate (AMP). In some embodiments, adenosine kinase is classified in EC 2.7.1.20. Although the primary substrate is adenosine, adenosine kinases as used herein include those that act on other nucleosides.

[0054] “Nucleoside monophosphate kinase,” “NMP kinase” or “NMPK” refers to an enzyme that catalyzes the transfer of the terminal phosphoryl group from a nucleoside triphosphate (NTP) to the phosphoryl group on a nucleoside monophosphate. This process converts a NMP to an NDP. For example, in some embodiments, the NMP kinase catalyzes the transfer of phosphate from a phosphate-donating molecule to convert AMP, GMP, CMP, TMP, or UMP to the corresponding product ADP, GDP, CDP, TDP, and UMP, respectively. In some embodiments, the phosphate donor NTP is ATP. In some embodiments, more than one NMP kinase is used in a reaction mixture.

[0055] “Adenylate kinase,” “AdyK,” or “AK” refers to an enzyme that catalyzes the interconversion of ATP, ADP, and AMP through transfer of phosphoryl groups. In some embodiments, adenylate kinase also includes enzymes capable of catalyzing the interconversion of NTP, NDP and NMP. In some embodiments, adenylate kinase are enzymes classified in EC 2.7.3.4.

[0056] “Nucleoside diphosphate kinase” or “NDP kinase” refers to an enzyme that catalyzes the transfer of a phosphoryl group of a phosphate donor compound to a nucleoside-5′-diphosphate. In some embodiments, the NDP kinase catalyzes the transfer of phosphate from a phosphate-donating compound to ADP, CDP, GDP, TDP, or UDP to produce the corresponding ATP, CTP, GTP, TTP, or UTP, respectively. In some embodiments, the phosphate donor compound is an NTP. In some embodiments, “nucleoside diphosphate kinase” includes transferase enzymes that can transfer a phosphoryl group from a phosphate donor other than NTP, e.g., acetyl phosphate, to a NDP substrate to produce NTP. In some embodiments, more than one NDP kinase is used in a reaction mixture.

[0057] “Acetate kinase (“AcK”) refers to enzymes that are capable of catalyzing the phosphorylation of nucleoside diphosphates or analogues thereof, to nucleoside triphosphates or the corresponding analogues, using acetyl phosphate or another phosphoryl group donor. Acetate kinases as used herein includes naturally occurring, wild-type enzymes or engineered enzymes. In some embodiments, acetate kinases are naturally occurring, wild-type basic metabolic enzymes found primarily in prokaryotes that catalyze the phosphorylation of acetate to acetyl-CoA in the presence of ATP. In some embodiments, acetate kinases are derived from the naturally occurring, wild-type enzymes.

[0058] “3‘—O’-kinase,” “3′O-kinase,” or “3OK” refers to an enzyme that catalyzes the phosphorylation of the 3′-OH group of the sugar moiety of a nucleoside or nucleotide to produce a nucleoside or nucleotide with a 3′-phosphate moiety. In some embodiments, the 3′-O-kinase phosphorylates the 3′-OH of a nucleoside, nucleoside monophosphate, nucleoside diphosphate, or nucleoside triphosphate.

[0059] “Pyruvate kinase” refers to an enzyme that catalyzes the conversion of ADP and phosphoenolpyruvate to ATP and pyruvate. In some embodiments, pyruvate kinase are enzymes classified in EC 2.7.1.40.

[0060] “Creatine kinase” refers to an enzyme that catalyzes the reversible interconversion of creatine:ATP to creatine phosphate:ADP.

[0061] “Polyphosphate kinase” refers to an enzyme that catalyzes the transfer of phosphate group(s) from high-energy, phosphate-donating molecules, such as polyphosphate (PolyPn), to specific substrates/molecules. Two families of polyphosphate kinases, PPKK1 and PPK2, are known. PPK1s preferentially synthesize polyphosphate from NTP and the corresponding reverse reaction, and PPK2s preferentially consume polyphosphate to phosphorylate nucleoside mono- or diphosphates, and the corresponding reverse reactions. In some embodiments, polyphosphate kinase includes enzymes classified in EC 2.7.4.1.

[0062] “Pyruvate oxidase” or “Pox” refers to an enzyme that catalyzes the reaction between pyruvate, inorganic phosphate, and oxygen to generate acetyl phosphate and H₂O₂. In some embodiments, pyruvate oxidase include enzymes classified in EC 1.2. 3.3.

[0063] “Catalase” refers to an enzyme that converts hydrogen peroxide (H₂O₂) to H₂O and O₂. Catalase can be used to remove residual hydrogen peroxide in applications where hydrogen peroxide is present or is a product in a process. In some embodiments, catalases includes enzymes classified in EC 1.11.1.6.

[0064] “Polynucleotide,” “oligonucleotide,” and “nucleic acid” are used interchangeably herein and refer to two or more nucleosides or nucleotides that are covalently linked together. The polynucleotide may be wholly comprised of ribonucleotides (i.e., RNA), wholly comprised of 2′ deoxyribonucleotides (i.e., DNA), wholly comprised of other synthetic nucleotides or comprised of mixtures of synthetic, ribo- and/or 2′ deoxyribonucleotides.

[0065] The polynucleotides may also include modified nucleotides with substitutions, including 2′ substitutions (e.g., 2′-fluoro, 2′-O-methyl, 2′-O-methoxyethyl, locked or constrained ethyl modifications, and others known to those skilled in the art). Nucleosides will be linked together via standard phosphodiester linkages or via one or more non-standard linkages, including but not limited to phosphothiolated linkages. The polynucleotide may be single-stranded or double-stranded, or may include both single-stranded regions and double-stranded regions. Moreover, while a polynucleotide will typically be composed of the naturally occurring encoding nucleobases (i.e., adenine, guanine, uracil, thymine and cytosine), it may include one or more modified and/or synthetic nucleobases, such as, for example, inosine, xanthine, hypoxanthine, etc. In some embodiments, such modified or synthetic nucleobases are nucleobases encoding amino-acid sequences. Nucleobases that are modified or synthetic may comprise any known or hypothetical or future discovered modification or structure that would be recognized by one of skill in the art as a modified or synthetic nucleobase. Similarly, the terms “polynucleotide,” “oligonucleotide,” and “nucleic acid” are intended to comprise any modified or synthetic structure that is now known or discovered in the future that would be recognized by one of skill in the art as being or having the function of a “polynucleotide,” “oligonucleotide,” or “nucleic acid.” An example of a modified or synthetic structure having the function of a “polynucleotide,” “oligonucleotide,” or “nucleic acid” is PNA or peptide nucleic acid.

[0066] “Nucleobase” or “base” refers to those naturally occurring and synthetic heterocyclic moieties commonly known to those who utilize nucleic acid or polynucleotide technology to thereby generate polymers that can hybridize to polynucleotides in a sequence-specific manner. Non-limiting examples of nucleobases include, among others, adenine, cytosine, guanine, thymine, uracil, 5-propynyl-uracil, 2-thio-5-propynyl-uracil, 5-methylcytosine, pseudoisocytosine, pseudoisouridine, 2-thiouracil and 2-thiothymine, 2-aminopurine, N9-(2-amino-6-chloropurine), N9-(2,6-diaminopurine), hypoxanthine, N9-(7-deaza-guanine), N9-(7-deaza-8-aza-guanine) and N8-(7-deaza-8-aza-adenine).

[0067] “Nucleoside” refers to glycosylamines comprising a nucleobase, and a 5-carbon sugar (e.g., ribose or deoxyribose). Non-limiting examples of nucleosides include cytidine, uridine, adenosine, guanosine, thymidine, and inosine. In contrast, the term “nucleotide” refers to the glycosylamines comprising a nucleobase, a 5-carbon sugar, and one or more phosphate groups, as further described herein. In some embodiments, nucleosides can be phosphorylated by kinases to produce nucleotides.

[0068] “Nucleoside monophosphate” or “NMP” refers to glycosylamines comprising a nucleobase, a 5-carbon sugar (e.g., ribose, deoxyribose or arabinose), and a monophosphate moiety at the 5′-position of the sugar moiety. Non-limiting examples of nucleoside monophosphates include cytidine monophosphate (CMP), uridine monophosphate (UMP), adenosine monophosphate (AMP), guanosine monophosphate (GMP), thymidine monophosphate (TMP), and inosine monophosphate (IMP). In some embodiments, “nucleoside monophosphate” may refer to a non-natural (i.e., modified) nucleoside monophosphate. The terms “nucleoside” and “nucleotide” may be used interchangeably in some contexts.

[0069] “Nucleoside diphosphate” or “NDP” refers to glycosylamines comprising a nucleobase, a 5-carbon sugar (e.g., ribose, deoxyribose, or arabinose), and a diphosphate (i.e., pyrophosphate) moiety at the 5′-position of the sugar moiety. Non-limiting examples of nucleoside diphosphates include cytidine diphosphate (CDP), uridine diphosphate (UDP), adenosine diphosphate (ADP), guanosine diphosphate (GDP), thymidine diphosphate (TDP), and inosine diphosphate (IDP). In some embodiments, “nucleoside diphosphate” may refer to a non-natural (i.e., modified) nucleoside diphosphate. The terms “nucleoside” and “nucleotide” may be used interchangeably in some contexts.

[0070] “Nucleoside triphosphate” or “NTP” refers to glycosylamines comprising a nucleobase, a 5-carbon sugar (e.g., ribose, deoxyribose, or arabinose), and a triphosphate moiety at the 5′-position of the sugar moiety. In some embodiments herein, “nucleoside triphosphate” is abbreviated as “NTP”. Non-limiting examples of nucleoside triphosphates include cytidine triphosphate (CTP), uridine triphosphate (UTP), adenosine triphosphate (ATP), guanosine triphosphate (GTP), thymidine triphosphate (TTP), and inosine triphosphate (ITP). In some embodiments, “nucleoside triphosphate” may refer to a non-natural nucleoside triphosphate. The terms “nucleoside” and “nucleotide” may be used interchangeably in some contexts.

[0071] “NQP” or “3′-phosphate-nucleoside-5′-triphosphate” or “pppNp” refers to a nucleoside tetraphosphate with a 5′-triphosphate and a 3′-phosphate, e.g., pppNp. In some embodiments, NQP may include a modified NTP portion of the NQP, including modified sugar moiety, modified nucleobase, modified triphosphate, or any combinations thereof. The terms “nucleoside” and “nucleotide” may be used interchangeably in some contexts.

[0072] “Modified” in context of a nucleoside or nucleotide refers to a nucleoside or nucleotide that has been altered to a non-naturally occurring nucleoside or nucleotide. In some embodiments, modifications to nucleoside or nucleotides include modifications to the base, sugar moiety, or phosphate, or any combinations thereof. In some embodiments, the common modifications of the 2′-position of the sugar moiety with fluoro (F) or —O—CH₃ is denoted by “fN” and “mN”, respectively, where N denotes the nucleobase on the nucleoside or nucleotide. In some embodiments, the presence of a 5′-thiophosphate is denoted by “*N”.

[0073] “Locked nucleoside” or “locked nucleotide” refers to nucleoside or nucleotide, respectively, in which the ribose moiety is modified with a bridge connecting the 2′ oxygen and 4′ carbon (see, e.g., Obika et al., Tetrahedron Letters, 1997, 38(50):8735-8738; Orum et al., Current Pharmaceutical Design, 2008, 14(11):1138-1142). In some embodiments, the bridge is a methylene or ethylene bridge. In some embodiments, the ribose moiety of the locked nucleoside or locked nucleotide is in the C3′-endo (beta-D) or C2′-endo (alpha-L) conformation.

[0074] “Naturally-occurring” or “wild-type” refers to the form found in nature. For example, a naturally occurring or wild-type polypeptide or polynucleotide sequence is a sequence present in an organism that can be isolated from a source in nature and which has not been intentionally modified by human manipulation.

[0075] “Recombinant,” “engineered,” and “non-naturally occurring” when used with reference to a cell, nucleic acid, or polypeptide, refer to a material, or a material corresponding to the natural or native form of the material, that has been modified in a manner that would not otherwise exist in nature. In some embodiments, the cell, nucleic acid or polypeptide is identical a naturally occurring cell, nucleic acid or polypeptide, but is produced or derived from synthetic materials and/or by manipulation using recombinant techniques. Non-limiting examples include, among others, recombinant cells expressing genes that are not found within the native (non-recombinant) form of the cell or express native genes that are otherwise expressed at a different level.

[0076] “Isolated polypeptide” refers to a polypeptide which is substantially separated from other contaminants that naturally accompany it, e.g., protein, lipids, and polynucleotides. The term embraces polypeptides which have been removed or purified from their naturally-occurring environment or expression system (e.g., host cell or in vitro synthesis). The enzymes herein may be present within a cell, present in the cellular medium, or prepared in various forms, such as lysates or isolated preparations. As such, in some embodiments, the enzymes can be an isolated polypeptide.

[0077] “Substantially pure polypeptide” refers to a composition in which the polypeptide species is the predominant species present (i.e., on a molar or weight basis it is more abundant than any other individual macromolecular species in the composition), and is generally a substantially purified composition when the object species comprises at least about 50 percent of the macromolecular species present by mole or % weight. Generally, a substantially pure enzyme composition will comprise about 60% or more, about 70% or more, about 80% or more, about 90% or more, about 95% or more, and about 98% or more of all macromolecular species by mole or % weight present in the composition. In some embodiments, the object species is purified to essential homogeneity (i.e., contaminant species cannot be detected in the composition by conventional detection methods) wherein the composition consists essentially of a single macromolecular species. Solvent species, small molecules (<500 Daltons), and elemental ion species are not considered macromolecular species. In some embodiments, the isolated enzyme is a substantially pure enzyme composition.

[0078] “Heterologous” polynucleotide refers to any polynucleotide that is introduced into a host cell by laboratory techniques, and includes polynucleotides that are removed from a host cell, subjected to laboratory manipulation, and then reintroduced into a host cell.

[0079] “Conversion” refers to the enzymatic conversion of the substrate(s) to the corresponding product(s). “Percent conversion” refers to the percent of the substrate that is converted to the product within a period of time under specified conditions.

[0080] “Suitable reaction conditions” refer to those conditions in the biocatalytic reaction solution (e.g., ranges of enzyme loading, substrate loading, cofactor loading, temperature, pH, buffers, co-solvents, etc.) under which an enzyme or enzymes of the present invention is capable of converting one or more substrate compounds to a product compound. Exemplary “suitable reaction conditions” are provided in the present invention and illustrated by the Examples.

[0081] “Composition” refers to a mixture or combination of one or more substances, wherein each substance or component of the composition retains its individual properties. As used herein, a biocatalytic composition refers to a combination of one or more substances useful for biocatalysis.

[0082] “Loading”, such as in “compound loading” or “enzyme loading” or “cofactor loading” refers to the concentration or amount of a component in a reaction mixture at the start of the reaction.

[0083] “Substrate” in the context of a biocatalyst mediated process refers to the compound or molecule acted on by the biocatalyst. For example, a 3′-O-kinase biocatalyst used in the synthesis processes disclosed herein acts on a nucleoside or nucleotide substrate, e.g., NTP substrate.

[0084] “Product” in the context of a biocatalyst mediated process refers to the compound or molecule resulting from the action of the biocatalyst. For example, an exemplary product for a 3-′O-kinase biocatalyst used in a process disclosed herein is an NQP.

[0085] “Alkyl” refers to saturated hydrocarbon groups of from 1 to 18 carbon atoms inclusively, either straight chained or branched, more preferably from 1 to 8 carbon atoms inclusively, and most preferably 1 to 6 carbon atoms inclusively. An alkyl with a specified number of carbon atoms is denoted in parenthesis (e.g., (C₁-C₆)alkyl refers to an alkyl of 1 to 6 carbon atoms).

[0086] “Alkenyl” refers to hydrocarbon groups of from 2 to 12 carbon atoms inclusively, either straight or branched containing at least one double bond but optionally containing more than one double bond.

[0087] “Alkynyl” refers to hydrocarbon groups of from 2 to 12 carbon atoms inclusively, either straight or branched containing at least one triple bond but optionally containing more than one triple bond, and additionally optionally containing one or more double bonded moieties.

[0088] “Heteroalkyl, “heteroalkenyl,” and heteroalkynyl,” refer respectively, to alkyl, alkenyl and alkynyl as defined herein in which one or more of the carbon atoms are each independently replaced with the same or different heteroatoms or heteroatomic groups. Heteroatoms and/or heteroatomic groups which can replace the carbon atoms include, but are not limited to —O—, —S—, —S—O—, —NR′—, —PH—, —S(O)—, —S(O)₂—, —S(O) NR′—, —S(O)₂NR′, and the like, including combinations thereof, where each R′ is independently selected from hydrogen, alkyl, cycloalkyl, heterocycloalkyl, aryl, and heteroaryl.

[0089] “Amino” refers to the group —NH₂. Substituted amino refers to the group —NHR′, NR′R′, and NR′R′R′, where each R′ is independently selected from substituted or unsubstituted alkyl, cycloalkyl, cycloheteroalkyl, alkoxy, aryl, heteroaryl, heteroarylalkyl, acyl, alkoxycarbonyl, sulfanyl, sulfinyl, sulfonyl, and the like. Typical amino groups include, but are limited to, dimethylamino, diethylamino, trimethylammonium, triethylammonium, methylysulfonylamino, furanyl-oxy-sulfamino, and the like.

[0090] “Aminoalkyl” refers to an alkyl group in which one or more of the hydrogen atoms are replaced with one or more amino groups, including substituted amino groups.

[0091] “Aminocarbonyl” refers to —C(O)NH₂. Substituted aminocarbonyl refers to —C(O)NR′R′, where the amino group NR′R′ is as defined herein.

[0092] “Oxy” refers to a divalent group —O—, which may have various substituents to form different oxy groups, including ethers and esters.

[0093] “Alkoxy” or “alkyloxy” are used interchangeably herein to refer to the group —OR′, wherein R′ is an alkyl group, including optionally substituted alkyl groups.

[0094] “Carboxy” refers to —COOH.

[0095] “Carbonyl” refers to —C(O)—, which may have a variety of substituents to form different carbonyl groups including acids, acid halides, aldehydes, amides, esters, and ketones.

[0096] “Carboxyalkyl” refers to an alkyl in which one or more of the hydrogen atoms are replaced with one or more carboxy groups.

[0097] “Aminocarbonylalkyl” refers to an alkyl substituted with an aminocarbonyl group, as defined herein.

[0098] “Halogen” or “halo” refers to fluoro, chloro, bromo and iodo.

[0099] “Haloalkyl” refers to an alkyl group in which one or more of the hydrogen atoms are replaced with a halogen. Thus, the term “haloalkyl” is meant to include monohaloalkyls, dihaloalkyls, trihaloalkyls, etc. up to perhaloalkyls. For example, the expression “(C₁-C₂) haloalkyl” includes 1-fluoromethyl, difluoromethyl, trifluoromethyl, 1-fluoroethyl, 1,1-difluoroethyl, 1,2-difluoroethyl, 1,1,1 trifluoroethyl, perfluoroethyl, etc.

[0100] “Hydroxy” refers to —OH.

[0101] “Hydroxyalkyl” refers to an alkyl group in which in which one or more of the hydrogen atoms are replaced with one or more hydroxy groups.

[0102] “Thiol” or “sulfanyl” refers to —SH. Substituted thiol or sulfanyl refers to —S—R′, where R′ is an alkyl, aryl or other suitable substituent.

[0103] “Sulfonyl” refers to —SO₂—. Substituted sulfonyl refers to —SO₂—R′, where R′ is an alkyl, aryl or other suitable substituent.

[0104] “Alkylsulfonyl” refers to —SO₂—R′, where R′ is an alkyl, which can be optionally substituted. Typical alkylsulfonyl groups include, but are not limited to, methylsulfonyl, ethylsulfonyl, n-propylsulfonyl, and the like.

[0105] “Phosphate” as used herein refers to a functional group comprised of an orthophosphate ion (phosphorous atom covalently linked to four oxygen atoms). The orthophosphate ion is commonly found with one or more hydrogen atoms or organic groups. A phosphate group or chain may be modified, as further described herein.

[0106] “Phosphorylated” as used herein refers to the addition or presence of one of more phosphoryl groups (phosphorous atom covalently linked to the three oxygen atoms).

[0107] “Thiophosphate” refers to an instance where a non-bridging oxygen in a phosphate group of a phosphodiester bond, NMP, NDP, NTP or NQP is replaced with a sulfur. In some embodiments, nucleoside 5′-thiophosphate is referred to as NMPαS or NMP-S. In some embodiments, nucleoside-5′-1-thio(diphosphate) and nucleoside-5′-1-thio(triphosphate) are referred to as NDPαS and NTPαS, respectively. In some embodiments, nucleoside-5′-2-thio(diphosphate) and nucleoside-5′-2-thio(triphosphate) are referred to as NDPβS and NTPβS, respectively. In some embodiments, nucleoside-5′-gamma-thiotriphosphate is referred to as NTPγS.

[0108] “Dithiophosphate” refers to an instance where two non-bridging oxygens in a phosphate group of a phosphodiester bond, NMP, NDP, NTP or NQP are replaced with two sulfurs.

[0109] “Optionally substituted” as used herein with respect to the foregoing chemical groups means that positions of the chemical group occupied by hydrogen can be substituted with another atom (unless otherwise specified) exemplified by, but not limited to carbon, oxygen, nitrogen, or sulfur, or a chemical group, exemplified by, but not limited to, hydroxy, oxo, nitro, methoxy, ethoxy, alkoxy, substituted alkoxy, trifluoromethoxy, haloalkoxy, fluoro, chloro, bromo, iodo, halo, methyl, ethyl, propyl, butyl, alkyl, alkenyl, alkynyl, substituted alkyl, trifluoromethyl, haloalkyl, hydroxyalkyl, alkoxyalkyl, thio, alkylthio, acyl, carboxy, alkoxycarbonyl, carboxamido, substituted carboxamido, alkylsulfonyl, alkylsulfinyl, alkylsulfonylamino, sulfonamido, substituted sulfonamido, cyano, amino, substituted amino, alkylamino, dialkylamino, aminoalkyl, acylamino, amidino, amidoximo, hydroxamoyl, phenyl, aryl, substituted aryl, aryloxy, arylalkyl, arylalkenyl, arylalkynyl, pyridyl, imidazolyl, heteroaryl, substituted heteroaryl, heteroaryloxy, heteroarylalkyl, heteroarylalkenyl, heteroarylalkynyl, cyclopropyl, cyclobutyl, cyclopentyl, cyclohexyl, cycloalkyl, cycloalkenyl, cycloalkylalkyl, substituted cycloalkyl, cycloalkyloxy, pyrrolidinyl, piperidinyl, morpholino, heterocycle, (heterocycle)oxy, and (heterocycle)alkyl; where preferred heteroatoms are oxygen, nitrogen, and sulfur. Additionally, where open valences exist on these substitute chemical groups they can be further substituted with alkyl, cycloalkyl, aryl, heteroaryl, and/or heterocycle groups, that where these open valences exist on carbon they can be further substituted by halogen and by oxygen-, nitrogen-, or sulfur-bonded substituents, and where multiple such open valences exist, these groups can be joined to form a ring, either by direct formation of a bond or by formation of bonds to a new heteroatom, preferably oxygen, nitrogen, or sulfur. It is further contemplated that the above substitutions can be made provided that replacing the hydrogen with the substituent does not introduce unacceptable instability to the molecules of the present invention, and is otherwise chemically reasonable. One of ordinary skill in the art would understand that with respect to any chemical group described as optionally substituted, only sterically practical and/or synthetically feasible chemical groups are meant to be included. “Optionally substituted” as used herein refers to all subsequent modifiers in a term or series of chemical groups. For example, in the term “optionally substituted arylalkyl,” the “alkyl” portion and the “aryl” portion of the molecule may or may not be substituted, and for the series “optionally substituted alkyl, cycloalkyl, aryl and heteroaryl,” the alkyl, cycloalkyl, aryl, and heteroaryl groups, independently of the others, may or may not be substituted.

[0110] “Reaction” as used herein refers to a process in which one or more substances or compounds or substrates is converted into one or more different substances, compounds, or processes. In some embodiments, the reaction is described as “conversion” of a substrate to a product.

[0111] “NTP regenerating system,” “NTP regeneration system” or “NTP recycling system” refers to chemical and/or enzymatic systems for the conversion of NDP to NTP, particularly to regenerate NTP in reactions that consume NTP to produce NDP. In some embodiments, the NTP regenerating system is an enzyme catalyzed system using a phosphate donor for conversion of NDP to NTP. Exemplary enzyme catalyzed NTP regeneration system include, among others, those using pyruvate kinase, creatine kinase, polyphosphate kinase, and acetate kinase.

### Enzyme Cascades for the Synthesis of NQP

[0112] In one aspect, the present disclosure provides a process and method and corresponding enzymes for the conversion of a nucleoside diphosphate (NDP) to a NTP with a phosphate group at the 3′ position of the sugar (referred herein as a nucleoside tetraphosphate, pppNp, or NQP). The conversion reaction from NTP to NQP is illustrated in Scheme 1.

[chemical structure]

[0113] In Scheme 1, the NTP is converted by a 3′-O-kinase to a nucleoside tetraphosphate (NQP or pppNp) with the fourth phosphate group at the 3′ position of the sugar moiety. The 3′-O-kinase uses a NTP as a co-substrate and phosphate donor, simultaneously producing an NDP. A nucleoside diphosphate kinase, such as an acetate kinase (ACK), is used to recycle the NTP donor from NDP using acetyl-phosphate as a phosphate donor substrate that is converted to acetate. Use of a phosphate donor NTP that has the same nucleotide structure as the substrate NTP for the 3′-O-kinase provides for generation of the 3′-phosphorylated product without contamination from using a phosphate donor NTP with a nucleotide structure different from the substrate NTP. In some embodiments, the NTP substrate for the 3′-O-kinase reaction is generated enzymatically, such as from a nucleoside, nucleoside monophosphate, and/or nucleoside diphosphate.

[0114] Accordingly, in some embodiments, a method of producing a nucleotide triphosphate with a phosphate group at the 3′ position of the sugar moiety (NQP), comprises at least:
[0115] contacting a nucleoside diphosphate (NDP) with a nucleoside diphosphate kinase, a 3′-O-kinase, and a phosphate donor under reaction conditions such that an NTP with a phosphate group on the 3′ position of the sugar moiety (NQP) is produced.

[0116] It is to be understood that in the foregoing, the NDP can be converted to NTP and subsequently phosphorylated at the 3′-OH by the 3′-O-kinase. Alternatively, the 3′-O′-kinase can phosphorylate the 3′-OH of NDP to generate 3′-phosphate-nucleoside-5′-diphosphate (ppNp), which can then be converted to NQP by the activity of nucleoside diphosphate kinase. The product in either pathway is NQP.

[0117] In some embodiments, the NDP substrate is an unmodified NDP. In some embodiments, the unmodified NDP substrate is any naturally occurring NDP.

[0118] In some embodiments, the NDP substrate has at the 2′ position of the sugar moiety a H (e.g., deoxy) or OH (e.g., ribo).

[0119] In some embodiments, the nucleobase of the NDP substrate is, among others, adenine, cytosine, guanine, thymine, uracil, xanthine, hypoxanthine, 2,6-diaminopurine, purine, 6,8-diaminopurine, 5-methylcytosine (m⁵C), 2-thiouridine, pseudouridine, dihydrouridine, inosine, or 7-methylguanosine (m⁷G).

[0120] In some embodiments of the method, the NDP substrate is ADP, GDP, UDP, CDP, or TDP, and wherein the NDP has at the 2′-position of the sugar moiety an OH, thereby by resulting in corresponding product rAQP, rGQP, rUQP, rCQP, or rTQP, respectively.

[0121] In some embodiments, of the method, the NDP substrate is ADP, GDP, UDP, CDP, or TDP, and wherein the NDP has at the 2′-position of the sugar moiety a H, thereby by resulting in corresponding product dAQP, dGQP, dUQP, dCQP, or dTQP, respectively.

[0122] In some embodiments, the NDP substrate is a modified NDP, thereby resulting a modified NQP product. In some embodiments, the modified NDP comprises a modified sugar moiety, modified nucleobase, or modified phosphate, or combinations thereof.

[0123] In some embodiments, the NDP substrate comprises a modified sugar moiety. In some embodiments, the modified sugar moiety is modified at the 2′-position of the sugar moiety. In some embodiments, the modified 2′-position of the sugar moiety of the NDP substrate is halo, 2′-O—R′, or 2′-O—COR′, where R′ is an alkyl, alkyloxyalkyl, cycloalkyl, heterocyclyl, aryl, heteroaryl, cycloalkylalkyl, heterocyclylalkyl, arylalkyl, or heteroarylalkyl. In some embodiments, R′ is a C₁-C₄alkyl. In some embodiments, the modified 2′-position is a 2′-O—R′, wherein in R′ is alkyloxyalkyl, alkylamine, cyanoalkyl, or —C(O)-alkyl. In some embodiments, the 2′-position of the sugar moiety of the NDP substrate is —O—R′, wherein R′ is —CH₃ or —CH₂CH₃ or —CH₂CH₂OCH₃. In some embodiments, the modified 2′-position is 2′-O-(2-methoxyethyl), 2′-O-allyl, 2′-O-propargyl, 2′-O-ethylamine, 2′-O-cyanoethyl, or 2′-O-acetalester.

[0124] In some embodiments, the modified 2′-position of the sugar moiety of the NDP substrate is halo. In some embodiments, the modified 2′-position of the sugar moiety is F (i.e., 2′-F) or Br (i.e., 2′-Br).

[0125] In some embodiments, the modified sugar moiety of the NDP substrate is a “locked” nucleotide (e.g., locked NDP). In some embodiments, the locked NDP is a locked ADP, locked GDP, locked CDP, locked TDP, or locked UDP. In some embodiments, the ribose moiety of the locked nucleotide is in the C3′-endo (beta-D-LNA) or C2′-endo (alpha-L-LNA) conformation.

[0126] In some embodiments, the modified NDP substrate comprises a modified nucleobase. In some embodiments, the modified nucleobase on the NDP substrate is 5-bromo-uracil, 5-iodo-uracil, 6-mCEPh-purine, 6-phenylpyrrolocytidine, N2-alkyl 8-oxoguanosine, difluorotoluene, difluorobenzene, dichlorobenzene, imidazole, or benzimidazole.

[0127] In some embodiments, the nucleobase of the NDP substrate is, among others, 5-methylcytosine, pyridin-4-one, pyridin-2-one, phenyl, pseudouracil, 3-methyl uracil, dihydrouridine, naphthyl, aminophenyl, 5-alkylcytidines, 5-alkyluridines, 5-halouridines, 6-azapyrimidines, 6-alkylpyrimidines, 5-propynyl-uracil, 2-thio-5-propynyl-uracil, quesosine, 2-thiouridine, 4-thiouridine, 4-acetyltidine, 5-(carboxyhydroxymethyl)uridine, 5-carboxymethylaminomethyl-2-thiouridine, 5-carboxymethylaminomethyluridine, -D-galactosylqueosine, 1-methyladenosine, 1-methylinosine, 2,2-dimethylguanosine, 3-methylcytidine, 2-methyladenosine, 2-methylguanosine, N6-methyladenosine, 7-methylguanosine, 5-methoxyaminomethy 1-2-thiouridine, 5-methylaminomethyluridine, 5-methylcarbon ylmethyluridine, 5-methyloxyuridine, 5-methyl-2-thiouridine, 2-methylthio-N6-isopentenyladenosine, -D-mannosylqueosine, uridine-5-oxyacetic acid, 2-thiocytidine, N1-methyl-adenine, N6-methyl-adenine, 8′-azido-adenine, N,N-dimethy 1-adenosine, aminoally 1-adenosine, 5′-methyl-uridine, pseudouridine, N1-methyl-pseudouridine, 5′-hydroxy-methyl-uridine, 2′-thio-uridine, 4′-thio-uridine, hypoxanthine, xanthine, 5′-methyl-cytidine, 5′-hydroxy-methyl-cytidine, 6′-thio-guanine, or N7-methyl-guanine.

[0128] In some embodiments, the modified nucleobase of the NDP substrate comprises a removable tag, a cleavable linker, or a radio, a photo, and/or a chemical sensor.

[0129] In some embodiments, the modified NDP substrate comprises a modified phosphate. In some embodiments, the modified NDP substrate comprises a 5′-O-1-thio(diphosphate) (NDPαS). In some embodiments, the modified NDP substrate comprises a 5′-O-2-thio(diphosphate) (NDPβS). In some embodiments, the modified NDPαS comprises an ADPαS, GDPαS, CDPαS, TDPαS, or UDPαS. In some embodiments, the modified NDPαS comprises a rADPαS, rGDPαS, rCDPαS, rTDPαS, or rUDPαS. In some embodiments, the modified NDPαS comprises a dADPαS, dGDPαS, dCDPαS, dTDPαS, or dUDPαS.

[0130] In some embodiments, when the modified NDP substrate comprises an NDPαS, wherein the NDPαS is (Rp) or (Sp) diastereomer, or a mixture of (Rp) and (Sp) diastereomers. In some embodiments, the NDPαS is the (Rp) diastereomer. In some embodiments, the NDPαS is the (Sp) diastereomer. In some embodiments, the NDPαS is a mixture of (Rp) and (Sp) diastereomers. In some embodiments, the (Rp) or (Sp) diastereomer is provided for each of the rNTPαS and dNTPαS described herein.

[0131] In some embodiments, the method further comprises contacting a nucleoside monophosphate (NMP) with a nucleoside monophosphate kinase in presence of a phosphate donor NTP under suitable reaction conditions such that a product nucleoside diphosphate (NDP) is produced for reaction with the nucleoside diphosphate kinase and/or 3′-O-kinase.

[0132] In some embodiments, the NMP substrate is an unmodified NMP. In some embodiments, the unmodified NMP substrate is any naturally occurring NMP.

[0133] In some embodiments, the NMP substrate has at the 2′ position of the sugar moiety a H (e.g., deoxy) or OH (e.g., ribo).

[0134] In some embodiments, the nucleobase of the NMP substrate is adenine, cytosine, guanine, thymine, uracil, xanthine, hypoxanthine, 2,6-diaminopurine, purine, 6,8-diaminopurine, 5-methylcytosine (m⁵C), 2-thiouridine, pseudouridine, dihydrouridine, inosine, or 7-methylguanosine (m⁷G).

[0135] In some embodiments, the nucleobase of the NMP substrate is, among others, 5-methylcytosine, pyridin-4-one, pyridin-2-one, phenyl, pseudouracil, 3-methyl uracil, dihydrouridine, naphthyl, aminophenyl, 5-alkylcytidines, 5-alkyluridines, 5-halouridines, 6-azapyrimidines, 6-alkylpyrimidines, 5-propynyl-uracil, 2-thio-5-propynyl-uracil, quesosine, 2-thiouridine, 4-thiouridine, 4-acetyltidine, 5-(carboxyhydroxymethyl)uridine, 5-carboxymethylaminomethyl-2-thiouridine, 5-carboxymethylaminomethyluridine, -D-galactosylqueosine, 1-methyladenosine, 1-methylinosine, 2,2-dimethylguanosine, 3-methylcytidine, 2-methyladenosine, 2-methylguanosine, N6-methyladenosine, 7-methylguanosine, 5-methoxyaminomethyl-2-thiouridine, 5-methylaminomethy luridine, 5-methylcarbon ylmethyluridine, 5-methyloxyuridine, 5-methyl-2-thiouridine, 2-methylthio-N6-isopentenyladenosine, -D-mannosylqueosine, uridine-5-oxyacetic acid, 2-thiocytidine, N1-methyl-adenine, N6-methyl-adenine, 8′-azido-adenine, N,N-dimethy 1-adenosine, aminoally 1-adenosine, 5′-methy 1-urdine, pseudouridine, N1-methyl-pseudouridine, 5′-hydroxy-methyl-uridine, 2′-thio-uridine, 4′-thio-uridine, hypoxanthine, xanthine, 5′-methyl-cytidine, 5′-hydroxy-methyl-cytidine, 6′-thio-guanine, or N7-methyl-guanine.

[0136] In some embodiments of the method, the NMP substrate is AMP, GMP, UMP, CMP, or TMP, and wherein the NMP has at the 2′-position of the sugar moiety an OH, thereby by resulting in corresponding product rAQP, rGQP, rUQP, rCQP, or rTQP, respectively.

[0137] In some embodiments, of the method, the NMP substrate is AMP, GMP, UMP, CMP, or TMP, and wherein the NMP has at the 2′-position of the sugar moiety a H, thereby by resulting in corresponding product dAQP, dGQP, dUQP, dCQP, or dTQP, respectively.

[0138] In some embodiments, the NMP substrate is a modified NMP, thereby resulting a modified NQP product. In some embodiments, the modified NMP comprises a modified sugar moiety, modified nucleobase, or modified phosphate, or combinations thereof.

[0139] In some embodiments, the NMP substrate comprises a modified sugar moiety. In some embodiments, the modified sugar moiety is modified at the 2′-position of the sugar moiety. In some embodiments, the modified 2′-position of the sugar moiety of the NMP substrate is halo, 2′-O—R′, or 2′-O—COR′, where R′ is an alkyl, alkyloxyalkyl, cycloalkyl, heterocyclyl, aryl, heteroaryl, cycloalkylalkyl, heterocyclylalkyl, arylalkyl, or heteroarylalkyl. In some embodiments, R′ is a C₁-C₄alkyl. In some embodiments, the modified 2′-position is a 2′-O—R′, wherein in R′ is alkyloxyalkyl, alkylamine, cyanoalkyl, or —C(O)-alkyl. In some embodiments, the 2′-position of the sugar moiety of the nucleoside substrate is —O—R′, wherein R′ is —CH₃ or —CH₂CH₃ or —CH₂CH₂OCH₃. In some embodiments, the modified 2′-position is 2′-O-(2-methoxyethyl), 2′-O-allyl, 2′-O-propargyl, 2′-O-ethylamine, 2′-O-cyanoethyl, or 2′-O-acetate ester.

[0140] In some embodiments, the modified 2′-position of the sugar moiety of the NMP substrate is halo. In some embodiments, the modified 2′-position of the sugar moiety is F (i.e., 2′-F) or Br (i.e., 2′-Br).

[0141] In some embodiments, the modified sugar moiety of the NMP substrate is a “locked” nucleotide (e.g., locked NMP). In some embodiments, the locked NMP is a locked AMP, locked GMP, locked CMP, locked TMP, or locked UMP. In some embodiments, the ribose moiety of the locked nucleotide is in the C3′-endo (beta-D) or C2′-endo (alpha-L) conformation.

[0142] In some embodiments, the modified NMP substrate comprises a modified nucleobase. In some embodiments, the modified nucleobase on the NDP substrate is 5-bromo-uracil, 5-iodo-uracil, 6-mCEPh-purine, 6-phenylpyrrolocytidine, N2-alkyl 8-oxoguanosine, difluorotoluene, difluorobenzene, dichlorobenzene, imidazole, or benzimidazole.

[0143] In some embodiments, the nucleobase of the NMP substrate is, among others, 5-methylcytosine, pyridin-4-one, pyridin-2-one, phenyl, pseudouracil, 3-methyl uracil, dihydrouridine, naphthyl, aminophenyl, 5-alkylcytidines, 5-alkyluridines, 5-halouridines, 6-azapyrimidines, 6-alkylpyrimidines, 5-propynyl-uracil, 2-thio-5-propynyl-uracil, quesosine, 2-thiouridine, 4-thiouridine, 4-acetyltidine, 5-(carboxyhydroxymethyl)uridine, 5-carboxymethylaminomethyl-2-thiouridine, 5-carboxymethylaminomethyluridine, -D-galactosylqueosine, 1-methyladenosine, 1-methylinosine, 2,2-dimethylguanosine, 3-methylcytidine, 2-methyladenosine, 2-methylguanosine, N6-methyladenosine, 7-methylguanosine, 5-methoxyaminomethyl-2-thiouridine, 5-methylaminomethy luridine, 5-methylcarbon ylmethyluridine, 5-methyloxyuridine, 5-methyl-2-thiouridine, 2-methylthio-N6-isopentenyladenosine, -D-mannosylqueosine, uridine-5-oxyacetic acid, 2-thiocytidine, N1-methyl-adenine, N6-methyl-adenine, 8′-azido-adenine, N,N-dimethy 1-adenosine, aminoally 1-adenosine, 5′-methy 1-urdine, pseudouridine, N1-methyl-pseudouridine, 5′-hydroxy-methyl-uridine, 2′-thio-uridine, 4′-thio-uridine, hypoxanthine, xanthine, 5′-methyl-cytidine, 5′-hydroxy-methyl-cytidine, 6′-thio-guanine, or N7-methyl-guanine.

[0144] In some embodiments, the modified nucleobase of the NMP substrate comprises a removable tag, a cleavable linker, or a radio, a photo, and/or a chemical sensor.

[0145] In some embodiments, the modified NMP substrate comprises a modified phosphate. In some embodiments, the modified NMP substrate comprises a nucleoside-5′-thiophosphate (NMPαS). In some embodiments, the modified NMP substrate comprises AMPαS, GMPαS, CMPαS, TMPαS, or UMPaS. In some embodiments, the modified NMP substrate comprises rAMPαS, rGMPαS, rCMPαS, rTMPαS, or rUMPαS. In some embodiments, the modified NMP substrate comprises dAMPαS, dGMPαS, dCMPαS, dTMPαS, or dUMPαS.

[0146] In some embodiments, where the modified NMP substrate is an NMPαS, the corresponding NDPαS product of the nucleoside monophosphate kinase is isolated or purified prior to reaction with the nucleoside diphosphate kinase and/or 3′-O-kinase. In some embodiments, any resulting NDPαS diastereomeric products can be separated and used separately for subsequent reaction with the nucleoside diphosphate kinase and/or 3′-O-kinase.

[0147] In some embodiments, the phosphate donor NTP for the nucleoside monophosphate kinase comprises ATP. In some embodiments, the phosphate donor NTP for the nucleoside monophosphate kinase has the same nucleotide structure as the substrate NMP. By way of example and not limitation, where the substrate NMP is AMP, the phosphate donor is ATP. If the substrate NMP is modified at the 2′-position of the ribose, the phosphate donor NTP has the same nucleobase and modified 2′-position as the substrate NMP.

[0148] In some embodiments, the method further comprises contacting a nucleoside with a nucleoside kinase in presence of a phosphate donor NTP under reaction conditions such that a product nucleoside monophosphate (NMP) is produced for reaction with the nucleoside monophosphate kinase and/or 3′-O-kinase.

[0149] In some embodiments, the nucleoside substrate is an unmodified nucleoside. In some embodiments, the unmodified nucleoside substrate is any naturally occurring nucleoside.

[0150] In some embodiments, the nucleoside substrate has at the 2′-position of the sugar moiety a H (e.g., deoxy) or OH (e.g., ribo).

[0151] In some embodiments, the nucleobase of the nucleoside substrate is adenine, cytosine, guanine, thymine, uracil, xanthine, hypoxanthine, 2,6-diaminopurine, purine, 6,8-diaminopurine, 5-methylcytosine (m⁵C), 2-thiouridine, pseudouridine, dihydrouridine, inosine, or 7-methylguanosine (m⁷G).

[0152] In some embodiments of the method, the nucleoside substrate is adenosine (A), guanosine (U), uridine (U), cytidine (C), or thymidine (T), and wherein the nucleoside has at the 2′-position of the sugar moiety an OH, thereby by resulting in corresponding product rAQP, rGQP, rUQP, rCQP, or rTQP, respectively.

[0153] In some embodiments of the method, the nucleoside substrate is adenosine (A), guanosine (U), uridine (U), cytidine (C), or thymidine (T), and wherein the nucleoside has at the 2′-position of the sugar moiety a H, thereby by resulting in corresponding product dAQP, dGQP, dUQP, dCQP, or dTQP, respectively.

[0154] In some embodiments, the nucleoside substrate is a modified nucleoside, thereby resulting in a modified NQP product. In some embodiments, the modified nucleoside is modified on the sugar moiety or nucleobase, or combinations thereof.

[0155] In some embodiments, the nucleoside substrate comprises a modified sugar moiety. In some embodiments, the modified sugar moiety is modified at the 2′-position of the sugar moiety. In some embodiments, the modified 2′-position of the sugar moiety of the nucleoside substrate is halo, 2′-O—R′, or 2′-O—COR′, where R′ is an alkyl, alkyloxyalkyl, cycloalkyl, heterocyclyl, aryl, heteroaryl, cycloalkylalkyl, heterocyclylalkyl, arylalkyl, or heteroarylalkyl. In some embodiments, R′ is a C₁-C₄alkyl. In some embodiments, the modified 2′-position is a 2′-O—R′, wherein in R′ is alkyloxyalkyl, alkylamine, cyanoalkyl, or —C(O)-alkyl. In some embodiments, the 2′-position of the sugar moiety of the nucleoside substrate is —O—R′, wherein R′ is —CH₃ or —CH₂CH₃ or —CH₂CH₂OCH₃. In some embodiments, the modified 2′-position is 2′-O-(2-methoxyethyl), 2′-O-allyl, 2′-O-propargyl, 2′-O-ethylamine, 2′-O-cyanoethyl, or 2′-O-acetate ester.

[0156] In some embodiments, the modified 2′-position of the sugar moiety of the nucleoside substrate is halo. In some embodiments, the modified 2′-position of the sugar moiety is F (i.e., 2′-F) or Br (i.e., 2′-Br).

[0157] In some embodiments, the modified sugar moiety of the nucleoside substrate is a “locked” nucleotide (e.g., locked nucleoside). In some embodiments, the locked nucleoside is a locked adenosine, locked guanosine, locked cytidine, locked thymidine, or locked uridine. In some embodiments, the ribose moiety of the locked nucleoside is in the C3′-endo (beta-D-LNA) or C2′-endo (alpha-L-LNA) conformation.

[0158] In some embodiments, the modified nucleoside substrate comprises a modified nucleobase. In some embodiments, the modified nucleobase on the nucleoside substrate is 5-bromo-uracil, 5-iodo-uracil, 6-mCEPh-purine, 6-phenylpyrrolocytidine, N2-alkyl 8-oxoguanosine, difluorotoluene, difluorobenzene, dichlorobenzene, imidazole, or benzimidazole.

[0159] In some embodiments, the nucleobase of the nucleoside substrate is, among others, 5-methylcytosine, pyridin-4-one, pyridin-2-one, phenyl, pseudouracil, 3-methyl uracil, dihydrouridine, naphthyl, aminophenyl, 5-alkylcytidines, 5-alkyluridines, 5-halouridines, 6-azapyrimidines, 6-alkylpyrimidines, 5-propynyl-uracil, 2-thio-5-propynyl-uracil, quesosine, 2-thiouridine, 4-thiouridine, 4-acetyltidine, 5-(carboxyhydroxymethyl)uridine, 5-carboxymethylaminomethyl-2-thiouridine, 5-carboxymethylaminomethyluridine, -D-galactosylqueosine, 1-methyladenosine, 1-methylinosine, 2,2-dimethylguanosine, 3-methylcytidine, 2-methyladenosine, 2-methylguanosine, N6-methyladenosine, 7-methylguanosine, 5-methoxyaminomethyl-2-thiouridine, 5-methylaminomethy luridine, 5-methylcarbon ylmethyluridine, 5-methyloxyuridine, 5-methyl-2-thiouridine, 2-methylthio-N6-isopentenyladenosine, -D-mannosylqueosine, uridine-5-oxyacetic acid, 2-thiocytidine, N1-methyl-adenine, N6-methyl-adenine, 8′-azido-adenine, N,N-dimethy 1-adenosine, aminoally 1-adenosine, 5′-methy 1-urdine, pseudouridine, N1-methyl-pseudouridine, 5′-hydroxy-methyl-uridine, 2′-thio-uridine, 4′-thio-uridine, hypoxanthine, xanthine, 5′-methyl-cytidine, 5′-hydroxy-methyl-cytidine, 6′-thio-guanine, or N7-methyl-guanine.

[0160] In some embodiments, the modified nucleobase of the nucleoside substrate comprises a removable tag, a cleavable linker, or a radio, a photo, and/or a chemical sensor.

[0161] In some embodiments, the phosphate donor NTP for the nucleoside kinase comprises ATP. In some embodiments, the phosphate donor NTP for the nucleoside kinase has the same nucleotide structure as the substrate nucleoside. By way of example and not limitation, where the substrate nucleoside is adenosine, the phosphate donor is ATP. If the substrate nucleoside is modified at the 2′-position of the ribose, the phosphate donor NTP has the same nucleobase and modified 2′-position as the substrate nucleoside.

[0162] In some embodiments, the phosphate donor NTP is a nucleoside-5′-gamma thiotriphosphate (NTPγS) for producing products NMP-5′-O-thiophosphate (NMP-S) and NQPαS. In some embodiments, the phosphate donor NTPγS is rATPγS or dATPγS.

[0163] In some embodiments, a method of producing a NTP with a phosphate group at the 3′ position of the sugar moiety (NQP), comprises contacting a nucleoside with a nucleoside kinase, a nucleoside monophosphate kinase, nucleoside diphosphate kinase, and a 3′-O-kinase in presence of a phosphate donor under reaction conditions such that a product NTP with a phosphate group at the 3′ position of the sugar (NQP) is produced.

[0164] In some embodiments, a method of producing a NTP with a phosphate group at the 3′ position of the sugar moiety (NQP) comprises (i) contacting a nucleoside with a nucleoside kinase, a nucleotide monophosphate kinase, and a nucleoside diphosphate kinase in presence of a phosphate donor under reaction conditions such that a NTP is produced; and ii) contacting the NTP produced in (i) with a 3′-O-kinase under suitable reaction conditions, such that a NTP with a phosphate group at the 3′ position of the sugar moiety (NQP) is produced.

[0165] In some embodiments, a method of producing a NTP with a phosphate group at the 3′ position of the sugar moiety (NQP) comprises (i) contacting a nucleoside with a nucleoside kinase, (ii) contacting the product of (i) with a nucleotide monophosphate kinase, (iii) contacting the product of (ii) with a nucleoside diphosphate kinase, and (iv) contacting the product of (iii) with a 3′-O-kinase enzyme, wherein (i), (ii), (iii) and (iv) are carried out in presence of a phosphate donor under reaction conditions such that a product NTP with a phosphate group at the 3′ position of the sugar moiety (NQP) is produced.

[0166] In some embodiments, a method of producing a NTP with a phosphate group at the 3′ position of the sugar or NQP (pppNp), comprises i) contacting the 3′-O-kinase with a nucleoside under suitable reaction conditions, such that a nucleoside with a phosphate at the 3′-position of the sugar is produced (Np); (ii) contacting the product of (i), i.e., nucleoside with nucleoside with a phosphate at the 3′ position of the sugar (Np) with a nucleoside kinase (5-′O-kinase), a nucleotide monophosphate kinase, and a nucleoside diphosphate kinase (e.g., an acetate kinase) under suitable reaction conditions, such that a NTP with a phosphate group at the 3′ position of the sugar or NQP (pppNp) is produced.

[0167] In some embodiments of the foregoing, the nucleoside, nucleoside monophosphate, nucleoside diphosphate, and nucleoside triphosphate for each of the enzymatic reactions are as described above.

[0168] In some embodiments, the nucleoside substrate is an unmodified nucleoside.

[0169] In some embodiments, the nucleoside has at the 2′-position of the sugar moiety a H or OH.

[0170] In some embodiments, the nucleobase of the nucleoside substrate is adenine, cytosine, guanine, thymine, uracil, xanthine, hypoxanthine, 2,6-diaminopurine, purine, 6,8-diaminopurine, 5-methylcytosine (m⁵C), 2-thiouridine, pseudouridine, dihydrouridine, inosine, or 7-methylguanosine (m⁷G).

[0171] In some embodiments, the nucleoside substrate is adenosine (A), guanosine (G), uridine (U), cytidine (C), or thymidine (T), and wherein the nucleoside has at the 2′-position of the sugar moiety an OH, thereby by resulting in corresponding product rAQP, rGQP, rUQP, rCQP, or rTQP, respectively.

[0172] In some embodiments, the nucleoside substrate is adenosine (A), guanosine (G), uridine (U), cytidine (C), or thymidine (T), and wherein the nucleoside has at the 2′-position of the sugar moiety a H, thereby by resulting in corresponding product dAQP, dGQP, dUQP, dCQP, or dTQP, respectively.

[0173] In some embodiments, the nucleoside substrate is a modified nucleoside. In some embodiments, the nucleoside has a modified sugar moiety or modified nucleobase, or combination thereof.

[0174] In some embodiments, the modified nucleoside substrate has a modified 2′-position of the sugar moiety. In some embodiments, the 2′-position of the sugar moiety is halo, 2′-O—R′, or 2′-O—COR′, where R′ is an alkyl, alkyloxyalkyl, cycloalkyl, heterocyclyl, aryl, heteroaryl, cycloalkylalkyl, heterocyclylalkyl, arylalkyl, or heteroarylalkyl. In some embodiments, R′ is a C₁-C₄alkyl. In some embodiments, the modified 2′-position is a 2′-O—R′, wherein in R′ is alkyloxyalkyl, alkylamine, cyanoalkyl, or —C(O)-alkyl. In some embodiments, the 2′-position of the sugar moiety of the nucleoside substrate is —O—R′, wherein R′ is —CH₃ or —CH₂CH₃ or —CH₂CH₂OCH₃. In some embodiments, the modified 2′-position is 2′-O-(2-methoxyethyl), 2′-O-allyl, 2′-O-propargyl, 2′-O-ethylamine, 2′-O-cyanoethyl, or 2′-O-acetate ester.

[0175] In some embodiments, the 2′-position of the sugar moiety is halo. In some embodiments, the 2′-position of the sugar moiety is F (i.e., 2′-F) or Br (i.e., 2′-Br).

[0176] In some embodiments, the modified sugar moiety is a locked nucleoside. In some embodiments, the locked nucleoside is a locked adenosine, locked guanosine, locked cytidine, locked thymidine, or locked uridine. In some embodiments, the ribose moiety of the locked nucleoside is in the C3′-endo (beta-D) or C2′-endo (alpha-L) conformation.

[0177] In some embodiments, the modified nucleoside substrate has a modified nucleobase. In some embodiments, the modified nucleobase of the nucleoside substrate is 5-bromo-uracil, 5-iodo-uracil, 6-mCEPh-purine, 6-phenylpyrrolocytidine, N2-alkyl 8-oxoguanosine, difluorotoluene, difluorobenzene, dichlorobenzene, imidazole, or benzimidazole.

[0178] In some embodiments, the nucleobase of the nucleoside substrate is, among others, 5-methylcytosine, pyridin-4-one, pyridin-2-one, phenyl, pseudouracil, 3-methyl uracil, dihydrouridine, naphthyl, aminophenyl, 5-alkylcytidines, 5-alkyluridines, 5-halouridines, 6-azapyrimidines, 6-alkylpyrimidines, 5-propynyl-uracil, 2-thio-5-propynyl-uracil, quesosine, 2-thiouridine, 4-thiouridine, 4-acetyltidine, 5-(carboxyhydroxymethyl)uridine, 5-carboxymethylaminomethyl-2-thiouridine, 5-carboxymethylaminomethyluridine, -D-galactosylqueosine, 1-methyladenosine, 1-methylinosine, 2,2-dimethylguanosine, 3-methylcytidine, 2-methyladenosine, 2-methylguanosine, N6-methyladenosine, 7-methylguanosine, 5-methoxyaminomethyl-2-thiouridine, 5-methylaminomethy luridine, 5-methylcarbon ylmethyluridine, 5-methyloxyuridine, 5-methyl-2-thiouridine, 2-methylthio-N6-isopentenyladenosine, -D-mannosylqueosine, uridine-5-oxyacetic acid, 2-thiocytidine, N1-methyl-adenine, N6-methyl-adenine, 8′-azido-adenine, N,N-dimethy 1-adenosine, aminoally 1-adenosine, 5′-methy 1-urdine, pseudouridine, N1-methyl-pseudouridine, 5′-hydroxy-methyl-uridine, 2′-thio-uridine, 4′-thio-uridine, hypoxanthine, xanthine, 5′-methyl-cytidine, 5′-hydroxy-methyl-cytidine, 6′-thio-guanine, or N7-methyl-guanine.

[0179] In some embodiments, the modified nucleobase of the nucleoside substrate comprises a noncanonical nucleobase, a removable tag, a cleavable linker, or a radio, a photo, and/or a chemical sensor.

[0180] In some embodiments of the enzymatic method, the phosphate donor comprises a phosphate donor NTP. In some embodiments, as further described below, where the nucleoside diphosphate kinase comprises an acetate kinase, the phosphate donor further includes acetyl phosphate.

[0181] In some embodiments, the phosphate donor NTP for the enzymatic method for NQP synthesis comprises ATP. In some embodiments, the phosphate donor NTP has the same nucleotide structure as the nucleoside substrate. In some embodiments, the phosphate donor NTP is a nucleoside-5′-1-thio(triphosphate) (NTPαS)

[0182] In some embodiments, the phosphate donor NTP is a nucleoside-5′-gamma thio-triphosphate (NTPγS) for producing products NMP-5′-O-thiophosphate (NMP-S) and NQPαS. In some embodiments, the phosphate donor NTPγS is rATPγS or dATPγS.

[0183] In some embodiments, each of the enzymatic steps for production of NQP can be carried out separately. In some embodiments, the products of each step can be isolated prior to reaction with the next enzymatic step. In some embodiments, the products are not isolated following each enzymatic step.

[0184] In some embodiments, the enzymatic conversion of a nucleoside substrate to the corresponding NTP can be carried in a first reaction, and the conversion of the NTP to the corresponding NQP with 3′-O-kinase carried out in a second reaction. In some embodiments herein, this is referred to as a “two-pot” method or process.

[0185] In some embodiments, the enzymatic conversion of a nucleotide substrate to the corresponding NQP can be carried out in a single reaction, e.g., nucleoside kinase, nucleoside monophosphate kinase, nucleoside diphosphate kinase, and 3′-O-kinase, nucleoside substrate, phosphate donor, and any other accessory enzymes, e.g., NTP regenerating system, are in a single reaction. In some embodiments, this is referred to as a “one-pot” method or process.

[0186] In some embodiments, the present disclosure provides an exemplary one-pot method for conversion of nucleosides to NQPs, as depicted in Scheme 2.

[chemical structure]

[0187] In some embodiments, the one-pot method for conversion of nucleosides to NQPs occurs in more than one step. In some embodiments, the one-pot method for conversion of nucleosides to NQPs occurs in two steps. In some embodiments, the first step comprises conversion of a nucleoside to an NTP (as exemplified in Scheme 3, below), and the second step comprises conversion of the NTP to an NQP (as exemplified in Scheme 1, above).

[0188] In some other embodiments, the first step comprises conversion of a nucleoside to a nucleoside with a phosphate at the 3′ position, and the second step comprises conversion of the nucleoside with a phosphate at the 3′ position to an NQP.

[chemical structure]

[0189] The first step of the two step one-pot method for conversion of nucleosides to NQPs comprises use of a nucleoside kinase (5′-O-kinase), a nucleoside monophosphate kinase, and an acetate kinase (AcK) to sequentially add three phosphates (or modified phosphates or phosphate substitutes) to a nucleoside to generate an NTP.

[0190] In some embodiments, as exemplified in Scheme 3, the nucleoside is first converted by a nucleoside kinase (5′-O-kinase) to a NMP by addition of a phosphate group to the 5′-OH position of the sugar moiety. After conversion of the nucleoside to a NMP by the nucleoside kinase, the NMP is converted to an NDP by a nucleoside monophosphate kinase (NMPK). Then, the NDP is converted to an NTP by a nucleoside diphosphate kinase (e.g., acetate kinase: AcK).

[0191] In some embodiments, with reference to Scheme 3, the 2′-R group can be —H, —OH, —OCH₃, —F, —OCH₂CH₂OCH₃, 2′-O—C(O)R′ (where R′ is an alkyl or aryl), or another atom or chemical group. Additionally, the sugar moiety may have other modifications at other positions. In some embodiments, the nucleobase may be an adenine, guanine, uridine, thymine, or cytosine, or another nucleobase known to those skilled in the art. Although not depicted in Scheme 3, the nucleoside may also have modifications of the nucleobase or of the 5′ phosphate chain. Any of these modifications may be present in any combination in any of the substrates or products depicted in Scheme 3 or may be added after conversion to the NTP product or may be added during or after the second step of the conversion depicted in Scheme 1.

[0192] In some embodiments, as depicted in Scheme 3, the nucleoside kinase (5′-O-kinase) and nucleoside monophosphate kinase use a NTP as a co-substrate and phosphate donor, simultaneously producing an NDP. In addition to catalyzing the conversion of the NDP to NTP, the acetate kinase is used to recycle the NTP donor from NDP using acetyl phosphate as a donor substrate that is converted to acetate, as further described herein. However, this is only one embodiment of the present invention, which is not intended to be so limited. The phosphate used by the nucleoside kinase (5′-O-kinase) and nucleoside monophosphate kinase may be sourced from any suitable molecule, with or without a recycling enzyme, as is known by those of skill in the art.

[0193] In certain embodiments where the nucleoside kinase (5-′O-kinase) and nucleoside monophosphate kinase enzymes are coupled with an acetate kinase recycling enzyme, the acetate kinase enzyme may be further coupled with a pyruvate oxidase enzyme (POX) to generate acetyl phosphate from pyruvate, as depicted in Scheme 3, as describe below. In some embodiments, the pyruvate oxidase enzyme transiently generates acetyl phosphate from pyruvate, atmospheric oxygen, and potassium phosphate buffer. These embodiments have the advantage of generating an unstable, moisture sensitive, and expensive substrate (acetyl phosphate) from stable, readily available, and inexpensive reagents (pyruvate, atmospheric oxygen, and potassium phosphate buffer).

[0194] The second step of the two step one-pot method for conversion of nucleosides to NQPs comprises use of a 3-′O-kinase to convert the natural or modified NTP generated in step one to the NQP product. The second step of the two step one-pot method conversion of nucleosides to NQPs, is described above and depicted in Scheme 1.

[0195] Thus, the two step one-pot method for conversion of nucleosides to NQPs comprises i) a first step comprising providing a nucleoside kinase (5′-O-kinase) enzyme, a nucleoside monophosphate enzyme, and an acetate kinase enzyme under suitable reaction conditions for conversion of a natural or modified nucleoside to a natural or modified NTP, optionally including an AcK recycling enzyme and/or POX enzyme and/or other suitable recycling enzymes; ii) a second step comprising providing a 3′-O-kinase enzyme under suitable reaction conditions for conversion of a natural or modified NTP to a natural or modified NQP, optionally including an ACK recycling enzyme and/or POX enzyme or other suitable recycling enzymes; and iii) optionally, comprising providing one or more additional enzymes or catalysts to generate one or more modifications to a nucleoside, NMP, NDP, NTP, or NQP as part of the one-pot method.

[0196] As described above, in some embodiments, the one-pot method for conversion of nucleosides to NQPs comprises i) a step comprising providing a nucleoside kinase (5′-O-kinase) enzyme, a nucleoside monophosphate enzyme, an acetate kinase enzyme, and a 3′-O-kinase enzyme under suitable reaction conditions for conversion of a natural or modified nucleoside to a natural or modified NQP, optionally including an AcK enzyme and/or POX enzyme and/or other suitable recycling enzymes; and ii) optionally, comprising providing one or more additional enzymes or catalysts to generate one or more modifications to a nucleoside, NMP, NDP, NTP, or NQP as part of the one-pot method.

[0197] In any of the above embodiments, the nucleosides, NMPs, NDPs, NTPs, or NQPs, and other byproduct species may be natural or may comprise one or more modifications, as described herein. In any of the above embodiments, the nucleosides, NMPs, NDPs, NTPs, and NQPs, and other byproduct species may comprise ribonucleosides, deoxyribonucleosides, dideoxynucleosides, or modified nucleosides. In any of the above embodiments, the nucleosides, NMPs, NDPs, NTPs, and NQPs, and other byproduct species may comprise one or more modifications to the sugar. In any of the above embodiments, the nucleosides, NMPs, NDPs, NTPs, and NQPs, and other byproduct species may comprise one or more modifications to the nucleobase. In any of the above embodiments, the NMPs, NDPs, NTPs, and NQPs, and other byproduct species may comprise an α-thiophosphate or dithiophosphate or other modification to the 5′ phosphate chain. In some embodiments, any of these modifications may be present in any combination in the 3′-O-kinase substrate or may be added after or during conversion to the 3′-O-kinase product.

[0198] In some embodiments, the 2′-R group of the sugar comprises H, OH, OCH₃, OCH₂CH₂OCH₃, F, 2′-O—C(O)R′ (where R′ is any alkyl or aryl), or another atom or chemical group. In some embodiments, the sugar may have other modifications at other positions, such as locked nucleotides or constrained ethyl nucleotides, as is known in the art. In some embodiments, the 3′-phosphate group of the NQP may act as a removable blocking group or protecting group that may be selectively unblocked or removed to allow further modifications, reactions, or incorporation of the NQP into a growing oligonucleotide chain during template-dependent or template-independent oligonucleotide synthesis.

[0199] In some embodiments, as described elsewhere herein, the nucleobase may be a uridine, thymine, cytosine, adenine, guanine or another nucleobase known to those skilled in the art. In some embodiments, the nucleobase of the nucleoside, NMP, NTP, NDP, NTP, and NQP, or byproduct species may have modifications. Various modified nucleobases are known to those skilled in the art, including but not limited to the following: 5-methylcytosine, pyridin-4-one, pyridin-2-one, phenyl, pseudouracil, 3-methyl uracil, dihydrouridine, naphthyl, aminophenyl, 5-alkylcytidines, 5-alkyluridines, 5-halouridines, 6-azapyrimidines, 6-alkylpyrimidines, 5-propynyl-uracil, 2-thio-5-propynyl-uracil, quesosine, 2-thiouridine, 4-thiouridine, 4-acetyltidine, 5-(carboxyhydroxymethyl)uridine, 5-carboxymethylaminomethyl-2-thiouridine, 5-carboxymethylaminomethyluridine, -D-galactosylqueosine, 1-methyladenosine, 1-methylinosine, 2,2-dimethylguanosine, 3-methylcytidine, 2-methyladenosine, 2-methylguanosine, N6-methyladenosine, 7-methylguanosine, 5-methoxyaminomethy1-2-thiouridine, 5-methylaminomethy luridine, 5-methylcarbon ylmethyluridine, 5-methyloxyuridine, 5-methyl-2-thiouridine, 2-methylthio-N6-isopentenyladenosine, -D-mannosylqueosine, uridine-5-oxyacetic acid, 2-thiocytidine, N1-methyl-adenine, N6-methyl-adenine, 8′-azido-adenine, N,N-dimethy 1-adenosine, aminoally 1-adenosine, 5′-methyl-urdine, pseudouridine, N1-methyl-pseudouridine, 5′-hydroxy-methyl-uridine, 2′-thio-uridine, 4′-thio-uridine, hypoxanthine, xanthine, 5′-methyl-cytidine, 5′-hydroxy-methyl-cytidine, 6′-thio-guanine, or N7-methyl-guanine.

[0200] In some embodiments, the nucleobase modification is a removable tag, a cleavable linker, or a radio, photo, or chemical sensor. In some embodiments, the nucleobase modification is a functional element that may be used for isolation, purification, detection, protection, prevention of hydrolysis or degradation, chemical transformation, or to enable further or sequential modifications.

[0201] In some embodiments, the NMP, NTP, NDP, NTP, and NQP, or byproduct species comprises one or more modifications to the 5′ phosphate chain. The 5′ phosphate chain may comprise one, two, or three phosphates or no phosphates may be present. The 5′ phosphate chain may also comprise one or more phosphate groups with modifications (e.g. an α-thiophosphate or dithiophosphate).

[0202] In some embodiments, the present disclosure provides a method of producing a NTP with a phosphate group at the 3′-position of the sugar or NQP, the method comprising (i) providing a nucleoside kinase (5′-O-kinase) enzyme, a nucleotide monophosphate kinase enzyme, an acetate kinase enzyme, and a 3′-O-kinase enzyme, and (ii) contacting the nucleoside kinase (5′-O-kinase) enzyme, the nucleotide monophosphate kinase enzyme, the acetate kinase enzyme, and the 3′-O-kinase enzyme with a nucleoside under suitable reaction conditions, such that a NTP with a phosphate group at the 3′ position of the sugar or NQP is produced.

[0203] In certain embodiments, the method comprises (i) providing a nucleoside kinase (5′-O-kinase) enzyme, a nucleotide monophosphate kinase enzyme, an acetate kinase enzyme, and a 3-′O-kinase enzyme and (ii) contacting the nucleoside kinase (5-′O-kinase) enzyme, the nucleotide monophosphate kinase enzyme, the acetate kinase enzyme and the 3′-O-kinase enzyme with a nucleoside with one or modifications under suitable reaction conditions, such that a NTP with a phosphate group at the 3′ position of the sugar or NQP with one or more modifications is produced.

[0204] In any of the above embodiments, the method may further comprise providing a source of phosphate, and, optionally, one or more phosphate recycling enzymes, including but not limited to pyruvate oxidase and/or acetate kinase. In any of the above embodiments, the method may further comprise providing more than one 3′-O-kinase in step (i). In any of the above embodiments, the method may further comprise a phosphate donor NTP that is the same type of NTP as the substrate NTP. In any of the above embodiments, the method may further comprise a phosphate donor NTP that is a different type of NTP than the substrate NTP.

[0205] In some embodiments, the present disclosure provides a method of producing a NTP with a phosphate group at the 3′ position of the sugar or NQP, the method comprising (i) providing a nucleoside kinase (5′-O-kinase) enzyme, a nucleotide monophosphate kinase enzyme, and an acetate kinase enzyme; (ii) contacting the nucleoside kinase (5′-O-kinase) enzyme, the nucleotide monophosphate kinase enzyme, and the acetate kinase enzyme with a nucleoside under suitable reaction conditions, such that a NTP is produced; iii) providing a 3′-O-kinase enzyme; and (iv) contacting the 3′-O-kinase enzyme with the NTP under suitable reaction conditions, such that a NTP with a phosphate group at the 3′ position of the sugar or NQP is produced.

[0206] In certain embodiments, the method comprises (i) providing a nucleoside kinase (5′-O-kinase) enzyme, a nucleotide monophosphate kinase enzyme, and an acetate kinase enzyme; (ii) contacting the nucleoside kinase (5′-O-kinase) enzyme, the nucleotide monophosphate kinase enzyme, and the acetate kinase enzyme with a nucleoside with one or more modifications under suitable reaction conditions, such that a NTP with one or more modifications is produced; iii) providing a 3′-O-kinase enzyme; and (iv) contacting the 3′-O-kinase enzyme with the NTP with one or more modifications under suitable reaction conditions, such that a NTP with a phosphate group at the 3′ position of the sugar or NQP with one or more modifications is produced.

### Enzyme Cascades for NTP Synthesis

[0207] In another aspect, the present disclosure provides a method or process of producing nucleotide triphosphate (NTP) enzymatically, particularly in an enzyme cascade reaction.

[0208] In some embodiments, a method of producing a nucleoside triphosphate (NTP) comprises contacting a nucleoside monophosphate (NMP) with a nucleoside monophosphate kinase, a nucleoside diphosphate kinase and a phosphate donor under reaction conditions such that NTP is produced.

[0209] In some embodiments, the NMP is an unmodified NMP substrate.

[0210] In some embodiments, the NMP has at the 2′-position of the sugar moiety a H or OH.

[0211] In some embodiments, the nucleobase of the NMP substrate is adenine, cytosine, guanine, thymine, uracil, xanthine, hypoxanthine, 2,6-diaminopurine, purine, 6,8-diaminopurine, 5-methylcytosine (m⁵C), 2-thiouridine, pseudouridine, dihydrouridine, inosine, or 7-methylguanosine (m⁷G).

[0212] In some embodiments, the NMP substrate is AMP, GMP, UMP, CMP, or TMP, and wherein the NMP has at the 2′-position of the sugar moiety an OH, thereby by resulting in corresponding product rATP, rGTP, rUTP, rCTP, or rTTP, respectively.

[0213] In some embodiments, the NMP substrate is AMP, GMP, UMP, CMP, or TMP, and wherein the NMP has at the 2′-position of the sugar moiety a H, thereby by resulting in corresponding product dATP, dGTP, dUTP, dCTP, or dTTP, respectively.

[0214] In some embodiments, the NMP substrate is a modified NMP. In some embodiments, the modified NMP comprises a modified sugar moiety, nucleobase, phosphate, or any combinations thereof.

[0215] In some embodiments, the modified NMP substrate has a modified 2′-position or 3′-position of the sugar moiety.

[0216] In some embodiments, the modified NMP substrate has a modified 2′-position of the sugar moiety. In some embodiments, the 2′-position of the sugar moiety is halo, 2′-O—R′, or 2′-O—COR′, where R′ is an alkyl, alkyloxyalkyl, cycloalkyl, heterocyclyl, aryl, heteroaryl, cycloalkylalkyl, heterocyclylalkyl, arylalkyl, or heteroarylalkyl. In some embodiments, R′ is a C₁-C₄alkyl. In some embodiments, the modified 2′-position is a 2′-O—R′, wherein in R′ is alkyloxyalkyl, alkylamine, cyanoalkyl, or —C(O)-alkyl. In some embodiments, the 2′-position of the sugar moiety of the NMP substrate is —O—R′, wherein R′ is —CH₃ or —CH₂CH₃ or —CH₂CH₂OCH₃. In some embodiments, the modified 2′-position is 2′-O-(2-methoxyethyl), 2′-O-allyl, 2′-O-propargyl, 2′-O-ethylamine, 2′-O-cyanoethyl, or 2′-O-acetate ester.

[0217] In some embodiments, the 2′-position of the sugar moiety is halo. In some embodiments, 2′-position of the sugar moiety is F (i.e., 2′-F) or Br (i.e., 2′-Br).

[0218] In some embodiments, the modified NMP substrate is a locked NMP. In some embodiments, the locked NMP is a locked AMP, locked GMP, locked CMP, locked TMP, or locked UMP. In some embodiments, the ribose moiety of the locked nucleoside or locked nucleotide is in the C3′-endo (beta-D) or C2′-endo (alpha-L) conformation.

[0219] In some embodiments, the modified NMP substrate has a modified 3′-position of the sugar moiety. In some embodiments, the 3′-position of the sugar moiety is modified with a blocking group, preferably a reversible blocking group. In some embodiments, the blocking group is a formate, benzoylformate, acetate, propionate, isobutyrate, aminoxy (—ONH₂), O-methyl, O-methoxymethyl, O-methylthiomethyl, O-benzyloxymethyl, O-allyl, O-propargyl, O-(2-nitrobenzyl), O-azidomethyl (O—CH₂N₃), O-tert-butyldithiomethyl, phosphate, disphosphate, or triphosphate. Reversible 3′-blocked nucleoside/nucleotides are described in Chen et al., Genomics, Proteomics & Bioinformatics, 2013, 11(1):34-40, Metzker et al., Nucleic Acids Res., 1994, 22 (20):4259-4267; and patent publications U.S. Pat. Nos. 5,763,594, 9,650,406, US20200216891; WO2004/018497; and WO 2014/139596; all of which are incorporated by reference).

[0220] In some embodiments, the modified NMP has a modified nucleobase. In some embodiments, the modified nucleobase is 5-bromo-uracil, 5-iodo-uracil, 6-mCEPh-purine, 6-phenylpyrrolocytidine, N2-alkyl 8-oxoguanosine, difluorotoluene, difluorobenzene, dichlorobenzene, imidazole, or benzimidazole.

[0221] In some embodiments, as described elsewhere herein, the nucleobase of the NMP substrate is 5-methylcytosine, pyridin-4-one, pyridin-2-one, phenyl, pseudouracil, 3-methyl uracil, dihydrouridine, naphthyl, aminophenyl, 5-alkylcytidines, 5-alkyluridines, 5-halouridines, 6-azapyrimidines, 6-alkylpyrimidines, 5-propynyl-uracil, 2-thio-5-propynyl-uracil, quesosine, 2-thiouridine, 4-thiouridine, 4-acetyltidine, 5-(carboxyhydroxymethyl)uridine, 5-carboxymethylaminomethyl-2-thiouridine, 5-carboxymethylaminomethyluridine, -D-galactosylqueosine, 1-methyladenosine, 1-methylinosine, 2,2-dimethylguanosine, 3-methylcytidine, 2-methyladenosine, 2-methylguanosine, N6-methyladenosine, 7-methylguanosine, 5-methoxyaminomethyl-2-thiouridine, 5-methylaminomethy luridine, 5-methylcarbon ylmethyluridine, 5-methyloxyuridine, 5-methyl-2-thiouridine, 2-methylthio-N6-isopentenyladenosine, -D-mannosylqueosine, uridine-5-oxyacetic acid, 2-thiocytidine, N1-methyl-adenine, N6-methyl-adenine, 8′-azido-adenine, N,N-dimethy 1-adenosine, aminoally 1-adenosine, 5′-methy 1-urdine, pseudouridine, N1-methyl-pseudouridine, 5′-hydroxy-methyl-uridine, 2′-thio-uridine, 4′-thio-uridine, hypoxanthine, xanthine, 5′-methyl-cytidine, 5′-hydroxy-methyl-cytidine, 6′-thio-guanine, or N7-methyl-guanine.

[0222] In some embodiments, the modified nucleobase of the modified NMP substrate comprises a noncanonical nucleobase, a removable tag, a cleavable linker, or a radio, a photo, and/or a chemical sensor.

[0223] In some embodiments, the modified NMP substrate has a modified phosphate. In some embodiments, the modified NMP substrate is a nucleoside-5′-O-thiophosphate (NMPαS). In some embodiments, where the modified NMP substrate is NMPαS, the corresponding product NDPαS is separated into (Rp) or (Sp) diastereomers prior to reaction with the nucleoside diphosphate kinase.

[0224] In some embodiments, the phosphate donor is a phosphate donor NTP. In some embodiments, the phosphate donor NTP has the same nucleotide structure as the NMP substrate. In some embodiments, the phosphate donor NTP is ATP, GTP, CTP, TTP, or UTP. In some embodiments, the phosphate donor also includes acetyl phosphate where the nucleoside diphosphate kinase is an acetate kinase, as described below.

[0225] In some embodiments of the method for converting an NMP substrate to product NTP, the method further comprises contacting a nucleoside with a nucleoside kinase in presence of a phosphate donor NTP under reaction conditions such that a product nucleoside monophosphate (NMP) is produced as substrate for the nucleoside monophosphate kinase.

[0226] In some embodiments, the nucleoside substrate is an unmodified nucleoside.

[0227] In some embodiments, the nucleoside has at the 2′-position of the sugar moiety a H or OH.

[0228] In some embodiments, the nucleobase of the nucleoside substrate is adenine, cytosine, guanine, thymine, uracil, xanthine, hypoxanthine, 2,6-diaminopurine, purine, 6,8-diaminopurine, 5-methylcytosine (m⁵C), 2-thiouridine, pseudouridine, dihydrouridine, inosine, or 7-methylguanosine (m⁷G).

[0229] In some embodiments, the nucleoside substrate is adenosine (A), guanosine (G), uridine (U), cytidine (C), or thymidine (T), and wherein the nucleoside has at the 2′-position of the sugar moiety an OH, thereby by resulting in corresponding product rATP, rGTP, rUTP, rCTP, or rTTP, respectively.

[0230] In some embodiments, the nucleoside substrate is adenosine (A), guanosine (G), uridine (U), cytidine (C), or thymidine (T), and wherein the nucleoside has at the 2′-position of the sugar moiety a H, thereby by resulting in corresponding product dATP, dGTP, dUTP, dCTP, or dTTP, respectively.

[0231] In some embodiments, the nucleoside substrate is a modified nucleoside. In some embodiments, the nucleoside has a modified sugar moiety, modified nucleobase, or a combination of modified sugar moiety and modified nucleobase.

[0232] In some embodiments, the modified nucleoside substrate has a modified 2′-position or 3′-position of the sugar moiety.

[0233] In some embodiments, the modified nucleoside has a modified 2′-position of the sugar moiety. In some embodiments, the 2′-position of the sugar moiety is halo, 2′-O—R′, or 2′-O—COR′, where R′ is an alkyl, alkyloxyalkyl, cycloalkyl, heterocyclyl, aryl, heteroaryl, cycloalkylalkyl, heterocyclylalkyl, arylalkyl, or heteroarylalkyl. In some embodiments, R′ is a C₁-C₄alkyl. In some embodiments, the modified 2′-position is a 2′-O—R′, wherein in R′ is alkyloxyalkyl, alkylamine, cyanoalkyl, or —C(O)— alkyl. In some embodiments, the 2′-position of the sugar moiety of the nucleoside substrate is —O—R′, wherein R′ is —CH₃ or —CH₂CH₃ or —CH₂CH₂OCH₃. In some embodiments, the modified 2′-position is 2′-O-(2-methoxyethyl), 2′-O-allyl, 2′-O-propargyl, 2′-O-ethylamine, 2′-O-cyanoethyl, or 2′-O-acetate ester.

[0234] In some embodiments, the 2′-position of the sugar moiety is halo. In some embodiments, the halo is F (i.e., 2′-F) or Br (i.e., 2′-Br).

[0235] In some embodiments, the modified nucleoside substrate is a locked nucleoside. In some embodiments, the locked nucleoside is a locked adenosine, locked guanosine, locked cytidine, locked thymidine, or locked uridine. In some embodiments, the ribose moiety of the locked nucleoside is in the C3′-endo (beta-D) or C2′-endo (alpha-L) conformation.

[0236] In some embodiments, the 3′-position of the sugar moiety of the nucleoside substrate is modified with a blocking group, preferably a reversible blocking group. In some embodiments, the 3′-position blocking group is formate, benzoylformate, acetate, propionate, isobutyrate, aminoxy (—ONH₂), O-methyl, O-methoxymethyl, O-methylthiomethyl, O-benzyloxymethyl, O-allyl, O-propargyl, O-(2-nitrobenzyl), O-azidomethyl (O—CH₂N₃), O-tert-butyldithiomethyl, phosphate, diphosphate, diphosphate, or triphosphate. In some embodiments, the modified sugar moiety is a 3′-O-phosphate.

[0237] In some embodiments, the modified nucleoside substrate has a modified nucleobase. In some embodiments, the modified nucleobase is 5-bromo-uracil, 5-iodo-uracil, 6-mCEPh-purine, 6-phenylpyrrolocytidine, N2-alkyl 8-oxoguanosine, difluorotoluene, difluorobenzene, dichlorobenzene, imidazole, or benzimidazole.

[0238] In some embodiments, the nucleobase of the nucleoside substrate is 5-methylcytosine, pyridin-4-one, pyridin-2-one, phenyl, pseudouracil, 3-methyl uracil, dihydrouridine, naphthyl, aminophenyl, 5-alkylcytidines, 5-alkyluridines, 5-halouridines, 6-azapyrimidines, 6-alkylpyrimidines, 5-propynyl-uracil, 2-thio-5-propynyl-uracil, quesosine, 2-thiouridine, 4-thiouridine, 4-acetyltidine, 5-(carboxyhydroxymethyl)uridine, 5-carboxymethylaminomethyl-2-thiouridine, 5-carboxymethylaminomethyluridine, -D-galactosylqueosine, 1-methyladenosine, 1-methylinosine, 2,2-dimethylguanosine, 3-methylcytidine, 2-methyladenosine, 2-methylguanosine, N6-methyladenosine, 7-methylguanosine, 5-methoxyaminomethyl-2-thiouridine, 5-methylaminomethy luridine, 5-methylcarbon ylmethyluridine, 5-methyloxyuridine, 5-methyl-2-thiouridine, 2-methylthio-N6-isopentenyladenosine, -D-mannosylqueosine, uridine-5-oxyacetic acid, 2-thiocytidine, N1-methyl-adenine, N6-methyl-adenine, 8′-azido-adenine, N,N-dimethy 1-adenosine, aminoally 1-adenosine, 5′-methy 1-urdine, pseudouridine, N1-methyl-pseudouridine, 5′-hydroxy-methyl-uridine, 2′-thio-uridine, 4′-thio-uridine, hypoxanthine, xanthine, 5′-methyl-cytidine, 5′-hydroxy-methyl-cytidine, 6′-thio-guanine, or N7-methyl-guanine.

[0239] In some embodiments, the modified nucleobase on the nucleoside substrate comprises a noncanonical nucleobase, a removable tag, a cleavable linker, or a radio, a photo, and/or a chemical sensor.

[0240] In some embodiments, the phosphate donor for the nucleoside kinase is a phosphate donor NTP. In some embodiments, the phosphate donor NTP has the same nucleoside structure as the nucleoside substrate. In some embodiments, the phosphate donor NTP is rATP or dATP. In some embodiments, the phosphate donor NTP is ATP, GTP, CTP, TTP, or UTP. In some embodiments, the phosphate donor NTP is NTPγS.

[0241] In some embodiments, a method of producing a nucleoside triphosphate (NTP) comprises contacting a nucleoside with a nucleoside kinase, a nucleoside monophosphate kinase, and a nucleoside diphosphate kinase in presence of a phosphate donor under reaction conditions such that NTP is produced.

[0242] In some embodiments, a method of producing a NTP, comprising (i) contacting a nucleoside with a nucleoside kinase, (ii) contacting the product of (i) with a nucleotide monophosphate kinase, and (iii) contacting the product of (ii) with a nucleoside diphosphate kinase, wherein (i), (ii), and (iii) are carried out in presence of a phosphate donor under reaction conditions such that a product NTP is produced.

[0243] In some embodiments of the forgoing methods, the nucleoside substrate is an unmodified nucleoside.

[0244] In some embodiments, the nucleoside has at the 2′-position of the sugar moiety a H or OH.

[0245] In some embodiments, the nucleobase of the nucleoside substrate is adenine, cytosine, guanine, thymine, uracil, xanthine, hypoxanthine, 2,6-diaminopurine, purine, 6,8-diaminopurine, 5-methylcytosine (m⁵C), 2-thiouridine, pseudouridine, dihydrouridine, inosine, or 7-methylguanosine (m⁷G).

[0246] In some embodiments, the nucleoside substrate is adenosine (A), guanosine (G), uridine (U), cytidine (C), or thymidine (T), and wherein the nucleoside has at the 2′-position of the sugar moiety an OH, thereby by resulting in corresponding product rATP, rGTP, rUTP, rCTP, or rTTP, respectively.

[0247] In some embodiments, the nucleoside substrate is adenosine (A), guanosine (G), uridine (U), cytidine (C), or thymidine (T), and wherein the nucleoside has at the 2′-position of the sugar moiety a H, thereby by resulting in corresponding product dATP, dGTP, dUTP, dCTP, or dTTP, respectively.

[0248] In some embodiments of the foregoing methods, the nucleoside substrate is a modified nucleoside. In some embodiments, the modified nucleoside has a modified sugar moiety or modified nucleobase, or a combination thereof.

[0249] In some embodiments, the modified nucleoside has a modified 2′-position or 3′-position of the sugar moiety.

[0250] In some embodiments, the modified nucleoside has a modified 2′-position of the sugar moiety. In some embodiments, the 2′-position of the sugar moiety is halo, 2′-O—R′, or 2′-O—COR′, where R′ is an alkyl, alkyloxyalkyl, cycloalkyl, heterocyclyl, aryl, heteroaryl, cycloalkylalkyl, heterocyclylalkyl, arylalkyl, or heteroarylalkyl. In some embodiments, R′ is a C₁-C₄alkyl. In some embodiments, the modified 2′-position is a 2′-O—R′, wherein in R′ is alkyloxyalkyl, alkylamine, cyanoalkyl, or —C(O)-alkyl. In some embodiments, the 2′-position of the sugar moiety of the nucleoside substrate is —O—R′, wherein R′ is —CH₃ or —CH₂CH₃ or —CH₂CH₂OCH₃. In some embodiments, the modified 2′-position is 2′-O-(2-methoxyethyl), 2′-O-allyl, 2′-O-propargyl, 2′-O-ethylamine, 2′-O-cyanoethyl, or 2′-O-acetalester.

[0251] In some embodiments, the 2′-position of the sugar moiety is halo. In some embodiments, the 2′-position of the sugar moiety is halo is F (i.e., 2′-F) or Br (i.e., 2′-Br).

[0252] In some embodiments, the modified nucleoside substrate is a locked nucleoside. In some embodiments, the locked nucleoside is a locked adenosine, locked guanosine, locked cytidine, locked thymidine, or locked uridine. In some embodiments, the ribose moiety of the locked nucleoside is in the C3′-endo (beta-D) or C2′-endo (alpha-L) conformation.

[0253] In some embodiments, the 3′-position of the sugar moiety is modified with a blocking group, preferably a reversible blocking group. In some embodiments, the 3′-position blocking group is formate, benzoylformate, acetate, propionate, isobutyrate, aminoxy (—ONH₂), O-methyl, O-methoxymethyl, O-methylthiomethyl, O-benzyloxymethyl, O-allyl, O-propargyl, O-(2-nitrobenzyl), O-azidomethyl (O—CH₂N₃), O-tert-butyldithiomethyl, phosphate, or triphosphate. In some embodiments, the modified sugar moiety is a 3′-O-phosphate.

[0254] In some embodiments, the modified nucleoside has a modified nucleobase. In some embodiments, the modified nucleobase is 5-bromo-uracil, 5-iodo-uracil, 6-mCEPh-purine, 6-phenylpyrrolocytidine, N2-alkyl 8-oxoguanosine, difluorotoluene, difluorobenzene, dichlorobenzene, imidazole, or benzimidazole.

[0255] In some embodiments, the nucleobase of the nucleoside substrate is, among others, 5-methylcytosine, pyridin-4-one, pyridin-2-one, phenyl, pseudouracil, 3-methyl uracil, dihydrouridine, naphthyl, aminophenyl, 5-alkylcytidines, 5-alkyluridines, 5-halouridines, 6-azapyrimidines, 6-alkylpyrimidines, 5-propynyl-uracil, 2-thio-5-propynyl-uracil, quesosine, 2-thiouridine, 4-thiouridine, 4-acetyltidine, 5-(carboxyhydroxymethyl)uridine, 5-carboxymethylaminomethyl-2-thiouridine, 5-carboxymethylaminomethyluridine, -D-galactosylqueosine, 1-methyladenosine, 1-methylinosine, 2,2-dimethylguanosine, 3-methylcytidine, 2-methyladenosine, 2-methylguanosine, N6-methyladenosine, 7-methylguanosine, 5-methoxyaminomethyl-2-thiouridine, 5-methylaminomethy luridine, 5-methylcarbon ylmethyluridine, 5-methyloxyuridine, 5-methyl-2-thiouridine, 2-methylthio-N6-isopentenyladenosine, -D-mannosylqueosine, uridine-5-oxyacetic acid, 2-thiocytidine, N1-methyl-adenine, N6-methyl-adenine, 8′-azido-adenine, N,N-dimethy 1-adenosine, aminoally 1-adenosine, 5′-methy 1-urdine, pseudouridine, N1-methyl-pseudouridine, 5′-hydroxy-methyl-uridine, 2′-thio-uridine, 4′-thio-uridine, hypoxanthine, xanthine, 5′-methyl-cytidine, 5′-hydroxy-methyl-cytidine, 6′-thio-guanine, or N7-methyl-guanine.

[0256] In some embodiments, the modified nucleobase comprises a noncanonical nucleobase, a removable tag, a cleavable linker, or a radio, a photo, and/or a chemical sensor

[0257] In some embodiments, the phosphate donor is a phosphate donor NTP. In some embodiments, the phosphate donor NTP has the same nucleoside structure as the nucleoside substrate. In some embodiments, the phosphate donor NTP is rATP or dATP. In some embodiments, the phosphate donor NTP is ATP, GTP, CTP, TMP, or UTP. In some embodiments, the phosphate donor is a phosphate donor NTPγS. As further discussed below, where the nucleoside diphosphate kinase is an acetate kinase, the phosphor donor further includes acetyl phosphate.

### NTP Regenerating Systems

[0258] In some embodiments, the methods of preparing NTP and/or NQP further includes an NTP recycling or NTP regenerating system. As used herein an NTP recycling system refers to at least regeneration of NTP from NDP formed in the enzyme and cascade reaction(s). In some embodiments, the NTP regenerating system is an enzyme-mediated NTP regeneration system.

[0259] In some embodiments, the NTP recycling system includes at least an enzyme for the conversion of NDP to NTP, and a phosphate donor. In some embodiments, the NTP recycling system includes, among others, at least an acetate kinase, adenylate kinase, pyruvate kinase, creatine kinase, or polyphosphate kinase (see, e.g., Endo et al., Adv. Synth. Catal., 2002, 343:521-526; Andexer et al., Chem Bio Chem., 2015, 16:380-386). In some embodiments, the NTP regenerating system selected is capable regenerating natural and/or modified NTPs from the respective NDPs (see, e.g., Ishige et al., Biosci. Biotechnol. Biochem., 2001, 65 1736-1740.2001; Zou et al., Appl. Microbiol. Biotechnol., 97:9389-9395).

[0260] In the NTP regeneration system, the phosphate donor or phosphate donor for the conversion of NDP to NTP is selected based on the NTP regenerating enzyme employed. By way of example and not limitation, if acetate kinase enzyme is used for conversion of NDP to NTP, the phosphate donor is acetyl-phosphate. If pyruvate kinase is used for the conversion of NDP to NTP, the phosphate donor is phosphoenolpyruvate. If creatine kinase is used for the conversion of NDP to NTP, the phosphate donor is creatine phosphate. If polyphosphate kinase is used for the conversion of NDP to NTP, the phosphate donor is inorganic polyphosphate.

[0261] In some embodiments, where the NTP recycling system uses acetate kinase for the conversion of NDP to NTP, the acetate kinase can be the same or different from the acetate kinase used as a nucleoside diphosphate kinase in the conversion of NDP to NQP synthesis or NTP synthesis. In some embodiments, the acetate kinase is a naturally occurring or wild-type acetate kinase. In some embodiments, the acetate kinase is an engineered acetate kinase, for example the engineered acetate kinase described herein.

[0262] Accordingly, in some embodiments, the NTP regenerating system includes pyruvate kinase and phosphoenolpyruvate. In some embodiments, the NTP regenerating system includes creatine kinase and creatine phosphate. In some embodiments, the NTP regenerating system includes polyphosphate kinase and inorganic polyphosphate. In some embodiments, the NTP regenerating system includes acetate kinase and acetyl phosphate.

[0263] In some embodiments, the NTP recycling system further includes additional enzymes (i.e., auxiliary enzymes) and substrates for regeneration of the phosphate donor used by the enzymatic conversion of NDP to NTP and/or do reduce byproducts of the NTP regenerating system. The enzyme for regeneration of the phosphate donor is selected based on the phosphate donor used in the conversion of NDP to NTP. By way example and not limitation, the enzyme for regeneration of the phosphate donor is pyruvate oxidase for regenerating acetyl phosphate. In some embodiments, the substrate for pyruvate oxidase is inorganic phosphate and pyruvate. In some embodiments, where the auxiliary enzyme is pyruvate oxidase, the NTP regeneration system further comprises catalase for removal of H₂O₂.

[0264] It is to be understood that for each and every method or process described for NQP or NTP synthesis, a NTP regenerating system can be incorporated into the enzymatic reactions or enzyme cascades.

### Enzymes for NQP/NTP Synthesis and Enzymatic Reactions

[0265] The enzymes for the process and methods described herein can use wild-type enzymes, engineered enzymes, and combinations of wild-type enzymes and engineered enzymes. Various combinations of such enzymes can be applied to the methods and processes as appropriate where such enzymes are used. Where appropriate for specific enzymes described below, the database accession numbers for the amino acid sequence, e.g., UniProt, NCBI, Genebank, etc., are provided in parentheses following the organism name.

[0266] Accordingly, in some embodiments, the present disclosure provides enzymes for the conversion of a nucleoside to a NMP via addition of a phosphate group to the 5′ position of the sugar. In some embodiments, the present disclosure provides enzymes for the conversion of a NMP to an NDP. In some embodiments, the present disclosure provides enzymes for the conversion of a NDP to an NTP.

[0267] In some embodiments, the present disclosure provide enzymes for the phosphorylation of the 3-OH of a nucleoside and a nucleotide. In some embodiments, the present disclosure provides enzymes for the conversion of a NTP to an NQP.

### Nucleoside Kinase/Adenosine Kinase

[0268] In some embodiments, nucleoside kinases are used for the conversion of a nucleoside to a nucleoside monophosphate (NMP). In the embodiments herein, any suitable nucleoside kinase may be used. Various suitable nucleoside kinases are known in the art. These include homologs of nucleoside kinases. In some embodiments, more than one nucleoside kinase can be used in the enzymatic reactions. In some embodiments, the nucleoside kinase useful for in the enzymatic reaction include, among others, the nucleoside kinase of Thermoplasma acidophilum (Q9HJT3), Methanocaldococcus jannaschii (Q57849), Burkholderia thailandensis (AIP24308.1), Thermus thermophilus (Q5SKR5), Caldilinea aerophila (WP_014432899.1), Geobacillus stearothermophilus (WP_043905564.1), Meiothermus ruber (WP_013014613.1), Thermostaphylospora chromogena (A0A1H1G3W4), Carbonactinospora thermoautotrophica (A0A132MV62), or Xanthomonas campestris (WP_011038567.1).

[0269] In some embodiments, the nucleoside kinase is an adenosine kinase. Various adenosine kinases can be used in the enzymatic reactions as the nucleoside kinase. In some embodiments, the adenosine kinase is a bacterial, fungal, plant, or animal adenosine kinase. In some embodiments, an adenosine kinase for use in the enzymatic reactions include, among others, the adenosine kinase of Chizosaccharomyces japonicus yFS275 (XP_002172336.1), Saccharomyces cerevisiae S288C (NP_012639.1), Drosophila melanogaster (NP_731676.2), Aradidopsis thaliana (NP_181262.1), Nicotiana tabacum (Q5DKU8), homo sapien (Q86U79), Thermostaphylospora chromogena (A0A1H1G3W4), Carbonactinospora thermoautotrophica (A0A132MV62), or Xanthomonas campestris (WP_011038567.1). In some embodiments, various adenosine kinase enzymes that may be used in the present invention are presented, below, in the Examples.

[0270] In some embodiments, the adenosine kinase is an engineered adenosine kinase. In some embodiments, the adenosine kinase is an adenosine kinase of an even numbered SEQ ID NO. of SEQ ID NOs: 66-1204, with or without amino acid residues 1-12 (i.e., His-tag), and is described in U.S. provisional application 63/589,818, filed Oct. 12, 2023, incorporated by reference herein. These engineered adenosine kinases exhibit improved properties compared to the parent wild-type enzyme, including among others, i) increased activity on unmodified nucleoside, ii) increased thermostability, iii) increased activity on cytidine, iv) increased activity on 2-fluoro modified 2′-deoxynucleosides, and/or v) increased activity on 2-O-methyl modified nucleosides.

### Nucleoside Monophosphate Kinase/Adenylate Kinase

[0271] In some embodiments, nucleoside monophosphate kinase (NMPK) is used for the conversion of nucleoside-5′-monophosphate (NMP) to nucleoside-5′-diphosphate (NDP). In the embodiments herein, any suitable nucleoside monophosphate kinase can be used. Various suitable nucleoside monophosphate kinases are known in the art. These include homologs of nucleoside monophosphate kinases. In some embodiments, more than one nucleoside monophosphate kinase can be used in the enzymatic reactions. In some embodiments, the nucleoside monophosphate kinase is an adenosine monophosphate kinase (e.g., adenylate kinase), cytidine monophosphate (CMP) kinase, uridine monophosphate (UMP) kinase, or guanylate-monophosphate (GMP) kinase.

[0272] In some embodiments, a nucleoside monophosphate kinase useful in the enzymatic reactions is a cytidine monophosphate kinases. Various suitable cytidine monophosphate kinases are known in the art. These include homologs of cytidine monophosphate kinases. In some embodiments, a cytidine monophosphate kinase useful in the enzymatic reactions includes, among others, the cytidine monophosphate kinase of Thermus thermophilus (Q5SL35), Pyrococcus furiosus (Q8U2L4), Pseudomonas putida (AF048857.1), Escherichia coli K-12 MG1655 (P0A6I0), Clostridium acetobutylicum (Q97I08), Halobacterium salinarum (Q9HPA5) Bacillus acidicola (WP_066270173), Acetobacter aceti (WP_010667744), Acidithiobacillus thiooxidans (WP_024892761.1), Acidithiobacillus ferrooxidans (WP_064220349.1), Metallosphaera sedula (WP_011921264.1), Amphibacillus xylanus (WP_015009966.1) Thioalkalivibrio denitrificans (WP_077278466.1), Vibrio psychroerythus (Q482G4), Pseudoalteromonas haloplanktis (Q3ILA1), Psychrobacter arcticus (Q4FRL5), Psychromonas ingrahamii (A1SZ01), Pseudomonas syringae (xQ4ZQ97) and Halobacterium salinarum (Q9HPA5).

[0273] In some embodiments, a nucleoside monophosphate kinase useful in the enzymatic reactions is a uridine monophosphate kinase. Various suitable uridine monophosphate kinases are known in the art. These include homologs of uridine monophosphate kinases. In some embodiments, a uridine monophosphate kinase useful in the enzymatic reactions includes, among others, the uridine monophosphate kinase of Pyrococcus furiosus (Q8U122), Thermus thermophilus (P43891), Pseudomonas putida (I7BW46), Escherichia coli K-12 MG1655 (P0A7E9), Aspergillus niger (A2R195), Saccharomyces cerevisiae (P15700), Clostridium acetobutylicum (Q97I64) ATCC 824 PyrH Halobacterium salinarum (Q9HNN8), Picrophilus torridus (WP_048059653), Metallosphaera sedula (WP_012021705), Thermoplasma acidophilum (WP_010900913), Sulfolobus solfataricus (WP_009992427), Acetobacter aceti (WP_042788648), Thioalkalivibrio sp. HK1 (WP_081759172.1), Amphibacillus xylanus (WP_015010200.1), Vibrio psychroerythus (Q485G8), Pseudoalteromonas haloplanktis (Q3IIX6), Psychrobacter arcticus (Q4FRH5), Psychromonas ingrahamii (ABM04676.1), Pseudomonas syringae (Q4ZWS6), and Halobacterium salinarum (Q9HNN8).

[0274] In some embodiments, the nucleoside monophosphate kinase useful in the enzymatic reactions is a guanosine monophosphate kinase (guanylate kinase). Various suitable guanylate kinases are known in the art. These include homologs of guanylate kinases. In some embodiments, a guanylate kinase useful in the enzymatic reactions includes, among others, the guanylate kinase of Thermotoga maritima (Q9X215), Thermus thermophilus (Q5SI18), Pseudomonas putida (I7C087), Escherichia coli K-12 (P60546), Aspergillus niger (A2QPV2), Saccharomyces cerevisiae (P15454), Clostridium acetobutylicum (Q97ID0), Acidithiobacillus ferrooxidans (WP_064219869.1), Acidithiobacillus thiooxidans (WP_010637919.1), Bacillus acidicola (WP_066264774.1), Acetobacter aceti (WP_018308252.1), Amphibacillus xylanus (WP_015010280.1), Thioalkalivibrio sulfidiphilus (WP_018953989.1), Vibrio psychroerythus (Q47UB3), Pseudoalteromonas haloplanktis (Q3IJH8), Psychrobacter arcticus (Q4FQY7), Psychromonas ingrahamii (A1T0P1), and Pseudomonas syringae (Q4ZZY8).

[0275] In some embodiments, the nucleoside monophosphate kinase useful in the enzymatic reactions is an adenosine monophosphate kinase (adenylate kinase). Various suitable adenylate kinases are known in the art. These include homologs of adenylate kinases. In some embodiments, the adenylate kinase is a bacterial, fungal, plant, or animal adenylate kinase. In some embodiments, an adenylate kinase useful in the enzymatic reactions includes, among others, adenylate kinases of Thermus thermophilus (Q72125), Pyrococcus furiosus (Q8U207), Pseudomonas putida (17CAA9), Escherichia coli K-12 W3110 (P69441), Aspergillus niger CBS 513.88 (A2QPN9), Saccharomyces cerevisiae (P07170), Clostridium acetobutylicum (Q97E39), Halobacterium salinarum (Q9HPAT), Acidithiobacillus thiooxidans (WP_024894015.1), Acidithiobacillus ferrooxidans (WP_064218420.1), Bacillus acidicola (WP_066267988.1), Sulfolobus solfataricus (WP_009991241.1), Saccharomyces cerevisiae (P07170), Thermotoga neapolitana (Q8GGL2), Escherichia coli (P69441) and Geobacillus stearothermophilus (WP_049624206.1). In some embodiments, various adenylate kinase enzymes that may be used in the present invention are presented, below, in the Examples.

[0276] In some embodiments, the adenylate kinase is an engineered adenylate kinase. In some embodiments, the adenylate kinase is an adenylate kinase of an even numbered SEQ ID NO. of SEQ ID NOs: 1206-2504, with or without amino acid residues 1-12 (i.e., His-tag), and is described in U.S. provisional application 63/589,828, filed Oct. 12, 2023, incorporated by reference herein. These engineered adenylate kinases exhibit improved properties compared to the parent wild-type enzyme, including among others, i) increased activity on unmodified nucleoside monophosphate (NMP), ii) increased stability, iii) increased activity on 2′-fluoro modified 2′-deoxynucleoside monophosphate, and iv) increased activity on 2′-O-methyl modified nucleoside monophosphate, or any combinations of i), ii), iii), and iv).

### Nucleoside Diphosphate Kinase/Acetate Kinase

[0277] In some embodiments, a nucleoside diphosphate kinase (NDPK) is used for the conversion of a nucleoside-5′-diphosphate (NDP) to the nucleoside-5-triphosphate. Various suitable nucleoside diphosphate kinases are known in the art. These include homologs of nucleoside diphosphate kinases. In some embodiments, a nucleoside diphosphate kinase useful in the enzymatic reactions includes, among others, the nucleoside diphosphate kinase of Aquifex aeolicus (067528), Pseudomonas putida (I7C0T7), Escherichia coli K-12 (P0A763), Aspergillus niger (A2QUJ6), Saccharomyces cerevisiae (P36010), Clostridium acetobutylicum (A6M162), Halobacterium salinarum (P61136), Acidithiobacillus thiooxidans (WP_024892623.), Acetobacter aceti (WP_042787791.1) Ndk Picrophilus (WP_011178084.1), Thermoplasma acidophilum (WP_010901523.1), Sulfolobus solfataricus (WP_009990482.1), Bacillus acidicola (WP_066262668.1), Ferroplasma (WP_009887649.1), Metallosphaera sedula (WP_011921175.1), Psychromonas ingrahamii (AlSZU8), Colwellia psychrerythraea (Q47WB6), Psychrobacter arcticus (Q4FTX1), Pseudoalteromonas haloplanktis (Q3ID15), Halobacterium salinarum (P61136), Natrialba magadii (D3SY02), Escherichia coli str. K-12 substr. MG1655 (NP_416799.1), Corynebacterium jeikeium K411 (WP_011272972.1), Lactococcus cremoris subsp. cremoris KW2 (WP_011835968.1), Lactococcus lactis (WP_004254593.1), Marinitoga sp. 38H-ov (WP_165147355.1), Thermotoga sp. KOL6 (WP_101510533.1), Thermosipho melaniensis (WP_012057479.1), Thermotoga sp. RQ7 (WP_041844042.1), and Thermosipho africanus (WP_004102380.1).

[0278] In some embodiments, the nucleoside diphosphate kinase is an acetate kinase. Various suitable acetate kinase are known in the art. These include homologs of acetate kinase. In some embodiments, more than one acetate kinase is used. In some embodiments, one acetate is used for conversion of a NDP to the NTP product, and a different acetate kinase is used as a recycling enzyme for the conversion of NDPs to NTPs used as cofactors in the nucleoside kinase and nucleoside monophosphate kinase reactions, as described below.

[0279] In some embodiments, the acetate kinase for use in the enzymatic reactions is an acetate kinase of Escherichia coli str. K-12 substr. MG1655 (NP_416799.1), Corynebacterium jeikeium K411 (WP_011272972.1), Lactococcus cremoris subsp. cremoris KW2 (WP_011835968.1), Lactococcus lactis (WP_004254593.1), Marinitoga sp. 38H-ov (WP_165147355.1), Thermotoga sp. KOL6 (WP_101510533.1), Thermosipho melaniensis (WP_012057479.1), Thermotoga sp. RQ7 (WP_041844042.1), and Thermosipho africanus (WP_004102380.1). In some embodiments, various acetate kinase enzymes that may be used in the present invention are presented, below, in the Examples.

[0280] In some embodiments, the acetate kinase is an engineered acetate kinase. In some embodiments, the acetate kinase is an acetate kinase of an even numbered SEQ ID NO. of SEQ ID NOs: 2506-3058, with or without amino acid residues 1-12 (i.e., His-tag), and is described in U.S. provisional application 63/589,839, filed Oct. 12, 2023, incorporated by reference herein. These engineered acetate kinases exhibit improved properties compared to the parent wild-type enzyme, including among others, i) increased activity on unmodified nucleoside diphosphate, ii) increased activity on 2′-fluoro modified 2′-deoxynucleoside diphosphate, and/or iii) increased activity on 2′-O-methyl modified nucleoside diphosphate.

### Polyphosphate Kinase PPK2

[0281] In some embodiments, a polyphosphate kinase can be used in place of the enzymatic actions of nucleoside monophosphate kinase and nucleoside diphosphate kinase, or a combination thereof. In a preferred embodiment, the polyphosphate kinase is PPK2. Various suitable PPK2s are known in the art. These include homologs of PPK2. In some embodiments, the PPK2 is the PPK2 of Deinococcus geothermalis DSM 11300 (WP_011531362.1), Meiothermus ruber DSM 1279 (ADD29239.1), Meiothermus silvanus DSM 9946 (WP_013159015.1), Thermosynechococcus elongatus BP-1 (NP_682498.1), Anaerolinea thermophila UNI-1 (WP_013558940), Caldilinea aerophila DSM 14535 (WP_014433181), Chlorobaculum tepidum ((NP_661973.1), Oceanithermus profundus DSM 14977 (WP_013458618), Roseiflexus castenholzii DSM 13941 (WP_012120763), Roseiflexus sp. RS-1 (WP_011956376), Truepera radiovictrix DSM 17093 (WP_013178933), Acidithiobacillus thiooxidans (WP_051690689.1), Acidithiobacillus ferrooxidans (WP_064219816.1), Psychrobacter arcticus (WP_083756052.1), Psychroserpens jangbogonensis (WP_033960485.1), Cryobacterium psychrotolerans (WP 092324020.1), Nocardioides psychrotolerans (WP_091116082.1), or Pseudomonas psychrophila (WP_019411115.1).

### 3′-O-Kinase

[0282] In some embodiments, a 3′-O-kinase (3OK) is used for the phosphorylation of a nucleoside or nucleotide (e.g., NMP, NDP, and NTP) at the 3′-OH of the sugar moiety. In some embodiments, any suitable 3′-O-kinase may be used. Various suitable 3′-O-kinase are known in the art. These include homologs of 3′-O-kinases, including homologs of CysC enzymes (adenylyl-sulfate kinase) and CoaE (dephospho-CoA kinase). CysC enzymes catalyze the conversion of adenosine 5′-phosphosulfate to 3′-phosphoadenylyl sulfate using ATP as a co-factor (C. Satishchandran et al., J. Biol. Chem., 1989, 264(25), 15012-15021). Similarly, CoaE enzymes are known to catalyze the conversion of 3′-dephospho-CoA to CoA, using ATP as a co-factor (Satishchandran C. et al. Biochemistry 1992, 31, 47, 11684-11688). In some embodiments, a 3′-O-kinase useful in the enzymatic reactions include, among others, the 3′O-kinase of E coli W3110 (P0A6J1), E coli W3110 (P0A6I9), Thermomonas hydrothermalis (A0A1M4SCV0), Geobacillus stearothermophilus (WP_033008536.1), Aquifex aeolicus (WP_010881297.1), Thermotoga sp. RQ7 (WP_041843859.1), Caldibacillus thermoamylovorans (A0A0D0ENB9), and Thermosynechococcus vestitus (Q8DJ87). In some embodiments, various acetate kinase enzymes that may be used in the present invention are presented, below, in the Examples.

[0283] In some embodiments, the 3′-O-kinase for the enzymatic reactions is an engineered 3′-O-kinase. In some embodiments, the 3′-O-kinase is a 3′-O-kinase of an even numbered SEQ ID NO. of SEQ ID NOs: 3060-3370 and 3376-5126, with or without amino acid residues 202-211 (i.e., His-tag), and is described in U.S. provisional application 63/387,908, filed Dec. 16, 2023, and International application No. PCT/US2023/076694, filed Oct. 12, 2023, incorporated by reference herein. These engineered 3′-O-kinases exhibit improved properties compared to the parent wild-type enzyme, including among others, including increased activity, increased activity on non-natural substrates, increased selectivity, increased substrate promiscuity, decreased product inhibition, and/or decreased byproduct formation.

### NTP Regeneration Enzymes

[0284] In some embodiments, the present disclosure also provides enzymes for NTP regeneration systems. Enzymes for NTP regeneration systems include, among others, pyruvate kinase, creatine kinase, polyphosphate kinase, and acetate kinase.

[0285] In some embodiments, the enzyme in the NTP regeneration system is a pyruvate kinase. Various suitable pyruvate kinases are known in the art. These include homologs of pyruvate kinase. In some embodiments, the pyruvate kinase useful in the NTP regenerating system includes, among others, pyruvate kinase of Escherichia coli str. K-12 substr. MG1655 (A0A3L1NNV5), Geobacillus stearothermophilus ATCC 7953 (Q02499), Schizosaccharomyces pombe (Q10208), Saccharomyces cerevisiae S288C (D6VPH8), Gallus gallus liver (F1NW43), Solanum tuberosum (P22200), Oryctolagus cuniculus M1/2 (O18919), Mus musculus muscle (P52480), Rattus norvegicus M1/2 (A0A8L2Q7B9), and Homo sapien muscle (A0A804F729).

[0286] In some embodiments, the enzyme in the NTP regeneration system is creatine kinase. Various suitable creatine kinases are known in the art. These include homologs of creatine kinase. In some embodiments, the creatine kinase useful in the NTP regenerating system includes, among others, the creatine kinase of Danio rerio (A8E5L0), Gallus gallus mitochondrial (P11009), Mus musculus (P07310), Bos taurus (Q5E9Y4), Oryctolagus cuniculus (P00563), and Homo sapien M-type (P06732).

[0287] In some embodiments, the enzyme in the NTP regeneration system is a polyphosphate kinase. Various suitable polyphosphate kinases are known in the art. These include homologs of polyphosphate kinases. In a preferred embodiment, the polyphosphate kinase is PPK1. In some embodiments, a PPK1 useful in the NTP regenerating system includes, among others, the PPK1 of Pseudomonas putida DOT-T1E (AFO50238.1), Escherichia coli K-12 P0A7B1 (AAC75554.1), Clostridium acetobutylicum ATCC 824 (NP_347259.1), Thermosynechococcus elongatus (WP_011056068), Acidithiobacillus ferrooxidans (WP_064219446), Acidithiobacillus thiooxidans (WP_031572361), Bacillus acidicola (WP_066264350), Acetobacter aceti (GAN58028), Acetobacter aceti (WP_077811826.1), Thioalkalivibrio denitrificans (WP_077277945.1), and Psychromonas ingrahamii (WP_041766473.1).

[0288] In some embodiments, the enzyme in the NTP regeneration system is an R-acetate kinase. As used herein, “R-acetate kinase” refers to the acetate kinase used in the NTP regenerating system. In some embodiments, the acetate kinase in the NTP regeneration system is the same acetate kinase used in the enzymatic conversion of a NDP substrate to the NTP product in the enzymatic cascades described herein. In some embodiments, the acetate kinase used in the NTP regeneration system is different from the acetate kinase used in the enzymatic conversion of a NDP substrate to the NTP product in the enzymatic cascades. Various suitable acetates kinases are known in the art and also describe herein. These include homologs of acetate kinases. In some embodiments, the acetate kinase useful in the NTP regeneration system includes, among others, an acetate kinase of Escherichia coli str. K-12 substr. MG1655 (NP_416799.1), Corynebacterium jeikeium K411 (WP_011272972.1), Lactococcus cremoris subsp. cremoris KW2 (WP_011835968.1), Lactococcus lactis (WP_004254593.1), Marinitoga sp. 38H-ov (WP_165147355.1), Thermotoga sp. KOL6 (WP_101510533.1), Thermosipho melaniensis (WP_012057479.1), Thermotoga sp. RQ7 (WP_041844042.1), or Thermosipho africanus (WP_004102380.1). In some embodiments, various acetate kinase enzymes that may be used in the present invention are presented, below, in the Examples.

[0289] In some embodiments, the acetate kinase for use in the NTP regeneration system is an engineered acetate kinase. In some embodiments, the acetate kinase is an acetate kinase of an even numbered SEQ ID NO. of SEQ ID NOs: 2506-3058, with or without amino acid residues 1-12 (i.e., His-tag), and is described in U.S. provisional application 63/589,839, filed Oct. 12, 2023, incorporated by reference herein.

### Auxiliary Enzymes

[0290] In some embodiments, the present disclosure further provides auxiliary enzymes for the NTP regeneration system based on acetate kinase. In some embodiments, the auxiliary enzyme is a pyruvate oxidase when acetate kinase is present in the enzymatic cascades. Various pyruvate oxidases are known in the art. In some embodiments, the pyruvate oxidases are homologs of pyruvate oxidases. In some embodiments, the pyruvate oxidase is a pyruvate oxidase of Bifidobacterium mongoliense (A0A087C4V4), Alkalibacterium subtropicum (A0A1I1KLE2), Pisciglobus halotolerans (A0A1I3CCM7), Jeotgalibaca sp PTS2502 (A0A1U7E9W7), Vagococcus fluvialis (A0A2C9XUJ6), Candidatus Gracilibacteria bacterium (A0A2M7FGE0), Bavariicoccus seileri (A0A3D4S346), Bifidobacterium aquikefiri (A0A261G4D1), Aerococcus urinae (F2I8Y6), and Aerococcus suis (A0A1W1YA59).

[0291] In some embodiments, the auxiliary enzyme is a catalase. In some embodiments, where appropriate (e.g., use of acetate kinase and pyruvate oxidase), any suitable catalase may be used in the methods herein. Various suitable catalases are known in the art. In some embodiments, the catalase can be the catalase of Archaeoglobus fulgidus, Bacillus stearothermophilus, E. coli, Mycobacterium intracellulare, Synechococcus sp PCC7942, Arabidopsis thaliana, Pisum sativum, or Saccharomyces cerevisiae (see, e.g., Zamocky, M., Progress in Biophysics and Molecular Biology, 1999, 72(1):19-66); see also WO1992017571). In some embodiments, the catalase is a catalase of Bos taurus (P00432), Aspergillus niger (A0A254TZH3), Helicobacter pylori (J0N6C6), Drosophila melanogaster (P17336) and Rattus norvegicus (P04762).

[0292] In some embodiments, any of the enzymes described herein can be provided as a fusion protein. In some embodiments, the enzyme is fused to variety of polypeptide sequences, such as, by way of example and not limitation, polypeptide tags that can be used for detection and/or purification. In some embodiments, the fusion polypeptide of the enzyme comprises a glycine-histidine or histidine-tag (His-tag). In some embodiments, the fusion polypeptide of the enzyme comprises an epitope tag, such as c-myc, FLAG, V5, or hemagglutinin (HA). In some embodiments, the fusion polypeptide of the enzyme comprises a GST, SUMO, Strep, MBP, or GFP tag. In some embodiments, the fusion is to the amino (N-) terminus of engineered enzyme polypeptide. In some embodiments, the fusion is to the carboxy (C-) terminus of the enzyme polypeptide.

### Immobilized Enzymes

[0293] In some embodiments, it is further contemplated that any of the methods or processes using the enzyme/polypeptide can be carried out using the enzyme/polypeptide bound or immobilized on a substrate, such as a solid support, a porous substrate, a membrane, or particles. The polypeptide can be entrapped in matrixes or membranes. In some embodiments, matrices include polymeric materials such as calcium-alginate, agar, k-carrageenin, polyacrylamide, and collagen. In some embodiments, the solid matrices, includes, among others, activated carbon, porous ceramic, and diatomaceous earth. In some embodiments, the matrix is a particle, a membrane, or a fiber. Types of membranes include, among others, nylon, cellulose, polysulfone, or polyacrylate.

[0294] In some embodiments, the enzyme/polypeptide is immobilized on the surface of a support material. In some embodiments, the polypeptide is adsorbed on the support material. In some embodiments, the polypeptide is immobilized on the support material by covalent attachment. Support materials include, among others, inorganic materials, such as alumina, silica, porous glass, ceramics, diatomaceous earth, clay, and bentonite, or organic materials, such as cellulose (CMC, DEAE-cellulose), starch, activated carbon, polyacrylamide, polystyrene, and ion-exchange resins, such as Amberlite, Sephadex, and Dowex.

[0295] In some embodiments, solid supports useful for immobilizing the enzyme/polypeptide in the present disclosure, include beads or resins comprising polymethacrylate with epoxide functional groups, polymethacrylate with amino epoxide functional groups, styrene/DVB copolymer or polymethacrylate with octadecyl functional groups. Exemplary solid supports useful for immobilizing the enzyme/polypeptide include, but are not limited to, EnginZyme (including, EziG-1, EziG-1, and EziG-3), chitosan beads, Eupergit C, and SEPABEADs (Mitsubishi) (including EC-EP, EC-HFA/S, EXA252, EXE119 and EXE120).

[0296] Methods of enzyme immobilization are known in the art. The engineered polypeptides can be bound non-covalently or covalently. Various methods for conjugation and immobilization of enzymes to solid supports (e.g., resins, membranes, beads, glass, etc.) are known in the art (see e.g., Yi et al., Proc. Biochem., 2007, 42(5): 895-898; Martin et al., Appl. Microbiol. Biotechnol., 2007, 76(4): 843-85; Koszelewski et al., J. Mol. Cat. B: Enzymatic, 2010, 63:39-44; Truppo et al., Org. Proc. Res. Dev., published online: dx.doi.org/10.1021/op200157c; Hermanson, Bioconjugate Techniques, 2nd Ed., Academic Press, Cambridge, M A (2008); Mateo et al., Biotechnol. Prog., 2002, 18(3):629-34; and “Bioconjugation Protocols: Strategies and Methods,” In Methods in Molecular Biology, Niemeyer (ed.), Humana Press, New York, NY (2004); the disclosures of each which are incorporated by reference herein).

### Reaction Conditions

[0297] In the embodiments provided herein and illustrated in the Examples, various components ranges of suitable reaction conditions that can be used in the processes, include but are not limited to, substrate loading, co-substrate loading, pH, temperature, buffer, solvent system, cofactor, polypeptide loading, and reaction time. Further suitable reaction conditions for carrying out the process for biocatalytic conversion of substrate compounds to product compounds using the enzymes described herein can be determined in view of the guidance provided herein includes, but is not limited to, contacting the enzymes and one or more substrate compounds under experimental reaction conditions of concentration, pH, temperature, and solvent conditions, and detecting the product compound. The reaction conditions described herein are illustrative and examples only. The present disclosure contemplates any suitable reaction conditions that may find use in the methods described herein.

[0298] The substrate compound, e.g., nucleoside and/or nucleotide, in the reaction mixtures can be varied, taking into consideration, for example, the desired amount of product compound, the effect of each substrate concentration on enzyme activity, stability of enzyme under reaction conditions, and the percent conversion of each substrate to product. In some embodiments, the suitable reaction conditions comprise a substrate compound loading of at least about 0.1 uM to 1 uM, 1 uM to 2 uM, 2 uM to 3 uM, 3 uM to 5 uM, 5 uM to 10 uM, or 10 uM or greater. In some embodiments, the suitable reaction conditions comprise a substrate compound loading of at least about 0.5 to about 25 g/L, 1 to about 25 g/L, 5 to about 25 g/L, about 10 to about 25 g/L, or 20 to about 25 g/L. In some embodiments, the suitable reaction conditions comprise a substrate compound loading of at least about 0.5 g/L, at least about 1 g/L, at least about 5 g/L, at least about 10 g/L, at least about 15 g/L, at least about 20 g/L, or at least about 30 g/L, or even greater.

[0299] In some embodiments, in carrying out the synthesis processes described herein, the enzymes/polypeptides can be added to the reaction mixture in the form of a purified enzyme, partially purified enzyme, whole cells transformed with gene(s) encoding the enzyme, as cell extracts and/or lysates of such cells, and/or as an enzyme immobilized on a solid support. Whole cells transformed with gene(s) encoding the enzyme(s) or cell extracts, lysates thereof, and isolated enzymes may be employed in a variety of different forms, including solid (e.g., lyophilized, spray-dried, and the like) or semisolid (e.g., a crude paste). The cell extracts or cell lysates may be partially purified by precipitation (ammonium sulfate, polyethyleneimine, heat treatment or the like, followed by a desalting procedure prior to lyophilization (e.g., ultrafiltration, dialysis, etc.). Any of the enzyme preparations (including whole cell preparations) may be stabilized by crosslinking using known crosslinking agents, such as, for example, glutaraldehyde or immobilization to a solid phase (e.g., Eupergit C, and the like).

[0300] In some embodiments, the gene(s) encoding the enzymes/polypeptides can be transformed into host cell separately or together into the same host cell. For example, in some embodiments one set of host cells can be transformed with gene(s) encoding one polypeptide and another set can be transformed with gene(s) encoding another polypeptide. Both sets of transformed cells can be utilized together in the reaction mixture in the form of whole cells, or in the form of lysates or extracts derived therefrom. In some embodiments, a host cell can be transformed with gene(s) encoding multiple polypeptides. In some embodiments the polypeptides can be expressed in the form of secreted polypeptides and the culture medium containing the secreted polypeptides can be used for the synthesis reaction.

[0301] In some embodiments, the enzyme/polypeptide, particularly any engineered enzyme disclosed herein, provides for processes wherein higher percentage conversion can be achieved with lower concentrations of the enzyme/polypeptide. In some embodiments of the process, the suitable reaction conditions comprise an enzyme/polypeptide amount of about 1% (w/w), 2% (w/w), 5% (w/w), 10% (w/w), 20% (w/w), 30% (w/w), 40% (w/w), 50% (w/w), 75% (w/w), 100% (w/w) or more of substrate compound loading.

[0302] In some embodiments, the enzyme/polypeptide is present at a molar ratio of enzyme/polypeptide to substrate of about 50 to 1, 25 to 1, 10 to 1, 5 to 1, 1 to 1, 1 to 5, 1 to 10, 1 to 25 or 1 to 50. In some embodiments, the enzyme/polypeptide is present at a molar ratio of enzyme/polypeptide to substrate from a range of about 50 to 1 to a range of about 1 to 50.

[0303] In some embodiments, the enzyme/polypeptide is present at about 0.01 g/L to about 50 g/L; about 0.01 to about 0.1 g/L; about 0.05 g/L to about 50 g/L; about 0.1 g/L to about 40 g/L; about 1 g/L to about 40 g/L; about 2 g/L to about 40 g/L; about 5 g/L to about 40 g/L; about 5 g/L to about 30 g/L; about 0.1 g/L to about 10 g/L; about 0.5 g/L to about 10 g/L; about 1 g/L to about 10 g/L; about 0.1 g/L to about 5 g/L; about 0.5 g/L to about 5 g/L; or about 0.1 g/L to about 2 g/L. In some embodiments, the enzyme/polypeptide is present at about 0.01 g/L, 0.05 g/L, 0.1 g/L, 0.2 g/L, 0.5 g/L, 1, 2 g/L, 5 g/L, 10 g/L, 15 g/L, 20 g/L, 25 g/L, 30 g/L, 35 g/L, 40 g/L, or 50 g/L.

[0304] In some embodiments, as described herein, the suitable reaction conditions comprise a phosphate donor. In some embodiments, the phosphate donor used is selected for the enzymes used in the method or process. In some embodiments, the phosphate donor is a NTP (e.g., ATP, GTP, CTP, TTP, or UTP). In some embodiments, the phosphate donor includes acetyl phosphate, where acetate kinase is used in the method or process. In some embodiments, the phosphate donor is present at concentrations of about 1 to 500 uM; about 50 to 400 uM; about 100 to 300 uM; or about 200 to 300 uM. In some embodiments, the phosphate donor is regenerated or created by an enzyme, so that a lower concentration of phosphate donor is used.

[0305] In some embodiments, the reactions conditions is at a pH suitable for the enzymatic process. The desired pH or desired pH range can be maintained by use of an acid or base, an appropriate buffer, or a combination of buffering and acid or base addition. The pH of the reaction mixture can be controlled before and/or during the course of the reaction. In some embodiments, the suitable reaction conditions comprise a solution pH from about 4 to about 10, pH from about 5 to about 10, pH from about 5 to about 9, pH from about 6 to about 9, pH from about 6 to about 8. In some embodiments, the reaction conditions comprise a solution pH of about 4, 4.5, 5, 5.5, 6, 6.5, 7, 7.5, 8, 8.5, 9, 9.5, or 10.

[0306] In some embodiments, the pH of the reaction mixture may change during the course of the reaction. The pH of the reaction mixture may be maintained at a desired pH or within a desired pH range. In some embodiments, this may be done by the addition of an acid or a base, before and/or during the course of the reaction. Alternatively, the pH may be controlled by using a buffer. Accordingly, in some embodiments, the reaction condition comprises a buffer. Suitable buffers to maintain desired pH ranges are known in the art and include, by way of example and not limitation, borate, potassium phosphate, 2-(N-morpholino)ethanesulfonic acid (MES), 3-(N-morpholino)propanesulfonic acid (MOPS), acetate, triethanolamine, and 2-amino-2-hydroxymethyl-propane-1,3-diol (Tris), and the like. In some embodiments, the reaction conditions comprise water as a suitable solvent with no buffer present.

[0307] In the embodiments of the processes herein, a suitable temperature is used for the reaction conditions, for example, taking into consideration the increase in reaction rate at higher temperatures, and the activity of the enzyme during the reaction time period. Accordingly, in some embodiments, the suitable reaction conditions comprise a temperature of about 10° C. to about 95° C., about 10° C. to about 75° C., about 15° C. to about 95° C., about 20° C. to about 95° C., about 20° C. to about 65° C., about 25° C. to about 70° C., or about 50° C. to about 70° C. In some embodiments, the suitable reaction conditions comprise a temperature of about 10° C., 15° C., 20° C., 25° C., 30° C., 35° C., 40° C., 45° C., 50° C., 55° C., 60° C., 65° C., 70° C., 75° C., 80° C., 85° C., 90° C. or 95° C. In some embodiments, the temperature during the enzymatic reaction can be maintained at a specific, constant temperature throughout the course of the reaction. In some embodiments, the temperature during the enzymatic reaction can be adjusted over a temperature profile during the course of the reaction.

[0308] In some embodiments, the processes described herein are carried out in a suitable solvent. Suitable solvents include water, aqueous buffer solutions, organic solvents, polymeric solvents, and/or co-solvent systems, which generally comprise aqueous solvents, organic solvents and/or polymeric solvents. In some embodiments, the aqueous solvent (water or aqueous co-solvent system) may be pH-buffered or unbuffered. In some embodiments, the processes using the enzymes/polypeptides can be carried out in an aqueous co-solvent system comprising an organic solvent (e.g., ethanol, isopropanol (IPA), dimethyl sulfoxide (DMSO), dimethylformamide (DMF) ethyl acetate, butyl acetate, 1-octanol, heptane, octane, methyl t butyl ether (MTBE), toluene, and the like), ionic or polar solvents (e.g., 1-ethyl 4 methylimidazolium tetrafluoroborate, 1-butyl-3-methylimidazolium tetrafluoroborate, 1-butyl 3 methylimidazolium hexafluorophosphate, glycerol, polyethylene glycol, and the like). In some embodiments, the co-solvent can be a polar solvent, such as a polyol, dimethylsulfoxide (DMSO), or lower alcohol. In some embodiments, the non-aqueous co-solvent component of an aqueous co-solvent system may be miscible with the aqueous component, providing a single liquid phase, or may be partly miscible or immiscible with the aqueous component, providing two liquid phases. Exemplary aqueous co-solvent systems can comprise water and one or more co-solvents selected from an organic solvent, polar solvent, and polyol solvent. In general, the co-solvent component of an aqueous co-solvent system is chosen such that it does not adversely inactivate the enzymes under the reaction conditions. Appropriate co-solvent systems can be identified by measuring the enzymatic activity of the specified enzymes with a defined substrate of interest in the candidate solvent system, utilizing an enzyme activity assay, such as those described herein.

[0309] In some embodiments of the process, the suitable reaction conditions comprise an aqueous co-solvent, where the co-solvent comprises DMSO at about 1% to about 50% (v/v), about 1 to about 40% (v/v), about 2% to about 40% (v/v), about 5% to about 30% (v/v), about 10% to about 30% (v/v), or about 10% to about 20% (v/v). In some embodiments of the process, the suitable reaction conditions can comprise an aqueous co-solvent comprising ethanol at about 1% (v/v), about 5% (v/v), about 10% (v/v), about 15% (v/v), about 20% (v/v), about 25% (v/v), about 30% (v/v), about 35% (v/v), about 40% (v/v), about 45% (v/v), or about 50% (v/v).

[0310] In some embodiments, the reaction conditions comprise a surfactant for stabilizing or enhancing the reaction. Surfactants can comprise non-ionic, cationic, anionic and/or amphiphilic surfactants. Exemplary surfactants, include by way of example and not limitation, nonyl phenoxypolyethoxylethanol (NP40), TRITON™ X-100 polyethylene glycol tert-octylphenyl ether, polyoxyethylene-stearylamine, cetyltrimethylammonium bromide, sodium oleylamidosulfate, polyoxyethylene-sorbitanmonostearate, hexadecyldimethylamine, etc. Any surfactant that may stabilize or enhance the reaction may be employed. The concentration of the surfactant to be employed in the reaction may be generally from 0.1 to 50 mg/mL, particularly from 1 to 20 mg/mL.

[0311] In some embodiments, the reaction conditions include an antifoam agent, which aids in reducing or preventing formation of foam in the reaction solution, such as when the reaction solutions are mixed or sparged. Anti-foam agents include non-polar oils (e.g., minerals, silicones, etc.), polar oils (e.g., fatty acids, alkyl amines, alkyl amides, alkyl sulfates, etc.), and hydrophobic (e.g., treated silica, polypropylene, etc.), some of which also function as surfactants. Exemplary anti-foam agents include Y-30® (Dow Corning), poly-glycol copolymers, oxy/ethoxylated alcohols, and polydimethylsiloxanes. In some embodiments, the anti-foam can be present at about 0.001% (v/v) to about 5% (v/v), about 0.01% (v/v) to about 5% (v/v), about 0.1% (v/v) to about 5% (v/v), or about 0.1% (v/v) to about 2% (v/v). In some embodiments, the anti-foam agent can be present at about 0.001% (v/v), about 0.01% (v/v), about 0.1% (v/v), about 0.5% (v/v), about 1% (v/v), about 2% (v/v), about 3% (v/v), about 4% (v/v), or about 5% (v/v) or more as desirable to promote the reaction.

[0312] The quantities or amounts of reactants used in the enzymatic reaction will generally vary depending on the quantities of product desired, and concomitantly the amount of substrates employed. Those having ordinary skill in the art will readily understand how to vary these quantities to tailor them to the desired level of productivity and scale of production.

[0313] In some embodiments, the order of addition of reactants is not critical. The reactants may be added together at the same time to a solvent (e.g., monophasic solvent, biphasic aqueous co-solvent system, and the like), or alternatively, some of the reactants may be added separately, and some together at different time points. For example, the cofactor, co-substrate and substrate may be added first to the solvent.

[0314] In some embodiments, solid reactants (e.g., substrate, enzyme, salts, etc.) may be provided to the reaction in a variety of different forms, including powder (e.g., lyophilized, spray dried, and the like), solution, emulsion, suspension, and the like. The reactants can be readily lyophilized or spray dried using methods and equipment that are known to those having ordinary skill in the art. For example, the protein solution can be frozen at −80° C. in small aliquots, then added to a pre-chilled lyophilization chamber, followed by the application of a vacuum.

[0315] In some embodiments, for improved mixing efficiency when an aqueous co-solvent system is used, the polypeptide(s), and co-substrate may be added and mixed into the aqueous phase first. The substrate may be added and mixed in, followed by the organic phase or the substrate may be dissolved in the organic phase and mixed in. Alternatively, the substrate may be premixed in the organic phase, prior to addition to the aqueous phase.

[0316] In some embodiments, the processes of the present disclosure are generally allowed to proceed until further conversion of substrate to product does not change significantly with reaction time (e.g., less than 10% of substrate being converted, or less than 5% of substrate being converted). In some embodiments, the reaction is allowed to proceed until there is complete or near complete conversion of substrate to product. Transformation of substrate to product can be monitored using known methods by detecting substrate and/or product, with or without derivatization. Suitable analytical methods include gas chromatography, HPLC, MS, and the like. In some embodiments, after suitable conversion to product, the reactants are separated from the product and additional reactants are added.

[0317] Any of the processes disclosed herein using the enzymes/polypeptides for the preparation of products can be carried out under a range of suitable reaction conditions, including but not limited to ranges of substrates, temperature, pH, solvent system, substrate loading, polypeptide loading, cofactor loading, and reaction time. In one illustrative example, the suitable reaction conditions for the conversion of a NDP or NTP to a NQP comprise: (a) substrate loading of about 1-200 mM NTP; (b) about 0.01 g/L to 5 g/L enzyme/polypeptide (e.g., 3′-O′-kinase, adenosine kinase, adenylate kinase, acetate kinase, etc.); (c) 1-100 mM MgCl₂; (e) 5 to 100 mM Tris-HCl buffer; (f) 10-100 mM LiKAcPO₄; (g) pH at 5-9; and (h) temperature of about 15° C. to 70° C. In another illustrative example, the suitable reaction conditions for the conversion of a NDP or NTP to a NQP comprise: (a) substrate loading of about 50 mM NDP or NTP; (b) about 0.01 g/L to 5 g/L enzyme/polypeptide (e.g., 3′-O′-kinase, acetate kinase, etc.); (c) 10 mM MgCl₂; (e) 50 mM Tris-HCl buffer; (f) 10 mM LiKAcPO₄; (g) pH 7.5; and (h) temperature of about 25° C. In some embodiments, the enzyme loading is between 1-30% w/w. In some embodiments, additional reaction components or additional techniques carried out to supplement the reaction conditions. These can include taking measures to stabilize or prevent inactivation of the enzyme, reduce product inhibition, shift reaction equilibrium to formation of the desired product.

[0318] In further embodiments, any of the above described processes for the conversion of one or more substrate compounds to product compound can further comprise one or more steps selected from: extraction; isolation; purification; and crystallization of product compound. Methods, techniques, and protocols for extracting, isolating, purifying, and/or crystallizing the product from biocatalytic reaction mixtures produced by the above disclosed processes are known to the ordinary artisan and/or accessed through routine experimentation. Additionally, illustrative methods are provided in the Examples below.

### EXAMPLES

[0319] The following Examples, including experiments and results achieved, are provided for illustrative purposes only and are not to be construed as limiting the present invention. Indeed, there are various suitable sources for many of the reagents and equipment described below. It is not intended that the present invention be limited to any particular source for any reagent or equipment item.

[0320] In the experimental disclosure below, the following abbreviations apply: M (molar); mM (millimolar), uM and μM (micromolar); nM (nanomolar); mol (moles); gm and g (gram); mg (milligrams); ug and μg (micrograms); L and 1 (liter); ml and mL (milliliter); ul, μl, uL, and μL (microliters); cm (centimeters); mm (millimeters); um and μιη (micrometers); sec. (seconds); min(s) (minute(s)); h(s) and hr(s) (hour(s)); U (units); MW (molecular weight); rpm (rotations per minute); psi and PSI (pounds per square inch); ° C. (degrees Celius); RT and rt (room temperature); CV (coefficient of variability); CAM and cam (chloramphenicol); PMBS (polymyxin B sulfate); IPTG (isopropyl β-D-1-thiogalactopyranoside); LB (lysogeny broth); TB (terrific broth); SFP (shake flask powder); CDS (coding sequence); DNA (deoxyribonucleic acid); RNA (ribonucleic acid); nt (nucleotide; polynucleotide); aa (amino acid; polypeptide); E. coli W3110 (commonly used laboratory E. coli strain, available from the Coli Genetic Stock Center [CGSC], New Haven, CT); HTP (high throughput); HPLC (high pressure liquid chromatography); HPLC-UV (HPLC-Ultraviolet Visible Detector); FIOPC (fold improvements over positive control) or FIOP (fold improvement over parent); Sigma and Sigma-Aldrich (Sigma-Aldrich, St. Louis, MO; Difco (Difco Laboratories, BD Diagnostic Systems, Detroit, MI); Microfluidics (Microfluidics, Westwood, MA); Life Technologies (Life Technologies, a part of Fisher Scientific, Waltham, MA); Amresco (Amresco, LLC, Solon, OH); Carbosynth (Carbosynth, Ltd., Berkshire, UK); Varian (Varian Medical Systems, Palo Alto, CA); Agilent (Agilent Technologies, Inc., Santa Clara, CA); Infors (Infors USA Inc., Annapolis Junction, MD);.

### Example 1

### Expression Enzymes and Purification in High Throughput (HTP)

### High Throughput (HTP) Growth of Enzymes and Variants Thereof

[0321] Transformed E. coli cells were selected by plating onto LB agar plates containing 1% glucose and 30 μg/ml chloramphenicol. After overnight incubation at 37° C., colonies were placed into the wells of 96-well shallow flat bottom NUNC™ (Thermo-Scientific) plates filled with 180 μl/well LB medium supplemented with 1% glucose and 30 μg/ml chloramphenicol. The cultures were allowed to grow overnight for 18-20 hours in a shaker (200 rpm, 30° C., and 85% relative humidity; Kuhner). Overnight growth samples (20 μL) were transferred into Costar 96-well deep plates filled with 380 μL of Terrific Broth supplemented with 30 μg/ml chloramphenicol. The plates were incubated for 120 minutes in a shaker (250 rpm, 30° C., and 85% relative humidity; Kuhner) until the OD₆₀₀ reached between 0.4-0.8. The cells were then induced with 40 μL of 10 mM IPTG in sterile water and incubated overnight for 18-20 hours in a shaker (250 rpm, 30° C., and 85% relative humidity; Kuhner). The cells were pelleted (4,000 rpm for 20 min), the supernatants were discarded, and the cells were frozen at −80° C. prior to analysis.

[0322] For lysis, 200 μL lysis buffer containing 50 mM Tris-HCl buffer, pH 7.5, and 0.1 g/L lysozyme were added to the cell pellet in each well. The cells were shaken vigorously at room temperature for 10 minutes on a bench top shaker. A 100 μL aliquot of the re-suspended cells was transferred to a 96-well format 200 μL BioRad PCR plate, then briefly spun-down prior to 1-hour heat treatment at the temperature indicated, typically 48-60° C. Following heat-treatment, the cell debris was pelleted by centrifugation (4,000 rpm, 4° C., 20 min), and clear supernatants were then used in biocatalytic reactions to determine their activity levels.

### Example 2

### Shake Flask Expression and Purification Procedure

### Shake Flask Expression

[0323] Method 1: Shake Flask Expression using IPTG induction. Selected HTP cultures, grown as described in Example 1, were plated onto LB agar plates with 1% glucose and 30 μg/mL chloramphenicol and grown overnight at 37° C. A single colony from each culture was transferred to 5 mL of LB broth with 1% glucose and 30 μg/mL chloramphenicol. The cultures were grown for 20 h at 30° C., 250 rpm, and subcultured at a dilution of approximately 1:50 into 250 mL of Terrific Broth with 30 μg/mL of chloramphenicol, to a final OD₆₀₀ of about 0.05. The cultures were incubated for approximately 195 min at 30° C., 250 rpm, to an OD₆₀₀ of about 0.6, and then induced with the addition of IPTG at a final concentration of 1 mM. The induced cultures were incubated for 20 h at 30° C., 250 rpm. Following this incubation period, the cultures were centrifuged at 4,000 rpm for 10 min. The culture supernatant was discarded, and the pellets were resuspended in 35 mL of 20 mM triethanolamine, pH 7.5. This cell suspension was chilled in an ice bath and lysed using a Microfluidizer cell disruptor (Microfluidics M-110L). The crude lysate was pelleted by centrifugation (11,000 rpm for 60 min at 4° C.), and the supernatant was then filtered through a 0.2 μm PES membrane to further clarify the lysate.

[0324] Method 2: Shake Flask Expression using auto-induction. Selected HTP cultures, grown as described in Example 1, were plated onto LB agar plates with 1% glucose and 30 μg/mL chloramphenicol and grown overnight at 37° C. A single colony from each culture was transferred to 160 mL of Terrific Broth containing 0.075% glucose, 0.03% lactose, and 30 μg/mL of chloramphenicol. The cultures were grown for 20 h at 30° C. and 250 rpm. Following this incubation period, the cultures were centrifuged at 4,000 rpm for 10 min. The culture supernatant was discarded, and the pellets were resuspended in 35 mL of 20 mM triethanolamine, pH 7.5. This cell suspension was chilled in an ice bath and lysed using a Microfluidizer cell disruptor (Microfluidics M-110L). The crude lysate was pelleted by centrifugation (11,000 rpm for 60 min at 4° C.), and the supernatant was then filtered through a 0.2 μm PES membrane to further clarify the lysate.

[0325] Method 3: Shake-Flask Expression using IPTG induction and collection of enzyme as shake flask powder. Selected HTP cultures, grown as described in Example 1, were plated onto LB agar plates with 1% glucose and 30 μg/mL chloramphenicol and grown overnight at 37° C. A single colony from each culture was transferred to 5 mL of LB broth with 1% glucose and 30 μg/mL chloramphenicol. The cultures were grown for 20 h at 30° C., 250 rpm, and subcultured at a dilution of approximately 1:50 into 250 mL of Terrific Broth with 30 μg/mL of chloramphenicol, to a final OD₆₀₀ of about 0.05. The cultures were incubated for approximately 195 min at 30° C., 250 rpm, to an OD₆₀₀ of about 0.6, and then induced with the addition of IPTG at a final concentration of 1 mM. The induced cultures were incubated for 20 h at 30° C., 250 rpm. Following this incubation period, the cultures were centrifuged at 4,000 rpm for 10 min. The culture supernatant was discarded, and the pellets were resuspended in 35 mL of 20 mM triethanolamine, pH 7.5. This cell suspension was chilled in an ice bath and lysed using a Microfluidizer cell disruptor (Microfluidics M-110L). The crude lysate was pelleted by centrifugation (11,000 rpm for 60 min at 4° C.). The supernatant was collected in petri dishes and frozen at −80° C. The water was then removed under reduced pressure with a lyophilizer. The resultant powder was then collected and stored at −20° C.

Purification of from Shake Flask Lysates

[0326] Lysates were supplemented with 1/10^{th} volume of SF elution buffer (50 mM Tris-HCl, 500 mM NaCl, 250 mM imidazole, 0.02% v/v Triton X-100 reagent). Lysates were then purified using an AKTA Pure purification system and a 5 mL HisTrap FF column (GE Healthcare) using the run parameters in Table 7.1. The SF wash buffer comprised 50 mM Tris-HCl, 300 mM NaCl, 20 mM imidazole, 0.02% v/v Triton X-100 reagent.

TABLE 2.1
Purification Parameters

| Parameter | Volume | |
|---|---|---|
| Column volume | 5 | mL |
| Flow rate | 8 | mL/min |
| Pressure limit | 0.3 | mPa |
| Sample volume | 35 | mL |
| Equilibration volume | 5 column volumes (CV) = 25 mL | |
| Wash Unbound volume | 20 CV = 100 mL | |
| Elution | Isocratic (step) | |
| Elution volume | 5 CV = 25 mL | |
| Fraction volume | 1.5 | mL |

| | |
|---|---|
| RE-equilibration volume | 5 CV = 25 mL |

[0327] Elution fractions containing protein were identified by UV absorption (A280) and pooled, then dialyzed overnight in dialysis buffer (20 mM Tris-HCl, pH 7.4, 100 mM KCl, 0.1 mM EDTA, and 50% glycerol) in a 3.5K Slide-A-Lyzer™ dialysis cassette (Thermo Fisher) for buffer exchange. Protein concentrations in the preparations were measured by absorption at 280 nm, and preparations were stored at −20° C.

### Example 3

### High Performance Liquid Chromatography (HPLC) Analysis of Nucleotides

### Sample Preparation for Reaction Analysis Using HPLC:

[0328] Enzyme reactions were quenched by the addition of 4 volume equivalents (5× dilution) or 34 volume equivalents (35× dilution) of 75% v/v MeOH/water. The plate was sealed, mixed well, and centrifuged at 4,000 rpm for 4 min at 4° C. The supernatant was collected and analyzed by HPLC using an Ultimate 3000 system.

TABLE 3.1
Method 1: Achiral HPLC Parameters (Acetonitrile Gradient)

| | |
|---|---|
| Instrument | Ultimate 3000 HPLC System with a PAL autosampler |
| Column | Agilent Zorbax RR StableBond Aq, 150 × 3.0 mm × |
| | 3.5 μm |
| Guard Column | Agilent Zorbax StabeBond Aq, 5.0 × 3.0 mm, 1.8 μm |
| Mobile Phases | A: 50 mM sodium phosphate, 2 mM |
| | tetrabutylammonium bisulfate, pH 7.0 |
| | B: Acetonitrile |
| LC Gradient | 0-3.0 min: 0-−20% B |
| | 3.0-3.5 min: 20% B |
| | 3.5-4.0 min: 20-0% B |
| | 4.0-6.5 min: 0% B |
| Flow rate | 1.5 mL/min |
| Run time | 6.5 min |
| Column | 30° C. |
| temperature | |
| Injection volume | 10 μL |
| UV Detector | 254 nm |

TABLE 3.2
Method 2: Achiral HPLC Parameters (Ion Pairing Gradient)

| | |
|---|---|
| Instrument | Ultimate 3000 HPLC System with a PAL autosampler |
| Column | Agilent Zorbax RR StableBond Aq, 150 × 3.0 mm × |
| | 3.5 μm |
| Guard Column | Agilent Zorbax StabeBond Aq, 5.0 × 3.0 mm, 1.8 μm |
| Mobile Phases | A: 50 mM sodium phosphate, 2 mM |
| | tetrabutylammonium bisulfate, pH 7.0 |
| | B: Acetonitrile |
| | C: Water |
| LC Gradient | 0-4.0 min: 9.0% B, 48.5-16.2% C |
| | 4.0-4.5 min: 9.0% B, 16.2-48.5% C |
| | 4.5-5.5 min: 9.0% B, 48.5% C |
| Flow rate | 1.2 mL/min |
| Run time | 5.5 min |
| Column | 30° C. |
| temperature | |
| Injection volume | 10 μL |
| UV Detector | 254 nm |

TABLE 3.3
Method 3: Achiral HPLC Parameters (Isocratic)

| | |
|---|---|
| Instrument | Ultimate 3000 HPLC System with a PAL autosampler |
| Column | Agilent Zorbax RR StableBond Aq, 150 × 3.0 mm × |
| | 3.5 μm |
| Guard Column | Agilent Zorbax StabeBond Aq, 5.0 × 3.0 mm, 1.8 μm |
| Mobile Phases | A: 50 mM sodium phosphate, 2 mM |
| | tetrabutylammonium bisulfate, pH 7.0 |
| | B: Acetonitrile |
| LC Gradient | 0-4.0 min: 7.0% B |
| Flow rate | 1.2 mL/min |
| Run time | 4.0 min |
| Column | 30° C. |
| temperature | |
| Injection volume | 10 μL |
| UV Detector | 254 nm |

### Sample Preparation and Reaction Analysis Using HPLC

[0329] The nucleoside substrates, along with their respective 5′-monophosphate (NMP), 5′-diphosphate (NDP), and 5′-triphosphate (NTP) products produced using reactions set up as described in Example 4 were analyzed using HPLC. Mobile phases consisted of 50 mM potassium phosphate (pH 7) with 2 mM tetrabutylammonium hydrogen sulfate (Solvent A), acetonitrile (solvent B), and water (Solvent C). Products were detected by UV absorption at 254 nm. In some instances, a Zorbax RR StableBond Aq, 3.0×150 mm, 3.5 μm (Agilent, #863954-314) column was used. In other instances, a Zorbax RR StableBond Aq, 3.0×100 mm, 3.5 μm (Agilent, #861954-314) column was used, while in other instances, a Zorbax RR StableBond Aq, 2.1×50 mm, 3.5 μm (Agilent, #871700-914) column was used.

### Example 4

### Adenosine Kinases and Expression of Adenosine Kinase Enzymes

[0330] Synthetic genes encoding N-terminal 6-histidine tagged versions of three wild-type (WT) adenosine kinase enzymes (AdoK) were cloned into the pCK900 vector system (See e.g., U.S. Pat. No. 9,714,437, which is hereby incorporated by reference in its entirety) and subsequently expressed in an E. coli strain derived from W3110TKO.

[0331] Cells transformed with the adenosine kinase (AdoK) expression constructs were grown at shake-flask scale using IPTG induction, as described in Example 2 (Method 1). The cells were then lysed, purified, and dialyzed into storage buffer (20 mM Tris-HCl, pH 7.4, 100 mM KCl, 0.1 mM EDTA, and 50% glycerol). After overnight dialysis, protein samples were removed, and adenosine kinase enzyme concentrations were measured by absorption at 280 nm using a NanoDrop™ 1000 spectrophotometer. Soluble protein concentrations are summarized in Table 4.1 below.

TABLE 4.1
Soluble Enzyme Production of Adenosine Kinase Variants

| | | FIOP Soluble |
|---|---|---|
| SEQ | | Enzyme Production |
| (ID NO: | Source organism of adenosine | (Relative to |
| nt/aa) | kinase gene sequence | SEQ ID NO: 50) |
| 1/2 | Thermostaphylospora chromogena | ++ |
| 3/4 | Carbonactinospora thermoautotrophica | ++ |
| 5/6 | Xanthomonas campestris | + |

Levels of increased soluble enzyme production were determined relative to the reference polypeptide of SEQ ID NO: 50 and defined as follows: ““+”” 1.00 to 1.19, “+” >1.19

[0332] Engineered adenosine kinases. The wild-type (WT) adenosine kinase (AdoK) enzyme encoded by the genome of Xanthemonas campestris (UniProt ID: A0A3E1LD95) was used to generate engineered adenosine kinase variants, and are described in U.S. provisional application No. 63/589,818, incorporated by reference herein. Briefly, a synthetic gene (SEQ ID NO: 5) encoding an N-terminal 6-histidine tagged version of the WT AdoK (SEQ ID NO: 6) was designed with codon optimization for E. coli expression, synthesized, and subcloned into the E. coli expression vector pCK100900i (See e.g., U.S. Pat. No. 7,629,157 and US Pat. Appln. Publn. 2016/0244787) all of which are hereby incorporated by reference). This plasmid construct was transformed into an E. coli strain derived from W3110. Directed evolution techniques generally known by those skilled in the art, e.g., saturation mutagenesis and recombination of identified beneficial mutations, were used to generate libraries of gene variants from these plasmids. The variants were selected under various assay conditions and selected for, e.g., for increased enzymatic activity, increased activity on different nucleosides, and increased activity on modified nucleosides. These engineered adenosine kinase enzymes have amino acid sequences comprising an even-numbered SEQ ID NO. of SEQ ID NOs: 66-1204.

### Example 5

### Adenylate Kinase and Expression of Adenylate Kinase Enzymes

[0333] Synthetic genes encoding N-terminal 6-histidine tagged versions of wild-type (WT) and evolved adenylate kinase enzymes (AdK) were cloned into the pCK900 vector system (See e.g., U.S. Pat. No. 9,714,437, which is hereby incorporated by reference in its entirety) and subsequently expressed in an E. coli strain derived from W3110TKO.

[0334] Cells transformed with the adenylate kinase expression construct were grown at shake-flask scale, as described in Example 2, (Method 1). Cells were then lysed, purified, and dialyzed into storage buffer (20 mM Tris-HCl, pH 7.4, 100 mM KCl, 0.1 mM EDTA, and 50% glycerol), as described in Example 7. After overnight dialysis, protein samples were removed, and adenylate kinase enzyme concentrations were measured by absorption at 280 nm using a NanoDrop™ 1000 spectrophotometer. Soluble protein concentrations are summarized in Table 2.1Table 5.1 below.

TABLE 5.1
Soluble Enzyme Production of Variants
Relative to SEQ ID NO: 16

| | | FIOP Soluble |
|---|---|---|
| SEQ | | Enzyme Production |
| ID NO: | Source organism of AdyK | (Relative to |
| (nt/aa) | gene sequence | SEQ ID NO: 16) |
| 7/8 | Saccharomyces cerevisiae | +++ |
| 9/10 | Saccharomyces cerevisiae | +++ |
| 11/12 | Thermotoga neapolitana | ++ |
| 13/14 | Escherichia coli | ++ |
| 15/16 | Geobacillus stearothermophilus | + |

Levels of increased soluble enzyme production were determined relative to the reference polypeptide of SEQ ID NO: 16 and defined as follows: “+” 1.00 to 1.10, “++” >1.10, “+++” >2.10

[0335] Engineered adenylate kinases. The wild-type (WT) adenylate kinase (AdyK) enzyme (SEQ ID NO: 12) encoded by the genome of Thermotoga neapolitana (UniProt ID: Q8GGL2) was used to generate engineered adenylate kinase variants, and are described in U.S. provisional application No. 63/589,828, incorporated by reference herein. Briefly, a synthetic gene (SEQ ID NO: 11) encoding an N-terminal 6-histidine tagged version of the WT AdoK was designed with codon optimization for E. coli expression, synthesized, and subcloned into the E. coli expression vector pCK100900i (see, e.g., U.S. Pat. No. 7,629,157 and US Pat. Appln. Publn. 2016/0244787, all of which are hereby incorporated by reference). This plasmid construct was transformed into an E. coli strain derived from W3110. Directed evolution techniques generally known by those skilled in the art, e.g., saturation mutagenesis and recombination of identified beneficial mutations, were used to generate libraries of gene variants from these plasmids. The adenylate kinase variants were assayed under different assay conditions and selected for, e.g., for increased enzymatic activity, increased activity on different nucleoside monophosphates, and increased activity on modified nucleosides. These engineered adenylate kinase enzymes have an amino acid sequence comprising an even-numbered SEQ ID NO. of SEQ ID NOs: 1206-2504.

### Example 6

### Guanylate Kinase and Expression of Guanylate Kinase Enzyme

[0336] Synthetic genes encoding N-terminal 6-histidine tagged versions of a guanylate kinase enzyme (GuK) were cloned into the pCK900 vector system (See e.g., U.S. Pat. No. 9,714,437, which is hereby incorporated by reference in its entirety) and subsequently expressed in an E. coli strain derived from W3110TKO.

[0337] Cells transformed with the guanylate kinase expression construct were grown at shake-flask scale, as described in Example 2, (Method 1). Cells were then lysed, purified, and dialyzed into storage buffer (20 mM Tris-HCl, pH 7.4, 100 mM KCl, 0.1 mM EDTA, and 50% glycerol), as described in Example 2. After overnight dialysis, protein samples were removed, and guanylate kinase enzyme concentrations were measured by absorption at 280 nm using a NanoDrop™ 1000 spectrophotometer. Soluble protein concentrations are summarized in Table 6.1 below.

TABLE 6.1
Soluble Enzyme Production of Guanylate Kinase Variant

| SEQ ID NO: | Source organism of GuK | Soluble Enzyme Concentration |
|---|---|---|
| (nt/aa) | gene sequence | After Purification [mg/mL] |
| 17/18 | Branchiostoma floridae | + |

Levels of increased soluble enzyme production are defined as follows: “+” >12

### Example 7

### Acetate Kinase (AcK) Genes and Plasmid Construction

[0338] A previously engineered acetate kinase enzyme (ACK-101) featuring an N-terminal 6-histidine tag (See e.g., PCT/US22/23039, which is hereby incorporated by reference in its entirety) was produced in shake flask using IPTG induction according to Example 2, Method 1.

[0339] In addition, synthetic genes encoding an N-terminal or C-terminal 6-histidine tagged version of multiple wild-type (WT) acetate kinase (AcK) enzymes were cloned into the pCK110900 vector system (See e.g., U.S. Pat. No. 9,714,437, which is hereby incorporated by reference in its entirety) and subsequently expressed in an E. coli strain derived from W3110.

[0340] Cells transformed with the AcK expression constructs were grown at shake-flask scale using IPTG induction (Example 2, Method 1). Cells were then lysed, clarified, and the soluble fractions were diluted 20-fold into solution containing 1×SDS-PAGE Running Buffer and Reducing Agent (Invitrogen). Samples were run on a 4-12% Bis-Tris SDS-PAGE gel and stained using AcquaStain Protein Gel Stain (Bulldog Bio). An image of the gel was analyzed using GelAnalyzer v19.1 to quantify the intensity of acetate kinase bands by densitometry. Soluble acetate kinase expression levels are summarized in Table 7.1, showing fold improvement in soluble expression level relative to the acetate kinase from Thermotogaceae bacterium (SEQ ID NO: 5128).

TABLE 7.1
Soluble Enzyme Production of Variants
Relative to SEQ ID NO: 5128

| | | FIOP Soluble Enzyme |
|---|---|---|
| SEQ ID NO: | Source organism of | Expression |
| (nt/aa) | AcK gene sequence | (Relative to SEQ ID NO: 5128) |
| 19/20 | Marinitoga sp. 38H-ov | ++ |
| 21/22 | Thermotoga sp. KOL6 | + |
| 23/24 | Thermosipho melaniensis | + |
| 25/26 | Thermotoga sp. RQ7 | + |
| 27/28 | Thermosipho africanus | + |

Levels of increased soluble enzyme production were determined relative to the reference polypeptide of SEQ ID NO: 5128 and defined as follows: “+” 1.12 to 1.22, “+” >1.22.

[0341] Engineered acetate kinases. The wild-type (WT) acetate kinase (AcK) enzyme (SEQ ID NO: 20) encoded by the genome of Marinitoga sp. 38H-ov was used to generate engineered acetate kinase variants, and are described in U.S. provisional application No. 63/589,839, incorporated by reference herein. Libraries of genes were produced from the parent gene using various techniques, e.g. saturation mutagenesis and recombination of previously identified beneficial mutations. The acetate kinase variants were assayed under different assay conditions and selected for, e.g., for increased enzymatic activity, increased activity on different nucleoside diphosphates, and increased activity on modified nucleoside diphosphates. These engineered acetate kinase enzymes have an amino acid sequence of an even-numbered SEQ ID NO. of SEQ ID NOs: 2506-3058.

### Example 8

### Pyruvate Oxidase and Expression of Pyruvate Oxidase Enzyme

[0342] Synthetic genes encoding N-terminal 6-histidine tagged versions of wild-type (WT) pyruvate oxidase (POX) were cloned into the pCK900 vector system (See e.g., U.S. Pat. No. 9,714,437, which is hereby incorporated by reference in its entirety) and subsequently expressed in an E. coli strain derived from W3110TKO.

[0343] Cells transformed with the pyruvate oxidase expression construct were grown at shake-flask scale and the expressed enzymes were collected as lyophilized powders as described in Example 2, (Method 3). The relative expression levels of these enzymes were determined by gel electrophoresis. The relative expression levels as measured by gel electrophoresis are shown in Table 8.1 below.

TABLE 8.1
Enzyme Production of Pyruvate Oxidase Variants

| SEQ ID NO: | Source organism of pyruvate | Relative Enzyme |
|---|---|---|
| (nt/aa) | oxidase gene sequence | expression level |
| 29/30 | Bifidobacterium mongoliense | +++ |
| 31/32 | Alkalibacterium subtropicum | ++ |
| 33/34 | Pisciglobus halotolerans | ++ |
| 35/36 | Jeotgalibaca sp PTS2502 | ++ |
| 37/38 | Vagococcus fluvialis | ++ |
| 39/40 | Candidatus Gracilibacteria bacterium | ++ |
| 41/42 | Bavariicoccus seileri | ++ |
| 43/44 | Bifidobacterium aquikefiri | + |
| 45/46 | Aerococcus urinae | + |
| 47/48 | Aerococcus suis | + |

Levels of increased enzyme production were qualitatively determined and defined as follows: “+” low expression, “++” moderate expression, “+++” high expression

### Example 9

### 3′-O-Kinase (3OK) and Expression of 3′-O-Kinase Enzymes

[0344] Synthetic genes encoding an N-terminal or C-terminal 6-histidine tagged version of multiple wild-type (WT) 3′O-Kinase (3OK) enzymes were cloned into the pCK110900 vector system (See e.g., U.S. Pat. No. 9,714,437, which is hereby incorporated by reference in its entirety) and subsequently expressed in an E. coli strain derived from W3110.

[0345] Cells transformed with the 3OK expression constructs were grown at shake-flask scale using either IPTG induction (SEQ ID NOs: 49 and 51) or auto-induction (SEQ ID NOs: 53-63), as described in Example 2, (Methods 1 and 2 respectively). Cells were then lysed, purified, and dialyzed into storage buffer (20 mM Tris-HCl, pH 7.4, 100 mM KCl, 0.1 mM EDTA, and 50% glycerol). After overnight dialysis, protein samples were removed, and 3OK concentrations were measured by absorption at 280 nm using a NanoDrop™ 1000 spectrophotometer. Soluble protein concentrations are summarized in Table 9.1 below, showing a fold improvement in soluble protein production following shake-flask purification relative to the 3′O-kinase from Thermosynechococcus vestitus (SEQ ID NO: 64).

TABLE 9.1
Soluble Enzyme Production of Variants
Relative to SEQ ID NO: 64

| | | FIOP Soluble |
|---|---|---|
| SEQ | | Enzyme Production |
| ID NO: | Source organism of 3OK | (Relative to |
| (nt/aa) | gene sequence | SEQ ID NO: 64) |
| 49/50 | E coli W3110 | +++ |
| 51/52 | E coli W3110 | +++ |
| 53/54 | Thermomonas hydrothermalis | +++ |
| 55/56 | Geobacillus stearothermophilus | ++ |
| 57/58 | Aquifex aeolicus | ++ |
| 59/60 | Thermotoga sp. RQ7 | ++ |
| 61/62 | Caldibacillus thermoamylovorans | + |
| 63/64 | Thermosynechococcus vestitus | + |

Levels of increased soluble enzyme production were determined relative to the reference polypeptide of SEQ ID NO: 64 and defined as follows: “+” 1.00 to 6.40, “++” >6.40, “+++” >21.60

### Screening of WT 3OK Homologs for Activity on ATP

[0346] The eight 3OK WT homologs were produced in shake flask and purified, as described in Example 2. ACK-101, a previously engineered acetate kinase enzyme featuring an N-terminal 6-histidine tag (See e.g., PCT/US22/23039, which is hereby incorporated by reference in its entirety) was produced in shake flask using IPTG induction according to Example 2, Method 1.

[0347] The 3OK homologs were screened for conversion of ATP to AQP. Reactions were performed at 100 μL scale in Costar 96-well deep plates. Reactions included 1 mM ATP, 10 mM LiKAcPO₄, 1 mM MgCl₂, 0.2 g/L ACK-101, 0.5 g/L 3OK, in 50 mM Tris-HCl (pH 7.5). The reactions were set up by sequential addition of 5× stocks prepared in 50 mM Tris-HCl (pH 7.5) as follows: (i) 20 μL of a 1.0 g/L ACK-101 stock was added; (ii) 20 μL of a 50 mM LiKAcPO₄ stock was added; (iii) 20 μL of a 2.5 g/L stock of 3OK purified enzyme variant was added; (iv) 20 μL of a 5 mM MgCl₂ was added; (v) 20 μL of a 5 mM ATP stock was added. After mixing well and briefly centrifuging to collect the contents in the bottom of each well, the reaction plates were heat-sealed with a peelable aluminum seal and incubated for 18 h (400 rpm, 30° C.).

[0348] Reactions were analyzed by HPLC Method 1, as described in Example 3, and the results for reaction with ATP to produce AQP are shown in their respective columns in Table 9.2.

TABLE 9.2
Conversion of 3OKs with Native ATP

| SEQ ID NO: | Source organism of 3OK | Conversion of |
|---|---|---|
| (nt/aa) | gene sequence | ATP to AQP |
| 49/50 | E coli W3110 | ++ |
| 51/52 | E coli W3110 | ++ |
| 53/54 | Thermomonas hydrothermalis | |
| 55/56 | Geobacillus stearothermophilus | ++ |
| 57/58 | Aquifex aeolicus | + |
| 59/60 | Thermotoga sp. RQ7 | +++ |
| 61/62 | Caldibacillus thermoamylovorans | +++ |

Levels of conversion of ATP to 3′-phosphorylated ATP (AQP) are defined as follows: “+” 0.6-4.5 percent conversion, “++” >4.5 percent conversion, “+++” >41 percent conversion

[0349] Engineered 3OK variants. The wild-type 3′-O-kinase of Geobacillus stearothermophilus with a His-tag (SEQ ID NO: 56) was selected as the parent 3′-O-kinase enzyme for generating engineered 3′-O-kinase variants, as described in U.S. provisional application No. 63/387,908, filed Dec. 16, 2022, and PCT application No. PCT/US2023/076694, filed Oct. 12, 2023, all of which are incorporated by reference herein. Libraries of genes were produced from the parent gene (SEQ ID NO: 55) using various techniques, e.g. saturation mutagenesis and recombination of previously identified beneficial mutations, and the 3′-O-kinase variants assayed in presence of acetate kinase AcK 101 and NDP under different assay conditions and selected for, e.g., for increased enzymatic activity, increased activity in presence of different nucleoside diphosphates, and increased activity on modified nucleoside diphosphates. These engineered 3′-O-kinase enzymes have an amino acid sequence of an even-numbered SEQ ID NO. of SEQ ID NOs: 3060-3370 and 3376-5126.

### Example 10

[0350] POX-Driven Enzymatic Synthesis of ATP from Adenosine without Addition of Acetyl Phosphate

[chemical structure]

[0351] ACK-101 was produced and purified, as described in Example 2 (Method 3). AdoK (SEQ ID NO: 5/6) was produced and purified, as described in Example 3. AdK (SEQ ID NO: 11/12) was produced and purified, as described in Example 2 (Method 3). Pyruvate Oxidase (POX) (SEQ ID NO: 37/38) was produced and purified, as described in Example 2 (Method 3) and tested in a kinase cascade. Use of POX precludes the need for added LiKAcPO₄ in the kinase cascade.

[0352] Reactions were performed in 1.1 mL Axygen deepwell plates. As depicted in Scheme 4, reactions included 0.91 mM adenosine, 0.009 mM ATP, 9.1 mM MgSO₄, 1 g/L ACK-101, 0.4 g/L AdK (SEQ ID NO: 12), 0.46 g/L AdoK (SEQ ID NO: 6), 9.1 mM Tris-HCl (pH 8), 0.45 mM flavin adenine dinucleotide (FAD), 0.45 mM thiamine pyrophosphate (ThPP), 45.5 mM sodium pyruvate, 18 mM K₂HPO₄, and 0.26 g/L POX (SEQ ID NO: 38).

[0353] All reagents were dissolved in water. The reactions were prepared as follows: to a well was added sequentially by micropipette 10 μL 100 mM MgSO₄, 10 μL 100 mM Tris-HCl (pH 8), 10 μL 200 mM K₂HPO₄, 10 μL 10 mM adenosine 5 μL 10 mM FAD, 5 μL 10 mM ThPP, 10 μL 0.1 mM ATP, 10 μL 11.5 mg/mL ACK-101, 10 μL 4.8 mg/mL AdK (SEQ ID NO: 11/12), 10 μL 5.04 mg/mL AdoK (SEQ ID NO: 5/6), 10 μL 0.26 mg/mL POX (SEQ ID NO: 37/38), and 10 μL 500 mM pyruvate. The plate was sealed with a porous aeroseal and shaken at 300 rpm in an incubator set at 30° C. and 85% humidity for 17 hours.

[0354] Subsequently, the reactions were quenched by transferring 60 μL of the reaction mixture into 60 μL methanol. The quenched mixture was filtered with a 0.45 μm low-binding hydrophilic PTFE plate. A 20-μL aliquot of the filtrate was then diluted with 180 μL water. These samples were then analyzed by HPLC Method 2—ion pairing gradient in Example 3, and the results are shown in Table 10.1.

TABLE 10.1
POX-driven synthesis of ATP from adenosine

| POX SEQ ID NO: (nt/aa) | Percent conversion to ATP |
|---|---|
| 37/38 | + |

Levels of conversion of adenosine to ATP are defined as follows: “+” >75 percent conversion

### Example 11

[0355] Enzymatic Synthesis of NQP from Nucleoside

[chemical structure]

[0356] AcK-101 was produced and purified, as described in Example 2 (Method 3). AdoK (SEQ ID NO: 5/6) was produced and purified, as described in Example 2 (Method 1). AdK (SEQ ID NO: 11/12) was produced and purified, as described in Example 2 (Method 1). 3OK enzyme (SEQ ID NO: 59/60) were produced as described in Example 2 (Method 1) and tested in a kinase cascade resulting in the conversion of substrate nucleoside to the respective NQP.

[0357] Reactions were performed in 200 μL BioRad PCR plates. Reactions included 1.11 mM nucleoside, 11.1 mM LiKAcPO₄, 11.1 mM MgSO₄, 1.3 g/L ACK-101, 1.1 mg/mL 3OK (SEQ ID NO: 55/56 or SEQ ID NO: 59/60), 0.5 g/L AdK (SEQ ID NO: 11/12), 2.8 g/L AdoK (SEQ ID NO: 5/6), and 11.1 mM Tris-HCl (pH 8).

[0358] All reagents were dissolved in water. The reactions were prepared as follows: to a well was added sequentially by micropipette 10 μL 100 mM MgSO₄, 10 μL 100 mM Tris-HCl (pH 8), 10 μL 0.1 mM ATP, 10 μL 10 mM nucleoside 10 μL 11.5 mg/mL ACK-101, 10 μL 4.8 mg/mL AdK (SEQ ID NO: 12), 10 μL 25 mg/mL AdoK (SEQ ID NO: 6), 10 μL 10 mg/mL 3OK enzyme (SEQ ID NO: 56 or SEQ ID NO: 60), and then 10 μL 100 mM LiKAcPO₄. The plate was sealed and shaken at 400 rpm in an incubator set at 30° C. for 24 hours.

[0359] Subsequently, the reactions were quenched by removing 30 μL of the reaction mixtures, and four volume equivalents of 75% MeOH/Water (120 μL, 5× dilution) were added, as described in Example 3. Samples were analyzed by HPLC Method 2—ion pairing gradient and the results are shown in Table 11.1.

TABLE 11.1
Reaction of 3OK enzyme variants with ATP

| SEQ ID NO: | | |
|---|---|---|
| (nt/aa) | NTP Substrate | Percent Conversion to NQP |
| 59/60 | ATP | + |

Level of conversion of ATP substrate to AQP are defined as follows: “+” >1.5 percent conversion

### Example 12

### Relative Activities of AdoK for the Conversion of Nucleosides to Nucleotides in Enzyme Cascade

### Shake Flask Characterization of AdoK Variants

[0360] AdoK variants (SEQ ID NOs: 6, 152, 316, 432, 796, and 926) were expressed and purified as described in Example 2.

[0361] To assess activity, each variant was added to a 5 μL reaction at a final concentration of 10 μM. The reaction contained 50 mM Tris (pH 8.0), 50 mM lithium potassium acetyl phosphate, 10 μM ATP, 10 mM MgCl₂, 10 μM SEQ ID NO: 2234 (AdyK), 10 μM SEQ ID NO: 2880 (AcK), and 10 mM nucleoside. Reactions were incubated in a Multitron (Infors) shaker at 30° C. & 400 rpm for 60 min. Reactions were then quenched and diluted 40-fold with 75% methanol and analyzed by HPLC as described in Example 3. Relative activities were normalized to the lowest observed activity by a variant on a given substrate. The results are shown in Table 12.1.

TABLE 12.1

| | Relative Activities of AdoK Variants | | | | | | | | |
|---|---|---|---|---|---|---|---|---|---|
| SEQ ID NO: | on Nucleoside Substrates | | | | | | | | |
| (nt/aa) | A | C | G | U | fA | fC | fG | fU | mA |
| 5/6 | ~ | ~ | ++ | + | + | − | ++ | − | − |
| 151/152 | ~ | ~ | ++ | + | ++ | − | +++ | − | − |
| 315/316 | ~ | ~ | ++ | ~ | ~ | − | ~ | − | − |
| 431/432 | ~ | ~ | ++ | + | ++ | ~ | ++ | ~ | ~ |
| 795/796 | ~ | ~ | ++ | + | ++ | ++ | +++ | ++ | +++ |
| 925/926 | ~ | ~ | ~ | + | ++ | +++ | +++ | +++ | +++ |

Levels of relative activity were measured for the listed variants and defined as follows:
“−” 0.00 to 0.99,
“~” ≥ 1.0,
“+” > 1.06,
“++” > 2.00,
“+++” > 29.90.

### Example 13

### Relative Activities of AdyK for the Conversion of Nucleosides to Nucleotides in Enzyme Cascade

### Shake Flask Characterization of AdyK Variants

[0362] AdyK variants (SEQ ID NOs: 12, 1374, 1710, 1786, 1876, 2076, and 2234) were expressed and purified as described in Example 2.

[0363] To assess activity, each variant was added to a 5 μL reaction at a final concentration of 10 μM. The reaction contained 50 mM Tris (pH 8.0), 50 mM lithium potassium acetyl phosphate, 10 μM ATP, 10 mM MgCl₂, 10 μM SEQ ID NO: 958, 10 μM SEQ ID NO: 2888, and 10 mM nucleoside. Reactions were incubated in a Multitron (Infors) shaker at 30° C. & 400 rpm for 60 min. Reactions were then quenched and diluted 40-fold with 75% methanol and analyzed by HPLC as described in Example 3. Relative activities were normalized to the lowest observed activity by a variant on a given substrate. The results are shown in Table 13.1.

TABLE 13.1

| | Relative Activities of AdyK Variants on | | | | | | | | |
|---|---|---|---|---|---|---|---|---|---|
| SEQ ID NO: | Nucleoside Substrates | | | | | | | | |
| (nt/aa) | A | C | G | U | fA | fC | fG | fU | mA |
| 11/12 | ~ | ~ | ~ | ~ | ~ | − | ~ | − | + |
| 1373/1374 | ~ | ++ | ++ | +++ | ~ | ~ | + | − | + |
| 1709/1710 | ~ | ++ | ++ | +++ | ~ | + | ++ | + | + |
| 1785/1786 | ~ | ++ | ++ | +++ | ~ | + | ++ | ~ | + |
| 1875/1876 | ~ | ++ | ++ | +++ | ~ | + | ++ | + | + |
| 2075/2076 | ~ | ++ | ++ | +++ | ~ | + | +++ | + | + |
| 2233/2234 | ~ | ++ | ++ | +++ | ~ | + | +++ | + | ~ |

Levels of relative activity were measured for the listed variants and defined as follows:
“−” 0.00 to 0.99,
“~” ≥ 1.0,
“+” > 1.10,
“++” > 4.15,
“+++” > 100.00.

### Example 14

### Relative Activities of AcK for the Conversion of Nucleosides to Nucleotides in Enzyme Cascade

### Shake Flask Characterization of AcK Variants

[0364] AcK variants_SEQ ID NOs 20, 2746, and 2888 were expressed and purified as described in Example 2.

[0365] To assess activity, each variant was added to a 5 μL reaction at a final concentration of 10 μM. The reaction contained 50 mM Tris (pH 8.0), 50 mM LiK(acetyl phosphate), 10 μM ATP, 10 mM MgCl₂, 10 μM SEQ ID NO: 958, 10 μM SEQ ID NO: 2234, and 10 mM nucleoside. Reactions were incubated in a Multitron (Infors) shaker at 30° C. & 400 rpm for 60 minutes. Reactions were then quenched and diluted 40-fold with 75% methanol and analyzed by HPLC as described in Example 3. Relative activities were normalized to the lowest observed activity by a variant on a given substrate. The results are shown in Table 14.1.

TABLE 14.1

| | Relative Activities of AK Variants on | | | | | | | | |
|---|---|---|---|---|---|---|---|---|---|
| SEQ ID NO: | Nucleoside Substrates | | | | | | | | |
| (nt/aa) | A | C | G | U | fA | fC | fG | fU | mA |
| 19/20 | ~ | ~ | ~ | ~ | ~ | ~ | ~ | ~ | ~ |
| 2745/2746 | ~ | ~ | + | ~ | ~ | ++ | + | ++ | +++ |
| 2887/2888 | ~ | ~ | + | ~ | ~ | ++ | ++ | ++ | +++ |

Levels of relative activity were measured for the listed variants and defined as follows:
“~” ≥ 1.0,
“+” > 1.10,
“++” > 1.60,
“+++” > 2.00.

### Example 15

### Relative Activities of 3OK for the Conversion of Nucleosides to Nucleotides

[0366] 3′-O-kinases of SEQ ID NOs: 56, 3376, 3500, 4468, 4804, 5082, and 5118 were selected as the parents of 3OK enzymes. Seven shake-flask parent variants were grown, expressed, and purified as described in Example 2, Method 2

[0367] Reactions were performed at 2 μL scale in 96-well format 200 μL BioRad PCR plates. Reactions included substrate, LiKAcPO₄, MgCl₂, AcK101, 25% 3OK solution, in Tris-HCl. The reactions were set up as follows: (i) all reaction components except for 3OK solution were pre-mixed in a single solution, and 1.5 μL of this solution was aliquoted into each well of the 96-well plate; (ii) 0.5 μL 3OK solution was added to each well. After briefly centrifuging to collect the contents in the bottom of each well, the reaction plates were heat-sealed with a peelable aluminum seal and incubated at 30° C. for indicated hours, then held at 4° C. until the reaction was quenched by 6 μL of MeOH. Quenched reaction mixtures were then subject to a TdT coupled assay for detection of NQP products. Evolved TdT (as described in U.S. provisional application No. 63/387,908, filed Oct. 13, 2022, and PCT application No. PCT/US2023/76694, filed Oct. 12, 2023, all of which are incorporated by reference herein) will couple a fluorescently labelled oligo with an NQP donor, producing a distinct product detectable by capillary electrophoresis. The reaction mixture was further diluted to 40 μM by water, then coupled with FAM labeled TdT oligo as described in Table 15.1. The reaction plates were heat-sealed with a peelable aluminum seal and incubated at 30° C. for 1 h and 95° C. for 2 min, then held at 4° C. until the reaction was quenched.

[0368] After quenching and sample preparation as described below, reactions were analyzed.

TABLE 15.1
Reaction, quench, and analytical properties

Reaction conditions: Substrate 10 mM ATP, 10 mM GTP, 10 mM CTP,
10 mM UTP, 1 mM fATP, 1 mM GTP-αS; Reaction buffer - 100 mM
Tris-HCl, pH 8, 50 mM LiKAcPO₄, 10 mM Magnesium chloride, 0.2
g/L AcK101; 3OK - 39 uM; Reaction time - 16 hour.
TdT coupling reaction conditions: Substrate - 10 μM SEQ ID: 5129,
10 μM above reaction mixture; Reaction buffer - 20 mM TEoA, pH 7.8,
50 mM CoCl₂, 0.001 U/μL IPP; Enzyme: 4 μM SEQ ID: 3374
(TdT variant)
Quench conditions: Reactions were quenched, and sample preparation as described below for capillary electrophoresis

[0369] Sample preparation for reaction analysis using CE: Reaction samples were analyzed via capillary electrophoresis using an ABI 3500xl Genetic Analyzer (ThermoFisher). Reactions (2 μL) were quenched by the addition of 38 μL of 10 mM aqueous EDTA. The quenched reaction mixture was further diluted 80000 times by water. 2 μL of this quenched solution was transferred to a new 96-well MicroAmp Optical PCR plate or 384-well MicroAmp Optical PCR plate containing 18 μL Hi-Di™ Formamide (ThermoFisher) which has an appropriate size standard. The ABI3500xl was configured with POP6 polymer, 50 cm capillaries and a 45° C. oven temperature. Pre-run settings were 18 KV for 180 sec. Injection was 5 KV for 5 sec, and the run settings were 19.5 KV for 640 sec. FAM-labeled oligo substrates and products (SEQ ID NOs: 5129-5135) were identified by their sizes relative to the sizing ladder, with the substrate oligo peak at ˜18 or 20 bp and the products appearing in the region of ˜14-18 bp.

[0370] Activities of 3OK variants SEQ IDs: 56, 3376, 3500, 4468, 4804, 5082, and 5118 with NTP substrates were measured as follows: Activity (% conversion) were calculated as 3′PO₄ product peak areas (SEQ ID NOs: 5130-5135) over the total of the unreacted substrate (SEQ ID: 5127, byproduct, and 3′PO₄ product peak areas). The results are shown in Table 15.2.

TABLE 15.2
conversion of nucleotide triphosphates to 3′ phosphorylated products

| | Relative Activities of 3OKinase | | | | | |
|---|---|---|---|---|---|---|
| SEQ ID No: | variants on nucleotide substrates | | | | | |
| (nt/aa) | CTP | UTP | GTP | ATP | GTP-αS | fATP |
| 55/56 | − | − | − | + | − | − |
| 3375/3376 | − | − | + | +++ | − | − |
| 3499/3500 | + | + | ++ | +++ | + | − |
| 4467/4468 | ++ | ++ | +++ | +++ | + | + |
| 4803/4804 | ++ | ++ | +++ | +++ | +++ | + |
| 5081/5082 | +++ | +++ | +++ | ++++ | +++ | + |
| 5117/5118 | +++ | +++ | +++ | ++++ | +++ | ++ |

Levels of relative activity were measured for the listed variants and defined as follows:
“−” 0.00 to 0.99,
“+” ≥ 1.0,
“++” > 10.0,
“+++” > 30.0.
“++++” > 70.0.

[0371] While the invention has been described with reference to the specific embodiments, various changes can be made and equivalents can be substituted to adapt to a particular situation, material, composition of matter, process, process step or steps, thereby achieving benefits of the invention without departing from the scope of what is claimed.

[0372] For all purposes, each and every publication and patent document cited in this disclosure is incorporated herein by reference as if each such publication or document was specifically and individually indicated to be incorporated herein by reference. Citation of publications and patent documents is not intended as an indication that any such document is pertinent prior art, nor does it constitute an admission as to its contents or date.

### Appendix

APPENDIX TABLE A1
Description of modifications in oligonucleotide sequences

| Alias | Description |
|---|---|
| * | there is a phosphorothioate bond between these bases |
| A[n] | poly-2′-deoxyadenosine of length n |
| C[n] | poly-2′-deoxycytidine of length n |
| G[n] | poly-2′-deoxyguanosine of length n |
| T[n] | poly-2′-deoxythymidine of length n |
| 5′-6-FAM-T | 5′-6-carboxyfluorescein-thymidine |
| ddG | 2′,3′-dideoxyguanosine |
| ddA | 2′,3′-dideoxyadenosine |
| ddC | 2′,3′-dideoxycytidine |
| ddT | 2′,3′-dideoxythymidine |
| (2′dF)A | 2′-deoxyfluoroadenosine |
| (2′dF)C | 2′-deoxyfluorocytidine |
| (2′dF)G | 2′-deoxyfluoroguanosine |
| (2′dF)U | 2′-deoxyfluorouridine |
| (2′dF)A-3′P | 2′-deoxyfluoroadenosine with a 3′-PO4 blocking group |
| (2′dF)C-3′P | 2′-deoxyfluorocytidine with a 3′-PO4 blocking group |
| (2′dF)G-3′P | 2′-deoxyfluoroguanosine with a 3′-PO4 blocking group |
| (2′dF)U-3′P | 2′-O-methyluridine with a 3′-PO4 blocking group |
| mA | 2′-O-methyladenosine |
| mC | 2′-O-methylcytidine |
| mG | 2′-O-methylguanosine |
| mU | 2′-O-methyluridine |
| mA-3′P | 2′-O-methyladenosine with a 3′-PO4 blocking group |
| mC-3′P | 2′-O-methylcytidine with a 3′-PO4 blocking group |
| mG-3′P | 2′-O-methylguanosine with a 3′-PO4 blocking group |
| mU-3′P | 2′-O-methyluridine with a 3′-PO4 blocking group |
| rA | adenosine ribonucleotide |
| rC | cytidine ribonucleotide |
| rG | guanosine ribonucleotide |
| rU | uridine ribonucleotide |
| (MOE)A | 2′-O-(2-methoxyethyl)adenosine |
| (MOE)C | 2′-O-(2-methoxyethyl)cytidine |
| (MOE)G | 2′-O-(2-methoxyethyl)guanosine |
| (MOE)U | 2′-O-(2-methoxyethyl)uridine |
| 5′-BiosG-T | thymidine with a 5′-biotin modifition |
| (iFluorT) | thymidine with a 5′-fluorescein modification |
| rA-3′P | adenosine ribonucleotide with a 3′-PO4 blocking group |
| rG-3′P | cytidine ribonucleotide with a 3′-PO4 blocking group |
| rC-3′P | guanosine ribonucleotide with a 3′-PO4 blocking group |
| rU-3′P | uridine ribonucleotide with a 3′-PO4 blocking group |
| dA-3′P | 2′-deoxyadenosine with a 3′-PO4 blocking group |
| dC-3′P | 2′-deoxycytidine with a 3′-PO4 blocking group |
| dG-3′P | 2′-deoxyguanosine with a 3′-PO4 blocking group |
| dT-3′P | 2′-deoxythymidine with a 3′-PO4 blocking group |
| A-3′P | 2′-deoxyadenosine with a 3′-PO4 blocking group |
| C-3′P | 2′-deoxycytidine with a 3′-PO4 blocking group |
| G-3′P | 2′-deoxyguanosine with a 3′-PO4 blocking group |
| T-3′P | 2′-deoxythymidine with a 3′-PO4 blocking group |

APPENDIX TABLE A2
Oligonucleotides included in sequence listing

| Oligonucleotide alias | SEQ ID NO |
|---|---|
| 5′-6-FAM-T17mAmUmC | 5129 |
| 5′-6-FAM-T17mAmUmCrA-3′P | 5130 |
| 5′-6-FAM-T17mAmUmCrG-3′P | 5131 |
| 5′-6-FAM-T17mAmUmCrC-3′P | 5132 |
| 5′-6-FAM-T17mAmUmCrU-3′P | 5133 |
| 5′-6-FAM-T17mAmUmC(2′dF)A-3′P | 5134 |
| 5′-6-FAM-T17mAmUmC*rG-3′P | 5135 |

Oligonucleotide modifications are described in Appendix Table A1.

The application's sequence listing, which the Patent Office published only in electronic form, follows.

SEQUENCE LISTING (5135 sequences)

SEQ ID NO: 1 - DNA, 1023 bp, synthetic construct
  misc_feature 1..1023: note = Variant of adenosine kinase
  source 1..1023: mol_type = other DNA
atgcaccatcatcaccatcacgggggctccggcatgcgtattgcagttaccggtagcattgcgacggatcatctgatgacttttccgggacgcttcagtgaccagttagtggctgaacaactgaaccgcatctcgctctcctttctggtcgatgatttgcagatccgtcgtggcggcgtagccgccaatatttgcttcggtatggggagccttggtctgaacccaatcttagtgggagcggttggcgcagactttgcggattatcgctcttggttggagcgtcacggcgtggactgtgaatcaattcatgtctcggaacttcatcacaccgctcgcttcttgtgcacgacagatgaggagcacaatcagatcgcgagcttctacaccggtgccatggcagaagcgcgcgaaattgaattaggtcctgttgcccaacgtgtaggcggcctcgatctcgtgcttatcagtccgaacgatccggacgcgatgttacgccataccgaagaagctcgtcagcgtgggattccctttgcagccgatccgtcccaacagttggctcgcatggagagcgaacagattcgcgagcttatcgacggtgcggcgtatctctttacgaatgactacgagaaagccttggtcgaacagaagactggctggtctgatgaagaagtgttagatcgtgttcgcgtgcgtgtaaccacattaggtcctaaaggcgcacgcattgatcgtaaaggagaaccgtctctccatgttccaccagctccggaacgtggcaaagcagatccgaccggtgtcggtgacgcgtttcgcgcgggctttcttgcaggcgtggcgtgggggctctcgttggaacgctgtgctcaaatcggcaacttgattgcaacgcacgtgcttgagcgtgttgggtcacaggagtatgagttaagtcgcaccaccttcctcgaacgtttcactgcggcgtacggtgcggctgctgcagatgaagtagcgccgcatttgcgttgccctcacccttaatga

SEQ ID NO: 2 - protein, 339 aa, synthetic construct
  REGION 1..339: note = Variant of adenosine kinase
MHHHHHHGGSGMRIAVTGSIATDHLMTFPGRFSDQLVAEQLNRISLSFLVDDLQIRRGGVAANICFGMGSLGLNPILVGAVGADFADYRSWLERHGVDCESIHVSELHHTARFLCTTDEEHNQIASFYTGAMAEAREIELGPVAQRVGGLDLVLISPNDPDAMLRHTEEARQRGIPFAADPSQQLARMESEQIRELIDGAAYLFTNDYEKALVEQKTGWSDEEVLDRVRVRVTTLGPKGARIDRKGEPSLHVPPAPERGKADPTGVGDAFRAGFLAGVAWGLSLERCAQIGNLIATHVLERVGSQEYELSRTTFLERFTAAYGAAAADEVAPHLRCPHP

SEQ ID NO: 3 - DNA, 1023 bp, synthetic construct
  misc_feature 1..1023: note = Variant of adenosine kinase
  source 1..1023: mol_type = other DNA
atgcaccatcatcaccatcacgggggctccggcatgcgtattgcagttaccggttctattgcgacggatcatctgatgacttttccgggccgcttcgtggaccagttagtccccgataaactgcaccgcgtaagcctgtcgtttttggttgatgggctcgaaatccgtcgtggtggaatcgccgccaacatttgcttcggcatggcttgtcttggcctggagccaatcttagtcggtgcggtgggccatgactttgacgattatcgcagttggctggatcgtcacggtgtgaatacccgcttcgtacatgtgtccgaactgcatcacacagcacgctttttgtgcacgaccgatctggaccacaaccaactggcgagcttctaccctggcgctatgtcagaagcccgtgatattgagttagcaccgatcgcggaacgtgtcggtgggctcgacctggtgatgatttcgccgaatgatccggaagcgatgcttcgccataccgatgaatgtcgcattcgtggctatccatttgccgctgatccgagccagcagctggcacgcttggacggagatgatgttcgtcgtctggttgagggtgcccgctacctgtttacgaacgaatatgaaggccaactcactgagcagaaaaccgggtggtcccatgaagaaatcttagaccgcgtggagattcgtgtcacaacattgggtcctcacggcgtacgcatcgatcgtaagggcgcggaaccgattgttgttccagcgccggaagaagaggtgaaagcagatcccaccggtgtcggagatgctttccgtgccgggtttctggcgggtgtagcgtggggcctgagtctggaacgctcagcccagatcggcaatatgttggcaacgctggcgcttgagaccattggtacgcaagaatacgaattaggacgcggccgtttcctggaacgcctggccaagacctatggtgaggaggctgctgcagacatcgaaccgcatgttcgttgcccttatccttaatga

SEQ ID NO: 4 - protein, 339 aa, synthetic construct
  REGION 1..339: note = Variant of adenosine kinase
MHHHHHHGGSGMRIAVTGSIATDHLMTFPGRFVDQLVPDKLHRVSLSFLVDGLEIRRGGIAANICFGMACLGLEPILVGAVGHDFDDYRSWLDRHGVNTRFVHVSELHHTARFLCTTDLDHNQLASFYPGAMSEARDIELAPIAERVGGLDLVMISPNDPEAMLRHTDECRIRGYPFAADPSQQLARLDGDDVRRLVEGARYLFTNEYEGQLTEQKTGWSHEEILDRVEIRVTTLGPHGVRIDRKGAEPIVVPAPEEEVKADPTGVGDAFRAGFLAGVAWGLSLERSAQIGNMLATLALETIGTQEYELGRGRFLERLAKTYGEEAAADIEPHVRCPYP

SEQ ID NO: 5 - DNA, 969 bp, synthetic construct
  misc_feature 1..969: note = Variant of adenosine kinase
  source 1..969: mol_type = other DNA
atgcaccatcatcaccatcacgggggctccggcatgagtgcactgatttgcggttctttagcgtatgataccatcatggtgtttccggaccagttcaagaaccatattctgcccgataaagttcacatcctcaatgtcagctttcttgtaccacgcatgcgtcgtgaatttggaggctgtgccggcaacattgcgtacaatctgcatctgttgggtggtgctccgatccctatgggaacggtgggccaagatttcggtccgtatcgcgagcacttcgaaactctgggcattgacttatcccgcgtcaagatcatcgatgatctgtttacaccgcaggccttcattaccaccgaccatgataacaaccagattacggcgtttcatccaggcgcaatgatgcgttcgtacgaaaatcacgttcgtgatgtgccgggtgttaccttgggcctcgtaggtcctgatggacgcgagggcatgatccaaaatgccgaagaatttgctgctggtggcattccgttcatttttgacccaggtcaggcaatgccgctgttcaacggccccgaactgcgcgagtttatcgaacaggcggactatgtggtggtcaacgattacgaaagcaatcttcttcaagaacgtactggctggaacgagcaggacattgtttcacgcgtgcaggcgtatatcaccacgcaaggtcctaaaggagccctggtacatacaccggagaagacctacgatattccgccggcacacgaacgtcgtgtcgttgatccaactggttgcggcgacgcgtttcgcgccggcctgatctatggtattcagcataattatgattggttgaccattggccgcatgggaaacttaatgggtgcgctgaaagtggaacaccctggcacgcaaaatcagcgtttcgattttgccgaattcaacgaccagttcaaacaacagtttggctacgcgctctaatga

SEQ ID NO: 6 - protein, 321 aa, synthetic construct
  REGION 1..321: note = Variant of adenosine kinase
MHHHHHHGGSGMSALICGSLAYDTIMVFPDQFKNHILPDKVHILNVSFLVPRMRREFGGCAGNIAYNLHLLGGAPIPMGTVGQDFGPYREHFETLGIDLSRVKIIDDLFTPQAFITTDHDNNQITAFHPGAMMRSYENHVRDVPGVTLGLVGPDGREGMIQNAEEFAAGGIPFIFDPGQAMPLFNGPELREFIEQADYVVVNDYESNLLQERTGWNEQDIVSRVQAYITTQGPKGALVHTPEKTYDIPPAHERRVVDPTGCGDAFRAGLIYGIQHNYDWLTIGRMGNLMGALKVEHPGTQNQRFDFAEFNDQFKQQFGYAL

SEQ ID NO: 7 - DNA, 684 bp, synthetic construct
  misc_feature 1..684: note = Variant of adenylate kinase
  source 1..684: mol_type = other DNA
atgcatcatcatcatcatcatagcagcagcgaaagtattcgtatggtactgattggtccgccgggtgcgggcaaaggcacccagtcgccgaatctgcaggaaagatttcatgcttgtcatctggggaccggcgatatgctgcgcagtcagcatgcaaaaggtacccagctgggtctggaagccaaaaaaattatggatcagggcggcttagtgtcagatgatattatggtgaatatgattaaagatgaactgaccaataatccggcttgcaaaaatggctttattctggatggctttccgcgcaccattccgcaggcgatgaaactggagcagatgctgaaagaacagggtaccccactggaaaaagccgttgaactgaaaattgatgatgagctgctgcctgcacgcattaccggtcgcctgattcatccggcttcaggccgttcttatcataaaatttttaatccgccgaaagaagatatgaaagatgatgtgaccggtgaagcactggttcagcgttcagatgataatgcagatgcactgaaaaaacgtctggccgcctatcataagcagaccgaaccggttgtggatttttataaaaaagctggtatttgggcgggcgttgatgcgagtcagccggtagccaccgtttgggccgatattctgaataaactgggtaaagat

SEQ ID NO: 8 - protein, 228 aa, synthetic construct
  REGION 1..228: note = Variant of adenylate kinase
MHHHHHHSSSESIRMVLIGPPGAGKGTQSPNLQERFHACHLGTGDMLRSQHAKGTQLGLEAKKIMDQGGLVSDDIMVNMIKDELTNNPACKNGFILDGFPRTIPQAMKLEQMLKEQGTPLEKAVELKIDDELLPARITGRLIHPASGRSYHKIFNPPKEDMKDDVTGEALVQRSDDNADALKKRLAAYHKQTEPVVDFYKKAGIWAGVDASQPVATVWADILNKLGKD

SEQ ID NO: 9 - DNA, 684 bp, synthetic construct
  misc_feature 1..684: note = Variant of adenylate kinase
  source 1..684: mol_type = other DNA
atgcatcatcatcatcatcatagcagcagcgaaagtattcgtatggttctgattggtccgccgggtgcgggcaaaggcacccaggcgccgaatctgcaggaaagatttcatgcttgtcatctggggaccggcgatatgctgcgcagtcagattgcaaaaggtacccagctgggtctggaagccaaaaaaattatggatcagggcggcttagtgtcagatgatattatggtgaatatgattaaagatgaactgaccaataatccggcttgcaaaaatggctttattctggatggctttccgcgcaccattccgcaggcggaaaaactggatcagatgctgaaagaacagggtaccccgctggaaaaagccgttgaactgaaaattgatgatgagctgctgcctgcacgcattaccggtcgcctgattcatccggcttcaggccgttcttatcataaaatttttaatccgccgaaagaagatatgaaagatgatgtgaccggtgaagcactggttcagcgttcagatgataatgcagatgcactgaaaaaacgtctggccgcctatcataagcagaccgaaccggttgtggatttttataaaaaaaccggtatttgggcgggcgttgatgcgagtcagccgccggccaccgtttgggccgatattctgaataaactgggtaaagat

SEQ ID NO: 10 - protein, 228 aa, synthetic construct
  REGION 1..228: note = Variant of adenylate kinase
MHHHHHHSSSESIRMVLIGPPGAGKGTQAPNLQERFHACHLGTGDMLRSQIAKGTQLGLEAKKIMDQGGLVSDDIMVNMIKDELTNNPACKNGFILDGFPRTIPQAEKLDQMLKEQGTPLEKAVELKIDDELLPARITGRLIHPASGRSYHKIFNPPKEDMKDDVTGEALVQRSDDNADALKKRLAAYHKQTEPVVDFYKKTGIWAGVDASQPPATVWADILNKLGKD

SEQ ID NO: 11 - DNA, 699 bp, synthetic construct
  misc_feature 1..699: note = Variant of adenylate kinase
  source 1..699: mol_type = other DNA
atgcaccatcatcaccatcacgggggctccggcatgatggcatatctggtgtttttaggtccgccgggcgcgggaaaaggtacctacgccaaacgcattcaggaaaagactggcatcccacatattagcacgggcgatatcttccgtgacatcgtcaagaaagagaacgatgaactgggcaagaagattaaagaaatcatggagaaaggtgaactcgttccagatgaactggtgaatgaggtagtaaaacgccgcctgtcggagaaagactgcgaaaaaggctttattttggatggttatccgcgtaccgttgctcaagcggaattcctggacagttttcttgaatcccagaacaaacagttgacagccgccgtgctgttcgatgtccccgaagatgttgttgtgcaacgtttaacctctcgccgcatctgtccgaaatgcgggcgtatctacaatatgatttcactgccaccaaaagaagacgagctgtgtgacgattgcaaagtcaaattagtacagcgtgatgatgataaggaagaaacggttcgtcaccgctataaagtctaccttgagaagacccagccggtcattgactattatggcaagaaaggtattctcaaacgcgtagatggcacgattggaatcgacaacgttgttgcagaagtcctgaagattattggttggagcgataagtaatga

SEQ ID NO: 12 - protein, 231 aa, synthetic construct
  REGION 1..231: note = Variant of adenylate kinase
MHHHHHHGGSGMMAYLVFLGPPGAGKGTYAKRIQEKTGIPHISTGDIFRDIVKKENDELGKKIKEIMEKGELVPDELVNEVVKRRLSEKDCEKGFILDGYPRTVAQAEFLDSFLESQNKQLTAAVLFDVPEDVVVQRLTSRRICPKCGRIYNMISLPPKEDELCDDCKVKLVQRDDDKEETVRHRYKVYLEKTQPVIDYYGKKGILKRVDGTIGIDNVVAEVLKIIGWSDK

SEQ ID NO: 13 - DNA, 681 bp, synthetic construct
  misc_feature 1..681: note = Variant of adenylate kinase
  source 1..681: mol_type = other DNA
atgcaccatcatcaccatcacgggggctccggcatgcgcattattttattaggtgctcctggcgcaggaaaaggaacccaggcgcagtttatcatggaaaaatatggtatcccgcaaattagcacgggcgatatgttgcgtgccgccgtgaaaagtggttcggagcttggcaagcaggcgaaagacatcatggatgcgggtaaactcgttactgatgaactcgtcattgcgttggtgaaggaacgcatcgctcaagaagactgtcgtaatggcttccttcttgatggctttccacgtaccattccgcaggcagacgccatgaaagaggcagggatcaatgtagattacgtcttggaattcgatgttccggacgagctcattgtggatcgcatcgtaggtcgccgtgttcatgctccctctgggcgcgtgtatcacgtcaagtttaacccgccgaaagtggaaggcaaagacgatgttacaggcgaggaattaaccacccgtaaagatgatcaggaagaaacggtgcgcaaacgtttggtcgagtaccatcaaatgactgcaccactcattgggtattattccaaagaagcggaagccggcaatacgaagtacgcgaaagttgacggtaccaaacctgtagccgaagtgcgcgcggaccttgagaagatcttaggttaatga

SEQ ID NO: 14 - protein, 225 aa, synthetic construct
  REGION 1..225: note = Variant of adenylate kinase
MHHHHHHGGSGMRIILLGAPGAGKGTQAQFIMEKYGIPQISTGDMLRAAVKSGSELGKQAKDIMDAGKLVTDELVIALVKERIAQEDCRNGFLLDGFPRTIPQADAMKEAGINVDYVLEFDVPDELIVDRIVGRRVHAPSGRVYHVKFNPPKVEGKDDVTGEELTTRKDDQEETVRKRLVEYHQMTAPLIGYYSKEAEAGNTKYAKVDGTKPVAEVRADLEKILG

SEQ ID NO: 15 - DNA, 690 bp, synthetic construct
  misc_feature 1..690: note = Variant of adenylate kinase
  source 1..690: mol_type = other DNA
atgcaccatcatcaccatcacgggggctccggcatgaatctggttttaatgggtttaccgggcgcgggaaaaggtacccaggccgaaaagattgtggcagcttatggcatcccacatattagcacgggcgatatgtttcgtgcggcgatgaaagagggtactccgctgggattgcaagccaaacagtacatggatcgcggtgacctggtacctgatgaagtgaccatcggcattgtccgcgaacgtctctcgaaagatgactgtcaaaacggcttccttcttgacggttttccgcgtacagttgcccaagcagaagctttggagaccatgctcgcggatatcggccgcaaactcgactatgtgatccacattgatgtccgccaggatgtgttgatggaacgtttaacgggtcgccgcatctgtcgtaactgcggcgcaacctaccatcttgttttccacccacccgctaaaccgggcgtatgtgataagtgcggaggtgagttgtatcagcgtgcggacgacaatgaagccacggttgcaaaccgcctcgaagtcaatatgaaacaaatgaaaccgcttgtcgacttctacgaacagaagggctatttgcgcaacattaatggtgagcaggatatggagaaagtgtttgcagatattcgtgaattattaggtggtttagcccgttaatga

SEQ ID NO: 16 - protein, 228 aa, synthetic construct
  REGION 1..228: note = Variant of adenylate kinase
MHHHHHHGGSGMNLVLMGLPGAGKGTQAEKIVAAYGIPHISTGDMFRAAMKEGTPLGLQAKQYMDRGDLVPDEVTIGIVRERLSKDDCQNGFLLDGFPRTVAQAEALETMLADIGRKLDYVIHIDVRQDVLMERLTGRRICRNCGATYHLVFHPPAKPGVCDKCGGELYQRADDNEATVANRLEVNMKQMKPLVDFYEQKGYLRNINGEQDMEKVFADIRELLGGLAR

SEQ ID NO: 17 - DNA, 687 bp, synthetic construct
  misc_feature 1..687: note = Variant of guanylate kinase
  source 1..687: mol_type = other DNA
atgcaccatcaccatcaccatgctctgccaactccagtcgttatttgtggtccatctggttctggtaagacaaccctgtataacaaactcctgaaagagttcccgggtgtcttccagctggttgcatctcatactacccgtcaaccacgtccaggtgaagagaacggtcgtgagttccactttatcaaccgtgaccagttccaggagaacatcaaacagggtgacttcctggaatgggcggagcattctggtaacctgtacggtacctctaagaaagcgctggaggaagttcaggcgaataacgttatcccgatcctggatatcgacacccagggtgttcgtaccgtgaagaaagcgtctctggaagcggtttacatctttatcaagccaccgtctatcaccgttctggaggaacgtctgcgttctcgtggtaccgaaaccgaggaagcgctgcagaaacgtctgtctgcagctccaaacgaactggaatacggtctgaaaccgggtaacttccagcatataatcaccaacgatgacctggacgttgcgtacgagaaactgaaaggtatcctgatcgattctcagatgccgctggctggtgcgaccggttccagttcctctgtggttaactctttcctggacaaaccggcggcttctgcgaccactgttaactcatcctctcaggac

SEQ ID NO: 18 - protein, 229 aa, synthetic construct
  REGION 1..229: note = Variant of guanylate kinase
MHHHHHHALPTPVVICGPSGSGKTTLYNKLLKEFPGVFQLVASHTTRQPRPGEENGREFHFINRDQFQENIKQGDFLEWAEHSGNLYGTSKKALEEVQANNVIPILDIDTQGVRTVKKASLEAVYIFIKPPSITVLEERLRSRGTETEEALQKRLSAAPNELEYGLKPGNFQHIITNDDLDVAYEKLKGILIDSQMPLAGATGSSSSVVNSFLDKPAASATTVNSSSQD

SEQ ID NO: 19 - DNA, 1257 bp, synthetic construct
  misc_feature 1..1257: note = Variant of acetate kinase
  source 1..1257: mol_type = other DNA
atgcaccatcatcatcatcatggcggtagcggcatgaaagttctggtgattaattctggtagctcctccatcaaatatcagctcctcgatatgaccaacgaaaaggtattagcgaaaggcttggtcgagcgcattggcatcgacggttcgcgtatcgtgcataaagttaacggcgaaaaacacgtgctggaacatgagattaagaatcacgaaattggacttaaattggtcctggatcttcttacggacgaaaaatacggtgtgttgaaggatctcaaagaaatcgatgcagttgggcatcgcgtagtacatggcggcgagcgttttgccagtagcgtgaagattactgacgaagtcttaaagaccatcgagacgttgtcgttcttagctccgttacacaatccagcgaacattatgggtatcaagagcagcatgaaattattaccgggtgtgcctcaagttgccgtctttgatacagcgttccaccagaagatgccggagaaagcctatttgtacgcaatcccctatgagtactacgagaaatataaaattcgccgctatgggtttcatggaacctcacatcgttatgtgagtaaacgtgctgcggaaattatgggcaaaccgtacgatcagctcaagatcattaccgttcacgtgggtaacggcgcatcagttgcggcggtgaagaatggcgtatctgttgacacttccatgggtttcacaccacttgaaggtcttgtcatgggcacgcgcagcggcgatattgatccggccatcgtggaatttcttgagaaagaagaaggattgtcggccaaagaagtcgtcaacatcctcaacaagaaatctggtgtgtatgggctcaccaaaggctttagtagtgacatgcgtgacattgaagataatgctattgaaggtgatcctgtatgccgccttgcattcgatgtgtacgaatatcgtatcgcgaaatatattggcgcatacgctgcggccatgaacggtgttgacgcgatcgtctttaccgcaggagttggcgaaaatagcccgattatgcgcgaagaaattattgagaactacttgggctacttagggatcaagatcgataaagaagccaatgacttcaaaggtgaggagaagatcatttcaacgcccgattccaaagtgattgcgatggtagttccgaccaacgaggagctcatgatcgccaaagacacgaaagaaatcattgagaaagggttggacgagcttaagatctaatga

SEQ ID NO: 20 - protein, 417 aa, synthetic construct
  REGION 1..417: note = Variant of acetate kinase
MHHHHHHGGSGMKVLVINSGSSSIKYQLLDMTNEKVLAKGLVERIGIDGSRIVHKVNGEKHVLEHEIKNHEIGLKLVLDLLTDEKYGVLKDLKEIDAVGHRVVHGGERFASSVKITDEVLKTIETLSFLAPLHNPANIMGIKSSMKLLPGVPQVAVFDTAFHQKMPEKAYLYAIPYEYYEKYKIRRYGFHGTSHRYVSKRAAEIMGKPYDQLKIITVHVGNGASVAAVKNGVSVDTSMGFTPLEGLVMGTRSGDIDPAIVEFLEKEEGLSAKEVVNILNKKSGVYGLTKGFSSDMRDIEDNAIEGDPVCRLAFDVYEYRIAKYIGAYAAAMNGVDAIVFTAGVGENSPIMREEIIENYLGYLGIKIDKEANDFKGEEKIISTPDSKVIAMVVPTNEELMIAKDTKEIIEKGLDELKI

SEQ ID NO: 21 - DNA, 1248 bp, synthetic construct
  misc_feature 1..1248: note = Variant of acetate kinase
  source 1..1248: mol_type = other DNA
atgcaccatcatcatcatcatggcggtagcggcatgaaagttctggtgattaattctggtagctcctccatcaaatatcagctcatcgaaatggagaaggaagaagtcctgtgcaaaggcattgcggagcgcattggaatcgaaggctcgcgtttagtacatcgtgtgaacgaagagaaacacattattgaagaaaccttgccggatcatgaacgcgccctgaaactggttttagacacgcttgtgaacgagaaactcggtgtcatcaaggatctgaaagaaatcgatgcagttggccaccgcgtagtacatggtggtgaaaagtttaaagaaagtgtgctgattgacgacgaggtgctgaaagcgatcgaagaagtggcgcctctggcaccgcttcacaatcctgctaacttgatgggcattaaagcggcgatgaaattattacccggcgttccgaatgttgccgtgttcgatactgcctttcatcaaaccattccgcagaaggcttacctgtatgcgatcccatacgagtattatgagaagtacaagatccgtcgttatgggttccatggtacatcacaccgctacgtaagcaaacgcgcagcagaaattctgggcaagaaaccggaagaactgaagatcatcacctgtcatattggaaacggtgcttcgattgcggcggtgaaatatgggaaatgcgttgatacgagcatgggctttacccctttggaagggctggtgatgggtactcgtagtggcgatttggacccggccattccgttcttcattatggagaaagaaggcatctctccacaggagatgtacgatatcctgaataagaaaagcggtgtttatgggctctcgaaaggctttagctcagatatgcgcgacattgaagaagccgcactgaaaggtgatgagtggtgtaaactggtgcttgacatttaccactatcgtgttgcgaaatatatcggagcttacgcggcggtaatgaacggtgtggatgccatcgtgtttacggctggagtaggcgaaaactctccgattacccgcgaggacgtttgctcctatctggaatacttgggcgtgaaactggatacaaagaagaatgaagaaaccattcgtgggaaagaaggcatcattagtagtagcgattcgaaagtgaaagttctggtagttcccacgaacgaagagctcatgattgcacgcgacaccaaagagatcgtggagaaattagtacgttaatga

SEQ ID NO: 22 - protein, 414 aa, synthetic construct
  REGION 1..414: note = Variant of acetate kinase
MHHHHHHGGSGMKVLVINSGSSSIKYQLIEMEKEEVLCKGIAERIGIEGSRLVHRVNEEKHIIEETLPDHERALKLVLDTLVNEKLGVIKDLKEIDAVGHRVVHGGEKFKESVLIDDEVLKAIEEVAPLAPLHNPANLMGIKAAMKLLPGVPNVAVFDTAFHQTIPQKAYLYAIPYEYYEKYKIRRYGFHGTSHRYVSKRAAEILGKKPEELKIITCHIGNGASIAAVKYGKCVDTSMGFTPLEGLVMGTRSGDLDPAIPFFIMEKEGISPQEMYDILNKKSGVYGLSKGFSSDMRDIEEAALKGDEWCKLVLDIYHYRVAKYIGAYAAVMNGVDAIVFTAGVGENSPITREDVCSYLEYLGVKLDTKKNEETIRGKEGIISSSDSKVKVLVVPTNEELMIARDTKEIVEKLVR

SEQ ID NO: 23 - DNA, 1257 bp, synthetic construct
  misc_feature 1..1257: note = Variant of acetate kinase
  source 1..1257: mol_type = other DNA
atgcaccatcatcatcatcatggcggtagcggcatgattgttctggtagtaaatagtggttcgagctccatcaaatatcagttgctcgatatggacaacgaaaaagtcttatgcaaaggccttgcggagcgcattggtatcccgggcagccgtatcgtccataagaaggccggcgaaaaatttattgttgagaaaccaatgcctaaccacgatgaagcactgaagattgttctggaagtcctgaaagatgagaaactgggagctatcaaggacttcaaagaaattgatgcggttggtcatcgtgtagtacacggcggcgaaaaattttctggttcagtcttaatcgacgacgaagttattaaagccatcgaggaattcagttacttggcaccgctgcataatccgccgaacctgatggggattaaagcgatcatgaaattattaccaggtgtccccaatattggcgtctttgataccgctttccacgccaagatgccggagaaagcgtatctgtacgcgatcccgtatgaattctacgagaagtataagattcgccgctacgggtttcatggaacgagccaccgttacgtttctaaacgcactgccgaaattcttggcctcgattataacaaagcgaagatcgttaccgtacatctggggaatggtgcatcgattgcagccgttaagaacggcaaaagcgtagatacatccatgggatttacccctttggaagggttagtcatgggtacgcgttcaggtgatcttgacccctccatcgtcacctttctcatggagaaagaaggtttgtcggctgaggaggtctatactattctcaacaagaaaagcggtgttcttgggttgagtaagaatttcagctctgatatgcgcgacatcgaagataaagcgctcgaaaacgatccgctctgtcgtcttgttttggacatctatgaataccgcattgccaaatatatcggagcatatgctgcggcgatgaacggtgtagatgccatttcatttacggcaggtgtcggagaaaattcgccgattacccgtgaagaaatctgcgtaaactacctttccttcttggggatcaagattgacaaagagaagaacaacgttaaaggtgaagaacgcattatttctacaccagatagcaaagtcaaggtacttgttgttccgaccaatgaagaattaatgattgcgcgtgatacgaaagaaatcatcgagaaagggctcaaacaattggaatactaatga

SEQ ID NO: 24 - protein, 417 aa, synthetic construct
  REGION 1..417: note = Variant of acetate kinase
MHHHHHHGGSGMIVLVVNSGSSSIKYQLLDMDNEKVLCKGLAERIGIPGSRIVHKKAGEKFIVEKPMPNHDEALKIVLEVLKDEKLGAIKDFKEIDAVGHRVVHGGEKFSGSVLIDDEVIKAIEEFSYLAPLHNPPNLMGIKAIMKLLPGVPNIGVFDTAFHAKMPEKAYLYAIPYEFYEKYKIRRYGFHGTSHRYVSKRTAEILGLDYNKAKIVTVHLGNGASIAAVKNGKSVDTSMGFTPLEGLVMGTRSGDLDPSIVTFLMEKEGLSAEEVYTILNKKSGVLGLSKNFSSDMRDIEDKALENDPLCRLVLDIYEYRIAKYIGAYAAAMNGVDAISFTAGVGENSPITREEICVNYLSFLGIKIDKEKNNVKGEERIISTPDSKVKVLVVPTNEELMIARDTKEIIEKGLKQLEY

SEQ ID NO: 25 - DNA, 1251 bp, synthetic construct
  misc_feature 1..1251: note = Variant of acetate kinase
  source 1..1251: mol_type = other DNA
atgcaccatcatcatcatcatggcggtagcggcatgaaagttctggtgattaattctggtagctcctccatcaaatatcagctcatcgaaatggaagatgagcgcgtcctgtgcaagggcattgcggaacgtattggattagaaggcagtcgcttggtacatcgtgttaacgaggagaaacacgtgatcgaaaaagacttgccggatcatgaagaagccctgaaactggtgcttaacaccctggtcgatgaaaaactgggtgtgatcaaggacctcaaagagattgatgcagttggccaccgcgtcgtacatggtggtgagaagtttaaagaatcggtgttcgtgaatgaggaagtcattaaggctatcgaagaagttagtccattagccccgcttcataaccctgcgaatctgatgggcattaaagcagcgatgaaattattacccggcgttccgaacgtagccgtctttgatacggcattccaccaaactattccacagaaagcgtacctctatgctatcccgtacgaatattatgagaaataccgtgtgcgccgctacgggtttcatggaaccagccaccgttatgtgtcaaaacgtgcggcggaaatcttggggaagaaacttgaagagctcaagatcatcacatgtcatattggtaatggtgctagcattgccgccgttaaacacggcaaatgcattgacacctcgatgggctttacgccgttggaagggttagtgatgggtacccgctctggcgatcttgacccggcgattcccttcttcatcatggagaaagaaggcatctcacctcaggaaatgtatgatatcctcaacaagaagagcggtgtatacggcttgtcgaaaggatttagcagcgatatgcgtgacattgaagaagccgcacttaaaggtgatgagtggtgtaaactcattttggacatctatcattaccgcattgcgaaatatattggcgcatatgctgctgcgatgaatggtgtcgatgccatcgtgtttactgcaggcgttggagaaaactctccgattacgcgtggcgatgtgtgctcctaccttgaattcctcggtgtgaagttggacaaacaaaagaacgaagaaaccattcgcgggaaagaggggatcatcagtacaccagattcgcgtgtcaaggtgttagttgtaccgaccaatgaggagcttatgattgcgcgcgacacgaaagaaattgttgaacgtttgggcaaacgttaatga

SEQ ID NO: 26 - protein, 415 aa, synthetic construct
  REGION 1..415: note = Variant of acetate kinase
MHHHHHHGGSGMKVLVINSGSSSIKYQLIEMEDERVLCKGIAERIGLEGSRLVHRVNEEKHVIEKDLPDHEEALKLVLNTLVDEKLGVIKDLKEIDAVGHRVVHGGEKFKESVFVNEEVIKAIEEVSPLAPLHNPANLMGIKAAMKLLPGVPNVAVFDTAFHQTIPQKAYLYAIPYEYYEKYRVRRYGFHGTSHRYVSKRAAEILGKKLEELKIITCHIGNGASIAAVKHGKCIDTSMGFTPLEGLVMGTRSGDLDPAIPFFIMEKEGISPQEMYDILNKKSGVYGLSKGFSSDMRDIEEAALKGDEWCKLILDIYHYRIAKYIGAYAAAMNGVDAIVFTAGVGENSPITRGDVCSYLEFLGVKLDKQKNEETIRGKEGIISTPDSRVKVLVVPTNEELMIARDTKEIVERLGKR

SEQ ID NO: 27 - DNA, 1257 bp, synthetic construct
  misc_feature 1..1257: note = Variant of acetate kinase
  source 1..1257: mol_type = other DNA
atgcaccatcatcatcatcatggcggtagcggcatgattgttctggtagtaaatagtggttcgagctccatcaaatatcagttgctcgatatggacaacgaaaaagtcttatgcaaaggccttgcggagcgcattggtatcccgggcagccgtatcgtccataagaaggatggcgaaaaatttgttattgaacacccaatggccaaccatgatgaagcactgcaactggttttgcagaccctgaaagacgagaagatgggagcgatcaaagacttcaaagaaattgatgctgtaggtcaccgcgtcgtccatggcggcgagaaattttctggctcagttctgattgatgatgaagttatcaatgccattgaagaattcagttacttagcaccgcttcacaaccctcctaatctgatgggtatcaaagcgattatgaaactgttacccggagtaccaaacgtcgccgtatttgacacggctttccatgcgaagatgcccaagaaagcctatctctacgcgattccatatgagtactacgagaagtataagatccgtcgttatggttttcatggtacttctcaccgctatgttagccgtcgtaccgcagaaattttgggcctcgattacaacaaatcgaagatcatcacagtccatcttggaaatggtgcttccattgcagccgttatgaacggcaaaagcgtagacacgtcaatgggctttacccctttggaaggtttagttatgggtactcgctctggcgatttagatcccagcatcgtcaccttcctcattgagaaagaaggactttcgccagaagaagtctatacgatcctcaataagaaaagtggcgttttgggtctcacctccaactttagctcagatatgcgcgacattgaagataaagcgcttgagaacgaccctttgtgtcgcctcgtccttgatatttacgaatatcgtatcgcgaaatatattggcgcatatgtagctgccatgaacggtgttgatgcgattagcttcacagcaggcgtaggagaaaattctccaattacccgcgaagaaatctgcgagaattacttgtcctaccttggcatcaagatcgacaaagagaagaacaacgtcaaaggtgaagagcgtattatttctactcccgatagcaaggttaaggttctcattgttccaacgaatgaagagttgatgattgcccgcgacaccaaagaaatcatcgagaaaggcatcaagaaattagaatactaatga

SEQ ID NO: 28 - protein, 417 aa, synthetic construct
  REGION 1..417: note = Variant of acetate kinase
MHHHHHHGGSGMIVLVVNSGSSSIKYQLLDMDNEKVLCKGLAERIGIPGSRIVHKKDGEKFVIEHPMANHDEALQLVLQTLKDEKMGAIKDFKEIDAVGHRVVHGGEKFSGSVLIDDEVINAIEEFSYLAPLHNPPNLMGIKAIMKLLPGVPNVAVFDTAFHAKMPKKAYLYAIPYEYYEKYKIRRYGFHGTSHRYVSRRTAEILGLDYNKSKIITVHLGNGASIAAVMNGKSVDTSMGFTPLEGLVMGTRSGDLDPSIVTFLIEKEGLSPEEVYTILNKKSGVLGLTSNFSSDMRDIEDKALENDPLCRLVLDIYEYRIAKYIGAYVAAMNGVDAISFTAGVGENSPITREEICENYLSYLGIKIDKEKNNVKGEERIISTPDSKVKVLIVPTNEELMIARDTKEIIEKGIKKLEY

SEQ ID NO: 29 - DNA, 1884 bp, synthetic construct
  misc_feature 1..1884: note = Variant of pyruvate oxidase
  source 1..1884: mol_type = other DNA
atgcaccatcatcatcatcatggcggtagcggcatggcgaaaaatgtgattcagtttggtttcgatgctgcaaccgccaaccaacataaagaaggcgcgatcaaggcgggtgttgccacggtcaaagtactggaaagctggggcgtgaagcacatttttggtattccgggaggatcgatcaactccttaatggacgcactgtatgttgagcgcgataatatcgactacgtgcaggtccgtcatgaagaagtcggcgcgttggccgctagtatgcacgcgaaatatactggccatattggtgtttgcttcggctcagcaggtccaggtggcacccatacactgcagggcctttacgatgctcgtgaggagcacgtaccgctgctcgcactgatcgggcaatttggaacggcgggcttgaactgggataccttccaggaaatgaacgaaaatcccatttatgctgatgtcgcaatctacaatcgccaggtttctaccgctgcccaaatgcctcatgtgattgatgaagcgattcgccaggcgtatgccaagaacggtgtggctgtcgtacaaatcccggttgatttaggttgggtggacattccggaagatggctggtatagcgcagcaaatgcaagccgtcgttacccaaacccgactctggatgagcgcgacatcgatgccgccgtggaaattctgaaccacgctgaacgccctgtcgtctttgcaggcattggtacgcgtggcgagcatcagatcgttatggacctgtgtcgcaagatcaaagctccgcttgccaataccggaatttcgtttgataacttcccgtccgactttgaagccctcctgggctctcccaatcgtgtgagtacaaaaccaagcgtggaatgcttcccggaggcagataccgttctgtttgtcggtaacaactatcctttcgctgaagtgtcaaatctgtttaagaatgttcgccactttatccagatcgatattgatccgtccaaattgggtaaacgtcatcgtacggacgtagccattttaggcgatgcaggcgatgctcttcgcgccatccacgccaaagtagacgagaaaccaggtactggatggtggcgtgcaaacctggaaaacgttgcaaattggcgcgaatacgtgaccaaactggaaaagaaacgcgaaggcgatctccagctgtatcaagtgtacgacgctattaacgccgtagcagaggaagacgccattttctcggtcgatgtgggtgatgttacgcagaccagcatccgtcatttgcatatgaatccgaaacaaatgtggcgcaccagtagtctgtttgctacaatgggcgtcggtattccgggcgcaatctctgccaaattagattttcccgatcgtcaggtgtggaacttagctggtgacggcggattcaacatgacgatgcaggatttggcaactgccgtgcagtatgatctcccaacccttcacgttgtcttcaacaaccaacaatacggttttatcaaagacgaacaggaggacacgaatcttggctatttgggtgtgcatttcatggacattgactatgccaaattagctgaagcaatgggagcagtaggccacaccgtgaatacgattgatgaagcccatgctgtcttagcacaagccgctcaggaggtacgcgatggcaaagttgtggttgtcaatgcccgtattaccaacgaacgtccgttgcctgcagaaatgctcgaacttgaaccgcgcctcttctcagctgagcgcatcgaggcctttaagaaacgttacgaagcagaggatttgaaaccgctcagctattttttggagaaagaaggtttagatgcccgcattgaagtggttgaacagggcggcttctaatga

SEQ ID NO: 30 - protein, 626 aa, synthetic construct
  REGION 1..626: note = Variant of pyruvate oxidase
MHHHHHHGGSGMAKNVIQFGFDAATANQHKEGAIKAGVATVKVLESWGVKHIFGIPGGSINSLMDALYVERDNIDYVQVRHEEVGALAASMHAKYTGHIGVCFGSAGPGGTHTLQGLYDAREEHVPLLALIGQFGTAGLNWDTFQEMNENPIYADVAIYNRQVSTAAQMPHVIDEAIRQAYAKNGVAVVQIPVDLGWVDIPEDGWYSAANASRRYPNPTLDERDIDAAVEILNHAERPVVFAGIGTRGEHQIVMDLCRKIKAPLANTGISFDNFPSDFEALLGSPNRVSTKPSVECFPEADTVLFVGNNYPFAEVSNLFKNVRHFIQIDIDPSKLGKRHRTDVAILGDAGDALRAIHAKVDEKPGTGWWRANLENVANWREYVTKLEKKREGDLQLYQVYDAINAVAEEDAIFSVDVGDVTQTSIRHLHMNPKQMWRTSSLFATMGVGIPGAISAKLDFPDRQVWNLAGDGGFNMTMQDLATAVQYDLPTLHVVFNNQQYGFIKDEQEDTNLGYLGVHFMDIDYAKLAEAMGAVGHTVNTIDEAHAVLAQAAQEVRDGKVVVVNARITNERPLPAEMLELEPRLFSAERIEAFKKRYEAEDLKPLSYFLEKEGLDARIEVVEQGGF

SEQ ID NO: 31 - DNA, 1830 bp, synthetic construct
  misc_feature 1..1830: note = Variant of pyruvate oxidase
  source 1..1830: mol_type = other DNA
atgcaccatcatcatcatcatggcggtagcggcatgaccgaagaaaagaaaactattgaagcgggcgtggcagccgtcaaagttatggagaaatggggtgtgaagaacatctatggactgccggctggcacgctcaatagctggatggatgcgctgaagaaagaggaggaaaacatccgctttattcaggtacgtcatgaagaagttggtgccttagcagcgagtatgcacgccaaattcaccggcgaaattggtgtcgctcttggctcggcaggtccaggagctacacatctgatgaatggtctgtacgacgcccgcgaagatggagtgccggttttggcaatcatcggccaacgtgccgagaaagagattaacatggacgcttttcaggaaatgaatcacaaccctctgttcgcagatgtaaccgtgtataatcgccgtgtcgcttacccggaacagttgcccaagattattgatgaagccatccgtacggcagttgcccgcaaaggcattgctgccgtagaagttccggtggactatggttgggtcgagatcgatgatgattcttggtacgcctccgcagacagccataaacaaatgccacacccggtgctgaacgagaaagaaattgatgaggccgtgaagatccttgagaaagcagaacgccctgtgatctatgctggcattggcacccgtggttcaggcgaagacgttatggatttaagccgcaaactgaaagctccggtcgcaatcacgggtattaactacgacacttttccgcatgatttcgaagcctttctgggtagtgcacatcgtgtgtcgcgcaaaccagctgtcgaagcctttgaagaagccgatgtagtactgttcgcaggctccaattatccgttttctgaagttaccgccattttcgacaacatcgacaaatttatccagattgatattgatcctcacaaactcggaaagcgtcataagacagatgtggctattttaggtgatgcaggcgaagccatccgcatgatgaccgacaaactgagcgagaaagaagaaacggcatggtatcgtgccaatctcaagaacattgagaactggaagacctacactgataaactggagcagaagaaagaaggcgaactgcaattctaccaggcttatcacgtgatcaatcaggttgcagacgacgatgccatctattcagtcgatgtgggtaataccacgcaaaccagtgttcgccatttgcacatgacaccgaagaacatgtggcgtacttctggcgtgtttgctaccatgggtaatggcttaccgggagctattgcagcaaaagccgattttcccgaacgtcaggtctggaacttgacgggtgatggcgccttcagcatggtaatgcaggacattattacaacccgccaatatcagctgcccatgatcaacgtggtgttctccaatacggaatacgcctttatcaaagatgaacaagaggacaccaaccatgcatactttggcgtcgatttcaaaggagtagactacgctaagattgcagaagctcagggtgccatcggctatactgttcgcgagattaatgaactggacaaagtgtttaagaaagccgtcgaacatgagaaagcaggtcgtaccgttgtggtggatgtcaaagtttcgacggatcgcccaattccggtagaagctctggaacttgatccgcgtcgttttagcgaagaagaaattcgcgccttcaagaaacgctttgaggcagaggaactggaacctttccttacctttctggaacaggagggcctggaatcacgtgcttcggaggagaaatgctaatga

SEQ ID NO: 32 - protein, 608 aa, synthetic construct
  REGION 1..608: note = Variant of pyruvate oxidase
MHHHHHHGGSGMTEEKKTIEAGVAAVKVMEKWGVKNIYGLPAGTLNSWMDALKKEEENIRFIQVRHEEVGALAASMHAKFTGEIGVALGSAGPGATHLMNGLYDAREDGVPVLAIIGQRAEKEINMDAFQEMNHNPLFADVTVYNRRVAYPEQLPKIIDEAIRTAVARKGIAAVEVPVDYGWVEIDDDSWYASADSHKQMPHPVLNEKEIDEAVKILEKAERPVIYAGIGTRGSGEDVMDLSRKLKAPVAITGINYDTFPHDFEAFLGSAHRVSRKPAVEAFEEADVVLFAGSNYPFSEVTAIFDNIDKFIQIDIDPHKLGKRHKTDVAILGDAGEAIRMMTDKLSEKEETAWYRANLKNIENWKTYTDKLEQKKEGELQFYQAYHVINQVADDDAIYSVDVGNTTQTSVRHLHMTPKNMWRTSGVFATMGNGLPGAIAAKADFPERQVWNLTGDGAFSMVMQDIITTRQYQLPMINVVFSNTEYAFIKDEQEDTNHAYFGVDFKGVDYAKIAEAQGAIGYTVREINELDKVFKKAVEHEKAGRTVVVDVKVSTDRPIPVEALELDPRRFSEEEIRAFKKRFEAEELEPFLTFLEQEGLESRASEEKC

SEQ ID NO: 33 - DNA, 1827 bp, synthetic construct
  misc_feature 1..1827: note = Variant of pyruvate oxidase
  source 1..1827: mol_type = other DNA
atgcaccatcatcatcatcatggcggtagcggcatgagtgataaaggtaagaagattgaagcgggcgtggcagctgtcaaagttctggaaagctggggagtgaaacatgtatatggtatcccggccggctcccttaactcgtggatggacgcgctgaataaagagaaagaaagcatccagtttattcaagttcgccacgaagaagtgggcgccttagcagcgtctatgcatgccaaattcaccggtgagattggcgtagctctgggttcagcagggccaggagcaacgcacttgatgaacggcctctacgatgcccgtgaggatcatgtccctgttctggctatcatcggtcagcgcagtgaacgtgagattaatatggacgcctttcaggaaatgaaccaaaatccggtgttcgctgatgtcgccgtgtataaccgccgcgttgcataccccgaacagctgccgaagattattgacgaagctgtgcgtacagccatcgcaaagaaaggcgttgcagccgtcgaagtaccggtggattatgggtgggtggagatcgatgataccgactggtactctagcgctaacgcctatcgtaattatttatacccagcagtcgacgagaaagatattgatgaagctgctgcactgctggaacaagccaaacgcccggtgatttacgccggtatcggcactcgtgggaacggtgacgccgttatggaactctcgcagaaacttaaagcacctgttgctgtatccggcatcaattatgatacctttccgcacgatttcgaagcactgctgggctcagcctatcgcgtcagccgtaaacccgctgtggaggtgtttgatgaagccgacgtcgttttgtttgcaggttcgaactatccgttcgctgaagtaagcgatacgttcaaacataccaagaagtttattcagattgacatcgatccacagaaattaggaaaacgccataagactgatgtggcaattttagcagatgccggtgatgctatccgtgccatcacgaagaagatttccgagaaaccggaaaccagttggtaccgcgccaatctgaacaacattaagaactggaagacatacaccgacaaactggaacagaaaacggacggcgagctgcaattctatcaggtgtacaacgccatcaatcaagtagcagacgaaaatgctctttattctgttgatgtcggcgataccacccagactagcgtgcgtcacttgcatctgacgccgaagaatatgtggcgcacctcggcactctttgctacaatggggaacggcctgcctggtgcaattgctgccaaagccgactttccggatcgtcaagcatggaatttggctggagatggtgcctttgccatggttatgcaggacattgtgactgcagtccagtatgaactgccagttatcaacgtggtgttctcaaatacgcaatacggcttcatcaaagatgaacaggaggataccaaccacgactattatggcgtgttctttaatgaagtcgatttcgccaagattgcagaagctcaaggagccgttggttacaccgtaacggagatttcccagctgaagaaagtctttgagaaagcagttgaagacgagaaagctggccgcaccgtgctcatcgacgtcaagattagtcgtgatcgcccgttaccagctgaagccctgaaacttgaaccggccctgtacagcaaagaagaaattcaggcctttaaagagcgtttcgaagcagaagaactggaacccctgagctattttctccagaaagaaggtctggagtctaacttgcagcaagaaaagtaatga

SEQ ID NO: 34 - protein, 607 aa, synthetic construct
  REGION 1..607: note = Variant of pyruvate oxidase
MHHHHHHGGSGMSDKGKKIEAGVAAVKVLESWGVKHVYGIPAGSLNSWMDALNKEKESIQFIQVRHEEVGALAASMHAKFTGEIGVALGSAGPGATHLMNGLYDAREDHVPVLAIIGQRSEREINMDAFQEMNQNPVFADVAVYNRRVAYPEQLPKIIDEAVRTAIAKKGVAAVEVPVDYGWVEIDDTDWYSSANAYRNYLYPAVDEKDIDEAAALLEQAKRPVIYAGIGTRGNGDAVMELSQKLKAPVAVSGINYDTFPHDFEALLGSAYRVSRKPAVEVFDEADVVLFAGSNYPFAEVSDTFKHTKKFIQIDIDPQKLGKRHKTDVAILADAGDAIRAITKKISEKPETSWYRANLNNIKNWKTYTDKLEQKTDGELQFYQVYNAINQVADENALYSVDVGDTTQTSVRHLHLTPKNMWRTSALFATMGNGLPGAIAAKADFPDRQAWNLAGDGAFAMVMQDIVTAVQYELPVINVVFSNTQYGFIKDEQEDTNHDYYGVFFNEVDFAKIAEAQGAVGYTVTEISQLKKVFEKAVEDEKAGRTVLIDVKISRDRPLPAEALKLEPALYSKEEIQAFKERFEAEELEPLSYFLQKEGLESNLQQEK

SEQ ID NO: 35 - DNA, 1818 bp, synthetic construct
  misc_feature 1..1818: note = Variant of pyruvate oxidase
  source 1..1818: mol_type = other DNA
atgcaccatcatcatcatcatggcggtagcggcatgaccgatggcaagacgaaagttagcactgcgatgctgaaagtattagctggttgggacgtggataccatttatggaatcccgtctggtacactggcaccattgatggaagcccttggcgagcaggaagaaaccgacatcaaatttctgcaagtcaaacatgaggaagttggtgcgatggccgcagtaatgcagtggaaatacaagggcaaactcggagtttgcgtgggttcaggcggtccgggcgctactcacttagcgaacggcctgtatgatgccgccatggataatacccctgtcctggcaattctgggaagtcgcccgcagcgtgaactgaacatggatgcgttccaagagttgaatcagaaccccatgtttgcgaatattgcggtgtacaaccgccgcgtggcctatgcagaacagcttccgaaactcgtcgacgaagctatccgtacggccatttcgaaacgtggtgttgcggtgctggaagttccaggcgatttcggctttcatgagatcgcaaatgacgctttctatagcacgggtcactcctaccgtgattatgtgagttcggcgattaacgaagccgatatcgacgctgcggtcgaagtgctgaacaacagcgatcgcaccgtaatttacgcaggcatcggtacaatgggccatggtccggcggttcaagaactttctcgcaagattaaagcgcctatcattaccacgggcaagaattttgagacctttgaatgggacttcgaggccctgactggttcaacgtatcgtgtgggttggaaaccggcaaatgaagccgtcaaagaagctgataccgtgttgtttgttggcagcaacttcccgtttgcggagattgaaggtaccttctcaaatatcaagaactttattcagatcgataacaatcccacaatgttaggaaaacgccacaatgcagacgtagcgattttaggcgatgccggtgaagcggtgcatagtctccttgagaaagtcactccagtggaagaatctgcctggtggaacgcgaacgtcaagaatgttcagaactggcgtgactacatgaacaaattggagcagaaagaaagcggcgatctgcaactgtatcaggtgtacaatgccatcaacaaatatgcagatgaagacgctatttattcgacggatgtaggcaattccacccaaaccagcattcgccatcttcacatgacgccgaagaatatgtggcgtacctcgccgttatttgcgacgatgggtatcgccttacctggcggcattgcagcgaagaacgtttacccagatcgccaggcttggaacttgatgggtgatggagcgttcaatatggtgtatccggacgtcgtaactaacgtgcgttacaatatgccggttatcaacgtggtgtttaccaacacagagtacggtttcattaagaacaaatatgaagataccaataagaacacgtttggcaccgaattcactgacgtcgattatgcaatgatcggtcaagcacagggcgctgtgggatttacggtctcacgcattgaagacatcgatcaggtaatggccgatgcggtcaaagcgtacaaagagggtaaaaccgtggttattgacgccaagatcaccaaagatcgtcccattccggtagaaacactcaaattagacccgagcctttatagtgccgaagagatcaaagcgtacaaagagaaatatgaagctgaagaactcgttccattctccgagttcttgaaagcagaaggccttacgagcaaagtgtctaagtaatga

SEQ ID NO: 36 - protein, 604 aa, synthetic construct
  REGION 1..604: note = Variant of pyruvate oxidase
MHHHHHHGGSGMTDGKTKVSTAMLKVLAGWDVDTIYGIPSGTLAPLMEALGEQEETDIKFLQVKHEEVGAMAAVMQWKYKGKLGVCVGSGGPGATHLANGLYDAAMDNTPVLAILGSRPQRELNMDAFQELNQNPMFANIAVYNRRVAYAEQLPKLVDEAIRTAISKRGVAVLEVPGDFGFHEIANDAFYSTGHSYRDYVSSAINEADIDAAVEVLNNSDRTVIYAGIGTMGHGPAVQELSRKIKAPIITTGKNFETFEWDFEALTGSTYRVGWKPANEAVKEADTVLFVGSNFPFAEIEGTFSNIKNFIQIDNNPTMLGKRHNADVAILGDAGEAVHSLLEKVTPVEESAWWNANVKNVQNWRDYMNKLEQKESGDLQLYQVYNAINKYADEDAIYSTDVGNSTQTSIRHLHMTPKNMWRTSPLFATMGIALPGGIAAKNVYPDRQAWNLMGDGAFNMVYPDVVTNVRYNMPVINVVFTNTEYGFIKNKYEDTNKNTFGTEFTDVDYAMIGQAQGAVGFTVSRIEDIDQVMADAVKAYKEGKTVVIDAKITKDRPIPVETLKLDPSLYSAEEIKAYKEKYEAEELVPFSEFLKAEGLTSKVSK

SEQ ID NO: 37 - DNA, 1785 bp, synthetic construct
  misc_feature 1..1785: note = Variant of pyruvate oxidase
  source 1..1785: mol_type = other DNA
atgcaccatcatcatcatcatggcggtagcggcatgagcaacaaaattgatggttgggtggcgggcctgaagaccatcgaaagttggggagtcgagaatatctatggtattccggcaggctcgttgaactccttaatggacgccctggagaaagagaaagaaaatatcaactttattcaggttcgccatgaagaagcgggtgctcttgcagcctctatgcacgcgaaattcacgggcaagattggagtatgcgtggggtcagctggtccaggcgcaactcatctgtacaatggcctctatgatgccaaatttgataacgtgccggtacttgcgatcttgggtcaacgtcctttaagcgaagcgaacatggacatgttccaggaaatgaatcagaacccgctgtttgccgatgtcgcgatttacaatcgcaaagtagcctatgcagaacaactgcccaaagttctggacgaagctattcgtacagcggtggcatatcgtggcgttgctgtggtggaagtaccggtcaatttcgggtgggagaagatcgatgccgataaatggccaagttcggcgtctagctaccgcaaactcccgaagatgcttcctgacgtgtccgatatcgataaagccgttgcactgctggagaaagctaaacgcccggtcatttatgccggcaaaggtacccgtggctgtggtgaattggtggaagcgttagggcgcaagattaaagcgcccgtcgcaatcaccggcatcaactttgacaactttaactacgattatgaaggtctgcttggatcagcgttccgtgttgcctggaaaccggctaatgaagcattagccgaggctgacacggtgctgtttgttggcagcaatttcccattttccgaagagaaaggtaccttcagcaacgtcaagcacttcattcagattgataacaaccagaagaatctggggaaacgccatcatccggatgtaactatcttgggcgacgccgaaattgcactgtcgaagatcaacgaacaaattgctgaagcacctctgacggagtggtaccaggccaatctggataacatcaagaactggaaagagtatatgcaccagctggaaaagaataccgaaggtgacctccgtctgtaccaagtgtatgatgccattaatcgctacgcagatgaaaacgccctgtatagtgtagatgtgggagacgtgacacagacctctatccgtcatctccacatgacgccgaagaatacttggcgcaccagcgaactctttgctacgatgggcaacggcttaccgggtgcaattgccgccaaactggagtttaagaatcgtcaagtttggtcactttcgggtgatggcgggttcgctatgaacatgcaggacattgtcaccgcagttcgctataatttgccatccatccatgtggtgtttagtaaccagcagtttggcttcattcgtgatagccaactggatacaaacgacgctatctttggtgtagatctgaccgacgtcgactttgccaagattgcagaagctcagggtgcagttggctacacgctgaaaaccatcgaagagatcgataatgtgttcagcaaagccattgaagatttgaatgcaggccgcgtcgtccttattgacgccaagatcatggatgaacgtccgattcccgttgagaacctgattctggataaagaactctattcggaaactgaaatcaacgacttcaaagctctgtacaatggagagaaccttgtgaccctgaaagaattgttgaatgcttaatga

SEQ ID NO: 38 - protein, 593 aa, synthetic construct
  REGION 1..593: note = Variant of pyruvate oxidase
MHHHHHHGGSGMSNKIDGWVAGLKTIESWGVENIYGIPAGSLNSLMDALEKEKENINFIQVRHEEAGALAASMHAKFTGKIGVCVGSAGPGATHLYNGLYDAKFDNVPVLAILGQRPLSEANMDMFQEMNQNPLFADVAIYNRKVAYAEQLPKVLDEAIRTAVAYRGVAVVEVPVNFGWEKIDADKWPSSASSYRKLPKMLPDVSDIDKAVALLEKAKRPVIYAGKGTRGCGELVEALGRKIKAPVAITGINFDNFNYDYEGLLGSAFRVAWKPANEALAEADTVLFVGSNFPFSEEKGTFSNVKHFIQIDNNQKNLGKRHHPDVTILGDAEIALSKINEQIAEAPLTEWYQANLDNIKNWKEYMHQLEKNTEGDLRLYQVYDAINRYADENALYSVDVGDVTQTSIRHLHMTPKNTWRTSELFATMGNGLPGAIAAKLEFKNRQVWSLSGDGGFAMNMQDIVTAVRYNLPSIHVVFSNQQFGFIRDSQLDTNDAIFGVDLTDVDFAKIAEAQGAVGYTLKTIEEIDNVFSKAIEDLNAGRVVLIDAKIMDERPIPVENLILDKELYSETEINDFKALYNGENLVTLKELLNA

SEQ ID NO: 39 - DNA, 1830 bp, synthetic construct
  misc_feature 1..1830: note = Variant of pyruvate oxidase
  source 1..1830: mol_type = other DNA
atgcaccatcatcatcatcatggcggtagcggcatggaagcgaagattaaaagtggcattgctgcagtgcgtgttctggaggagtggggtgtgaaacatatctatggaattccgggtgggagcatcaacacctttatggatgccttacttgccgaaaaagaccgcatcgattacattcaggtacgtcacgaagaagtcggcgccatggcagcatcgatgcatgcgaaattcacgggtcaccttggtgtttgctttggttctgctggtccaggcgggactcatctgctgaatggcctttatgatgctcgcgaagaccatatgccggtgctggccctcatcggtcaattcgccaccaccgggatgaacatggatgcgtttcaggaaatcaatgagaaccctatttacgcagatgtttccgtctataatcgtacagtgatgacggcggaacagttaccgcacgtaattgacgaagccattcgccaagcgtacgcgaaacgcggagtcgcagtggtgcagcttcccgttgatctgggttggaaggatattccggctcagccattctattcatcagccggcgcgcatcgtacctatcctaacccggtcatggacaaagcggatttagaggccgccgcaaatatcttgagcagcagcgagaagacgatcatctacgcgggcattggtactcgcaaaagtggtttagatctggtggctctgtcgcgtaaactcaaagcaccgattgcggttaccgccatcaactatgactcctttccacacgactacgaaggcctgcttggatctgcgaatcgcgtcgcaacaaaaccggctaacgaagcctttccgcaagcggatacggtactgttcgtgggcaacaactatcccttttccgaagttagcggtattttcgcgcatgtcaagaattttatccagattgacaataatgtagcaaacctggggaaacgtcacgctaacggcgtgaccattctggccgatgcaggtgatgccgttcgcgctttaactgccatggtggatgaacgtgaggaaaccgcatggtggcgcgccaacctgaagaatatcgaaaactggcgtgcttacacgaaattcctggaaaccaaaacaacaggagacctgcagctgtatcaagtgtttgccgccatcaatgcacatgctcaggaagatgcaatttttagtgttgacgtaggcgatgtgaccgaaacctcgattcgccacttgcatatgaacccgaaacaaatgtggcgtacgtctaatctgttcgccactatgggcatcgcacttcctggtgctatcaccgccaaactggattttccggaacgtcaggtttgggcactcatgggcgatggtgctttccagatggtcatgcaagacttagccacgcaggtgcagtatcaactgccaattttgaacgtcgtctttagcaacgcacagtacgggttcattaaagatgagcaggaagacaccaatactggctatctgggtgtggactttatggatgtagatcacgctaagattgcagaagccatgggagccaaagcttttaccttacgccgcatcgaagaggttgatgaagtgttctcgaaagccaacaatgcagttgctgaaggtcatacggtgctgattgacgccaagatcacccaagatcgtccgattcccgtagagcatctggttcttgacccagcactgcacagtcaggaagccatcacgaaatttcgtgctcgctacgaggcacagattcttgaacctctctcagtctttttagctgcagaagggatcgccaccatgcatcgtgaagcagcagaaggcggcttctaatga

SEQ ID NO: 40 - protein, 608 aa, synthetic construct
  REGION 1..608: note = Variant of pyruvate oxidase
MHHHHHHGGSGMEAKIKSGIAAVRVLEEWGVKHIYGIPGGSINTFMDALLAEKDRIDYIQVRHEEVGAMAASMHAKFTGHLGVCFGSAGPGGTHLLNGLYDAREDHMPVLALIGQFATTGMNMDAFQEINENPIYADVSVYNRTVMTAEQLPHVIDEAIRQAYAKRGVAVVQLPVDLGWKDIPAQPFYSSAGAHRTYPNPVMDKADLEAAANILSSSEKTIIYAGIGTRKSGLDLVALSRKLKAPIAVTAINYDSFPHDYEGLLGSANRVATKPANEAFPQADTVLFVGNNYPFSEVSGIFAHVKNFIQIDNNVANLGKRHANGVTILADAGDAVRALTAMVDEREETAWWRANLKNIENWRAYTKFLETKTTGDLQLYQVFAAINAHAQEDAIFSVDVGDVTETSIRHLHMNPKQMWRTSNLFATMGIALPGAITAKLDFPERQVWALMGDGAFQMVMQDLATQVQYQLPILNVVFSNAQYGFIKDEQEDTNTGYLGVDFMDVDHAKIAEAMGAKAFTLRRIEEVDEVFSKANNAVAEGHTVLIDAKITQDRPIPVEHLVLDPALHSQEAITKFRARYEAQILEPLSVFLAAEGIATMHREAAEGGF

SEQ ID NO: 41 - DNA, 1797 bp, synthetic construct
  misc_feature 1..1797: note = Variant of pyruvate oxidase
  source 1..1797: mol_type = other DNA
atgcaccatcatcatcatcatggcggtagcggcatgctgaccgatactattgatggttgggtggcgggcctcaaagttctggaagaatgggggattcgtaacgcctatggtttaccggcaggaagcctgaatagtcttatggacgcgtttgagaaagaacagggcaacattaatttcgtccaagtacgccatgaagaagttggtgctttagcagccgcaatgagtgcaaagtttacgggcaagatcggtgtgtgcattgggtctgcaggtccaggagcgacccacctgttcaacgggctgtacgacgcgaaatatgataatgtgccgttgttggctatcgtaggtcagcgccctctgaaacagctgaacctcgatatgtttcaagagttcaatcagaacccgtactttgtcgatgtgagcgtttataaccgtcgtgtggcctaccccgaacagctgccgaaagtcttagacgaggcaattcgcacagcgtatgctaagaaaggagttgcggtggtggaagtcccagtagattttggttgggccaaaatcgacaagaaagatacgtattccgctgccaatgcataccgcgaacgtccgcttcttgatcctgacgagaaagacattaaagcggccgtgtcaatcttggaagaagcagagaaaccggtcatttatgcaggagttggtacccgtgggtgtggtgaagcggttgttgagctcagcaagaagattaaagcgcccatcgtgattaccgggatcaacttcgataactttgattacgatactgacgctttattaggttctgcctatcgcgtaggatggaaaccggcgaatgaagtcttggaagaagccgatacgatcctcttcattgggtcgaattttccgttcagtgaagcggagaacatgttcggtaacatcaagaaatttgtgcaaattgacattgatccgtttaaacttggaaaacgccatcatgctgacgtgtcaatcttgggtgatgccagcctcgcgattgacaagatcctttccgaagtctcggtgaagaccgataatgggtggtacgaagcaaacattgcgaacaataagaactggaaagagtatatgcaggccttggaagaacgtaatgagggtgagctccagttattccaagtttacaatgcgatcaacaaagtagcagcagaagatgccatttatagcattgatgttgggaacacaacacagaccagtattcgtcaccttcacatgaacccaaagaatatgtggcgcaccagccaattgtttgctacgatgggaaacgggttacctggtgctatcgcggcgaaagcagaacttccagaacgtcaggtgtggtctctctcaggtgatggtggttttactatggtattccaggacattgttacggccgtcaaatacaaattgccgtccatcaatgtggtgtttaccaatgaacgctttgcgttcatccgcgatgagcaagaagacaccaacgaccatttctatggagtcgatattgccgatatcgattttgcgaagattgctgaagcacaaggagctaaagggtatacggtgcgtaagattgatgagctcgacaaagtctttgcgcaggccatcgaagacgagaagaacggtcatgtggtagtaattgatgcgaagatctcgttagatcgcccgattcctgttgaacacctccagttggatgaccgtaaattcacctccgaacagatcaaagcctttaaagaacgctactacggtgagaaccttcttccgctccatcatttccttaaagaacagaaactctaatga

SEQ ID NO: 42 - protein, 597 aa, synthetic construct
  REGION 1..597: note = Variant of pyruvate oxidase
MHHHHHHGGSGMLTDTIDGWVAGLKVLEEWGIRNAYGLPAGSLNSLMDAFEKEQGNINFVQVRHEEVGALAAAMSAKFTGKIGVCIGSAGPGATHLFNGLYDAKYDNVPLLAIVGQRPLKQLNLDMFQEFNQNPYFVDVSVYNRRVAYPEQLPKVLDEAIRTAYAKKGVAVVEVPVDFGWAKIDKKDTYSAANAYRERPLLDPDEKDIKAAVSILEEAEKPVIYAGVGTRGCGEAVVELSKKIKAPIVITGINFDNFDYDTDALLGSAYRVGWKPANEVLEEADTILFIGSNFPFSEAENMFGNIKKFVQIDIDPFKLGKRHHADVSILGDASLAIDKILSEVSVKTDNGWYEANIANNKNWKEYMQALEERNEGELQLFQVYNAINKVAAEDAIYSIDVGNTTQTSIRHLHMNPKNMWRTSQLFATMGNGLPGAIAAKAELPERQVWSLSGDGGFTMVFQDIVTAVKYKLPSINVVFTNERFAFIRDEQEDTNDHFYGVDIADIDFAKIAEAQGAKGYTVRKIDELDKVFAQAIEDEKNGHVVVIDAKISLDRPIPVEHLQLDDRKFTSEQIKAFKERYYGENLLPLHHFLKEQKL

SEQ ID NO: 43 - DNA, 1884 bp, synthetic construct
  misc_feature 1..1884: note = Variant of pyruvate oxidase
  source 1..1884: mol_type = other DNA
atgcaccatcatcatcatcatggcggtagcggcatggcgaaaaacgtgattcagtttggtttcgataccaaggttgccaatcgccatgaagtaggcacgatcaaagcaggagtggctgtcgtcaaactgctggaaagctggggcgtgaagcacatttatggtattccgggcggctcgatcaactccttaatggacgcgttgtacgaggagaaacaaaatatcgattatattcaggttcgtcatgaagaagttggtgccatggcagcggcgatgcacgccaagatgactggtgaaatcggcgtgtgctttggttcagctggaccaggtggcacccatctgatgaacggcctttacgatgcacgcgaagaccatgttccggtactcgctctggtgggtcagttcggcacagcgggcatgaattgggatacctttcaagagattaacgaaaaccctatcttcgcagacgtcgcgatctataatcgtacggtaatgaccgcggatcagttaccgcacgtggtggatgaagccattcgccaggcctacgccaagaatggagtcgcggtggttcagattcccgtaaacctgggttgggtcaacattgacactgatgcatggtatagtgctgctcatgctcatcgccgttatccgaatccaacgttagatcccgaggacattgccctggccgttaacatcctgaatgaagcagaacgccctgtgatctttgctggcattggtacccgcggcaaaagcaagatcgtcattgatctgtgtcgcaagattaaagcaccgcttgccaacacgggaatctcttgggacaactttccgagcgatttcgaggcactcctcggtagtccaaatcgtgtgtccaccaaaccctcggttgaagtgtttcctgaagccgatgtcgtcgttttcgtgggcaacaactacccgtttgctgaggtgtctaaaatcttcaagaacgtgaagaaatttatccaaattgacattgatccgagcaaactgggtaaacgtcattatacagatgttgccattttaggcgatgccggtgacgctctgaaagcaatctacgagaaagtcgacgagaaaccggataatggatggtggcgcgccaatctggacaacgtggtgaattggaacgaatatgttcaccgtctggaaaccaagactgaaggcgaacttcagttgtaccaagtctataatcagattaatcgcgtttcagagaaagatgcaatctactcgattgatgttggcgatgtgacccaaacgagcatccgtcatctgcacatgaatccacaacagatgtggcgtacttccgccctgttcgctaccatgggtattggcttaccgggtgcaatcgcagctaaattggactttcctggtcgccaggtctggaacttagctggagatggcggctttaacatggtgatgcaggatttggccacacaggttcagtataaactcccgattattaacgttgtcttcgccaaccaacaatacggcttcatcaaagacgaacaggaagacacgaacaaaggttttcttggagtgcagtttcaggataccgactataagaaattagccgaaagtatgggtgcagtgggctattctgtcaccaagatttcacagcttgaggatgtgtttgatgcagcaatccgcgacattgctaatggccgtgtggtggttatcgacgccaagattagcaatgaacgtccacttccggccgaattgttggaattagatccgcgcctttcctccgatgaagatatcgagcgcttcaaacaacgttacgaagctgaggatctcaaacctctcagctatttccttgagaaagagggtttggaatcgcatatcggcaagattgaacagggtggtttctaatga

SEQ ID NO: 44 - protein, 626 aa, synthetic construct
  REGION 1..626: note = Variant of pyruvate oxidase
MHHHHHHGGSGMAKNVIQFGFDTKVANRHEVGTIKAGVAVVKLLESWGVKHIYGIPGGSINSLMDALYEEKQNIDYIQVRHEEVGAMAAAMHAKMTGEIGVCFGSAGPGGTHLMNGLYDAREDHVPVLALVGQFGTAGMNWDTFQEINENPIFADVAIYNRTVMTADQLPHVVDEAIRQAYAKNGVAVVQIPVNLGWVNIDTDAWYSAAHAHRRYPNPTLDPEDIALAVNILNEAERPVIFAGIGTRGKSKIVIDLCRKIKAPLANTGISWDNFPSDFEALLGSPNRVSTKPSVEVFPEADVVVFVGNNYPFAEVSKIFKNVKKFIQIDIDPSKLGKRHYTDVAILGDAGDALKAIYEKVDEKPDNGWWRANLDNVVNWNEYVHRLETKTEGELQLYQVYNQINRVSEKDAIYSIDVGDVTQTSIRHLHMNPQQMWRTSALFATMGIGLPGAIAAKLDFPGRQVWNLAGDGGFNMVMQDLATQVQYKLPIINVVFANQQYGFIKDEQEDTNKGFLGVQFQDTDYKKLAESMGAVGYSVTKISQLEDVFDAAIRDIANGRVVVIDAKISNERPLPAELLELDPRLSSDEDIERFKQRYEAEDLKPLSYFLEKEGLESHIGKIEQGGF

SEQ ID NO: 45 - DNA, 1824 bp, synthetic construct
  misc_feature 1..1824: note = Variant of pyruvate oxidase
  source 1..1824: mol_type = other DNA
atgcaccatcatcatcatcatggcggtagcggcatggcgaaaattgatgcatgggtggctggtctgcgtgtccttgaagactggggcatcaagagcgtttatggattaccggccggcagtctgaactccttgatggatgcgtttgagaaagaacaggggaagatcaatttcattcaagtacgccatgaagaaaccggtgcactggctgcgtcgatgagcgccaaatttacgggcaagattgcagcatgcatcggttcagctggtccaggcgcgactcacctctacaacgggctgtatgatgcgaaagaggacaatgtgccggttctggcgattattggtcagcgtcctgaagtgcagtctaacttcgatatgtttcaagagttcaatcagaacccgtactttgctgacgtagcggtctataatcgccgcgttgcatacgcggaacagttacccaaagtgctggatgaagcaatccgtaccgcgattgctcgcaaaggagtggcagcggtcgaagttccggtgagttttggctgggaggttttggaagaagatagctggtattcgtcggcgaaatcctaccgtgactatccactgatgacaccggatgtcaacgacatcgatcaagctgtgaaagtacttgaggcatcagaacgccctatcatttatgcgggcattggtacccgtggctctgggcaggaagtggtggagctgagcaagaagatcaaagctccggtcgttgtaacgggcattaacttcgacaatttcgattacgaatttgatgcgctcctgggtagtgcatatcgtgttgcgtggaaacccgctaacgaagcgttagaagaagcagataccgtgctgtttgcgggcagcaattttccgttcgcagaggttgaggggacgttcgaccatgtcaaacactttatccagatcgatattgatcaacagaaattgggtaaacgccatgacgctgatgtgtctattctgggagatgcgggcgaatccatccgccagattaccgagaagatcgcagagaagactgacaaaggttggtacaaagcgaacattgataacgcgaagaattggaaagactatctgcaaagcctcgaagaacgtgaaagtggcgaacttcagctgtttcaagtatatcacgctatcaatcaggtggcagatgaagatgctgtctactcgattgacgttggtaacacaacacagacctccattcgccatctgcatatgaccccaaagaatacttggcgtaccagcaacatcttcgcaacgatggggaacggcttaccgggtgcgattgcggcgaaattggaaatgcctgatcgccaagtgtggaatttagctggagatggtggctttagcatggcaatgcaggacattgttacggcggtcaaatatgatctgccgatgatcaacgtggtgttcaccaatgagcgttttggctttattcgcgacgaacaggaagatacgaacgacaatttctacggcatcgatatcgctgatgtcgacttcgcaatgattggtcaagcacagggtgcgtcgtcatataccgtaactgagatctctcagctgaaagatgtgttttcccaagctgttgcggacgagaaagatgggaaagtcgtcgtgatcgactgtaagattagtttggatcgtccgattccagtagaacacctggaactcgatccgaaactgcatgaagaagaagcgatcgcgaaatttaaagagcgctactacgcagaagatcttaaacctctgaccgcttatctggaagcagaaggcgttgagattcgtcagtatcagtggaaagatacgctctaatga

SEQ ID NO: 46 - protein, 606 aa, synthetic construct
  REGION 1..606: note = Variant of pyruvate oxidase
MHHHHHHGGSGMAKIDAWVAGLRVLEDWGIKSVYGLPAGSLNSLMDAFEKEQGKINFIQVRHEETGALAASMSAKFTGKIAACIGSAGPGATHLYNGLYDAKEDNVPVLAIIGQRPEVQSNFDMFQEFNQNPYFADVAVYNRRVAYAEQLPKVLDEAIRTAIARKGVAAVEVPVSFGWEVLEEDSWYSSAKSYRDYPLMTPDVNDIDQAVKVLEASERPIIYAGIGTRGSGQEVVELSKKIKAPVVVTGINFDNFDYEFDALLGSAYRVAWKPANEALEEADTVLFAGSNFPFAEVEGTFDHVKHFIQIDIDQQKLGKRHDADVSILGDAGESIRQITEKIAEKTDKGWYKANIDNAKNWKDYLQSLEERESGELQLFQVYHAINQVADEDAVYSIDVGNTTQTSIRHLHMTPKNTWRTSNIFATMGNGLPGAIAAKLEMPDRQVWNLAGDGGFSMAMQDIVTAVKYDLPMINVVFTNERFGFIRDEQEDTNDNFYGIDIADVDFAMIGQAQGASSYTVTEISQLKDVFSQAVADEKDGKVVVIDCKISLDRPIPVEHLELDPKLHEEEAIAKFKERYYAEDLKPLTAYLEAEGVEIRQYQWKDTL

SEQ ID NO: 47 - DNA, 1812 bp, synthetic construct
  misc_feature 1..1812: note = Variant of pyruvate oxidase
  source 1..1812: mol_type = other DNA
atgcaccatcatcatcatcatggcggtagcggcatgagcgaaaacatgatttcagcaagttccgcgatgctgaatgtgctcaaaacctggggcgtcgatacgatctatggtattccgtcgggaactctgggcagcttaatggacgctctggccgaggatgatgatatccgctttttgcaggttcgtcatgaagaagtaggtgcgcttgcagcagtgatgcaaaacaaattcggtggtccgctcggagttgctgtgggttctggtggtcctggagcgacccacctgattaatggcgtatacgacgcggccatggataacacaccgtttttagctatccagggcagtcgcccgaatgacgagctgaacctcgatgcgttccaggaactgaaccaaaaccccatgtattcgggcattgccgtgtacaataagcgtgttgcctatccggaacagctgccgaaagtcatcgacgaagcagcacgcgcggctgtcacccgtaaaggaccagcggtggttgagattcctgtgaactttggctgggtagaaatcccggaagatagctattacggttccggcgagtatcagcgcgactacattgcctctgcgttgaatgaagaagatatcgatcaagccgtcgagattctgaataatgcagaacgtcccgtgatttatagcggtatcggcgcgaacgaacatggtgatcttgtttcgaaattagcccagaagattaaagctccgatcattacgacgggaaagaacttcgactcctttaactacgatgatgaagcgctgaccggctcagcatatcgcgtgggttggaaaccagcgaatgaggtcgtctttgaagccgacactgtgttgttcctgggcagcaactttccgttcgccgagacctaccaggcgtttaagaatgtggacaaattcatccaagttgatattgatccgcacaaactgggcaaacgtaacgctcttgacgcgagtatcctgggtgatgcaggagaagctgcccaggcgatctatgacaaagttgatgccgtagaagaatctgcatggtggaatgcgaacattaagaacaacaagaattggcgcgagtacatggataaactcgaacagaagacagaaggcgatctgcaactgtatcaggtgtataatgccattaacaatcatgcagacgaggatgcgatttacagcatcgacgttggtaactcaacccaaacgagcattcgtcacttgcatatgaaccccaagaatatgtggcgtacttcaccgttatttgccactatgggcatcgcactgcctggtggtattgcggcgaagaaagataatccaaaccgtcaggtctggaatatcatgggagatggcgcctttaacatgacgtatccggacgtggtgaccaacgttcagtacgatctgccggtcattaatgtggtgttctcgaacaccgaatatgcgtttatcaagaataaatacgaggatacgaacaaacatcttttcggcaccgactttattgatgttgactacgctaagattggtgaagctcaaggcgcagtcggctatactgtaaatcgcatcgaagatatggacgaagtaatgcgtaaagccgttgaggacaacaaagcgggtaagacagtagtagtggatgccaagattacccctgatcgcccaatcccggtcgaagtgttagaactcgatccgaaagtttcctccgaggaggacatcaaagccttcaaagagaaatatgaagcggaagatttggtgccctttcgtctgtttctggaagaagaaggactggaatctcgcgcgattaagtaatga

SEQ ID NO: 48 - protein, 602 aa, synthetic construct
  REGION 1..602: note = Variant of pyruvate oxidase
MHHHHHHGGSGMSENMISASSAMLNVLKTWGVDTIYGIPSGTLGSLMDALAEDDDIRFLQVRHEEVGALAAVMQNKFGGPLGVAVGSGGPGATHLINGVYDAAMDNTPFLAIQGSRPNDELNLDAFQELNQNPMYSGIAVYNKRVAYPEQLPKVIDEAARAAVTRKGPAVVEIPVNFGWVEIPEDSYYGSGEYQRDYIASALNEEDIDQAVEILNNAERPVIYSGIGANEHGDLVSKLAQKIKAPIITTGKNFDSFNYDDEALTGSAYRVGWKPANEVVFEADTVLFLGSNFPFAETYQAFKNVDKFIQVDIDPHKLGKRNALDASILGDAGEAAQAIYDKVDAVEESAWWNANIKNNKNWREYMDKLEQKTEGDLQLYQVYNAINNHADEDAIYSIDVGNSTQTSIRHLHMNPKNMWRTSPLFATMGIALPGGIAAKKDNPNRQVWNIMGDGAFNMTYPDVVTNVQYDLPVINVVFSNTEYAFIKNKYEDTNKHLFGTDFIDVDYAKIGEAQGAVGYTVNRIEDMDEVMRKAVEDNKAGKTVVVDAKITPDRPIPVEVLELDPKVSSEEDIKAFKEKYEAEDLVPFRLFLEEEGLESRAIK

SEQ ID NO: 49 - DNA, 636 bp, synthetic construct
  misc_feature 1..636: note = Variant of 3'O-kinase
  source 1..636: mol_type = other DNA
atgcaccatcatcaccatcacgggggctccggcgcgctgcatgacgaaaacgtcgtctggcatagccatccggtcactgtgcaacaacgcgagctacaccacggtcatcgtggtgtagtgctgtggtttaccggcctctccgggtccggtaaatcaacggtcgccggggcgctggaggaggcgttacataaactcggcgtcagtacgtatctgctggatggcgacaatgttcgccacggattatgcagcgatctcggttttagcgatgccgatcgtaaagagaatatccgtcgcgtcggtgaagtggcgaatttgatggttgaagccggactggtggtgctgaccgcatttatctcgccacaccgcgccgaacgccagatggttcgcgaacgcgtaggagaagggcgctttatcgaagtgtttgtcgatacgccgctggcgatttgcgaagcccgcgatcccaaaggcttatataagaaagcgcgtgccggtgaactgcgcaactttacgggaatagattccgtttacgaagcgcctgaatcggcagaaattcatctcaatggtgaacaattagtaacaaatttggtacagcaattattagatctgttgagacagaacgatattatcagatcctaa

SEQ ID NO: 50 - protein, 211 aa, synthetic construct
  REGION 1..211: note = Variant of 3'O-kinase
MHHHHHHGGSGALHDENVVWHSHPVTVQQRELHHGHRGVVLWFTGLSGSGKSTVAGALEEALHKLGVSTYLLDGDNVRHGLCSDLGFSDADRKENIRRVGEVANLMVEAGLVVLTAFISPHRAERQMVRERVGEGRFIEVFVDTPLAICEARDPKGLYKKARAGELRNFTGIDSVYEAPESAEIHLNGEQLVTNLVQQLLDLLRQNDIIRS

SEQ ID NO: 51 - DNA, 651 bp, synthetic construct
  misc_feature 1..651: note = Variant of 3'O-kinase
  source 1..651: mol_type = other DNA
atgaggtatatagttgccttaacgggaggcattggcagtggcaagagtaccgttgccaatgcgtttgctgatctcggaattaacgtcattgatgccgatattattgcgcgtcaggtggttgaaccaggtgcacctgcgctacatgccattgctgatcactttggcgctaacatgattgctgctgatggaacattgcagcgccgggccttgcgcgagcggatcttcgccaacccggaagagaaaaactggcttaacgccctgctgcatccgctgattcagcaagagacgcaacaccagatccagcaagctacttccccctatgtactgtgggttgtgccattgctggtagaaaactcactgtataaaaaagcgaatcgagtgcttgtggtggatgtcagcccagaaacgcaacttaagcgcaccatgcagcgcgatgatgtaactcgcgagcatgtcgaacaaatccttgctgctcaggcaacgcgcgaagcccgccttgccgtggcagatgacgtcattgataataacggcgcaccggatgctatcgcatcggatgttgcccgcctgcacgcacactatttgcagcttgcgtcgcagtttgtctcacaggaaaaaccggggggctccggccaccatcatcaccatcactaa

SEQ ID NO: 52 - protein, 216 aa, synthetic construct
  REGION 1..216: note = Variant of 3'O-kinase
MRYIVALTGGIGSGKSTVANAFADLGINVIDADIIARQVVEPGAPALHAIADHFGANMIAADGTLQRRALRERIFANPEEKNWLNALLHPLIQQETQHQIQQATSPYVLWVVPLLVENSLYKKANRVLVVDVSPETQLKRTMQRDDVTREHVEQILAAQATREARLAVADDVIDNNGAPDAIASDVARLHAHYLQLASQFVSQEKPGGSGHHHHHH

SEQ ID NO: 53 - DNA, 645 bp, synthetic construct
  misc_feature 1..645: note = Variant of 3'O-kinase
  source 1..645: mol_type = other DNA
atgagcgatgtgattattggtttaaccggcggcgttgcgtctgggaaaagtctggccgaagcatgctttcgtgctctgggtatcgtagtagcagatgctgacgccgcagcacgcgatgctttggccgtgggttcaccgggacttgcagaggtcgtcgctacgttcggcccacaggttctgactcaagacggtcagctcgatcgtgccgctatgcgccgccgcatctttgcagatccgaccgccaaagcccagctggaagccattgttcatcctcgtgtgcgtacagccttacacgatgcttgtcgtaacgcagaatcgccgtatgcaatcgctagcattcccctgttggccgaaagtggcggccgctcagcatacccgtggctgcatcgcatcctgcttgtagaggctgacgctgccctgcgtctgaagcgtctttgccaacgcgacgggattgatatcgatttagcacagcgcatgctccaagcacaggcttcccaccgtgaacgcttggccattgccgatgacgtcctccgtaatgaaggttccccagatgcattagcagcaggagttgcccgcttggaccgtctctatcgtcgtttagctgctcgtggtggctccggccaccatcatcaccatcactaatga

SEQ ID NO: 54 - protein, 213 aa, synthetic construct
  REGION 1..213: note = Variant of 3'O-kinase
MSDVIIGLTGGVASGKSLAEACFRALGIVVADADAAARDALAVGSPGLAEVVATFGPQVLTQDGQLDRAAMRRRIFADPTAKAQLEAIVHPRVRTALHDACRNAESPYAIASIPLLAESGGRSAYPWLHRILLVEADAALRLKRLCQRDGIDIDLAQRMLQAQASHRERLAIADDVLRNEGSPDALAAGVARLDRLYRRLAARGGSGHHHHHH

SEQ ID NO: 55 - DNA, 639 bp, synthetic construct
  misc_feature 1..639: note = Variant of 3'O-kinase
  source 1..639: mol_type = other DNA
atggcgtttaccattggtttaacaggagggatcgcaagcggcaaatcgactgtgagtgccatgatgcgtgaactgggtctgccggtcatcgatgctgacgaggcagcacgcgccgttgttcgtccaggcgaagaagcttatcgccagattgtagctgcgttcggtccgggcattcttcgtgccgatggcgagatcgatcgcgccaaattgggtgccatcgtgtttaacgacgaacaacaacgtaaggtgctgaatgcgattgtacatcctgcagtccgcaagaagatgctcgctgagaaagaagctcatatccgctcaggcgccaagacggttgtgctggatatcccgctgctgttcgaatccggattgacccattgggtcgacaaagtgctcgtggtgtacgtcgatgatgatgttcagttacgccgccttatggcacgtaacgggtttaccgaagaagaagctctggcccgcattcgttcacagtggcccatggccgagaaagttaaacgtgcagacgctgtaatcgacaataatggcacgattgaagaaacccgccgccagctgctggccattttacaccagtgggatgcactgggtaagggtggctccggccaccatcatcaccatcactaatga

SEQ ID NO: 56 - protein, 211 aa, synthetic construct
  REGION 1..211: note = Variant of 3'O-kinase
MAFTIGLTGGIASGKSTVSAMMRELGLPVIDADEAARAVVRPGEEAYRQIVAAFGPGILRADGEIDRAKLGAIVFNDEQQRKVLNAIVHPAVRKKMLAEKEAHIRSGAKTVVLDIPLLFESGLTHWVDKVLVVYVDDDVQLRRLMARNGFTEEEALARIRSQWPMAEKVKRADAVIDNNGTIEETRRQLLAILHQWDALGKGGSGHHHHHH

SEQ ID NO: 57 - DNA, 624 bp, synthetic construct
  misc_feature 1..624: note = Variant of 3'O-kinase
  source 1..624: mol_type = other DNA
atgaaacgcattggtctgaccggcaatatcggatgcggcaagagcacggttgcgcagatgtttcgtgaacttggtgcatatgtgttggatgccgacaaactgatccattcgttctaccgcaaaggtcacccggtctatgaggaggtagtgaagacctttgggaaaggcattctggatgaagaaggcaacattgaccgtaagaaactggctgatatcgtgttcaaagacgaagaaaaattacgcaaattagaggagattactcatcgtgcgctgtacaaagaaatcgaaaagattacgaagaacctgtccgaagataccttgtttatcctcgaagccagtctgctggttgagaaaggtacctataagaattacgataaacttattgtcgtctacgcgccatatgaagtgtgtaaagaacgcgcaatcaaacgtgggatgtcagaagaagatttcgaacgccgctggaagaaacaaatgccgattgaggagaaagtgaaatatgcggactacgttatcgataactctggcagcattgaagagacgtataagcaggtaaagaaagtgtatgaagaactgacacgtgatccaggtggctccggccaccatcatcaccatcactaatga

SEQ ID NO: 58 - protein, 206 aa, synthetic construct
  REGION 1..206: note = Variant of 3'O-kinase
MKRIGLTGNIGCGKSTVAQMFRELGAYVLDADKLIHSFYRKGHPVYEEVVKTFGKGILDEEGNIDRKKLADIVFKDEEKLRKLEEITHRALYKEIEKITKNLSEDTLFILEASLLVEKGTYKNYDKLIVVYAPYEVCKERAIKRGMSEEDFERRWKKQMPIEEKVKYADYVIDNSGSIEETYKQVKKVYEELTRDPGGSGHHHHHH

SEQ ID NO: 59 - DNA, 636 bp, synthetic construct
  misc_feature 1..636: note = Variant of 3'O-kinase
  source 1..636: mol_type = other DNA
atgaatccgaaagcgaagaacattgtttggcatgaaggcaaagtcaagaaagaggatcgcgaaaaactgctgggtcagaaaggcgtagtggtgtggctcaccggtttaagcggcgcagggaaatctacgatcgcccacgaattggaatggcgtctgcttgagatgggaaaactggcttatgttttggacggtgataacattcgccatggcctgaatagtgatctggggttttcgcctgaagaccgtaaagaaaacatccgccgcatttccgaagtggcgaagttattcgccgatgcgggtctgatcactattaccgcatttatctcaccataccgtgaggaccgtaaacgcgctcgtaatctccttaaagaaggcgagttcattgaagtctatgtaaaatgcccgctggatgtgctgatcgaacgtgatccgaagggtctgtacaagaaagccttagcgggcgagattaaagagtttacaggaattagcgcaccctatgaagaaccggaagacccagaactggttgttgagaccgataaagaaagcatcgaagaatcggtgaacaagatcttgaattacctgcgcgagaaaggcattatcggtggctccggccaccatcatcaccatcactaatga

SEQ ID NO: 60 - protein, 210 aa, synthetic construct
  REGION 1..210: note = Variant of 3'O-kinase
MNPKAKNIVWHEGKVKKEDREKLLGQKGVVVWLTGLSGAGKSTIAHELEWRLLEMGKLAYVLDGDNIRHGLNSDLGFSPEDRKENIRRISEVAKLFADAGLITITAFISPYREDRKRARNLLKEGEFIEVYVKCPLDVLIERDPKGLYKKALAGEIKEFTGISAPYEEPEDPELVVETDKESIEESVNKILNYLREKGIIGGSGHHHHHH

SEQ ID NO: 61 - DNA, 645 bp, synthetic construct
  misc_feature 1..645: note = Variant of 3'O-kinase
  source 1..645: mol_type = other DNA
atgggtaatgcaaccaacattgtttggcacgatagcaaagtgacgaaagaagaccgtcagatctcgaagaagcataaaagtgccgccgtctggtttactggtttatcgggatctgggaaatccaccattacagtggctgtcgagaaagaattgcatcaactgggagtacacacctatcgcttagatggtgataacatccgcttcggcctgaataaagacctcggtttttctccggaagatcgtgcggagaacattcgccgcattggagaagttgcgaaactgatggtggacgcggggcttattacgctgaccgcattcatcagtccataccagaaagatcgcgataaggctcgtgaaattattggtgaagccgagtttatcgaagtctatgtgaaatgcagcttggagacgtgtgaaaatcgtgatccgaaaggcctgtacaagaaagcacgcgcgggagaaatcaaagagttcactggtattgacgcgccctatgaagaacctgtaaacccggaactcattattgataccgagaaactgagcctggccgaatcagttcagacagtgatccattaccttttagagaagggctttatcccgaagaccaacggtggctccggccaccatcatcaccatcactaatga

SEQ ID NO: 62 - protein, 213 aa, synthetic construct
  REGION 1..213: note = Variant of 3'O-kinase
MGNATNIVWHDSKVTKEDRQISKKHKSAAVWFTGLSGSGKSTITVAVEKELHQLGVHTYRLDGDNIRFGLNKDLGFSPEDRAENIRRIGEVAKLMVDAGLITLTAFISPYQKDRDKAREIIGEAEFIEVYVKCSLETCENRDPKGLYKKARAGEIKEFTGIDAPYEEPVNPELIIDTEKLSLAESVQTVIHYLLEKGFIPKTNGGSGHHHHHH

SEQ ID NO: 63 - DNA, 669 bp, synthetic construct
  misc_feature 1..669: note = Variant of 3'O-kinase
  source 1..669: mol_type = other DNA
atgagcgcgaattttctgattcaaaccgtgtctaacactccggaaaacatcttgtggcatcagtcaacggttacacgtgcccgccgcgagcagctgaatggccacaaatcctatgtcctctggttcacgggtttaagcggagcaggcaaaagtcgtcttgctcataccgtagaagaacgtctgcaccgcttagggtgccgcacctttgtgctggatggtgacaacgttcgtcatggcctgtgttcggatctggatttcagtgaggtgggtcgcaaggaaaatattcgtcgtatcggcgaagtcgcgaaattgatgatggaggtaggtctgattgttatgaccgcctttatctcgccatttcgtgcagaccgcgaagcggtgcgcaaccgtatgccttacggcgatttcctggagatttattgccaggtgagccttgaagcttgtgaagcccgcgacgtcaaagggctctacaagaaagcacgtgcgggccaaatcaagaattatacgggtattgattctgcgtacgaagcgccgctgaaaccggaactggttgtgaacactgagtgcttaaccttggaagaatcagtcagcgccgtactgcgcatgcttcacgaacgcggaatggtggtgcagggtggctccggccaccatcatcaccatcactaatga

SEQ ID NO: 64 - protein, 221 aa, synthetic construct
  REGION 1..221: note = Variant of 3'O-kinase
MSANFLIQTVSNTPENILWHQSTVTRARREQLNGHKSYVLWFTGLSGAGKSRLAHTVEERLHRLGCRTFVLDGDNVRHGLCSDLDFSEVGRKENIRRIGEVAKLMMEVGLIVMTAFISPFRADREAVRNRMPYGDFLEIYCQVSLEACEARDVKGLYKKARAGQIKNYTGIDSAYEAPLKPELVVNTECLTLEESVSAVLRMLHERGMVVQGGSGHHHHHH

SEQ ID NO: 65 - DNA, 969 bp, synthetic construct
  misc_feature 1..969: note = Variant of adenosine kinase
  source 1..969: mol_type = other DNA
atgcaccatcatcaccatcacgggggctccggcatgagtgcactgatttgcggttctttagcgtatgataccatcatggtgtttccggaccagttcaagaaccatattctgcccgataaagttcacatcctcaatgtcagctttcttgtaccacgcatgcgtcgtgaatttggaggctgtgccggcaacattgcgtacaatctgcatctgttgggtggtgctccgatccctatgggaacggtgggccaagatttcggtccgtatcgcgagcacttcgaaactctgggcattgacttatcccgcgtcaagatcatcgatgatctgaggacagctcaggccttcattaccaccgaccatgataacaaccagattacggcgtttcatccaggcgcaatgatgcgttcgtacgaaaatcacgttcgtgatgtgccgggtgttaccttgggcctcgtaggtcctgatggacgcgagggcatgatccaaaatgccgaagaatttgctgctggtggcattccgttcatttttgacccaggtcaggcaatgccgctgttcaacggccccgaactgcgcgagtttatcgaacaggcggactatgtggtggtcaacgattacgaaagcaatcttcttcaagaacgtactggctggaacgagcaggacattgtttcacgcgtgcaggcgtatatcaccacgcaaggtcctaaaggagccctggtacatacaccggagaagacctacgatattccgccggcacacgaacgtcgtgtcgttgatccaactggttgcggcgacgcgtttcgcgccggcctgatctatggtattcagcataattatgattggttgaccattggccgcatgggaaacttaatgggtgcgctgaaagtggaacaccctggcacgcaaaatcagcgtttcgattttgccgaattcaacgaccagttcaaacaacagtttggctacgcgctctaatga

SEQ ID NO: 66 - protein, 321 aa, synthetic construct
  REGION 1..321: note = Variant of adenosine kinase
MHHHHHHGGSGMSALICGSLAYDTIMVFPDQFKNHILPDKVHILNVSFLVPRMRREFGGCAGNIAYNLHLLGGAPIPMGTVGQDFGPYREHFETLGIDLSRVKIIDDLRTAQAFITTDHDNNQITAFHPGAMMRSYENHVRDVPGVTLGLVGPDGREGMIQNAEEFAAGGIPFIFDPGQAMPLFNGPELREFIEQADYVVVNDYESNLLQERTGWNEQDIVSRVQAYITTQGPKGALVHTPEKTYDIPPAHERRVVDPTGCGDAFRAGLIYGIQHNYDWLTIGRMGNLMGALKVEHPGTQNQRFDFAEFNDQFKQQFGYAL

SEQ ID NO: 67 - DNA, 969 bp, synthetic construct
  misc_feature 1..969: note = Variant of adenosine kinase
  source 1..969: mol_type = other DNA
atgcaccatcatcaccatcacgggggctccggcatgagtgcactgatttgcggttctttagcgtatgataccatcatggtgtttccggaccagttcaagaaccatattctgcccgataaagttcacatcctcaatgtcagctttcttgtaccacgcatgcgtcgtgaatttggaggctgtgccggcaacattgcgtacaatctgcatctgttgggtggtgctccgatccctatgggaacggtgggccaagatttcggtccgtatcgcgagcacttcgaaactctgggcattgacttatcccgcgtcaagggtatcgatgatctgtttacagctcaggccttcattaccaccgaccatgataacaaccagattacggcgtttcatccaggcgcaatgatgcgttcgtacgaaaatcacgttcgtgatgtgccgggtgttaccttgggcctcgtaggtcctgatggacgcgagggcatgatccaaaatgccgaagaatttgctgctggtggcattccgttcatttttgacccaggtcaggcaatgccgctgttcaacggccccgaactgcgcgagtttatcgaacaggcggactatgtggtggtcaacgattacgaaagcaatcttcttcaagaacgtactggctggaacgagcaggacattgtttcacgcgtgcaggcgtatatcaccacgcaaggtcctaaaggagccctggtacatacaccggagaagacctacgatattccgccggcacacgaacgtcgtgtcgttgatccaactggttgcggcgacgcgtttcgcgccggcctgatctatggtattcagcataattatgattggttgaccattggccgcatgggaaacttaatgggtgcgctgaaagtggaacaccctggcacgcaaaatcagcgtttcgattttgccgaattcaacgaccagttcaaacaacagtttggctacgcgctctaatga

SEQ ID NO: 68 - protein, 321 aa, synthetic construct
  REGION 1..321: note = Variant of adenosine kinase
MHHHHHHGGSGMSALICGSLAYDTIMVFPDQFKNHILPDKVHILNVSFLVPRMRREFGGCAGNIAYNLHLLGGAPIPMGTVGQDFGPYREHFETLGIDLSRVKGIDDLFTAQAFITTDHDNNQITAFHPGAMMRSYENHVRDVPGVTLGLVGPDGREGMIQNAEEFAAGGIPFIFDPGQAMPLFNGPELREFIEQADYVVVNDYESNLLQERTGWNEQDIVSRVQAYITTQGPKGALVHTPEKTYDIPPAHERRVVDPTGCGDAFRAGLIYGIQHNYDWLTIGRMGNLMGALKVEHPGTQNQRFDFAEFNDQFKQQFGYAL

SEQ ID NO: 69 - DNA, 969 bp, synthetic construct
  misc_feature 1..969: note = Variant of adenosine kinase
  source 1..969: mol_type = other DNA
atgcaccatcatcaccatcacgggggctccggcatgagtgcactgatttgcggttctttagcgtatgataccatcatggtgtttccggaccagttcaagaaccatattctgtgtgataaagttcacatcctcaatgtcagctttcttgtaccacgcatgcgtcgtgaatttggaggctgtgccggcaacattgcgtacaatctgcatctgttgggtggtgctccgatccctatgggaacggtgggccaagatttcggtccgtatcgcgagcacttcgaaactctgggcattgacttatcccgcgtcaagatcatcgatgatctgtttacaccgcaggccttcattaccaccgaccatgataacaaccagattacggcgtttcatccaggcgcaatgatgcgttcgtacgaaaatcacgttcgtgatgtgccgggtgttaccttgggcctcgtaggtcctgatggacgcgagggcatgatccaaaatgccgaagaatttgctgctggtggcattccgttcatttttgacccaggtcaggcaatgccgctgttcaacggccccgaactgcgcgagtttatcgaacaggcggactatgtggtggtcaacgattacgaaagcaatcttcttcaagaacgtactggctggaacgagcaggacattgtttcacgcgtgcaggcgtatatcaccacgcaaggtcctaaaggagccctggtacatacaccggagaagacctacgatattccgccggcacacgaacgtcgtgtcgttgatccaactggttgcggcgacgcgtttcgcgccggcctgatctatggtattcagcataattatgattggttgaccattggccgcatgggaaacttaatgggtgcgctgaaagtggaacaccctggcacgcaaaatcagcgtttcgattttgccgaattcaacgaccagttcaaacaacagtttggctacgcgctctaatga

SEQ ID NO: 70 - protein, 321 aa, synthetic construct
  REGION 1..321: note = Variant of adenosine kinase
MHHHHHHGGSGMSALICGSLAYDTIMVFPDQFKNHILCDKVHILNVSFLVPRMRREFGGCAGNIAYNLHLLGGAPIPMGTVGQDFGPYREHFETLGIDLSRVKIIDDLFTPQAFITTDHDNNQITAFHPGAMMRSYENHVRDVPGVTLGLVGPDGREGMIQNAEEFAAGGIPFIFDPGQAMPLFNGPELREFIEQADYVVVNDYESNLLQERTGWNEQDIVSRVQAYITTQGPKGALVHTPEKTYDIPPAHERRVVDPTGCGDAFRAGLIYGIQHNYDWLTIGRMGNLMGALKVEHPGTQNQRFDFAEFNDQFKQQFGYAL

SEQ ID NO: 71 - DNA, 969 bp, synthetic construct
  misc_feature 1..969: note = Variant of adenosine kinase
  source 1..969: mol_type = other DNA
atgcaccatcatcaccatcacgggggctccggcatgagtgcactgatttgcggttctttagcgtatgataccatcatggtgtttccggaccagttcaagaaccatattctgcccgataaagttcacatcctcaatgtcagctttcttgtaccacgcatgcgtcgtgaatttggaggctgtgccggcaacattgcgtacaatctgcatctgttgggtggtgctccgatccctatgggaacggtgggccaagatttcggtccgtatcgcgagcacttcgaaactctgggcattgacttatcccgcgtcaaggctatcgatgatctgtttacagctcaggccttcattaccaccgaccatgataacaaccagattacggcgtttcatccaggcgcaatgatgcgttcgtacgaaaatcacgttcgtgatgtgccgggtgttaccttgggcctcgtaggtcctgatggacgcgagggcatgatccaaaatgccgaagaatttgctgctggtggcattccgttcatttttgacccaggtcaggcaatgccgctgttcaacggccccgaactgcgcgagtttatcgaacaggcggactatgtggtggtcaacgattacgaaagcaatcttcttcaagaacgtactggctggaacgagcaggacattgtttcacgcgtgcaggcgtatatcaccacgcaaggtcctaaaggagccctggtacatacaccggagaagacctacgatattccgccggcacacgaacgtcgtgtcgttgatccaactggttgcggcgacgcgtttcgcgccggcctgatctatggtattcagcataattatgattggttgaccattggccgcatgggaaacttaatgggtgcgctgaaagtggaacaccctggcacgcaaaatcagcgtttcgattttgccgaattcaacgaccagttcaaacaacagtttggctacgcgctctaatga

SEQ ID NO: 72 - protein, 321 aa, synthetic construct
  REGION 1..321: note = Variant of adenosine kinase
MHHHHHHGGSGMSALICGSLAYDTIMVFPDQFKNHILPDKVHILNVSFLVPRMRREFGGCAGNIAYNLHLLGGAPIPMGTVGQDFGPYREHFETLGIDLSRVKAIDDLFTAQAFITTDHDNNQITAFHPGAMMRSYENHVRDVPGVTLGLVGPDGREGMIQNAEEFAAGGIPFIFDPGQAMPLFNGPELREFIEQADYVVVNDYESNLLQERTGWNEQDIVSRVQAYITTQGPKGALVHTPEKTYDIPPAHERRVVDPTGCGDAFRAGLIYGIQHNYDWLTIGRMGNLMGALKVEHPGTQNQRFDFAEFNDQFKQQFGYAL

SEQ ID NO: 73 - DNA, 969 bp, synthetic construct
  misc_feature 1..969: note = Variant of adenosine kinase
  source 1..969: mol_type = other DNA
atgcaccatcatcaccatcacgggggctccggcatgagtgcactgatttgcggttctttagcgtatgataccatcatggtgtttccggaccagttcaagaaccatattctgcccgataaagttcacatcctcaatgtcagctttcttgtaccacgcatgcgtcgtgaatttggaggctgtgccggcaacattgcgtacaatctgcatctgttgggtggtgctccgatccctatgggaacggtgggccaagatttcggtccgtatcgcgagcacttcgaaactctgggcattgacttatcccgcgtcaagtatatcgatgatctgtttacagctcaggccttcattaccaccgaccatgataacaaccagattacggcgtttcatccaggcgcaatgatgcgttcgtacgaaaatcacgttcgtgatgtgccgggtgttaccttgggcctcgtaggtcctgatggacgcgagggcatgatccaaaatgccgaagaatttgctgctggtggcattccgttcatttttgacccaggtcaggcaatgccgctgttcaacggccccgaactgcgcgagtttatcgaacaggcggactatgtggtggtcaacgattacgaaagcaatcttcttcaagaacgtactggctggaacgagcaggacattgtttcacgcgtgcaggcgtatatcaccacgcaaggtcctaaaggagccctggtacatacaccggagaagacctacgatattccgccggcacacgaacgtcgtgtcgttgatccaactggttgcggcgacgcgtttcgcgccggcctgatctatggtattcagcataattatgattggttgaccattggccgcatgggaaacttaatgggtgcgctgaaagtggaacaccctggcacgcaaaatcagcgtttcgattttgccgaattcaacgaccagttcaaacaacagtttggctacgcgctctaatga

SEQ ID NO: 74 - protein, 321 aa, synthetic construct
  REGION 1..321: note = Variant of adenosine kinase
MHHHHHHGGSGMSALICGSLAYDTIMVFPDQFKNHILPDKVHILNVSFLVPRMRREFGGCAGNIAYNLHLLGGAPIPMGTVGQDFGPYREHFETLGIDLSRVKYIDDLFTAQAFITTDHDNNQITAFHPGAMMRSYENHVRDVPGVTLGLVGPDGREGMIQNAEEFAAGGIPFIFDPGQAMPLFNGPELREFIEQADYVVVNDYESNLLQERTGWNEQDIVSRVQAYITTQGPKGALVHTPEKTYDIPPAHERRVVDPTGCGDAFRAGLIYGIQHNYDWLTIGRMGNLMGALKVEHPGTQNQRFDFAEFNDQFKQQFGYAL

SEQ ID NO: 75 - DNA, 969 bp, synthetic construct
  misc_feature 1..969: note = Variant of adenosine kinase
  source 1..969: mol_type = other DNA
atgcaccatcatcaccatcacgggggctccggcatgagtgcactgatttgcggttctttagcgtatgataccatcatggtgtttccggaccagttcaagaaccatattctgcccgatcgggttcacatcctcaatgtcagctttcttgtaccacgcatgcgtcgtgaatttggaggctgtgccggcaacattgcgtacaatctgcatctgttgggtggtgctccgatccctatgggaacggtgggccaagatttcggtccgtatcgcgagcacttcgaaactctgggcattgacttatcccgcgtcaagatcatcgatgatctgtttacaccgcaggccttcattaccaccgaccatgataacaaccagattacggcgtttcatccaggcgcaatgatgcgttcgtacgaaaatcacgttcgtgatgtgccgggtgttaccttgggcctcgtaggtcctgatggacgcgagggcatgatccaaaatgccgaagaatttgctgctggtggcattccgttcatttttgacccaggtcaggcaatgccgctgttcaacggccccgaactgcgcgagtttatcgaacaggcggactatgtggtggtcaacgattacgaaagcaatcttcttcaagaacgtactggctggaacgagcaggacattgtttcacgcgtgcaggcgtatatcaccacgcaaggtcctaaaggagccctggtacatacaccggagaagacctacgatattccgccggcacacgaacgtcgtgtcgttgatccaactggttgcggcgacgcgtttcgcgccggcctgatctatggtattcagcataattatgattggttgaccattggccgcatgggaaacttaatgggtgcgctgaaagtggaacaccctggcacgcaaaatcagcgtttcgattttgccgaattcaacgaccagttcaaacaacagtttggctacgcgctctaatga

SEQ ID NO: 76 - protein, 321 aa, synthetic construct
  REGION 1..321: note = Variant of adenosine kinase
MHHHHHHGGSGMSALICGSLAYDTIMVFPDQFKNHILPDRVHILNVSFLVPRMRREFGGCAGNIAYNLHLLGGAPIPMGTVGQDFGPYREHFETLGIDLSRVKIIDDLFTPQAFITTDHDNNQITAFHPGAMMRSYENHVRDVPGVTLGLVGPDGREGMIQNAEEFAAGGIPFIFDPGQAMPLFNGPELREFIEQADYVVVNDYESNLLQERTGWNEQDIVSRVQAYITTQGPKGALVHTPEKTYDIPPAHERRVVDPTGCGDAFRAGLIYGIQHNYDWLTIGRMGNLMGALKVEHPGTQNQRFDFAEFNDQFKQQFGYAL

SEQ ID NO: 77 - DNA, 969 bp, synthetic construct
  misc_feature 1..969: note = Variant of adenosine kinase
  source 1..969: mol_type = other DNA
atgcaccatcatcaccatcacgggggctccggcatgagtgcactgatttgcggttctttagcgtatgataccatcatggtgtttccggaccagttcaagaaccatattctgcccgataaagttcacatcctcaatgtcagctttcttgtaccacgcatgcgtcgtgaatttggaggctgtgccggcaacattgcgtacaatctgcatctgttgggtggtgctccgatccctatgggaacggtgggccaagatttcggtccgtatcgcgagcacttcgaaactctgggcattgacttatcccgcgtcaagatcatcgatgatctgtttacaggtcaggccttcattaccaccgaccatgataacaaccagattacggcgtttcatccaggcgcaatgatgcgttcgtacgaaaatcacgttcgtgatgtgccgggtgttaccttgggcctcgtaggtcctgatggacgcgagggcatgatccaaaatgccgaagaatttgctgctggtggcattccgttcatttttgacccaggtcaggcaatgccgctgttcaacggccccgaactgcgcgagtttatcgaacaggcggactatgtggtggtcaacgattacgaaagcaatcttcttcaagaacgtactggctggaacgagcaggacattgtttcacgcgtgcaggcgtatatcaccacgcaaggtcctaaaggagccctggtacatacaccggagaagacctacgatattccgccggcacacgaacgtcgtgtcgttgatccaactggttgcggcgacgcgtttcgcgccggcctgatctatggtattcagcataattatgattggttgaccattggccgcatgggaaacttaatgggtgcgctgaaagtggaacaccctggcacgcaaaatcagcgtttcgattttgccgaattcaacgaccagttcaaacaacagtttggctacgcgctctaatga

SEQ ID NO: 78 - protein, 321 aa, synthetic construct
  REGION 1..321: note = Variant of adenosine kinase
MHHHHHHGGSGMSALICGSLAYDTIMVFPDQFKNHILPDKVHILNVSFLVPRMRREFGGCAGNIAYNLHLLGGAPIPMGTVGQDFGPYREHFETLGIDLSRVKIIDDLFTGQAFITTDHDNNQITAFHPGAMMRSYENHVRDVPGVTLGLVGPDGREGMIQNAEEFAAGGIPFIFDPGQAMPLFNGPELREFIEQADYVVVNDYESNLLQERTGWNEQDIVSRVQAYITTQGPKGALVHTPEKTYDIPPAHERRVVDPTGCGDAFRAGLIYGIQHNYDWLTIGRMGNLMGALKVEHPGTQNQRFDFAEFNDQFKQQFGYAL

SEQ ID NO: 79 - DNA, 969 bp, synthetic construct
  misc_feature 1..969: note = Variant of adenosine kinase
  source 1..969: mol_type = other DNA
atgcaccatcatcaccatcacgggggctccggcatgagtgcactgatttgcggttctttagcgtatgataccatcatggtgtttccggaccagttcaagaaccatattctgcccgataaagttcacatcctcaatgtcagctttcttgtaccacgcatgcgtcgtgaatttggaggctgtgccggcaacattgcgtacaatctgcatctgttgggtggtgctccgatccctatgggaacggtgggccaagatttcggtccgtatcgcgagcacttcgaaactctgggcattgacttatcccgcgtcaagatcatcgatgatctgagtacagctcaggccttcattaccaccgaccatgataacaaccagattacggcgtttcatccaggcgcaatgatgcgttcgtacgaaaatcacgttcgtgatgtgccgggtgttaccttgggcctcgtaggtcctgatggacgcgagggcatgatccaaaatgccgaagaatttgctgctggtggcattccgttcatttttgacccaggtcaggcaatgccgctgttcaacggccccgaactgcgcgagtttatcgaacaggcggactatgtggtggtcaacgattacgaaagcaatcttcttcaagaacgtactggctggaacgagcaggacattgtttcacgcgtgcaggcgtatatcaccacgcaaggtcctaaaggagccctggtacatacaccggagaagacctacgatattccgccggcacacgaacgtcgtgtcgttgatccaactggttgcggcgacgcgtttcgcgccggcctgatctatggtattcagcataattatgattggttgaccattggccgcatgggaaacttaatgggtgcgctgaaagtggaacaccctggcacgcaaaatcagcgtttcgattttgccgaattcaacgaccagttcaaacaacagtttggctacgcgctctaatga

SEQ ID NO: 80 - protein, 321 aa, synthetic construct
  REGION 1..321: note = Variant of adenosine kinase
MHHHHHHGGSGMSALICGSLAYDTIMVFPDQFKNHILPDKVHILNVSFLVPRMRREFGGCAGNIAYNLHLLGGAPIPMGTVGQDFGPYREHFETLGIDLSRVKIIDDLSTAQAFITTDHDNNQITAFHPGAMMRSYENHVRDVPGVTLGLVGPDGREGMIQNAEEFAAGGIPFIFDPGQAMPLFNGPELREFIEQADYVVVNDYESNLLQERTGWNEQDIVSRVQAYITTQGPKGALVHTPEKTYDIPPAHERRVVDPTGCGDAFRAGLIYGIQHNYDWLTIGRMGNLMGALKVEHPGTQNQRFDFAEFNDQFKQQFGYAL

SEQ ID NO: 81 - DNA, 969 bp, synthetic construct
  misc_feature 1..969: note = Variant of adenosine kinase
  source 1..969: mol_type = other DNA
atgcaccatcatcaccatcacgggggctccggcatgagtgcactgatttgcggttctttagcgtatgataccatcatggtgtttccggaccagttcaagaaccatattctgcccgataaagttcacatcctcaatgtcagctttcttgtaccacgcatgcgtcatgaatttggaggctgtgccggcaacattgcgtacaatctgcatctgttgggtggtgctccgatccctatgggaacggtgggccaagatttcggtccgtatcgcgagcacttcgaaactctgggcattgacttatcccgcgtcaagatcatcgatgatctgtttacaccgcaggccttcattaccaccgaccatgataacaaccagattacggcgtttcatccaggcgcaatgatgcgttcgtacgaaaatcacgttcgtgatgtgccgggtgttaccttgggcctcgtaggtcctgatggacgcgagggcatgatccaaaatgccgaagaatttgctgctggtggcattccgttcatttttgacccaggtcaggcaatgccgctgttcaacggccccgaactgcgcgagtttatcgaacaggcggactatgtggtggtcaacgattacgaaagcaatcttcttcaagaacgtactggctggaacgagcaggacattgtttcacgcgtgcaggcgtatatcaccacgcaaggtcctaaaggagccctggtacatacaccggagaagacctacgatattccgccggcacacgaacgtcgtgtcgttgatccaactggttgcggcgacgcgtttcgcgccggcctgatctatggtattcagcataattatgattggttgaccattggccgcatgggaaacttaatgggtgcgctgaaagtggaacaccctggcacgcaaaatcagcgtttcgattttgccgaattcaacgaccagttcaaacaatcgtttggctacgcgctctaatga

SEQ ID NO: 82 - protein, 321 aa, synthetic construct
  REGION 1..321: note = Variant of adenosine kinase
MHHHHHHGGSGMSALICGSLAYDTIMVFPDQFKNHILPDKVHILNVSFLVPRMRHEFGGCAGNIAYNLHLLGGAPIPMGTVGQDFGPYREHFETLGIDLSRVKIIDDLFTPQAFITTDHDNNQITAFHPGAMMRSYENHVRDVPGVTLGLVGPDGREGMIQNAEEFAAGGIPFIFDPGQAMPLFNGPELREFIEQADYVVVNDYESNLLQERTGWNEQDIVSRVQAYITTQGPKGALVHTPEKTYDIPPAHERRVVDPTGCGDAFRAGLIYGIQHNYDWLTIGRMGNLMGALKVEHPGTQNQRFDFAEFNDQFKQSFGYAL

SEQ ID NO: 83 - DNA, 969 bp, synthetic construct
  misc_feature 1..969: note = Variant of adenosine kinase
  source 1..969: mol_type = other DNA
atgcaccatcatcaccatcacgggggctccggcatgagtgcactgatttgcggttctttagcgtatgataccatcatggtgtttccggaccagttcaagaaccatattctgcccgataaagttcacatcctcaatgtcagctttcttgtaccacgcatgcgtcgtgaatttggaggctgtgccggcaacattgcgtacaatctgcatctgttgggtggtgctccgatccctatgggaacggtgggccaagatttcggtccgtatcgcgagcacttcgaaactctgggcattgacttatcccgcgtcaagatcatcgatgatctggggacagctcaggccttcattaccaccgaccatgataacaaccagattacggcgtttcatccaggcgcaatgatgcgttcgtacgaaaatcacgttcgtgatgtgccgggtgttaccttgggcctcgtaggtcctgatggacgcgagggcatgatccaaaatgccgaagaatttgctgctggtggcattccgttcatttttgacccaggtcaggcaatgccgctgttcaacggccccgaactgcgcgagtttatcgaacaggcggactatgtggtggtcaacgattacgaaagcaatcttcttcaagaacgtactggctggaacgagcaggacattgtttcacgcgtgcaggcgtatatcaccacgcaaggtcctaaaggagccctggtacatacaccggagaagacctacgatattccgccggcacacgaacgtcgtgtcgttgatccaactggttgcggcgacgcgtttcgcgccggcctgatctatggtattcagcataattatgattggttgaccattggccgcatgggaaacttaatgggtgcgctgaaagtggaacaccctggcacgcaaaatcagcgtttcgattttgccgaattcaacgaccagttcaaacaacagtttggctacgcgctctaatga

SEQ ID NO: 84 - protein, 321 aa, synthetic construct
  REGION 1..321: note = Variant of adenosine kinase
MHHHHHHGGSGMSALICGSLAYDTIMVFPDQFKNHILPDKVHILNVSFLVPRMRREFGGCAGNIAYNLHLLGGAPIPMGTVGQDFGPYREHFETLGIDLSRVKIIDDLGTAQAFITTDHDNNQITAFHPGAMMRSYENHVRDVPGVTLGLVGPDGREGMIQNAEEFAAGGIPFIFDPGQAMPLFNGPELREFIEQADYVVVNDYESNLLQERTGWNEQDIVSRVQAYITTQGPKGALVHTPEKTYDIPPAHERRVVDPTGCGDAFRAGLIYGIQHNYDWLTIGRMGNLMGALKVEHPGTQNQRFDFAEFNDQFKQQFGYAL

SEQ ID NO: 85 - DNA, 969 bp, synthetic construct
  misc_feature 1..969: note = Variant of adenosine kinase
  source 1..969: mol_type = other DNA
atgcaccatcatcaccatcacgggggctccggcatgagtgcactgatttgcggttctttagcgtatgataccatcatggtgtttccggaccagttcaagaaccatattctgcccgataaagttcacatcctcaatgtcagctttcttgtaccacgcatgcgtcgtgaatttggaggctgtgccggcaacattgcgtacaatctgcatctgttgggtggtgctccgatccctatgggaacggtgggccaagatttcggtccgtatcgcgagcacttcgaaactctgggcattgacttatcccgcgtcaagatcatcgatgatctgtttacaccgcaggccttcattaccaccgaccatgataacaaccagattacggcgtttcatccaggcgcaatgatgcgttcgtacgaaaatcacgttcgtgatgtgccgggtgttaccttgggcctcgtaggtcctgatggacgcgagggcatgatccaaaatgccgaagaatttgctgctggtggcattccgttcatttttgacccaggtcaggcaatgccgctgttcaacggccccgaactgcgcgagtttatcgaacaggcggactatgtggtggtcaacgattacgaaagcaatcttcttcaagaacgtactggctggaacgagcaggacattgtttcacgcgtgcaggcgtatatcaccacgcaaggtcctaaaggagccctggtacatacaccggagaagacctacgatattccgccggcacacgaacgtcgtgtcgttgatgttactggttgcggcgacgcgtttcgcgccggcctgatctatggtattcagcataattatgattggttgaccattggccgcatgggaaacttaatgggtgcgctgaaagtggaacaccctggcacgcaaaatcagcgtttcgattttgccgaattcaacgaccagttcaaacaacagtttggctacgcgctctaatga

SEQ ID NO: 86 - protein, 321 aa, synthetic construct
  REGION 1..321: note = Variant of adenosine kinase
MHHHHHHGGSGMSALICGSLAYDTIMVFPDQFKNHILPDKVHILNVSFLVPRMRREFGGCAGNIAYNLHLLGGAPIPMGTVGQDFGPYREHFETLGIDLSRVKIIDDLFTPQAFITTDHDNNQITAFHPGAMMRSYENHVRDVPGVTLGLVGPDGREGMIQNAEEFAAGGIPFIFDPGQAMPLFNGPELREFIEQADYVVVNDYESNLLQERTGWNEQDIVSRVQAYITTQGPKGALVHTPEKTYDIPPAHERRVVDVTGCGDAFRAGLIYGIQHNYDWLTIGRMGNLMGALKVEHPGTQNQRFDFAEFNDQFKQQFGYAL

SEQ ID NO: 87 - DNA, 969 bp, synthetic construct
  misc_feature 1..969: note = Variant of adenosine kinase
  source 1..969: mol_type = other DNA
atgcaccatcatcaccatcacgggggctccggcatgagtgcactgatttgcggttctttagcgtatgataccatcatggtgtttccggaccagttcaagaaccatattctgcccgataaagttcacatcctcaatgtcagctttcttgtaccacgcatgcgtcgtgaatttggaggctgtgccggcaacattgcgtacaatctgcatctgttgggtggtgctccgatccctatgggaacggtgggccaagatttcggtccgtatcgcgagcacttcgaaactctgggcattgacttatcccgcgtcaagatcatcgaggatctgtttacagctcaggccttcattaccaccgaccatgataacaaccagattacggcgtttcatccaggcgcaatgatgcgttcgtacgaaaatcacgttcgtgatgtgccgggtgttaccttgggcctcgtaggtcctgatggacgcgagggcatgatccaaaatgccgaagaatttgctgctggtggcattccgttcatttttgacccaggtcaggcaatgccgctgttcaacggccccgaactgcgcgagtttatcgaacaggcggactatgtggtggtcaacgattacgaaagcaatcttcttcaagaacgtactggctggaacgagcaggacattgtttcacgcgtgcaggcgtatatcaccacgcaaggtcctaaaggagccctggtacatacaccggagaagacctacgatattccgccggcacacgaacgtcgtgtcgttgatccaactggttgcggcgacgcgtttcgcgccggcctgatctatggtattcagcataattatgattggttgaccattggccgcatgggaaacttaatgggtgcgctgaaagtggaacaccctggcacgcaaaatcagcgtttcgattttgccgaattcaacgaccagttcaaacaacagtttggctacgcgctctaatga

SEQ ID NO: 88 - protein, 321 aa, synthetic construct
  REGION 1..321: note = Variant of adenosine kinase
MHHHHHHGGSGMSALICGSLAYDTIMVFPDQFKNHILPDKVHILNVSFLVPRMRREFGGCAGNIAYNLHLLGGAPIPMGTVGQDFGPYREHFETLGIDLSRVKIIEDLFTAQAFITTDHDNNQITAFHPGAMMRSYENHVRDVPGVTLGLVGPDGREGMIQNAEEFAAGGIPFIFDPGQAMPLFNGPELREFIEQADYVVVNDYESNLLQERTGWNEQDIVSRVQAYITTQGPKGALVHTPEKTYDIPPAHERRVVDPTGCGDAFRAGLIYGIQHNYDWLTIGRMGNLMGALKVEHPGTQNQRFDFAEFNDQFKQQFGYAL

SEQ ID NO: 89 - DNA, 969 bp, synthetic construct
  misc_feature 1..969: note = Variant of adenosine kinase
  source 1..969: mol_type = other DNA
atgcaccatcatcaccatcacgggggctccggcatgagtgcactgatttgcggttctttagcgtatgataccatcatggtgtttccggaccagttcaagaaccatattctgcccgataaagttcacatcctcaatgtcagctttcttgtaccacgcatgcgtcgtgaatttggaggctgtgccggcaacattgcgtacaatctgcatctgttgggtggtgctccgatccctatgggaacggtgggccaagatttcggtccgtatcgcgagcacttcgaaactctgggcattgacttatcccgcgtcaagaatatcgatgatctgtttacagctcaggccttcattaccaccgaccatgataacaaccagattacggcgtttcatccaggcgcaatgatgcgttcgtacgaaaatcacgttcgtgatgtgccgggtgttaccttgggcctcgtaggtcctgatggacgcgagggcatgatccaaaatgccgaagaatttgctgctggtggcattccgttcatttttgacccaggtcaggcaatgccgctgttcaacggccccgaactgcgcgagtttatcgaacaggcggactatgtggtggtcaacgattacgaaagcaatcttcttcaagaacgtactggctggaacgagcaggacattgtttcacgcgtgcaggcgtatatcaccacgcaaggtcctaaaggagccctggtacatacaccggagaagacctacgatattccgccggcacacgaacgtcgtgtcgttgatccaactggttgcggcgacgcgtttcgcgccggcctgatctatggtattcagcataattatgattggttgaccattggccgcatgggaaacttaatgggtgcgctgaaagtggaacaccctggcacgcaaaatcagcgtttcgattttgccgaattcaacgaccagttcaaacaacagtttggctacgcgctctaatga

SEQ ID NO: 90 - protein, 321 aa, synthetic construct
  REGION 1..321: note = Variant of adenosine kinase
MHHHHHHGGSGMSALICGSLAYDTIMVFPDQFKNHILPDKVHILNVSFLVPRMRREFGGCAGNIAYNLHLLGGAPIPMGTVGQDFGPYREHFETLGIDLSRVKNIDDLFTAQAFITTDHDNNQITAFHPGAMMRSYENHVRDVPGVTLGLVGPDGREGMIQNAEEFAAGGIPFIFDPGQAMPLFNGPELREFIEQADYVVVNDYESNLLQERTGWNEQDIVSRVQAYITTQGPKGALVHTPEKTYDIPPAHERRVVDPTGCGDAFRAGLIYGIQHNYDWLTIGRMGNLMGALKVEHPGTQNQRFDFAEFNDQFKQQFGYAL

SEQ ID NO: 91 - DNA, 969 bp, synthetic construct
  misc_feature 1..969: note = Variant of adenosine kinase
  source 1..969: mol_type = other DNA
atgcaccatcatcaccatcacgggggctccggcatgagtgcactgatttgcggttctttagcgtatgataccatcatggtgtttccggaccagttcaagaaccatattctgcccgataaagttcacatcctcaatgtcagctttcttgtaccacgcatgcgtcgtgaatttggaggctgtgccggcaacattgcgtacaatctgcatctgttgggtggtgctccgatccctatgggaacggtgggccaagatttcggtccgtatcgcgagcacttcgaaactctgggcattgacttatcccgcgtcaagatcatcgatgatctgacgacagctcaggccttcattaccaccgaccatgataacaaccagattacggcgtttcatccaggcgcaatgatgcgttcgtacgaaaatcacgttcgtgatgtgccgggtgttaccttgggcctcgtaggtcctgatggacgcgagggcatgatccaaaatgccgaagaatttgctgctggtggcattccgttcatttttgacccaggtcaggcaatgccgctgttcaacggccccgaactgcgcgagtttatcgaacaggcggactatgtggtggtcaacgattacgaaagcaatcttcttcaagaacgtactggctggaacgagcaggacattgtttcacgcgtgcaggcgtatatcaccacgcaaggtcctaaaggagccctggtacatacaccggagaagacctacgatattccgccggcacacgaacgtcgtgtcgttgatccaactggttgcggcgacgcgtttcgcgccggcctgatctatggtattcagcataattatgattggttgaccattggccgcatgggaaacttaatgggtgcgctgaaagtggaacaccctggcacgcaaaatcagcgtttcgattttgccgaattcaacgaccagttcaaacaacagtttggctacgcgctctaatga

SEQ ID NO: 92 - protein, 321 aa, synthetic construct
  REGION 1..321: note = Variant of adenosine kinase
MHHHHHHGGSGMSALICGSLAYDTIMVFPDQFKNHILPDKVHILNVSFLVPRMRREFGGCAGNIAYNLHLLGGAPIPMGTVGQDFGPYREHFETLGIDLSRVKIIDDLTTAQAFITTDHDNNQITAFHPGAMMRSYENHVRDVPGVTLGLVGPDGREGMIQNAEEFAAGGIPFIFDPGQAMPLFNGPELREFIEQADYVVVNDYESNLLQERTGWNEQDIVSRVQAYITTQGPKGALVHTPEKTYDIPPAHERRVVDPTGCGDAFRAGLIYGIQHNYDWLTIGRMGNLMGALKVEHPGTQNQRFDFAEFNDQFKQQFGYAL

SEQ ID NO: 93 - DNA, 969 bp, synthetic construct
  misc_feature 1..969: note = Variant of adenosine kinase
  source 1..969: mol_type = other DNA
atgcaccatcatcaccatcacgggggctccggcatgagtgcactgatttgcggttctttagcgtatgataccatcatggtgtttccggaccagttcaagaaccatattctgcccgataaagttcacatcctcaatgtcagctttcttgtaccacgcatgcgtcgtgaatttggaggctgtgccggcaacattgcgtacaatctgcatctgttgggtggtgctccgatccctatgggaacggtgggccaagatttcggtccgtatcgcgagcacttcgaaactctgggcattgacttatcccgcgtcaagatcatcgatgatctgcctacagctcaggccttcattaccaccgaccatgataacaaccagattacggcgtttcatccaggcgcaatgatgcgttcgtacgaaaatcacgttcgtgatgtgccgggtgttaccttgggcctcgtaggtcctgatggacgcgagggcatgatccaaaatgccgaagaatttgctgctggtggcattccgttcatttttgacccaggtcaggcaatgccgctgttcaacggccccgaactgcgcgagtttatcgaacaggcggactatgtggtggtcaacgattacgaaagcaatcttcttcaagaacgtactggctggaacgagcaggacattgtttcacgcgtgcaggcgtatatcaccacgcaaggtcctaaaggagccctggtacatacaccggagaagacctacgatattccgccggcacacgaacgtcgtgtcgttgatccaactggttgcggcgacgcgtttcgcgccggcctgatctatggtattcagcataattatgattggttgaccattggccgcatgggaaacttaatgggtgcgctgaaagtggaacaccctggcacgcaaaatcagcgtttcgattttgccgaattcaacgaccagttcaaacaacagtttggctacgcgctctaatga

SEQ ID NO: 94 - protein, 321 aa, synthetic construct
  REGION 1..321: note = Variant of adenosine kinase
MHHHHHHGGSGMSALICGSLAYDTIMVFPDQFKNHILPDKVHILNVSFLVPRMRREFGGCAGNIAYNLHLLGGAPIPMGTVGQDFGPYREHFETLGIDLSRVKIIDDLPTAQAFITTDHDNNQITAFHPGAMMRSYENHVRDVPGVTLGLVGPDGREGMIQNAEEFAAGGIPFIFDPGQAMPLFNGPELREFIEQADYVVVNDYESNLLQERTGWNEQDIVSRVQAYITTQGPKGALVHTPEKTYDIPPAHERRVVDPTGCGDAFRAGLIYGIQHNYDWLTIGRMGNLMGALKVEHPGTQNQRFDFAEFNDQFKQQFGYAL

SEQ ID NO: 95 - DNA, 969 bp, synthetic construct
  misc_feature 1..969: note = Variant of adenosine kinase
  source 1..969: mol_type = other DNA
atgcaccatcatcaccatcacgggggctccggcatgagtgcactgatttgcggttctttagcgtatgataccatcatggtgtttccggaccagttcaagaaccatattctgcccgataaagttcacatcctcaatgtcagctttcttgtaccacgcatgcgtcgtgaatttggaggctgtgccggcaacattgcgtacaatctgcatctgttgggtggtgctccgatccctatgggaacggtgggccaagatttcggtccgtatcgcgagcacttcgaaactctgggcattgacttatcccgcgtccagatcatcgatgatctgtttacagcgcaggccttcattaccaccgaccatgataacaaccagattacggcgtttcatccaggcgcaatgatgcgttcgtacgaaaatcacgttcgtgatgtgccgggtgttaccttgggcctcgtaggtcctgatggacgcgagggcatgatccaaaatgccgaagaatttgctgctggtggcattccgttcatttttgacccaggtcaggcaatgccgctgttcaacggccccgaactgcgcgagtttatcgaacaggcggactatgtggtggtcaacgattacgaaagcaatcttcttcaagaacgtactggctggaacgagcaggacattgtttcacgcgtgcaggcgtatatcaccacgcaaggtcctaaaggagccctggtacatacaccggagaagacctacgatattccgccggcacacgaacgtcgtgtcgttgatccaactggttgcggcgacgcgtttcgcgccggcctgatctatggtattcagcataattatgattggttgaccattggccgcatgggaaacttaatgggtgcgctgaaagtggaacaccctggcacgcaaaatcagcgtttcgattttgccgaattcaacgaccagttcaaacaacagtttggctacgcgctctaatga

SEQ ID NO: 96 - protein, 321 aa, synthetic construct
  REGION 1..321: note = Variant of adenosine kinase
MHHHHHHGGSGMSALICGSLAYDTIMVFPDQFKNHILPDKVHILNVSFLVPRMRREFGGCAGNIAYNLHLLGGAPIPMGTVGQDFGPYREHFETLGIDLSRVQIIDDLFTAQAFITTDHDNNQITAFHPGAMMRSYENHVRDVPGVTLGLVGPDGREGMIQNAEEFAAGGIPFIFDPGQAMPLFNGPELREFIEQADYVVVNDYESNLLQERTGWNEQDIVSRVQAYITTQGPKGALVHTPEKTYDIPPAHERRVVDPTGCGDAFRAGLIYGIQHNYDWLTIGRMGNLMGALKVEHPGTQNQRFDFAEFNDQFKQQFGYAL

SEQ ID NO: 97 - DNA, 969 bp, synthetic construct
  misc_feature 1..969: note = Variant of adenosine kinase
  source 1..969: mol_type = other DNA
atgcaccatcatcaccatcacgggggctccggcatgagtgcactgatttgcggttctttagcgtatgataccatcatggtgtttccggaccagttcaagaaccatattctgcccgataaagttcacatcctcaatgtcagctttcttgtaccacgcatgcgtcgtgaatttggaggctgtgccggcaacattgcgtacaatctgcatctgttgggtggtgctccgatccctatgggaacggtgggccaagatttcggtccgtatcgcgagcacttcgaaactctgggcattgacttatcccgcgtcaaggatatcgatgatctgtttacagctcaggccttcattaccaccgaccatgataacaaccagattacggcgtttcatccaggcgcaatgatgcgttcgtacgaaaatcacgttcgtgatgtgccgggtgttaccttgggcctcgtaggtcctgatggacgcgagggcatgatccaaaatgccgaagaatttgctgctggtggcattccgttcatttttgacccaggtcaggcaatgccgctgttcaacggccccgaactgcgcgagtttatcgaacaggcggactatgtggtggtcaacgattacgaaagcaatcttcttcaagaacgtactggctggaacgagcaggacattgtttcacgcgtgcaggcgtatatcaccacgcaaggtcctaaaggagccctggtacatacaccggagaagacctacgatattccgccggcacacgaacgtcgtgtcgttgatccaactggttgcggcgacgcgtttcgcgccggcctgatctatggtattcagcataattatgattggttgaccattggccgcatgggaaacttaatgggtgcgctgaaagtggaacaccctggcacgcaaaatcagcgtttcgattttgccgaattcaacgaccagttcaaacaacagtttggctacgcgctctaatga

SEQ ID NO: 98 - protein, 321 aa, synthetic construct
  REGION 1..321: note = Variant of adenosine kinase
MHHHHHHGGSGMSALICGSLAYDTIMVFPDQFKNHILPDKVHILNVSFLVPRMRREFGGCAGNIAYNLHLLGGAPIPMGTVGQDFGPYREHFETLGIDLSRVKDIDDLFTAQAFITTDHDNNQITAFHPGAMMRSYENHVRDVPGVTLGLVGPDGREGMIQNAEEFAAGGIPFIFDPGQAMPLFNGPELREFIEQADYVVVNDYESNLLQERTGWNEQDIVSRVQAYITTQGPKGALVHTPEKTYDIPPAHERRVVDPTGCGDAFRAGLIYGIQHNYDWLTIGRMGNLMGALKVEHPGTQNQRFDFAEFNDQFKQQFGYAL

SEQ ID NO: 99 - DNA, 969 bp, synthetic construct
  misc_feature 1..969: note = Variant of adenosine kinase
  source 1..969: mol_type = other DNA
atgcaccatcatcaccatcacgggggctccggcatgagtgcactgatttgcggttctttagcgtatgataccatcatggtgtttccggaccagttcaagaaccatattctgcccgataaagttcacatcctcaatgtcagctttcttgtaccacgcatgcgtcgtgaatttggaggctgtgccggcaacattgcgtacaatctgcatctgttgggtggtgctccgatccctatgggaacggtgggccaagatttcggtccgtatcgcgagcacttcgaaactctgggcattgacttatcccgcgtcaagaggatcgatgatctgtttacagctcaggccttcattaccaccgaccatgataacaaccagattacggcgtttcatccaggcgcaatgatgcgttcgtacgaaaatcacgttcgtgatgtgccgggtgttaccttgggcctcgtaggtcctgatggacgcgagggcatgatccaaaatgccgaagaatttgctgctggtggcattccgttcatttttgacccaggtcaggcaatgccgctgttcaacggccccgaactgcgcgagtttatcgaacaggcggactatgtggtggtcaacgattacgaaagcaatcttcttcaagaacgtactggctggaacgagcaggacattgtttcacgcgtgcaggcgtatatcaccacgcaaggtcctaaaggagccctggtacatacaccggagaagacctacgatattccgccggcacacgaacgtcgtgtcgttgatccaactggttgcggcgacgcgtttcgcgccggcctgatctatggtattcagcataattatgattggttgaccattggccgcatgggaaacttaatgggtgcgctgaaagtggaacaccctggcacgcaaaatcagcgtttcgattttgccgaattcaacgaccagttcaaacaacagtttggctacgcgctctaatga

SEQ ID NO: 100 - protein, 321 aa, synthetic construct
  REGION 1..321: note = Variant of adenosine kinase
MHHHHHHGGSGMSALICGSLAYDTIMVFPDQFKNHILPDKVHILNVSFLVPRMRREFGGCAGNIAYNLHLLGGAPIPMGTVGQDFGPYREHFETLGIDLSRVKRIDDLFTAQAFITTDHDNNQITAFHPGAMMRSYENHVRDVPGVTLGLVGPDGREGMIQNAEEFAAGGIPFIFDPGQAMPLFNGPELREFIEQADYVVVNDYESNLLQERTGWNEQDIVSRVQAYITTQGPKGALVHTPEKTYDIPPAHERRVVDPTGCGDAFRAGLIYGIQHNYDWLTIGRMGNLMGALKVEHPGTQNQRFDFAEFNDQFKQQFGYAL

SEQ ID NO: 101 - DNA, 969 bp, synthetic construct
  misc_feature 1..969: note = Variant of adenosine kinase
  source 1..969: mol_type = other DNA
atgcaccatcatcaccatcacgggggctccggcatgagtgcactgatttgcggttctttagcgtatgataccatcatggtgtttccggaccagttcaagaaccatattctgcccgataaagttcacatcctcaatgtcagctttcttgtaccacgcatgcgtcgtgaatttggaggctgtgccggcaacattgcgtacaatctgcatctgttgggtggtgctccgatccctatgggaacggtgggccaagatttcggtccgtatcgcgagcacttcgaaactctgggcattgacttatcccgcgtcaagatcatcgatgatctgtttacaccgcaggccttcattaccaccgaccatgattttaaccagattacggcgtttcatccaggcgcaatgatgcgttcgtacgaaaatcacgttcgtgatgtgccgggtgttaccttgggcctcgtaggtcctgatggacgcgagggcatgatccaaaatgccgaagaatttgctgctggtggcattccgttcatttttgacccaggtcaggcaatgccgctgttcaacggccccgaactgcgcgagtttatcgaacaggcggactatgtggtggtcaacgattacgaaagcaatcttcttcaagaacgtactggctggaacgagcaggacattgtttcacgcgtgcaggcgtatatcaccacgcaaggtcctaaaggagccctggtacatacaccggagaagacctacgatattccgccggcacacgaacgtcgtgtcgttgatccaactggttgcggcgacgcgtttcgcgccggcctgatctatggtattcagcataattatgattggttgaccattggccgcatgggaaacttaatgggtgcgctgaaagtggaacaccctggcacgcaaaatcagcgtttcgattttgccgaattcaacgaccagttcaaacaacagtttggctacgcgctctaatga

SEQ ID NO: 102 - protein, 321 aa, synthetic construct
  REGION 1..321: note = Variant of adenosine kinase
MHHHHHHGGSGMSALICGSLAYDTIMVFPDQFKNHILPDKVHILNVSFLVPRMRREFGGCAGNIAYNLHLLGGAPIPMGTVGQDFGPYREHFETLGIDLSRVKIIDDLFTPQAFITTDHDFNQITAFHPGAMMRSYENHVRDVPGVTLGLVGPDGREGMIQNAEEFAAGGIPFIFDPGQAMPLFNGPELREFIEQADYVVVNDYESNLLQERTGWNEQDIVSRVQAYITTQGPKGALVHTPEKTYDIPPAHERRVVDPTGCGDAFRAGLIYGIQHNYDWLTIGRMGNLMGALKVEHPGTQNQRFDFAEFNDQFKQQFGYAL

SEQ ID NO: 103 - DNA, 969 bp, synthetic construct
  misc_feature 1..969: note = Variant of adenosine kinase
  source 1..969: mol_type = other DNA
atgcaccatcatcaccatcacgggggctccggcatgagtgcactgatttgcggttctttagcgtatgataccatcatggtgtttccggaccagttcaagaaccatattctgcccgataaagttcacatcctcaatgtcagctttcttgtaccacgcatgcgtcgtgaatttggaggctgtgccggcaacattgcgtacaatctgcatctgttgggtggtgctccgatccctatgggaacggtgggccaagatttcggtccgtatcgcgagcacttcgaaactctgggcattgacttatcccgcgtcaagtcgatcgatgatctgtttacagctcaggccttcattaccaccgaccatgataacaaccagattacggcgtttcatccaggcgcaatgatgcgttcgtacgaaaatcacgttcgtgatgtgccgggtgttaccttgggcctcgtaggtcctgatggacgcgagggcatgatccaaaatgccgaagaatttgctgctggtggcattccgttcatttttgacccaggtcaggcaatgccgctgttcaacggccccgaactgcgcgagtttatcgaacaggcggactatgtggtggtcaacgattacgaaagcaatcttcttcaagaacgtactggctggaacgagcaggacattgtttcacgcgtgcaggcgtatatcaccacgcaaggtcctaaaggagccctggtacatacaccggagaagacctacgatattccgccggcacacgaacgtcgtgtcgttgatccaactggttgcggcgacgcgtttcgcgccggcctgatctatggtattcagcataattatgattggttgaccattggccgcatgggaaacttaatgggtgcgctgaaagtggaacaccctggcacgcaaaatcagcgtttcgattttgccgaattcaacgaccagttcaaacaacagtttggctacgcgctctaatga

SEQ ID NO: 104 - protein, 321 aa, synthetic construct
  REGION 1..321: note = Variant of adenosine kinase
MHHHHHHGGSGMSALICGSLAYDTIMVFPDQFKNHILPDKVHILNVSFLVPRMRREFGGCAGNIAYNLHLLGGAPIPMGTVGQDFGPYREHFETLGIDLSRVKSIDDLFTAQAFITTDHDNNQITAFHPGAMMRSYENHVRDVPGVTLGLVGPDGREGMIQNAEEFAAGGIPFIFDPGQAMPLFNGPELREFIEQADYVVVNDYESNLLQERTGWNEQDIVSRVQAYITTQGPKGALVHTPEKTYDIPPAHERRVVDPTGCGDAFRAGLIYGIQHNYDWLTIGRMGNLMGALKVEHPGTQNQRFDFAEFNDQFKQQFGYAL

SEQ ID NO: 105 - DNA, 969 bp, synthetic construct
  misc_feature 1..969: note = Variant of adenosine kinase
  source 1..969: mol_type = other DNA
atgcaccatcatcaccatcacgggggctccggcatgagtgcactgatttgcggttctttagcgtatgataccatcatggtgtttccggaccagttcaagaaccatattctgcccgataaagttcacatcctcaatgtcagctttcttgtaccacgcatgcgtcgtgaatttggaggctgtgccggcaacattgcgtacaatctgcatctgttgggtggtgctccgatccctatgggaacggtgggccaagatttcggtccgtatcgcgagcacttcgaaactctgggcattgacttatcccgcgtcaagacgatcgatgatctgtttacagctcaggccttcattaccaccgaccatgataacaaccagattacggcgtttcatccaggcgcaatgatgcgttcgtacgaaaatcacgttcgtgatgtgccgggtgttaccttgggcctcgtaggtcctgatggacgcgagggcatgatccaaaatgccgaagaatttgctgctggtggcattccgttcatttttgacccaggtcaggcaatgccgctgttcaacggccccgaactgcgcgagtttatcgaacaggcggactatgtggtggtcaacgattacgaaagcaatcttcttcaagaacgtactggctggaacgagcaggacattgtttcacgcgtgcaggcgtatatcaccacgcaaggtcctaaaggagccctggtacatacaccggagaagacctacgatattccgccggcacacgaacgtcgtgtcgttgatccaactggttgcggcgacgcgtttcgcgccggcctgatctatggtattcagcataattatgattggttgaccattggccgcatgggaaacttaatgggtgcgctgaaagtggaacaccctggcacgcaaaatcagcgtttcgattttgccgaattcaacgaccagttcaaacaacagtttggctacgcgctctaatga

SEQ ID NO: 106 - protein, 321 aa, synthetic construct
  REGION 1..321: note = Variant of adenosine kinase
MHHHHHHGGSGMSALICGSLAYDTIMVFPDQFKNHILPDKVHILNVSFLVPRMRREFGGCAGNIAYNLHLLGGAPIPMGTVGQDFGPYREHFETLGIDLSRVKTIDDLFTAQAFITTDHDNNQITAFHPGAMMRSYENHVRDVPGVTLGLVGPDGREGMIQNAEEFAAGGIPFIFDPGQAMPLFNGPELREFIEQADYVVVNDYESNLLQERTGWNEQDIVSRVQAYITTQGPKGALVHTPEKTYDIPPAHERRVVDPTGCGDAFRAGLIYGIQHNYDWLTIGRMGNLMGALKVEHPGTQNQRFDFAEFNDQFKQQFGYAL

SEQ ID NO: 107 - DNA, 969 bp, synthetic construct
  misc_feature 1..969: note = Variant of adenosine kinase
  source 1..969: mol_type = other DNA
atgcaccatcatcaccatcacgggggctccggcatgagtgcactgatttgcggttctttagcgtatgataccatcatggtgtttccggaccagttcaagaaccatattctgcccgataaagttcacatcctcaatgtcagctttcttgtaccacgcatgcgtcgtgaatttggaggctgtgccggcaacattgcgtacaatctgcatctgttgggtggtgctccgatccctatgggaacggtgggccaagatttcggtccgtatcgcgagcacttcgaaactctgggcattgacttatcccgcgtcaagatcatcgatgatctgtttacaccgcaggccttcattaccaccgaccatgataacaaccagattacggcgtttcatccaggcgcaatgatgcgttcgtacgaaaatcacgttcgtgatgtgccgggtgttaccttgggcctcgtaggtcctgatggacgcgagggcatgatccaaaatgccgaagaatttgctgctggtggcattccgttcatttttgacccaggtcaggcaatgccgctgttcaacggccccgaactgcgcgagtttatcgaacaggcggactatgtggtggtcaacgattacgaaagccggcttcttcaagaacgtactggctggaacgagcaggacattgtttcacgcgtgcaggcgtatatcaccacgcaaggtcctaaaggagccctggtacatacaccggagaagacctacgatattccgccggcacacgaacgtcgtgtcgttgatccaactggttgcggcgacgcgtttcgcgccggcctgatctatggtattcagcataattatgattggttgaccattggccgcatgggaaacttaatgggtgcgctgaaagtggaacaccctggcacgcaaaatcagcgtttcgattttgccgaattcaacgaccagttcaaacaacagtttggctacgcgctctaatga

SEQ ID NO: 108 - protein, 321 aa, synthetic construct
  REGION 1..321: note = Variant of adenosine kinase
MHHHHHHGGSGMSALICGSLAYDTIMVFPDQFKNHILPDKVHILNVSFLVPRMRREFGGCAGNIAYNLHLLGGAPIPMGTVGQDFGPYREHFETLGIDLSRVKIIDDLFTPQAFITTDHDNNQITAFHPGAMMRSYENHVRDVPGVTLGLVGPDGREGMIQNAEEFAAGGIPFIFDPGQAMPLFNGPELREFIEQADYVVVNDYESRLLQERTGWNEQDIVSRVQAYITTQGPKGALVHTPEKTYDIPPAHERRVVDPTGCGDAFRAGLIYGIQHNYDWLTIGRMGNLMGALKVEHPGTQNQRFDFAEFNDQFKQQFGYAL

SEQ ID NO: 109 - DNA, 969 bp, synthetic construct
  misc_feature 1..969: note = Variant of adenosine kinase
  source 1..969: mol_type = other DNA
atgcaccatcatcaccatcacgggggctccggcatgagtgcactgatttgcggttctttagcgtatgataccatcatggtgtttccggaccagttcaagaaccatattctgcccgataaagttcacatcctcaatgtcagctttcttgtaccacgcatgcgtcgtgaatttggaggctgtgccggcaacattgcgtacaatctgcatctgttgggtggtgctccgatccctatgggaacggtgggccaagatttcggtccgtatcgcgagcacttcgaaactctgggcattgacttatcccgcgtcaagatcatcgatgatctgtttacagcgcaggccttcattaccaccgaccatgataacaaccagattacggcgtttcatccaggcgcaatgatgcgttcgtacgaaaatcacgttcgtgatgtgccgggtgttaccttgggcctcgtaggtcctgatggacgcgagggcatgatccaaaatgccgaagaatttgctgctggtggcattccgttcatttttgacccaggtcaggcaatgccgctgttcaacggccccgaactgcgcgagtttatcgaacaggcggactatgtggtggtcaacgattacgaaagcaatcttcttcaagaacgtactggctggaacgagcaggacattgtttcacgcgtgcaggcgtatatcaccacgcaaggtcctaaaggagccctggtacatacaccggagaagacctacgatattccgccggcacacgaacgtcgtgtcgttgatccaactggttgcggcgacgcgtttcgcgccggcctgatctatggtattcagcataattatgattggttgaccattggccgcatgggaaacttaatgggtgcgctgaaagtggaacaccctggcacgcaaaatcagcgtttcgattttgccgaattcaacgaccagttcaaacaacagtttggctacgcgctctaatga

SEQ ID NO: 110 - protein, 321 aa, synthetic construct
  REGION 1..321: note = Variant of adenosine kinase
MHHHHHHGGSGMSALICGSLAYDTIMVFPDQFKNHILPDKVHILNVSFLVPRMRREFGGCAGNIAYNLHLLGGAPIPMGTVGQDFGPYREHFETLGIDLSRVKIIDDLFTAQAFITTDHDNNQITAFHPGAMMRSYENHVRDVPGVTLGLVGPDGREGMIQNAEEFAAGGIPFIFDPGQAMPLFNGPELREFIEQADYVVVNDYESNLLQERTGWNEQDIVSRVQAYITTQGPKGALVHTPEKTYDIPPAHERRVVDPTGCGDAFRAGLIYGIQHNYDWLTIGRMGNLMGALKVEHPGTQNQRFDFAEFNDQFKQQFGYAL

SEQ ID NO: 111 - DNA, 969 bp, synthetic construct
  misc_feature 1..969: note = Variant of adenosine kinase
  source 1..969: mol_type = other DNA
atgcaccatcatcaccatcacgggggctccggcatgagtgcactgatttgcggttctttagcgtatgataccatcatggtgtttccggaccagttcaagaaccatattctgcccgataaagttcacatcctcaatgtcagctttcttgtaccacgcatgcgtcgtgaatttggaggctgtgccggcaacattgcgtacaatctgcatctgttgggtggtgctccgatccctatgggaacggtgggccaagatttcggtccgtatcgcgagcacttcgaaactctgggcattgacttatcccgcgtcaagatcatcgatgatctggagacagctcaggccttcattaccaccgaccatgataacaaccagattacggcgtttcatccaggcgcaatgatgcgttcgtacgaaaatcacgttcgtgatgtgccgggtgttaccttgggcctcgtaggtcctgatggacgcgagggcatgatccaaaatgccgaagaatttgctgctggtggcattccgttcatttttgacccaggtcaggcaatgccgctgttcaacggccccgaactgcgcgagtttatcgaacaggcggactatgtggtggtcaacgattacgaaagcaatcttcttcaagaacgtactggctggaacgagcaggacattgtttcacgcgtgcaggcgtatatcaccacgcaaggtcctaaaggagccctggtacatacaccggagaagacctacgatattccgccggcacacgaacgtcgtgtcgttgatccaactggttgcggcgacgcgtttcgcgccggcctgatctatggtattcagcataattatgattggttgaccattggccgcatgggaaacttaatgggtgcgctgaaagtggaacaccctggcacgcaaaatcagcgtttcgattttgccgaattcaacgaccagttcaaacaacagtttggctacgcgctctaatga

SEQ ID NO: 112 - protein, 321 aa, synthetic construct
  REGION 1..321: note = Variant of adenosine kinase
MHHHHHHGGSGMSALICGSLAYDTIMVFPDQFKNHILPDKVHILNVSFLVPRMRREFGGCAGNIAYNLHLLGGAPIPMGTVGQDFGPYREHFETLGIDLSRVKIIDDLETAQAFITTDHDNNQITAFHPGAMMRSYENHVRDVPGVTLGLVGPDGREGMIQNAEEFAAGGIPFIFDPGQAMPLFNGPELREFIEQADYVVVNDYESNLLQERTGWNEQDIVSRVQAYITTQGPKGALVHTPEKTYDIPPAHERRVVDPTGCGDAFRAGLIYGIQHNYDWLTIGRMGNLMGALKVEHPGTQNQRFDFAEFNDQFKQQFGYAL

SEQ ID NO: 113 - DNA, 969 bp, synthetic construct
  misc_feature 1..969: note = Variant of adenosine kinase
  source 1..969: mol_type = other DNA
atgcaccatcatcaccatcacgggggctccggcatgagtgcactgatttgcggttctttagcgtatgataccatcatggtgtttccggaccagttcaagaaccatattctgcccgataaagttcacatcctcaatgtcagctttcttgtaccacgcatgcgtcgtgaatttggaggctgtgccggcaacattgcgtacaatctgcatctgttgggtggtgctccgatccctatgggaacggtgggccaagatttcggtccgtatcgcgagcacttcgaaactctgggcattgacttatcccgcgtcaggatcatcgatgatctgtttacagcgcaggccttcattaccaccgaccatgataacaaccagattacggcgtttcatccaggcgcaatgatgcgttcgtacgaaaatcacgttcgtgatgtgccgggtgttaccttgggcctcgtaggtcctgatggacgcgagggcatgatccaaaatgccgaagaatttgctgctggtggcattccgttcatttttgacccaggtcaggcaatgccgctgttcaacggccccgaactgcgcgagtttatcgaacaggcggactatgtggtggtcaacgattacgaaagcaatcttcttcaagaacgtactggctggaacgagcaggacattgtttcacgcgtgcaggcgtatatcaccacgcaaggtcctaaaggagccctggtacatacaccggagaagacctacgatattccgccggcacacgaacgtcgtgtcgttgatccaactggttgcggcgacgcgtttcgcgccggcctgatctatggtattcagcataattatgattggttgaccattggccgcatgggaaacttaatgggtgcgctgaaagtggaacaccctggcacgcaaaatcagcgtttcgattttgccgaattcaacgaccagttcaaacaacagtttggctacgcgctctaatga

SEQ ID NO: 114 - protein, 321 aa, synthetic construct
  REGION 1..321: note = Variant of adenosine kinase
MHHHHHHGGSGMSALICGSLAYDTIMVFPDQFKNHILPDKVHILNVSFLVPRMRREFGGCAGNIAYNLHLLGGAPIPMGTVGQDFGPYREHFETLGIDLSRVRIIDDLFTAQAFITTDHDNNQITAFHPGAMMRSYENHVRDVPGVTLGLVGPDGREGMIQNAEEFAAGGIPFIFDPGQAMPLFNGPELREFIEQADYVVVNDYESNLLQERTGWNEQDIVSRVQAYITTQGPKGALVHTPEKTYDIPPAHERRVVDPTGCGDAFRAGLIYGIQHNYDWLTIGRMGNLMGALKVEHPGTQNQRFDFAEFNDQFKQQFGYAL

SEQ ID NO: 115 - DNA, 969 bp, synthetic construct
  misc_feature 1..969: note = Variant of adenosine kinase
  source 1..969: mol_type = other DNA
atgcaccatcatcaccatcacgggggctccggcatgagtgcactgatttgcggttctttagcgtatgataccatcatggtgtttccggaccagttcaagaaccatattctgcccgataaagttcacatcctcaatgtcagctttcttgtaccacgcatgcgtcgtgaatttggaggctgtgccggcaacattgcgtacaatctgcatctgttgggtggtgctccgatccctatgggaacggtgggccaagatttcggtccgtatcgcgagcacttcgaaactctgggcattgacttatcccgcgtcaagatcatcgatgatctgctgacagctcaggccttcattaccaccgaccatgataacaaccagattacggcgtttcatccaggcgcaatgatgcgttcgtacgaaaatcacgttcgtgatgtgccgggtgttaccttgggcctcgtaggtcctgatggacgcgagggcatgatccaaaatgccgaagaatttgctgctggtggcattccgttcatttttgacccaggtcaggcaatgccgctgttcaacggccccgaactgcgcgagtttatcgaacaggcggactatgtggtggtcaacgattacgaaagcaatcttcttcaagaacgtactggctggaacgagcaggacattgtttcacgcgtgcaggcgtatatcaccacgcaaggtcctaaaggagccctggtacatacaccggagaagacctacgatattccgccggcacacgaacgtcgtgtcgttgatccaactggttgcggcgacgcgtttcgcgccggcctgatctatggtattcagcataattatgattggttgaccattggccgcatgggaaacttaatgggtgcgctgaaagtggaacaccctggcacgcaaaatcagcgtttcgattttgccgaattcaacgaccagttcaaacaacagtttggctacgcgctctaatga

SEQ ID NO: 116 - protein, 321 aa, synthetic construct
  REGION 1..321: note = Variant of adenosine kinase
MHHHHHHGGSGMSALICGSLAYDTIMVFPDQFKNHILPDKVHILNVSFLVPRMRREFGGCAGNIAYNLHLLGGAPIPMGTVGQDFGPYREHFETLGIDLSRVKIIDDLLTAQAFITTDHDNNQITAFHPGAMMRSYENHVRDVPGVTLGLVGPDGREGMIQNAEEFAAGGIPFIFDPGQAMPLFNGPELREFIEQADYVVVNDYESNLLQERTGWNEQDIVSRVQAYITTQGPKGALVHTPEKTYDIPPAHERRVVDPTGCGDAFRAGLIYGIQHNYDWLTIGRMGNLMGALKVEHPGTQNQRFDFAEFNDQFKQQFGYAL

SEQ ID NO: 117 - DNA, 969 bp, synthetic construct
  misc_feature 1..969: note = Variant of adenosine kinase
  source 1..969: mol_type = other DNA
atgcaccatcatcaccatcacgggggctccggcatgagtgcactgatttgcggttctttagcgtatgataccatcatggtgtttccggaccagttcaagaaccatattctgcccgataaagttcacatcctcaatgtcagctttcttgtaccacgcatgcgtcgtgaatttggaggctgtgccggcaacattgcgtacaatctgcatctgttgggtggtgctccgatccctatgggaacggtgggccaagatttcggtccgtatcgcgagcacttcgaaactctgggcattgacttatcccgcgtcaagcttatcgatgatctgtttacagctcaggccttcattaccaccgaccatgataacaaccagattacggcgtttcatccaggcgcaatgatgcgttcgtacgaaaatcacgttcgtgatgtgccgggtgttaccttgggcctcgtaggtcctgatggacgcgagggcatgatccaaaatgccgaagaatttgctgctggtggcattccgttcatttttgacccaggtcaggcaatgccgctgttcaacggccccgaactgcgcgagtttatcgaacaggcggactatgtggtggtcaacgattacgaaagcaatcttcttcaagaacgtactggctggaacgagcaggacattgtttcacgcgtgcaggcgtatatcaccacgcaaggtcctaaaggagccctggtacatacaccggagaagacctacgatattccgccggcacacgaacgtcgtgtcgttgatccaactggttgcggcgacgcgtttcgcgccggcctgatctatggtattcagcataattatgattggttgaccattggccgcatgggaaacttaatgggtgcgctgaaagtggaacaccctggcacgcaaaatcagcgtttcgattttgccgaattcaacgaccagttcaaacaacagtttggctacgcgctctaatga

SEQ ID NO: 118 - protein, 321 aa, synthetic construct
  REGION 1..321: note = Variant of adenosine kinase
MHHHHHHGGSGMSALICGSLAYDTIMVFPDQFKNHILPDKVHILNVSFLVPRMRREFGGCAGNIAYNLHLLGGAPIPMGTVGQDFGPYREHFETLGIDLSRVKLIDDLFTAQAFITTDHDNNQITAFHPGAMMRSYENHVRDVPGVTLGLVGPDGREGMIQNAEEFAAGGIPFIFDPGQAMPLFNGPELREFIEQADYVVVNDYESNLLQERTGWNEQDIVSRVQAYITTQGPKGALVHTPEKTYDIPPAHERRVVDPTGCGDAFRAGLIYGIQHNYDWLTIGRMGNLMGALKVEHPGTQNQRFDFAEFNDQFKQQFGYAL

SEQ ID NO: 119 - DNA, 969 bp, synthetic construct
  misc_feature 1..969: note = Variant of adenosine kinase
  source 1..969: mol_type = other DNA
atgcaccatcatcaccatcacgggggctccggcatgagtgcactgatttgcggttctttagcgtatgataccatcatggtgtttccggaccagttcaagaaccatattctgcccgataaagttcacatcctcaatgtcagctttcttgtaccacgcatgcgtcgtgaatttggaggctgtgccggcaacattgcgtacaatctgcatctgttgggtggtgctccgatccctatgggaacggtgggccaagatttcggtccgtatcgcgagcacttcgaaactctgggcattgacttatcccgcgtcaagatcatcccggatctgtttacagctcaggccttcattaccaccgaccatgataacaaccagattacggcgtttcatccaggcgcaatgatgcgttcgtacgaaaatcacgttcgtgatgtgccgggtgttaccttgggcctcgtaggtcctgatggacgcgagggcatgatccaaaatgccgaagaatttgctgctggtggcattccgttcatttttgacccaggtcaggcaatgccgctgttcaacggccccgaactgcgcgagtttatcgaacaggcggactatgtggtggtcaacgattacgaaagcaatcttcttcaagaacgtactggctggaacgagcaggacattgtttcacgcgtgcaggcgtatatcaccacgcaaggtcctaaaggagccctggtacatacaccggagaagacctacgatattccgccggcacacgaacgtcgtgtcgttgatccaactggttgcggcgacgcgtttcgcgccggcctgatctatggtattcagcataattatgattggttgaccattggccgcatgggaaacttaatgggtgcgctgaaagtggaacaccctggcacgcaaaatcagcgtttcgattttgccgaattcaacgaccagttcaaacaacagtttggctacgcgctctaatga

SEQ ID NO: 120 - protein, 321 aa, synthetic construct
  REGION 1..321: note = Variant of adenosine kinase
MHHHHHHGGSGMSALICGSLAYDTIMVFPDQFKNHILPDKVHILNVSFLVPRMRREFGGCAGNIAYNLHLLGGAPIPMGTVGQDFGPYREHFETLGIDLSRVKIIPDLFTAQAFITTDHDNNQITAFHPGAMMRSYENHVRDVPGVTLGLVGPDGREGMIQNAEEFAAGGIPFIFDPGQAMPLFNGPELREFIEQADYVVVNDYESNLLQERTGWNEQDIVSRVQAYITTQGPKGALVHTPEKTYDIPPAHERRVVDPTGCGDAFRAGLIYGIQHNYDWLTIGRMGNLMGALKVEHPGTQNQRFDFAEFNDQFKQQFGYAL

SEQ ID NO: 121 - DNA, 969 bp, synthetic construct
  misc_feature 1..969: note = Variant of adenosine kinase
  source 1..969: mol_type = other DNA
atgcaccatcatcaccatcacgggggctccggcatgagtgcactgatttgcggttctttagcgtatgataccatcatggtgtttccggaccagttcaagaaccatattctgcccgataaagttcacatcctcaatgtcagctttcttgtaccacgcatgcgtcgtgaatttggaggctgtgccggcaacattgcgtacaatctgcatctgttgggtggtgctccgatccctatgggaacggtgggccaagatttcggtccgtatcgcgagcacttcgaaactctgggcattgacttatcccgcgtcaagatcatcgatgatctgtttacaccgcaggccttcattaccaccgaccatgataacaaccagattacggcgtttcatccaggcgcaatgatgcgttcgtacgaaaatcacgttcgtgatgtgccgggtgttaccttgggcctcgtaggtcctgatggacgcgagggcatgatccaaaatgccgaagaatttgctgctggtggcattccgttcatttttgacccaggtcaggcaatgccgctgttcaacggccccgaactgcgcgagtttatcgaacaggcggactatgtggtggtcaacgattacgaaagcaatcttcttcaagaacgtactggctggaacgagcaggacattgtttcacgcgtgcaggcgtatatcaccacgcaaggtcctaaaggagccctggtacatacaccggagaagacctacgatattccgccggcacacgaacgtcgtgtcgttgatccaactggttgcggcgacgcgtttcgcgccggcctgatctatggtattcagcataattatgattggttgaccattggccgcatgggaaacttaatgggtgcgctgaaagtggaacaccctggcacgcaaaatcagcgtttcgattttgccgaattcaacgaccagttcaaacaagagtttggctacgcgctctaatga

SEQ ID NO: 122 - protein, 321 aa, synthetic construct
  REGION 1..321: note = Variant of adenosine kinase
MHHHHHHGGSGMSALICGSLAYDTIMVFPDQFKNHILPDKVHILNVSFLVPRMRREFGGCAGNIAYNLHLLGGAPIPMGTVGQDFGPYREHFETLGIDLSRVKIIDDLFTPQAFITTDHDNNQITAFHPGAMMRSYENHVRDVPGVTLGLVGPDGREGMIQNAEEFAAGGIPFIFDPGQAMPLFNGPELREFIEQADYVVVNDYESNLLQERTGWNEQDIVSRVQAYITTQGPKGALVHTPEKTYDIPPAHERRVVDPTGCGDAFRAGLIYGIQHNYDWLTIGRMGNLMGALKVEHPGTQNQRFDFAEFNDQFKQEFGYAL

SEQ ID NO: 123 - DNA, 969 bp, synthetic construct
  misc_feature 1..969: note = Variant of adenosine kinase
  source 1..969: mol_type = other DNA
atgcaccatcatcaccatcacgggggctccggcatgagtgcactgatttgcggttctttagcgtatgataccatcatggtgtttccggaccagttcaagaaccatattctgcccgataaagttcaccggctcaatgtcagctttctggtaccacgcatgcgtcgtgaatttggaggctgtgccggcaacattgcgtacaatctgcatctgttgggtggtgctccgatccctatgggaacggtgggccaagatttcggtccgtatcgcgagcacttcgaaactctgggcattgacttatcccgcgtcaagatcatcgatgatctgtttacaccgcaggccttcattaccaccgaccatgataacaaccagattacggcgtttcatccaggcgcaatgatgcgttcgtacgaaaatcacgttcgtgatgtgccgggtgttaccttgggcctcgtaggtcctgatggacgcgagggcatgatccaaaatgccgaagaatttgctgctggtggcattccgttcatttttgacccaggtcaggcaatgccgctgttcaacggccccgaactgcgcgagtttatcgaacaggcggactatgtggtggtcaacgattacgaaagcaatcttcttcaagaacgtactggctggaacgagcaggacattgtttcacgcgtgcaggcgtatatcaccacgcaaggtcctaaaggagccctggtacatacaccggagaagacctacgatattccgccggcacacgaacgtcgtgtcgttgatccaactggttgcggcgacgcgtttcgcgccggcctgatctatggtattcagcataattatgattggttgaccattggccgcatgggaaacttaatgggtgcgctgaaagtggaacaccctggcacgcaaaatcagcgtttcgattttgccgaattcaacgaccagttcaaacaacagtttggctacgcgctctaatga

SEQ ID NO: 124 - protein, 321 aa, synthetic construct
  REGION 1..321: note = Variant of adenosine kinase
MHHHHHHGGSGMSALICGSLAYDTIMVFPDQFKNHILPDKVHRLNVSFLVPRMRREFGGCAGNIAYNLHLLGGAPIPMGTVGQDFGPYREHFETLGIDLSRVKIIDDLFTPQAFITTDHDNNQITAFHPGAMMRSYENHVRDVPGVTLGLVGPDGREGMIQNAEEFAAGGIPFIFDPGQAMPLFNGPELREFIEQADYVVVNDYESNLLQERTGWNEQDIVSRVQAYITTQGPKGALVHTPEKTYDIPPAHERRVVDPTGCGDAFRAGLIYGIQHNYDWLTIGRMGNLMGALKVEHPGTQNQRFDFAEFNDQFKQQFGYAL

SEQ ID NO: 125 - DNA, 969 bp, synthetic construct
  misc_feature 1..969: note = Variant of adenosine kinase
  source 1..969: mol_type = other DNA
atgcaccatcatcaccatcacgggggctccggcatgagtgcactgatttgcggttctttagcgtatgataccatcatggtgtttccggaccagttcaagaaccatattctgcccgataaagttcacatcctcaatgtcagctttcttgtaccacgcatgcgtcgtgaatttggaggctgtgccggcaacattgcgtacaatctgcatctgttgggtggtgctccgatccctatgggaacggtgggccaagatttcggtccgtatcgcgagcacttcgaaactctgggcattgacttatcccgcgtcctgatcatcgatgatctgtttacagcgcaggccttcattaccaccgaccatgataacaaccagattacggcgtttcatccaggcgcaatgatgcgttcgtacgaaaatcacgttcgtgatgtgccgggtgttaccttgggcctcgtaggtcctgatggacgcgagggcatgatccaaaatgccgaagaatttgctgctggtggcattccgttcatttttgacccaggtcaggcaatgccgctgttcaacggccccgaactgcgcgagtttatcgaacaggcggactatgtggtggtcaacgattacgaaagcaatcttcttcaagaacgtactggctggaacgagcaggacattgtttcacgcgtgcaggcgtatatcaccacgcaaggtcctaaaggagccctggtacatacaccggagaagacctacgatattccgccggcacacgaacgtcgtgtcgttgatccaactggttgcggcgacgcgtttcgcgccggcctgatctatggtattcagcataattatgattggttgaccattggccgcatgggaaacttaatgggtgcgctgaaagtggaacaccctggcacgcaaaatcagcgtttcgattttgccgaattcaacgaccagttcaaacaacagtttggctacgcgctctaatga

SEQ ID NO: 126 - protein, 321 aa, synthetic construct
  REGION 1..321: note = Variant of adenosine kinase
MHHHHHHGGSGMSALICGSLAYDTIMVFPDQFKNHILPDKVHILNVSFLVPRMRREFGGCAGNIAYNLHLLGGAPIPMGTVGQDFGPYREHFETLGIDLSRVLIIDDLFTAQAFITTDHDNNQITAFHPGAMMRSYENHVRDVPGVTLGLVGPDGREGMIQNAEEFAAGGIPFIFDPGQAMPLFNGPELREFIEQADYVVVNDYESNLLQERTGWNEQDIVSRVQAYITTQGPKGALVHTPEKTYDIPPAHERRVVDPTGCGDAFRAGLIYGIQHNYDWLTIGRMGNLMGALKVEHPGTQNQRFDFAEFNDQFKQQFGYAL

SEQ ID NO: 127 - DNA, 969 bp, synthetic construct
  misc_feature 1..969: note = Variant of adenosine kinase
  source 1..969: mol_type = other DNA
atgcaccatcatcaccatcacgggggctccggcatgagtgcactgatttgcggttctttagcgtatgataccatcatggtgtttccggaccagttcaagaaccatattctgcccgataaagttcacatcctcaatgtcagctttcttgtaccacgcatgcgtcgtgaatttggaggctgtgccggcaacattgcgtacaatctgcatctgttgggtggtgctccgatccctatgggaacggtgggccaagatttcggtccgtatcgcgagcacttcgaaactctgggcattgacttatcccgcgtcaagatcatcgatgatctgtttacaccgcaggccttcattaccaccgaccatgataacaaccagattacggcgtttcatccaggcgcaatgatgcgttcgtacgaaaatcacgttcgtgatgtgccgggtgttaccttgggcctcgtaggtcctgatggacgcgagggcatgatccaaaatgccgaagaatttgctgctggtggcattccgttcatttttgacccaggtcaggcaatgccgctgttcaacggccccgaactgcgcgagtttatcgaacaggcggactatgtggtggtcaacgattacgaaagcaatcttcttcaagaacgtactggctggaacgagcaggacattgtttcacgcgtgcaggcgtatatcaccacgcaaggtcctaaaggagccctggtacatacaccggagaagacctacgatattccgccggcacacgaacgtcgtgtcgttgatccaactggttgcggcgacgcgtttcgcgccggcctgatctatggtattcagcataattatgattggttgaccattggccgcatgggaaacttaatgggtgcgctgaaagtggaacaccctggcacgcaaaatcagcgtttcgattttgccgaattcaacgaccagttcaaacaatcttttggctacgcgctctaatga

SEQ ID NO: 128 - protein, 321 aa, synthetic construct
  REGION 1..321: note = Variant of adenosine kinase
MHHHHHHGGSGMSALICGSLAYDTIMVFPDQFKNHILPDKVHILNVSFLVPRMRREFGGCAGNIAYNLHLLGGAPIPMGTVGQDFGPYREHFETLGIDLSRVKIIDDLFTPQAFITTDHDNNQITAFHPGAMMRSYENHVRDVPGVTLGLVGPDGREGMIQNAEEFAAGGIPFIFDPGQAMPLFNGPELREFIEQADYVVVNDYESNLLQERTGWNEQDIVSRVQAYITTQGPKGALVHTPEKTYDIPPAHERRVVDPTGCGDAFRAGLIYGIQHNYDWLTIGRMGNLMGALKVEHPGTQNQRFDFAEFNDQFKQSFGYAL

SEQ ID NO: 129 - DNA, 969 bp, synthetic construct
  misc_feature 1..969: note = Variant of adenosine kinase
  source 1..969: mol_type = other DNA
atgcaccatcatcaccatcacgggggctccggcatgagtgcactgatttgcggttctttagcgtatgataccatcatggtgtttccggaccagttcaagaaccatattctgcccgataaagttcacatcctcaatgtcagctttcttgtaccacgcatgcgtcgtgaatttggaggctgtgccggcaacattgcgtacaatctgcatctgttgggtggtgctccgatccctatgggaacggtgggccaagatttcggtccgtatcgcgagcacttcgaaactctgggcattgacttatcccgcgtcaagatcatcgatgatctgtttacaccgcaggccttcattaccaccgaccatgataacaaccagattacggcgtttcatccaggcgcaatgatgcgttcgtacgaaaatcacgttcgtgatgtgccgggtgttaccttgggcctcgtaggtcctgatggacgcgagggcatgatccaaaatgccgaagaatttgctgctggtggcattccgttcatttttgacccaggtcaggcaatgccgctgttcaacggccccgaactgcgcgagtttatcgaacaggcggactatgtggtggtcaacgattacgaaagcaatcttcttcaagaacgtactggctggaacgagcaggacattgtttcacgcgtgcaggcgtatatcaccacgcaaggtcctaaaggagccctggtacatacaccggagaagacctacgatattccgccggcacacgaacgtccggtcgttgatccaactggttgcggcgacgcgtttcgcgccggcctgatctatggtattcagcataattatgattggttgaccattggccgcatgggaaacttaatgggtgcgctgaaagtggaacaccctggcacgcaaaatcagcgtttcgattttgccgaattcaacgaccagttcaaacaacagtttggctacgcgctctaatga

SEQ ID NO: 130 - protein, 321 aa, synthetic construct
  REGION 1..321: note = Variant of adenosine kinase
MHHHHHHGGSGMSALICGSLAYDTIMVFPDQFKNHILPDKVHILNVSFLVPRMRREFGGCAGNIAYNLHLLGGAPIPMGTVGQDFGPYREHFETLGIDLSRVKIIDDLFTPQAFITTDHDNNQITAFHPGAMMRSYENHVRDVPGVTLGLVGPDGREGMIQNAEEFAAGGIPFIFDPGQAMPLFNGPELREFIEQADYVVVNDYESNLLQERTGWNEQDIVSRVQAYITTQGPKGALVHTPEKTYDIPPAHERPVVDPTGCGDAFRAGLIYGIQHNYDWLTIGRMGNLMGALKVEHPGTQNQRFDFAEFNDQFKQQFGYAL

SEQ ID NO: 131 - DNA, 969 bp, synthetic construct
  misc_feature 1..969: note = Variant of adenosine kinase
  source 1..969: mol_type = other DNA
atgcaccatcatcaccatcacgggggctccggcatgagtgcactgatttgcggttctttagcgtatgataccatcatggtgtttccggaccagttcaagaaccatattctgcccgataaagttcacatcctcaatgtcagctttcttgtaccacgcatgcgtcgtgaatttggaggctgtgccggcaacattgcgtacaatctgcatctgttgggtggtgctccgatccctatgggaacggtgggccaagatttcggtccgtatcgcgagcacttcgaaactctgggcattgacttatcccgcgtcaagatcatcgatgatctgtttacaccgcaggccttcattaccaccgaccatgataacaaccagattacggcgtttcatccaggcgcaatgatgcgttcgtacgaaaatcacgttcgtgatgtgccgggtgttaccttgggcctcgtaggtcctgatggacgcgagggcatgatccaaaatgccgaagaatttgctgctggtggcattccgttcatttttgacccaggtcaggcaatgccgctgttcaacggccccgaactgcgcgagtttatcgaacaggcggactatgtggtggtcaacgattacgaaagcaatcttcttcaagaacgtactggctggaacgagcaggacattgtttcacgcgtgcaggcgtatatcaccacgcaaggttcgaaaggagccctggtacatacaccggagaagacctacgatattccgccggcacacgaacgtcgtgtcgttgatccaactggttgcggcgacgcgtttcgcgccggcctgatctatggtattcagcataattatgattggttgaccattggccgcatgggaaacttaatgggtgcgctgaaagtggaacaccctggcacgcaaaatcagcgtttcgattttgccgaattcaacgaccagttcaaacaacagtttggctacgcgctctaatga

SEQ ID NO: 132 - protein, 321 aa, synthetic construct
  REGION 1..321: note = Variant of adenosine kinase
MHHHHHHGGSGMSALICGSLAYDTIMVFPDQFKNHILPDKVHILNVSFLVPRMRREFGGCAGNIAYNLHLLGGAPIPMGTVGQDFGPYREHFETLGIDLSRVKIIDDLFTPQAFITTDHDNNQITAFHPGAMMRSYENHVRDVPGVTLGLVGPDGREGMIQNAEEFAAGGIPFIFDPGQAMPLFNGPELREFIEQADYVVVNDYESNLLQERTGWNEQDIVSRVQAYITTQGSKGALVHTPEKTYDIPPAHERRVVDPTGCGDAFRAGLIYGIQHNYDWLTIGRMGNLMGALKVEHPGTQNQRFDFAEFNDQFKQQFGYAL

SEQ ID NO: 133 - DNA, 969 bp, synthetic construct
  misc_feature 1..969: note = Variant of adenosine kinase
  source 1..969: mol_type = other DNA
atgcaccatcatcaccatcacgggggctccggcatgagtgcactgatttgcggttctttagcgtatgataccatcatggtgtttccggaccagttcaagaaccatattctgcccgataaagttcacatcctcaatgtcagctttcttgtaccacgcatgcgtcgtgaatttggaggctgtgccggcaacattgcgtacaatctgcatctgttgggtggtgctccgatccctatgggaacggtgggccaagatttcggtccgtatcgcgagcacttcgaaactctgggcattgacttatcccgcgtcaagatcatcgatgatctgtttacaccgcaggccttcattaccaccgaccatgataacaaccagattacggcgtttcatccagcggcaatgatgcgttcgtacgaaaatcacgttcgtgatgtgccgggtgttaccttgggcctcgtaggtcctgatggacgcgagggcatgatccaaaatgccgaagaatttgctgctggtggcattccgttcatttttgacccaggtcaggcaatgccgctgttcaacggccccgaactgcgcgagtttatcgaacaggcggactatgtggtggtcaacgattacgaaagcaatcttcttcaagaacgtactggctggaacgagcaggacattgtttcacgcgtgcaggcgtatatcaccacgcaaggtcctaaaggagccctggtacatacaccggagaagacctacgatattccgccggcacacgaacgtcgtgtcgttgatccaactggttgcggcgacgcgtttcgcgccggcctgatctatggtattcagcataattatgattggttgaccattggccgcatgggaaacttaatgggtgcgctgaaagtggaacaccctggcacgcaaaatcagcgtttcgattttgccgaattcaacgaccagttcaaacaacagtttggctacgcgctctaatga

SEQ ID NO: 134 - protein, 321 aa, synthetic construct
  REGION 1..321: note = Variant of adenosine kinase
MHHHHHHGGSGMSALICGSLAYDTIMVFPDQFKNHILPDKVHILNVSFLVPRMRREFGGCAGNIAYNLHLLGGAPIPMGTVGQDFGPYREHFETLGIDLSRVKIIDDLFTPQAFITTDHDNNQITAFHPAAMMRSYENHVRDVPGVTLGLVGPDGREGMIQNAEEFAAGGIPFIFDPGQAMPLFNGPELREFIEQADYVVVNDYESNLLQERTGWNEQDIVSRVQAYITTQGPKGALVHTPEKTYDIPPAHERRVVDPTGCGDAFRAGLIYGIQHNYDWLTIGRMGNLMGALKVEHPGTQNQRFDFAEFNDQFKQQFGYAL

SEQ ID NO: 135 - DNA, 969 bp, synthetic construct
  misc_feature 1..969: note = Variant of adenosine kinase
  source 1..969: mol_type = other DNA
atgcaccatcatcaccatcacgggggctccggcatgagtgcactgatttgcggttctttagcgtatgataccatcatggtgtttccggaccagttcaagaaccatattctgcccgataaagttcacatcctcaatgtcagctttcttgtaccacgcatgcgtcgtgaatttggaggctgtgccggcaacattgcgtacaatctgcatctgttgggtggtgctccgatccctatgggaacggtgggccaagatttcggtccgtatcgcgagcacttcgaaactctgggcattgacttatcccgcgtcaagatcatcgatgatctgtttacaccgcaggccttcattaccaccgaccatgataacaaccagattacggcgtttcatccaggcgcaatgatgcgttcgtacgaaaatcacgttcgtgatgtgccgggtgttaccttgggcctcgtaggtcctgatggacgcgagggcatgatccaaaatgccgaagaatttgctgctggtggcattccgttcatttttgacccaggtcaggcaatgccgctgttcaacggccccgaactgcgcgagtttatcgaacaggcggactatgtggtggtcaacgattacgaaagcaatcttcttcaagaacgtactggctggaacgagcaggacattgtttcacgcgtgcaggcgtatatcaccacgcaaggtcctaaaggagccctggtacatacaccggagaagacctacgatattccgccggcacacgaacgtcgtgtcgttgatccaactggttgcggcgacgcgtttcgcgccggcctgatctatggtattcagcataattatgattggttgaccattggccgcatgggaaacttaatgggtgcgctgaaagtggaacaccctggcacgcaaaatcagcgtttcgattttgccgaattcaacgaccagttcaaacaagattttggctacgcgctctaatga

SEQ ID NO: 136 - protein, 321 aa, synthetic construct
  REGION 1..321: note = Variant of adenosine kinase
MHHHHHHGGSGMSALICGSLAYDTIMVFPDQFKNHILPDKVHILNVSFLVPRMRREFGGCAGNIAYNLHLLGGAPIPMGTVGQDFGPYREHFETLGIDLSRVKIIDDLFTPQAFITTDHDNNQITAFHPGAMMRSYENHVRDVPGVTLGLVGPDGREGMIQNAEEFAAGGIPFIFDPGQAMPLFNGPELREFIEQADYVVVNDYESNLLQERTGWNEQDIVSRVQAYITTQGPKGALVHTPEKTYDIPPAHERRVVDPTGCGDAFRAGLIYGIQHNYDWLTIGRMGNLMGALKVEHPGTQNQRFDFAEFNDQFKQDFGYAL

SEQ ID NO: 137 - DNA, 969 bp, synthetic construct
  misc_feature 1..969: note = Variant of adenosine kinase
  source 1..969: mol_type = other DNA
atgcaccatcatcaccatcacgggggctccggcatgagtgcactgatttgcggttctttagcgtatgataccatcatggtgtttccggaccagttcaagaaccatattctgcccgataaagttcacatcctcaatgtcagctttcttgtaccacgcatgcgtcgtgaatttggaggctgtgccggcaacattgcgtacaatctgcatctgttgggtggtgctccgatccctatgggaacggtgggccaagatttcggtccgtatcgcgagcacttcgaaactctgggcattgacttatcccgcgtcaagatcatcgatgatctgtttacaccgcaggccttcattaccaccgaccatgataacaaccagattacggcgtttcatccaggcgcaatgatgcgttcgtacgaaaatcacgttcgtgatgtgccgggtgttaccttgggcctcgtaggtcctgatggacgcgagggcatgatccaaaatgccgaagaatttgctgctggtggcattccgttcatttttgacccaggtcaggcaatgccgctgttcaacggccccgaactgcgcgagtttatcgaacaggcggactatgtggtggtcaacgattacgaaagcaatcttcttcaagaacgtactggctggaacgagcaggacattgtttcacgcgtgcaggcgtatatcaccacgcaaggtcctaaaggagccctggtacatacaccggagaagacctacgatattccgggggcacacgaacgtcgtgtcgttgatccaactggttgcggcgacgcgtttcgcgccggcctgatctatggtattcagcataattatgattggttgaccattggccgcatgggaaacttaatgggtgcgctgaaagtggaacaccctggcacgcaaaatcagcgtttcgattttgccgaattcaacgaccagttcaaacaacagtttggctacgcgctctaatga

SEQ ID NO: 138 - protein, 321 aa, synthetic construct
  REGION 1..321: note = Variant of adenosine kinase
MHHHHHHGGSGMSALICGSLAYDTIMVFPDQFKNHILPDKVHILNVSFLVPRMRREFGGCAGNIAYNLHLLGGAPIPMGTVGQDFGPYREHFETLGIDLSRVKIIDDLFTPQAFITTDHDNNQITAFHPGAMMRSYENHVRDVPGVTLGLVGPDGREGMIQNAEEFAAGGIPFIFDPGQAMPLFNGPELREFIEQADYVVVNDYESNLLQERTGWNEQDIVSRVQAYITTQGPKGALVHTPEKTYDIPGAHERRVVDPTGCGDAFRAGLIYGIQHNYDWLTIGRMGNLMGALKVEHPGTQNQRFDFAEFNDQFKQQFGYAL

SEQ ID NO: 139 - DNA, 969 bp, synthetic construct
  misc_feature 1..969: note = Variant of adenosine kinase
  source 1..969: mol_type = other DNA
atgcaccatcatcaccatcacgggggctccggcatgagtgcactgatttgcggttctttagcgtatgataccatcatggtgtttccggaccagttcaagaaccatattctgcccgataaagttcacatcctcaatgtcagctttcttgtaccacgcatgcgtcgtgaatttggaggctgtgccggcaacattgcgtacaatctgcatctgttgggtggtgctccgatccctatgggaacggtgggccaagatttcggtccgtatcgcgagcacttcgaaactctgggcattgacttatcccgcgtcaagcctatcgatgatctgtttacagctcaggccttcattaccaccgaccatgataacaaccagattacggcgtttcatccaggcgcaatgatgcgttcgtacgaaaatcacgttcgtgatgtgccgggtgttaccttgggcctcgtaggtcctgatggacgcgagggcatgatccaaaatgccgaagaatttgctgctggtggcattccgttcatttttgacccaggtcaggcaatgccgctgttcaacggccccgaactgcgcgagtttatcgaacaggcggactatgtggtggtcaacgattacgaaagcaatcttcttcaagaacgtactggctggaacgagcaggacattgtttcacgcgtgcaggcgtatatcaccacgcaaggtcctaaaggagccctggtacatacaccggagaagacctacgatattccgccggcacacgaacgtcgtgtcgttgatccaactggttgcggcgacgcgtttcgcgccggcctgatctatggtattcagcataattatgattggttgaccattggccgcatgggaaacttaatgggtgcgctgaaagtggaacaccctggcacgcaaaatcagcgtttcgattttgccgaattcaacgaccagttcaaacaacagtttggctacgcgctctaatga

SEQ ID NO: 140 - protein, 321 aa, synthetic construct
  REGION 1..321: note = Variant of adenosine kinase
MHHHHHHGGSGMSALICGSLAYDTIMVFPDQFKNHILPDKVHILNVSFLVPRMRREFGGCAGNIAYNLHLLGGAPIPMGTVGQDFGPYREHFETLGIDLSRVKPIDDLFTAQAFITTDHDNNQITAFHPGAMMRSYENHVRDVPGVTLGLVGPDGREGMIQNAEEFAAGGIPFIFDPGQAMPLFNGPELREFIEQADYVVVNDYESNLLQERTGWNEQDIVSRVQAYITTQGPKGALVHTPEKTYDIPPAHERRVVDPTGCGDAFRAGLIYGIQHNYDWLTIGRMGNLMGALKVEHPGTQNQRFDFAEFNDQFKQQFGYAL

SEQ ID NO: 141 - DNA, 969 bp, synthetic construct
  misc_feature 1..969: note = Variant of adenosine kinase
  source 1..969: mol_type = other DNA
atgcaccatcatcaccatcacgggggctccggcatgagtgcactgatttgcggttctttagcgtatgataccatcatggtgtttccggaccagttcaagaaccatattctgcccgataaagttcacatcctcaatgtcagctttcttgtaccacgcatgcgtcgtgaatttggaggctgtgccggcaacattgcgtacaatctgcatctgttgggtggtgctccgatccctatgggaacggtgggccaagatttcggtccgtatcgcgagcacttcgaaactctgggcattgacttatcccgcgtcaagtggatcgatgatctgtttacagctcaggccttcattaccaccgaccatgataacaaccagattacggcgtttcatccaggcgcaatgatgcgttcgtacgaaaatcacgttcgtgatgtgccgggtgttaccttgggcctcgtaggtcctgatggacgcgagggcatgatccaaaatgccgaagaatttgctgctggtggcattccgttcatttttgacccaggtcaggcaatgccgctgttcaacggccccgaactgcgcgagtttatcgaacaggcggactatgtggtggtcaacgattacgaaagcaatcttcttcaagaacgtactggctggaacgagcaggacattgtttcacgcgtgcaggcgtatatcaccacgcaaggtcctaaaggagccctggtacatacaccggagaagacctacgatattccgccggcacacgaacgtcgtgtcgttgatccaactggttgcggcgacgcgtttcgcgccggcctgatctatggtattcagcataattatgattggttgaccattggccgcatgggaaacttaatgggtgcgctgaaagtggaacaccctggcacgcaaaatcagcgtttcgattttgccgaattcaacgaccagttcaaacaacagtttggctacgcgctctaatga

SEQ ID NO: 142 - protein, 321 aa, synthetic construct
  REGION 1..321: note = Variant of adenosine kinase
MHHHHHHGGSGMSALICGSLAYDTIMVFPDQFKNHILPDKVHILNVSFLVPRMRREFGGCAGNIAYNLHLLGGAPIPMGTVGQDFGPYREHFETLGIDLSRVKWIDDLFTAQAFITTDHDNNQITAFHPGAMMRSYENHVRDVPGVTLGLVGPDGREGMIQNAEEFAAGGIPFIFDPGQAMPLFNGPELREFIEQADYVVVNDYESNLLQERTGWNEQDIVSRVQAYITTQGPKGALVHTPEKTYDIPPAHERRVVDPTGCGDAFRAGLIYGIQHNYDWLTIGRMGNLMGALKVEHPGTQNQRFDFAEFNDQFKQQFGYAL

SEQ ID NO: 143 - DNA, 969 bp, synthetic construct
  misc_feature 1..969: note = Variant of adenosine kinase
  source 1..969: mol_type = other DNA
atgcaccatcatcaccatcacgggggctccggcatgagtgcactgatttgcggttctttagcgtatgataccatcatggtgtttccggaccagttcaagaaccatattctgcccgataaagttcacatcctcaatgtcagctttcttgtaccacgcatgcgtcgtgaatttggaggctgtgccggcaacattgcgtacaatctgcatctgttgggtggtgctccgatccctatgggaacggtgggccaagatttcggtccgtatcgcgagcacttcgaaactctgggcattgacttatcccgcgtcaagatcatcgatgatctgtttacaccgcaggccttcattaccaccgaccatgataacaaccagattacggcgtttcatccaggcgcaatgatgcgttcgtacgaaaatcacgttcgtgatgtgccgggtgttaccttgggcctcgtaggtcctgatggacgcgagggcatgatccaaaatgccgaagaatttgctgctggtggcattccgttcatttttgacccaggtcaggcaatgccgctgttcaacggccccgaactgcgcgagtttatcgaacaggcggactatgtggtggtcaacgattacgaaagcaatcttcttcaagaacgtactggctggaacgagcaggacattgtttcacgcgtgcaggcgtatatcaccacgcaaggtcctaaaggagccctggtacatacaccggagaagacctacgatattccgtcggcacacgaacgtcgtgtcgttgatccaactggttgcggcgacgcgtttcgcgccggcctgatctatggtattcagcataattatgattggttgaccattggccgcatgggaaacttaatgggtgcgctgaaagtggaacaccctggcacgcaaaatcagcgtttcgattttgccgaattcaacgaccagttcaaacaacagtttggctacgcgctctaatga

SEQ ID NO: 144 - protein, 321 aa, synthetic construct
  REGION 1..321: note = Variant of adenosine kinase
MHHHHHHGGSGMSALICGSLAYDTIMVFPDQFKNHILPDKVHILNVSFLVPRMRREFGGCAGNIAYNLHLLGGAPIPMGTVGQDFGPYREHFETLGIDLSRVKIIDDLFTPQAFITTDHDNNQITAFHPGAMMRSYENHVRDVPGVTLGLVGPDGREGMIQNAEEFAAGGIPFIFDPGQAMPLFNGPELREFIEQADYVVVNDYESNLLQERTGWNEQDIVSRVQAYITTQGPKGALVHTPEKTYDIPSAHERRVVDPTGCGDAFRAGLIYGIQHNYDWLTIGRMGNLMGALKVEHPGTQNQRFDFAEFNDQFKQQFGYAL

SEQ ID NO: 145 - DNA, 969 bp, synthetic construct
  misc_feature 1..969: note = Variant of adenosine kinase
  source 1..969: mol_type = other DNA
atgcaccatcatcaccatcacgggggctccggcatgagtgcactgatttgcggttctttagcgtatgataccatcatggtgtttccggaccagttcaagaaccatattctgcccgataaagttcacatcctcaatgtcagctttcttgtaccacgcatgcgtcgtgaatttggaggctgtgccggcaacattgcgtacaatctgcatctgttgggtggtgctccgatccctatgggaacggtgggccaagatttcggtccgtatcgcgagcacttcgaaactctgggcattgacttatcccgcgtcaagatcatcgatacgctgtttacagctcaggccttcattaccaccgaccatgataacaaccagattacggcgtttcatccaggcgcaatgatgcgttcgtacgaaaatcacgttcgtgatgtgccgggtgttaccttgggcctcgtaggtcctgatggacgcgagggcatgatccaaaatgccgaagaatttgctgctggtggcattccgttcatttttgacccaggtcaggcaatgccgctgttcaacggccccgaactgcgcgagtttatcgaacaggcggactatgtggtggtcaacgattacgaaagcaatcttcttcaagaacgtactggctggaacgagcaggacattgtttcacgcgtgcaggcgtatatcaccacgcaaggtcctaaaggagccctggtacatacaccggagaagacctacgatattccgccggcacacgaacgtcgtgtcgttgatccaactggttgcggcgacgcgtttcgcgccggcctgatctatggtattcagcataattatgattggttgaccattggccgcatgggaaacttaatgggtgcgctgaaagtggaacaccctggcacgcaaaatcagcgtttcgattttgccgaattcaacgaccagttcaaacaacagtttggctacgcgctctaatga

SEQ ID NO: 146 - protein, 321 aa, synthetic construct
  REGION 1..321: note = Variant of adenosine kinase
MHHHHHHGGSGMSALICGSLAYDTIMVFPDQFKNHILPDKVHILNVSFLVPRMRREFGGCAGNIAYNLHLLGGAPIPMGTVGQDFGPYREHFETLGIDLSRVKIIDTLFTAQAFITTDHDNNQITAFHPGAMMRSYENHVRDVPGVTLGLVGPDGREGMIQNAEEFAAGGIPFIFDPGQAMPLFNGPELREFIEQADYVVVNDYESNLLQERTGWNEQDIVSRVQAYITTQGPKGALVHTPEKTYDIPPAHERRVVDPTGCGDAFRAGLIYGIQHNYDWLTIGRMGNLMGALKVEHPGTQNQRFDFAEFNDQFKQQFGYAL

SEQ ID NO: 147 - DNA, 969 bp, synthetic construct
  misc_feature 1..969: note = Variant of adenosine kinase
  source 1..969: mol_type = other DNA
atgcaccatcatcaccatcacgggggctccggcatgagtgcactgatttgcggttctttagcgtatgataccatcatggtgtttccggaccagttcaagaaccatattctgcccgataaagttcacatcctcaatgtcagctttcttgtaccacgcatgcgtcgtgaatttggaggctgtgccggcaacattgcgtacaatctgcatctgttgggtggtgctccgatccctatgggaacggtgggccaagatttcggtccgtatcgcgagcacttcgaaactctgggcattgacttatcccgcgtcaagatcatcggggatctgtttacagctcaggccttcattaccaccgaccatgataacaaccagattacggcgtttcatccaggcgcaatgatgcgttcgtacgaaaatcacgttcgtgatgtgccgggtgttaccttgggcctcgtaggtcctgatggacgcgagggcatgatccaaaatgccgaagaatttgctgctggtggcattccgttcatttttgacccaggtcaggcaatgccgctgttcaacggccccgaactgcgcgagtttatcgaacaggcggactatgtggtggtcaacgattacgaaagcaatcttcttcaagaacgtactggctggaacgagcaggacattgtttcacgcgtgcaggcgtatatcaccacgcaaggtcctaaaggagccctggtacatacaccggagaagacctacgatattccgccggcacacgaacgtcgtgtcgttgatccaactggttgcggcgacgcgtttcgcgccggcctgatctatggtattcagcataattatgattggttgaccattggccgcatgggaaacttaatgggtgcgctgaaagtggaacaccctggcacgcaaaatcagcgtttcgattttgccgaattcaacgaccagttcaaacaacagtttggctacgcgctctaatga

SEQ ID NO: 148 - protein, 321 aa, synthetic construct
  REGION 1..321: note = Variant of adenosine kinase
MHHHHHHGGSGMSALICGSLAYDTIMVFPDQFKNHILPDKVHILNVSFLVPRMRREFGGCAGNIAYNLHLLGGAPIPMGTVGQDFGPYREHFETLGIDLSRVKIIGDLFTAQAFITTDHDNNQITAFHPGAMMRSYENHVRDVPGVTLGLVGPDGREGMIQNAEEFAAGGIPFIFDPGQAMPLFNGPELREFIEQADYVVVNDYESNLLQERTGWNEQDIVSRVQAYITTQGPKGALVHTPEKTYDIPPAHERRVVDPTGCGDAFRAGLIYGIQHNYDWLTIGRMGNLMGALKVEHPGTQNQRFDFAEFNDQFKQQFGYAL

SEQ ID NO: 149 - DNA, 969 bp, synthetic construct
  misc_feature 1..969: note = Variant of adenosine kinase
  source 1..969: mol_type = other DNA
atgcaccatcatcaccatcacgggggctccggcatgagtgcactgatttgcggttctttagcgtatgataccatcatggtgtttccggaccagttcaagaaccatattctgcccgataaagttcacatcctcaatgtcagctttcttgtaccacgcatgcgtcgtgaatttggaggctgtgccggcaacattgcgtacaatctgcatctgttgggtggtgctccgatccctatgggaacggtgggccaagatttcggtccgtatcgcgagcacttcgaaactctgggcattgacttatcccgcgtcaagatcatcgatgatctgtttacaccgcaggccttcattaccaccgaccatgataacaaccagattacggcgtttcatccaggcgcaatgatgcgttcgtacgaaaatcacgttcgtgatgtgccgggtgttaccttgggcctcgtaggtcctgatggacgcgagggcatgatccaaaatgccgaagaatttgctgctggtggcattccgttcatttttgacccaggtcaggcaatgccgctgttcaacggccccgaactgcgcgagtttatcgaacaggcggactatgtggtggtcaacgattacgaaagcaatcttcttcaagaacgtactggctggaacgagcaggacattgtttcacgcgtgcaggcgtatatcaccacgcaaggtcctaaaggagccctggtacatacaccggagaagacctacgatattccgccggcacacgaaccgcgtgtcgttgatccaactggttgcggcgacgcgtttcgcgccggcctgatctatggtattcagcataattatgattggttgaccattggccgcatgggaaacttaatgggtgcgctgaaagtggaacaccctggcacgcaaaatcagcgtttcgattttgccgaattcaacgaccagttcaaacaacagtttggctacgcgctctaatga

SEQ ID NO: 150 - protein, 321 aa, synthetic construct
  REGION 1..321: note = Variant of adenosine kinase
MHHHHHHGGSGMSALICGSLAYDTIMVFPDQFKNHILPDKVHILNVSFLVPRMRREFGGCAGNIAYNLHLLGGAPIPMGTVGQDFGPYREHFETLGIDLSRVKIIDDLFTPQAFITTDHDNNQITAFHPGAMMRSYENHVRDVPGVTLGLVGPDGREGMIQNAEEFAAGGIPFIFDPGQAMPLFNGPELREFIEQADYVVVNDYESNLLQERTGWNEQDIVSRVQAYITTQGPKGALVHTPEKTYDIPPAHEPRVVDPTGCGDAFRAGLIYGIQHNYDWLTIGRMGNLMGALKVEHPGTQNQRFDFAEFNDQFKQQFGYAL

SEQ ID NO: 151 - DNA, 969 bp, synthetic construct
  misc_feature 1..969: note = Variant of adenosine kinase
  source 1..969: mol_type = other DNA
atgcaccatcatcaccatcacgggggctccggcatgagtgcactgatttgcggttctttagcgtatgataccatcatggtgtttccggaccagttcaagaaccatattctgcccgataaagttcacatcctcaatgtcagctttcttgtaccacgcatgcgtcgtgaatttggaggctgtgccggcaacattgcgtacaatctgcatctgttgggtggtgctccgatccctatgggaacggtgggccaagatttcggtccgtatcgcgagcacttcgaaactctgggcattgacttatcccgcgtcaagatcatcgatgatctgtttacaccgcaggccttcattaccaccgaccatgatcataaccagattacggcgtttcatccaggcgcaatgatgcgttcgtacgaaaatcacgttcgtgatgtgccgggtgttaccttgggcctcgtaggtcctgatggacgcgagggcatgatccaaaatgccgaagaatttgctgctggtggcattccgttcatttttgacccaggtcaggcaatgccgctgttcaacggccccgaactgcgcgagtttatcgaacaggcggactatgtggtggtcaacgattacgaaagcaatcttcttcaagaacgtactggctggaacgagcaggacattgtttcacgcgtgcaggcgtatatcaccacgcaaggtcctaaaggagccctggtacatacaccggagaagacctacgatattccgccggcacacgaacgtcgtgtcgttgatccaactggttgcggcgacgcgtttcgcgccggcctgatctatggtattcagcataattatgattggttgaccattggccgcatgggaaacttaatgggtgcgctgaaagtggaacaccctggcacgcaaaatcagcgtttcgattttgccgaattcaacgaccagttcaaacaacagtttggctacgcgctctaatga

SEQ ID NO: 152 - protein, 321 aa, synthetic construct
  REGION 1..321: note = Variant of adenosine kinase
MHHHHHHGGSGMSALICGSLAYDTIMVFPDQFKNHILPDKVHILNVSFLVPRMRREFGGCAGNIAYNLHLLGGAPIPMGTVGQDFGPYREHFETLGIDLSRVKIIDDLFTPQAFITTDHDHNQITAFHPGAMMRSYENHVRDVPGVTLGLVGPDGREGMIQNAEEFAAGGIPFIFDPGQAMPLFNGPELREFIEQADYVVVNDYESNLLQERTGWNEQDIVSRVQAYITTQGPKGALVHTPEKTYDIPPAHERRVVDPTGCGDAFRAGLIYGIQHNYDWLTIGRMGNLMGALKVEHPGTQNQRFDFAEFNDQFKQQFGYAL

SEQ ID NO: 153 - DNA, 969 bp, synthetic construct
  misc_feature 1..969: note = Variant of adenosine kinase
  source 1..969: mol_type = other DNA
atgcaccatcatcaccatcacgggggctccggcatgagtgcactgatttgcggttctttagcgtatgataccatcatggtgtttccggaccagttcaagaaccatattctgcccgataaagttcacatcctcaatgtcagctttcttgtaccacgcatgcgtcgtgaatttggaggctgtgccggcaacattgcgtacaatctgcatctgttgggtggtgctccgatccctatgggaacggtgggccaagatttcggtccgtatcgcgagcacttcgaaactctgggcattgacttatcccgcgtcaagatcatcgatgatctgtttacaccgcaggccttcattaccaccgaccatgataacaaccagattacggcgtttcatccaggcgcaatgatgcgttcgtacgaaaatcacgttcgtgatgtgccgggtgttaccttgggcctcgtaggtcctgatggacgcgagggcatgatccaaaatgccgaagaatttgctgctggtggcattccgttcatttttgacccaggtcaggcaatgccgctgttcaacggccccgaactgcgcgagtttatcgaacaggcggactatgtggtggtcaacgattacgaaagcaatcttcttgaggaacgtactggctggaacgagcaggacattgtttcacgcgtgcaggcgtatatcaccacgcaaggtcctaaaggagccctggtacatacaccggagaagacctacgatattccgccggcacacgaacgtcgtgtcgttgatccaactggttgcggcgacgcgtttcgcgccggcctgatctatggtattcagcataattatgattggttgaccattggccgcatgggaaacttaatgggtgcgctgaaagtggaacaccctggcacgcaaaatcagcgtttcgattttgccgaattcaacgaccagttcaaacaacagtttggctacgcgctctaatga

SEQ ID NO: 154 - protein, 321 aa, synthetic construct
  REGION 1..321: note = Variant of adenosine kinase
MHHHHHHGGSGMSALICGSLAYDTIMVFPDQFKNHILPDKVHILNVSFLVPRMRREFGGCAGNIAYNLHLLGGAPIPMGTVGQDFGPYREHFETLGIDLSRVKIIDDLFTPQAFITTDHDNNQITAFHPGAMMRSYENHVRDVPGVTLGLVGPDGREGMIQNAEEFAAGGIPFIFDPGQAMPLFNGPELREFIEQADYVVVNDYESNLLEERTGWNEQDIVSRVQAYITTQGPKGALVHTPEKTYDIPPAHERRVVDPTGCGDAFRAGLIYGIQHNYDWLTIGRMGNLMGALKVEHPGTQNQRFDFAEFNDQFKQQFGYAL

SEQ ID NO: 155 - DNA, 969 bp, synthetic construct
  misc_feature 1..969: note = Variant of adenosine kinase
  source 1..969: mol_type = other DNA
atgcaccatcatcaccatcacgggggctccggcatgagtgcactgatttgcggttctttagcgtatgataccatcatggtgtttccggaccagttcaagaaccatattctgcccgataaagttcacatcctcaatgtcagctttcttgtaccacgcatgcgtcgtgaatttggaggctgtgccggcaacattgcgtacaatctgcatctgttgggtggtgctccgatccctatgggaacggtgggccaagatttcggtccgtatcgcgagcacttcgaaactctgggcattgacttatcccgcgtcaagatcatcgatgatctgtttacaccgcaggccttcattaccaccgaccatgataacaaccagattacggcgtttcatccaggcgcaatgatgcgttcgcacgaaaatcacgttcgtgatgtgccgggtgttaccttgggcctcgtaggtcctgatggacgcgagggcatgatccaaaatgccgaagaatttgctgctggtggcattccgttcatttttgacccaggtcaggcaatgccgctgttcaacggccccgaactgcgcgagtttatcgaacaggcggactatgtggtggtcaacgattacgaaagcaatcttcttcaagaacgtactggctggaacgagcaggacattgtttcacgcgtgcaggcgtatatcaccacgcaaggtcctaaaggagccctggtacatacaccggagaagacctacgatattccgggggcacacgaacgtcgtgtcgttgatccaactggttgcggcgacgcgtttcgcgccggcctgatctatggtattcagcataattatgattggttgaccattggccgcatgggaaacttaatgggtgcgctgaaagtggaacaccctggcacgcaaaatcagcgtttcgattttgccgaattcaacgaccagttcaaacaacagtttggctacgcgctctaatga

SEQ ID NO: 156 - protein, 321 aa, synthetic construct
  REGION 1..321: note = Variant of adenosine kinase
MHHHHHHGGSGMSALICGSLAYDTIMVFPDQFKNHILPDKVHILNVSFLVPRMRREFGGCAGNIAYNLHLLGGAPIPMGTVGQDFGPYREHFETLGIDLSRVKIIDDLFTPQAFITTDHDNNQITAFHPGAMMRSHENHVRDVPGVTLGLVGPDGREGMIQNAEEFAAGGIPFIFDPGQAMPLFNGPELREFIEQADYVVVNDYESNLLQERTGWNEQDIVSRVQAYITTQGPKGALVHTPEKTYDIPGAHERRVVDPTGCGDAFRAGLIYGIQHNYDWLTIGRMGNLMGALKVEHPGTQNQRFDFAEFNDQFKQQFGYAL

SEQ ID NO: 157 - DNA, 969 bp, synthetic construct
  misc_feature 1..969: note = Variant of adenosine kinase
  source 1..969: mol_type = other DNA
atgcaccatcatcaccatcacgggggctccggcatgagtgcactgatttgcggttctttagcgtatgataccatcatggtgtttccggaccagttcaagaaccatattctgcccgataaagttcacatcctcaatgtcagctttcttgtaccacgcatgcgtcgtgaatttggaggctgtgccggcaacattgcgtacaatctgcatctgttgggtggtgctccgatccctatgggaacggtgggccaagatttcggtccgtatcgcgagcacttcgaaactctgggcattgacttatcccgcgtcaagatcatcgatgatctgtttacaccgcaggccttcattaccaccgaccatgataacaaccagattacggcgtttcatccaggcgcaatgatgcgttcgtacgaaaatcacgttcgtgatgtgccgggtgttaccttgggcctcgtaggtcctgatggacgcgagggcatgatccaaaatgccgaagaatttgctgctggtggcattccgttcatttttgacccaggtcaggcaatgccgctgttcaacggccccgaactgcgcgagtttatcgaacaggcggactatgtggtggtcaacgattacgaaagcaatgtgcttcaagaacgtactggctggaacgagcaggacattgtttcacgcgtgcaggcgtatatcaccacgcaaggtcctaaaggagccctggtacatacaccggagaagacctacgatattccgccggcacacgaacgtcgtgtcgttgatccaactggttgcggcgacgcgtttcgcgccggcctgatctatggtattcagcataattatgattggttgaccattggccgcatgggaaacttaatgggtgcgctgaaagtggaacaccctggcacgcaaaatcagcgtttcgattttgccgaattcaacgaccagttcaaacaacagtttggctacgcgctctaatga

SEQ ID NO: 158 - protein, 321 aa, synthetic construct
  REGION 1..321: note = Variant of adenosine kinase
MHHHHHHGGSGMSALICGSLAYDTIMVFPDQFKNHILPDKVHILNVSFLVPRMRREFGGCAGNIAYNLHLLGGAPIPMGTVGQDFGPYREHFETLGIDLSRVKIIDDLFTPQAFITTDHDNNQITAFHPGAMMRSYENHVRDVPGVTLGLVGPDGREGMIQNAEEFAAGGIPFIFDPGQAMPLFNGPELREFIEQADYVVVNDYESNVLQERTGWNEQDIVSRVQAYITTQGPKGALVHTPEKTYDIPPAHERRVVDPTGCGDAFRAGLIYGIQHNYDWLTIGRMGNLMGALKVEHPGTQNQRFDFAEFNDQFKQQFGYAL

SEQ ID NO: 159 - DNA, 969 bp, synthetic construct
  misc_feature 1..969: note = Variant of adenosine kinase
  source 1..969: mol_type = other DNA
atgcaccatcatcaccatcacgggggctccggcatgagtgcactgatttgcggttctttagcgtatgataccatcatggtgtttccggaccagttcaagaagcatattctgcccgataaagttcacatcctcaatgtcagctttcttgtaccacgcatgcgtcgtgaatttggaggctgtgccggcaacattgcgtacaatctgcatctgttgggtggtgctccgatccctatgggaacggtgggccaagatttcggtccgtatcgcgagcacttcgaaactctgggcattgacttatcccgcgtcaagatcatcgatgatctgtttacaccgcaggccttcattaccaccgaccatgataacaaccagattacggcgtttcatccaggcgcaatgatgcgttcgtacgaaaatcacgttcgtgatgtgccgggtgttaccttgggcctcgtaggtcctgatggacgcgagggcatgatccaaaatgccgaagaatttgctgctggtggcattccgttcatttttgacccaggtcaggcaatgccgctgttcaacggccccgaactgcgcgagtttatcgaacaggcggactatgtggtggtcaacgattacgaaagcaatcttcttcaagaacgtactggctggaacgagcaggacattgtttcacgcgtgcaggcgtatatcaccacgcaaggtcctaaaggagccctggtacatacaccggagaagacctacgatattccgccggcacacgaacgtcgtgtcgttgatccaactggttgcggcgacgcgtttcgcgccggcctgatctatggtattcagcataattatgattggttgaccattggccgcatgggaaacttaatgggtgcgctgaaagtggaacaccctggcacgcaaaatcagcgtttcgattttgccgaattcaacgaccagttcaaacaacagtttggctacgcgctctaatga

SEQ ID NO: 160 - protein, 321 aa, synthetic construct
  REGION 1..321: note = Variant of adenosine kinase
MHHHHHHGGSGMSALICGSLAYDTIMVFPDQFKKHILPDKVHILNVSFLVPRMRREFGGCAGNIAYNLHLLGGAPIPMGTVGQDFGPYREHFETLGIDLSRVKIIDDLFTPQAFITTDHDNNQITAFHPGAMMRSYENHVRDVPGVTLGLVGPDGREGMIQNAEEFAAGGIPFIFDPGQAMPLFNGPELREFIEQADYVVVNDYESNLLQERTGWNEQDIVSRVQAYITTQGPKGALVHTPEKTYDIPPAHERRVVDPTGCGDAFRAGLIYGIQHNYDWLTIGRMGNLMGALKVEHPGTQNQRFDFAEFNDQFKQQFGYAL

SEQ ID NO: 161 - DNA, 969 bp, synthetic construct
  misc_feature 1..969: note = Variant of adenosine kinase
  source 1..969: mol_type = other DNA
atgcaccatcatcaccatcacgggggctccggcatgagtgcactgatttgcggttctttagcgtatgataccatcatggtgtttccggaccagttcaagaaccatattctgcccgataaagttcacatcctcaatgtcagctttcttgtaccacgcatgcgtcgtgaatttggaggctgtgccggcaacattgcgtacaatctgcatctgttgggtggtgctccgatccctatgggaacggtgggccaagatttcggtccgtatcgcgagcacttcgaaactctgggcattgacttatcccgcgtcaagatcatcgattctctgtttacagctcaggccttcattaccaccgaccatgataacaaccagattacggcgtttcatccaggcgcaatgatgcgttcgtacgaaaatcacgttcgtgatgtgccgggtgttaccttgggcctcgtaggtcctgatggacgcgagggcatgatccaaaatgccgaagaatttgctgctggtggcattccgttcatttttgacccaggtcaggcaatgccgctgttcaacggccccgaactgcgcgagtttatcgaacaggcggactatgtggtggtcaacgattacgaaagcaatcttcttcaagaacgtactggctggaacgagcaggacattgtttcacgcgtgcaggcgtatatcaccacgcaaggtcctaaaggagccctggtacatacaccggagaagacctacgatattccgccggcacacgaacgtcgtgtcgttgatccaactggttgcggcgacgcgtttcgcgccggcctgatctatggtattcagcataattatgattggttgaccattggccgcatgggaaacttaatgggtgcgctgaaagtggaacaccctggcacgcaaaatcagcgtttcgattttgccgaattcaacgaccagttcaaacaacagtttggctacgcgctctaatga

SEQ ID NO: 162 - protein, 321 aa, synthetic construct
  REGION 1..321: note = Variant of adenosine kinase
MHHHHHHGGSGMSALICGSLAYDTIMVFPDQFKNHILPDKVHILNVSFLVPRMRREFGGCAGNIAYNLHLLGGAPIPMGTVGQDFGPYREHFETLGIDLSRVKIIDSLFTAQAFITTDHDNNQITAFHPGAMMRSYENHVRDVPGVTLGLVGPDGREGMIQNAEEFAAGGIPFIFDPGQAMPLFNGPELREFIEQADYVVVNDYESNLLQERTGWNEQDIVSRVQAYITTQGPKGALVHTPEKTYDIPPAHERRVVDPTGCGDAFRAGLIYGIQHNYDWLTIGRMGNLMGALKVEHPGTQNQRFDFAEFNDQFKQQFGYAL

SEQ ID NO: 163 - DNA, 969 bp, synthetic construct
  misc_feature 1..969: note = Variant of adenosine kinase
  source 1..969: mol_type = other DNA
atgcaccatcatcaccatcacgggggctccggcatgagtgcactgatttgcggttctttagcgtatgataccatcatggtgtttccggaccagttcaagaaccatattctgcccgataaagttcacatcctcaatgtcagctttcttgtaccacgcatgcgtcgtgaatttggaggctgtgccggcaacattgcgtacaatctgcatctgttgggtggtgctccgatccctatgggaacggtgggccaagatttcggtccgtatcgcgagcacttcgaaactctgggcattgacttatcccgcgtcaagatcatcgatggtctgtttacagctcaggccttcattaccaccgaccatgataacaaccagattacggcgtttcatccaggcgcaatgatgcgttcgtacgaaaatcacgttcgtgatgtgccgggtgttaccttgggcctcgtaggtcctgatggacgcgagggcatgatccaaaatgccgaagaatttgctgctggtggcattccgttcatttttgacccaggtcaggcaatgccgctgttcaacggccccgaactgcgcgagtttatcgaacaggcggactatgtggtggtcaacgattacgaaagcaatcttcttcaagaacgtactggctggaacgagcaggacattgtttcacgcgtgcaggcgtatatcaccacgcaaggtcctaaaggagccctggtacatacaccggagaagacctacgatattccgccggcacacgaacgtcgtgtcgttgatccaactggttgcggcgacgcgtttcgcgccggcctgatctatggtattcagcataattatgattggttgaccattggccgcatgggaaacttaatgggtgcgctgaaagtggaacaccctggcacgcaaaatcagcgtttcgattttgccgaattcaacgaccagttcaaacaacagtttggctacgcgctctaatga

SEQ ID NO: 164 - protein, 321 aa, synthetic construct
  REGION 1..321: note = Variant of adenosine kinase
MHHHHHHGGSGMSALICGSLAYDTIMVFPDQFKNHILPDKVHILNVSFLVPRMRREFGGCAGNIAYNLHLLGGAPIPMGTVGQDFGPYREHFETLGIDLSRVKIIDGLFTAQAFITTDHDNNQITAFHPGAMMRSYENHVRDVPGVTLGLVGPDGREGMIQNAEEFAAGGIPFIFDPGQAMPLFNGPELREFIEQADYVVVNDYESNLLQERTGWNEQDIVSRVQAYITTQGPKGALVHTPEKTYDIPPAHERRVVDPTGCGDAFRAGLIYGIQHNYDWLTIGRMGNLMGALKVEHPGTQNQRFDFAEFNDQFKQQFGYAL

SEQ ID NO: 165 - DNA, 969 bp, synthetic construct
  misc_feature 1..969: note = Variant of adenosine kinase
  source 1..969: mol_type = other DNA
atgcaccatcatcaccatcacgggggctccggcatgagtgcactgatttgcggttctttagcgtatgataccatcatggtgtttccggaccagttcaagaaccatattctgcccgataaagttcacatcctcaatgtcagctttcttgtaccacgcatgcgtcgtgaatttggaggctgtgccggcaacattgcgtacaatctgcatctgttgggtggtgctccgatccctatgggaacggtgggccaagatttcggtccgtatcgcgagcacttcgaaactctgggcattgacttatcccgcgtcaagatcatcgatgatctgtttacaccgcaggccttcattaccaccgaccatgataacaaccagattacggcgtttcatccaggcgcaatgatgcgttcgtacgaaaatcacgttcgtgatgtgccgggtgttaccttgggcctcgtaggtcctgatggacgcgagggcatgatccaaaatgccgaagaatttgctgctggtggcattccgttcatttttgacccaggtcaggcaatgccgctgttcaacggccccgaactgcgcgagtttatcgaacaggcggactatgtggtggtcaacgattacgaaagcaatcttcttcaaacgcgtactggctggaacgagcaggacattgtttcacgcgtgcaggcgtatatcaccacgcaaggtcctaaaggagccctggtacatacaccggagaagacctacgatattccgccggcacacgaacgtcgtgtcgttgatccaactggttgcggcgacgcgtttcgcgccggcctgatctatggtattcagcataattatgattggttgaccattggccgcatgggaaacttaatgggtgcgctgaaagtggaacaccctggcacgcaaaatcagcgtttcgattttgccgaattcaacgaccagttcaaacaacagtttggctacgcgctctaatga

SEQ ID NO: 166 - protein, 321 aa, synthetic construct
  REGION 1..321: note = Variant of adenosine kinase
MHHHHHHGGSGMSALICGSLAYDTIMVFPDQFKNHILPDKVHILNVSFLVPRMRREFGGCAGNIAYNLHLLGGAPIPMGTVGQDFGPYREHFETLGIDLSRVKIIDDLFTPQAFITTDHDNNQITAFHPGAMMRSYENHVRDVPGVTLGLVGPDGREGMIQNAEEFAAGGIPFIFDPGQAMPLFNGPELREFIEQADYVVVNDYESNLLQTRTGWNEQDIVSRVQAYITTQGPKGALVHTPEKTYDIPPAHERRVVDPTGCGDAFRAGLIYGIQHNYDWLTIGRMGNLMGALKVEHPGTQNQRFDFAEFNDQFKQQFGYAL

SEQ ID NO: 167 - DNA, 969 bp, synthetic construct
  misc_feature 1..969: note = Variant of adenosine kinase
  source 1..969: mol_type = other DNA
atgcaccatcatcaccatcacgggggctccggcatgagtgcactgatttgcggttctttagcgtatgataccatcatggtgtttccggaccagttcaagaaccatattctgcccgataaagttcacatcctcaatgtcagctttcttgtaccacgcatgcgtcgtgaatttggaggctgtgccggcaacattgcgtacaatctgcatctgttgggtggtgctccgatccctatgggaacggtgggccaagatttcggtccgtatcgcgagcacttcgaaactctgggcattgacttatcccgcgtcaagatcatcgatgatctgtttacaccgcaggccttcattaccaccgaccatgataacaaccagattacggcgtttcatccaggcgcaatgatgcgttcgtacgaaaatcacgttcgtgatgtgccgggtgttaccttgggcctcgtaggtcctgatggacgcgagggcatgatccaaaatgccgaagaatttgctgctggtggcattccgttcatttttgacccaggtcaggcaatgccgctgttcaacggccccgaactgcgcgagtttatcgaacaggcggactatgtggtggtcaacgattacgaaagcaatcttcttcaagaacgtactggctggaacgagcaggacattgtttcacgcgtgcaggcatatatcaccacgcaaggtcctaaaggagccctggtacatacaccggagaagacctacgatattccgccggcacacgaacgtcgtgtcgttgatccaactggttgcggcgacgcgtttcgcgccggcctgatctatggtattcagcataattatgattggttgaccattggccgcatgggaaacttaatgggtgcgctgaaagtggaacaccctggcacgcaaaatcagcgtttcgattttgcctttttcaacgaccagttcaaacaacagtttggctacgcgctctaatga

SEQ ID NO: 168 - protein, 321 aa, synthetic construct
  REGION 1..321: note = Variant of adenosine kinase
MHHHHHHGGSGMSALICGSLAYDTIMVFPDQFKNHILPDKVHILNVSFLVPRMRREFGGCAGNIAYNLHLLGGAPIPMGTVGQDFGPYREHFETLGIDLSRVKIIDDLFTPQAFITTDHDNNQITAFHPGAMMRSYENHVRDVPGVTLGLVGPDGREGMIQNAEEFAAGGIPFIFDPGQAMPLFNGPELREFIEQADYVVVNDYESNLLQERTGWNEQDIVSRVQAYITTQGPKGALVHTPEKTYDIPPAHERRVVDPTGCGDAFRAGLIYGIQHNYDWLTIGRMGNLMGALKVEHPGTQNQRFDFAFFNDQFKQQFGYAL

SEQ ID NO: 169 - DNA, 969 bp, synthetic construct
  misc_feature 1..969: note = Variant of adenosine kinase
  source 1..969: mol_type = other DNA
atgcaccatcatcaccatcacgggggctccggcatgagtgcactgatttgcggttctttagcgtatgataccatcatggtgtttccggaccagttcaagaaccatattctgcccgataaagttcacatcctcaatgtcagctttcttgtaccacgcatgcgtcgtgaatttggaggctgtgccggcaacattgcgtacaatctgcatctgttgggtggtgctccgatccctatgggaacggtgggccaagatttcggtccgtatcgcgagcacttcgaaactctgggcattgacttatcccgcgtcaagatcatcgatgatctgtttacaccgcaggccttcattaccaccgaccatgataacaaccagattacggcgtttcatccaggcgcaatgatgcgttcgtacgaaaatcacgttcgtgatgtgccgggtgttaccttgggcctcgtaggtcctgatggacgcgagggcatgatccaaaatgccgaagaatttgctgctggtggcattccgttcatttttgacccaggtcaggcattgccgctgttcaacggccccgaactgcgcgagtttatcgaacaggcggactatgtggtggtcaacgattacgaaagcaatcttcttcaagaacgtactggctggaacgagcaggacattgtttcacgcgtgcaggcgtatatcaccacgcaaggtcctaaaggagccctggtacatacaccggagaagacctacgatattccgccggcacacgaacgtcgtgtcgttgatccaactggttgcggcgacgcgtttcgcgccggcctgatctatggtattcagcataattatgattggttgaccattggccgcatgggaaacttaatgggtgcgctgaaagtggaacaccctggcacgcaaaatcagcgtttcgattttgccgaattcaacgaccagttcaaacaacagtttggctacgcgctctaatga

SEQ ID NO: 170 - protein, 321 aa, synthetic construct
  REGION 1..321: note = Variant of adenosine kinase
MHHHHHHGGSGMSALICGSLAYDTIMVFPDQFKNHILPDKVHILNVSFLVPRMRREFGGCAGNIAYNLHLLGGAPIPMGTVGQDFGPYREHFETLGIDLSRVKIIDDLFTPQAFITTDHDNNQITAFHPGAMMRSYENHVRDVPGVTLGLVGPDGREGMIQNAEEFAAGGIPFIFDPGQALPLFNGPELREFIEQADYVVVNDYESNLLQERTGWNEQDIVSRVQAYITTQGPKGALVHTPEKTYDIPPAHERRVVDPTGCGDAFRAGLIYGIQHNYDWLTIGRMGNLMGALKVEHPGTQNQRFDFAEFNDQFKQQFGYAL

SEQ ID NO: 171 - DNA, 969 bp, synthetic construct
  misc_feature 1..969: note = Variant of adenosine kinase
  source 1..969: mol_type = other DNA
atgcaccatcatcaccatcacgggggctccggcatgagtgcactgatttgcggttctttagcgtatgataccatcatggtgtttccggaccagttcaagaaccatattctgcccgataaagttcacatcctcaatgtcagctttcttgtaccacgcatgcgtcgtgaatttggaggctgtgccggcaacattgcgtacaatctgcatctgttgggtggtgctccgatccctatgggaacggtgggccaagatttcggtccgtatcgcgagcacttcgaaactctgggcattgacttatcccgcgtcaagatcatcgatgatctgtttacaccgcaggccttcattaccaccgaccatgataacaaccagattacggcgtttcatccaggcgcaatgatgcgttcgtacgaaaatcacgttcgtgatgtgccgggtgttaccttgggcctcgtaggtcctgatggacgcgagggcatgatccaaaatgccgaagaatttgctgctggtggcattccgttcatttttgacccaggtcaggcaatgccgctgttcaacggccccgaactgcgcgagtttatcgaacaggcggactatgtggtggtcaacgattacgaaagcaatcttcttcaagaacgtactggctggaacgagcaggacattgtttcacgcgtgcaggcgtatatcaccacgcaaggtgttaaaggagccctggtacatacaccggagaagacctacgatattccgccggcacacgaacgtcgtgtcgttgatccaactggttgcggcgacgcgtttcgcgccggcctgatctatggtattcagcataattatgattggttgaccattggccgcatgggaaacttaatgggtgcgctgaaagtggaacaccctggcacgcaaaatcagcgtttcgattttgccgaattcaacgaccagttcaaacaacagtttggctacgcgctctaatga

SEQ ID NO: 172 - protein, 321 aa, synthetic construct
  REGION 1..321: note = Variant of adenosine kinase
MHHHHHHGGSGMSALICGSLAYDTIMVFPDQFKNHILPDKVHILNVSFLVPRMRREFGGCAGNIAYNLHLLGGAPIPMGTVGQDFGPYREHFETLGIDLSRVKIIDDLFTPQAFITTDHDNNQITAFHPGAMMRSYENHVRDVPGVTLGLVGPDGREGMIQNAEEFAAGGIPFIFDPGQAMPLFNGPELREFIEQADYVVVNDYESNLLQERTGWNEQDIVSRVQAYITTQGVKGALVHTPEKTYDIPPAHERRVVDPTGCGDAFRAGLIYGIQHNYDWLTIGRMGNLMGALKVEHPGTQNQRFDFAEFNDQFKQQFGYAL

SEQ ID NO: 173 - DNA, 969 bp, synthetic construct
  misc_feature 1..969: note = Variant of adenosine kinase
  source 1..969: mol_type = other DNA
atgcaccatcatcaccatcacgggggctccggcatgagtgcactgatttgcggttctttagcgtatgataccatcatggtgtttccggaccagttcaagaaccatattctgcccgataaagttcacatcctcaatgtcagctttcttgtaccacgcatgcgtcgtgaatttggaggctgtgccggcaacattgcgtacaatctgcatctgttgggtggtgctccgatccctatgggaacggtgggccaagatttcggtccgtatcgcgagcacttcgaaactctgggcattgacttatcccgcgtcaagatcatcgatgcgctgtttacagctcaggccttcattaccaccgaccatgataacaaccagattacggcgtttcatccaggcgcaatgatgcgttcgtacgaaaatcacgttcgtgatgtgccgggtgttaccttgggcctcgtaggtcctgatggacgcgagggcatgatccaaaatgccgaagaatttgctgctggtggcattccgttcatttttgacccaggtcaggcaatgccgctgttcaacggccccgaactgcgcgagtttatcgaacaggcggactatgtggtggtcaacgattacgaaagcaatcttcttcaagaacgtactggctggaacgagcaggacattgtttcacgcgtgcaggcgtatatcaccacgcaaggtcctaaaggagccctggtacatacaccggagaagacctacgatattccgccggcacacgaacgtcgtgtcgttgatccaactggttgcggcgacgcgtttcgcgccggcctgatctatggtattcagcataattatgattggttgaccattggccgcatgggaaacttaatgggtgcgctgaaagtggaacaccctggcacgcaaaatcagcgtttcgattttgccgaattcaacgaccagttcaaacaacagtttggctacgcgctctaatga

SEQ ID NO: 174 - protein, 321 aa, synthetic construct
  REGION 1..321: note = Variant of adenosine kinase
MHHHHHHGGSGMSALICGSLAYDTIMVFPDQFKNHILPDKVHILNVSFLVPRMRREFGGCAGNIAYNLHLLGGAPIPMGTVGQDFGPYREHFETLGIDLSRVKIIDALFTAQAFITTDHDNNQITAFHPGAMMRSYENHVRDVPGVTLGLVGPDGREGMIQNAEEFAAGGIPFIFDPGQAMPLFNGPELREFIEQADYVVVNDYESNLLQERTGWNEQDIVSRVQAYITTQGPKGALVHTPEKTYDIPPAHERRVVDPTGCGDAFRAGLIYGIQHNYDWLTIGRMGNLMGALKVEHPGTQNQRFDFAEFNDQFKQQFGYAL

SEQ ID NO: 175 - DNA, 969 bp, synthetic construct
  misc_feature 1..969: note = Variant of adenosine kinase
  source 1..969: mol_type = other DNA
atgcaccatcatcaccatcacgggggctccggcatgagtgcactgatttgcggttctttagcgtatgataccatcatggtgtttccggaccagttcaagcggcatattctgcccgataaagttcacatcctcaatgtcagctttcttgtaccacgcatgcgtcgtgaatttggaggctgtgccggcaacattgcgtacaatctgcatctgttgggtggtgctccgatccctatgggaacggtgggccaagatttcggtccgtatcgcgagcacttcgaaactctgggcattgacttatcccgcgtcaagatcatcgatgatctgtttacaccgcaggccttcattaccaccgaccatgataacaaccagattacggcgtttcatccaggcgcaatgatgcgttcgtacgaaaatcacgttcgtgatgtgccgggtgttaccttgggcctcgtaggtcctgatggacgcgagggcatgatccaaaatgccgaagaatttgctgctggtggcattccgttcatttttgacccaggtcaggcaatgccgctgttcaacggccccgaactgcgcgagtttatcgaacaggcggactatgtggtggtcaacgattacgaaagcaatcttcttcaagaacgtactggctggaacgagcaggacattgtttcacgcgtgcaggcgtatatcaccacgcaaggtcctaaaggagccctggtacatacaccggagaagacctacgatattccgccggcacacgaacgtcgtgtcgttgatccaactggttgcggcgacgcgtttcgcgccggcctgatctatggtattcagcataattatgattggttgaccattggccgcatgggaaacttaatgggtgcgctgaaagtggaacaccctggcacgcaaaatcagcgtttcgattttgccgaattcaacgaccagttcaaacaacagtttggctacgcgctctaatga

SEQ ID NO: 176 - protein, 321 aa, synthetic construct
  REGION 1..321: note = Variant of adenosine kinase
MHHHHHHGGSGMSALICGSLAYDTIMVFPDQFKRHILPDKVHILNVSFLVPRMRREFGGCAGNIAYNLHLLGGAPIPMGTVGQDFGPYREHFETLGIDLSRVKIIDDLFTPQAFITTDHDNNQITAFHPGAMMRSYENHVRDVPGVTLGLVGPDGREGMIQNAEEFAAGGIPFIFDPGQAMPLFNGPELREFIEQADYVVVNDYESNLLQERTGWNEQDIVSRVQAYITTQGPKGALVHTPEKTYDIPPAHERRVVDPTGCGDAFRAGLIYGIQHNYDWLTIGRMGNLMGALKVEHPGTQNQRFDFAEFNDQFKQQFGYAL

SEQ ID NO: 177 - DNA, 969 bp, synthetic construct
  misc_feature 1..969: note = Variant of adenosine kinase
  source 1..969: mol_type = other DNA
atgcaccatcatcaccatcacgggggctccggcatgagtgcactgatttgcggttctttagcgtatgataccatcatggtgtttccggaccagttcaagaaccatattctggtggataaagttcacatcctcaatgtcagctttcttgtaccacgcatgcgtcgtgaatttggaggctgtgccggcaacattgcgtacaatctgcatctgttgggtggtgctccgatccctatgggaacggtgggccaagatttcggtccgtatcgcgagcacttcgaaactctgggcattgacttatcccgcgtcaagatcatcgatgatctgtttacaccgcaggccttcattaccaccgaccatgataacaaccagattacggcgtttcatccaggcgcaatgatgcgttcgtacgaaaatcacgttcgtgatgtgccgggtgttaccttgggcctcgtaggtcctgatggacgcgagggcatgatccaaaatgccgaagaatttgctgctggtggcattccgttcatttttgacccaggtcaggcaatgccgctgttcaacggccccgaactgcgcgagtttatcgaacaggcggactatgtggtggtcaacgattacgaaagcaatcttcttcaagaacgtactggctggaacgagcaggacattgtttcacgcgtgcaggcgtatatcaccacgcaaggtcctaaaggagccctggtacatacaccggagaagacctacgatattccgccggcacacgaacgtcgtgtcgttgatccaactggttgcggcgacgcgtttcgcgccggcctgatctatggtattcagcataattatgattggttgaccattggccgcatgggaaacttaatgggtgcgctgaaagtggaacaccctggcacgcaaaatcagcgtttcgattttgccgaattcaacgaccagttcaaacaacagtttggctacgcgctctaatga

SEQ ID NO: 178 - protein, 321 aa, synthetic construct
  REGION 1..321: note = Variant of adenosine kinase
MHHHHHHGGSGMSALICGSLAYDTIMVFPDQFKNHILVDKVHILNVSFLVPRMRREFGGCAGNIAYNLHLLGGAPIPMGTVGQDFGPYREHFETLGIDLSRVKIIDDLFTPQAFITTDHDNNQITAFHPGAMMRSYENHVRDVPGVTLGLVGPDGREGMIQNAEEFAAGGIPFIFDPGQAMPLFNGPELREFIEQADYVVVNDYESNLLQERTGWNEQDIVSRVQAYITTQGPKGALVHTPEKTYDIPPAHERRVVDPTGCGDAFRAGLIYGIQHNYDWLTIGRMGNLMGALKVEHPGTQNQRFDFAEFNDQFKQQFGYAL

SEQ ID NO: 179 - DNA, 969 bp, synthetic construct
  misc_feature 1..969: note = Variant of adenosine kinase
  source 1..969: mol_type = other DNA
atgcaccatcatcaccatcacgggggctccggcatgagtgcactgatttgcggttctttagcgtatgataccatcatggtgtttccggaccagttcaagaaccatattctgcccgataaagttcacatcctcaatgtcagctttcttgtaccacgcatgcgtcgtgaatttggaggctgtgccggcaacattgcgtacaatctgcatctgttgggtggtgctccgatccctatgggaacggtgggccaagatttcggtccgtatcgcgagcacttcgaaactctgggcattgacttatcccgcgtcaagatcatcgatgatctgtttacaccgcaggccttcattaccaccgaccatgataacaaccagattacggcgtttcatccaggcgcaatgatgcgttcgtacgaaaatcacgttcgtgatgtgccgggtgttaccttgggcctcgtaggtcctgatggacgcgagggcatgatccaaaatgccgaagaatttgctgctggtggcattccgttcatttttgacccaggtcaggcaatgccgctgttcaacggccccgaactgcgcgagtttatcgaacaggcggactatgtggtggtcaacgattacgaaagcaatcttcttcaagaacgtactggctggaacgagcaggacattgtttcacgcgtgcaggcgtatatcaccacgcaaggtcctaaaggagccctggtacatacaccggagaagacctacgatattcggccggcacacgaacgtcgtgtcgttgatccaactggttgcggcgacgcgtttcgcgccggcctgatctatggtattcagcataattatgattggttgaccattggccgcatgggaaacttaatgggtgcgctgaaagtggaacaccctggcacgcaaaatcagcgtttcgattttgccgaattcaacgaccagttcaaacaacagtttggctacgcgctctaatga

SEQ ID NO: 180 - protein, 321 aa, synthetic construct
  REGION 1..321: note = Variant of adenosine kinase
MHHHHHHGGSGMSALICGSLAYDTIMVFPDQFKNHILPDKVHILNVSFLVPRMRREFGGCAGNIAYNLHLLGGAPIPMGTVGQDFGPYREHFETLGIDLSRVKIIDDLFTPQAFITTDHDNNQITAFHPGAMMRSYENHVRDVPGVTLGLVGPDGREGMIQNAEEFAAGGIPFIFDPGQAMPLFNGPELREFIEQADYVVVNDYESNLLQERTGWNEQDIVSRVQAYITTQGPKGALVHTPEKTYDIRPAHERRVVDPTGCGDAFRAGLIYGIQHNYDWLTIGRMGNLMGALKVEHPGTQNQRFDFAEFNDQFKQQFGYAL

SEQ ID NO: 181 - DNA, 969 bp, synthetic construct
  misc_feature 1..969: note = Variant of adenosine kinase
  source 1..969: mol_type = other DNA
atgcaccatcatcaccatcacgggggctccggcatgagtgcactgatttgcggttctttagcgtatgataccatcatggtgtttccggaccagttcaagaaccatattctgcccgataaagttcacatcctcaatgtcagctttcttgtaccacgcatgcgtcgtagttttggaggctgtgccggcaacattgcgtacaatctgcatctgttgggtggtgctccgatccctatgggaacggtgggccaagatttcggtccgtatcgcgagcacttcgaaactctgggcattgacttatcccgcgtcaagatcatcgatgatctgtttacaccgcaggccttcattaccaccgaccatgataacaaccagattacggcgtttcatccaggcgcaatgatgcgttcgtacgaaaatcacgttcgtgatgtgccgggtgttaccttgggcctcgtaggtcctgatggacgcgagggcatgatccaaaatgccgaagaatttgctgctggtggcattccgttcatttttgacccaggtcaggcaatgccgctgttcaacggccccgaactgcgcgagtttatcgaacaggcggactatgtggtggtcaacgattacgaaagcaatcttcttcaagaacgtactggctggaacgagcaggacattgtttcacgcgtgcaggcgtatatcaccacgcaaggtcctaaaggagccctggtacatacaccggagaagacctacgatattccgccggcacacgaacgtcgtgtcgttgatccaactggttgcggcgacgcgtttcgcgccggcctgatctatggtattcagcataattatgattggttgaccattggccgcatgggaaacttaatgggtgcgctgaaagtggaacaccctggcacgcaaaatcagcgtttcgattttgccgaattcaacgaccagttcaaacaacagtttggctacgcgctctaatga

SEQ ID NO: 182 - protein, 321 aa, synthetic construct
  REGION 1..321: note = Variant of adenosine kinase
MHHHHHHGGSGMSALICGSLAYDTIMVFPDQFKNHILPDKVHILNVSFLVPRMRRSFGGCAGNIAYNLHLLGGAPIPMGTVGQDFGPYREHFETLGIDLSRVKIIDDLFTPQAFITTDHDNNQITAFHPGAMMRSYENHVRDVPGVTLGLVGPDGREGMIQNAEEFAAGGIPFIFDPGQAMPLFNGPELREFIEQADYVVVNDYESNLLQERTGWNEQDIVSRVQAYITTQGPKGALVHTPEKTYDIPPAHERRVVDPTGCGDAFRAGLIYGIQHNYDWLTIGRMGNLMGALKVEHPGTQNQRFDFAEFNDQFKQQFGYAL

SEQ ID NO: 183 - DNA, 969 bp, synthetic construct
  misc_feature 1..969: note = Variant of adenosine kinase
  source 1..969: mol_type = other DNA
atgcaccatcatcaccatcacgggggctccggcatgagtgcactgatttgcggttctttagcgtatgataccatcatggtgtttccggaccagttcaagaaccatattctgcccgataaagttcacatcctcaatgtcagctttcttgtaccacgcatgcgtcgtgaatttggaggctgtgccggcaacattgcgtacaatctgcatctgttgggtggtgctccgatccctatgggaacggtgggccaagatttcggtccgtatcgcgagcacttcgaaactctgggcattgacttatcccgcgtcaagatcatcgatgatctgtttacaccgcaggccttcattaccaccgaccatgataacaaccagattacggcgtttcatccaggcgcaatgatgcgttcgtacgaaaatcacgttcgtgatgtgccgggtgttaccttgggcctcgtaggtcctgatggacgcgagggcatgatccaaaatgccgaagaatttgctgctggtggcattccgttcatttttgacccaggtcaggcaatgccgctgttcaacggccccgaactgcgcgagtttatcgaacaggcggactatgtggtggtcaacgattacgaaagcaatcttcttcaagaacgtactggctggaacgagcaggacattgtttcacgcgtgcaggcgtatatcaccacgcaaggtcctaaaggagccctggtacatacaccggagaagacctacgatattccgccggcacacgaacgtcgtgtcgttgatccaactggttgcggcgacgcgtttcgcgccggcctgatctatggtattcagcataattatgattggttgaccattggccgcatgggaaacttaatgggtgcgctgaaagtggaacaccctggcacgcaaaatcagcgtttcgattttgccgaattcaacgaccagttcaaacaaaagtttggctacgcgctctaatga

SEQ ID NO: 184 - protein, 321 aa, synthetic construct
  REGION 1..321: note = Variant of adenosine kinase
MHHHHHHGGSGMSALICGSLAYDTIMVFPDQFKNHILPDKVHILNVSFLVPRMRREFGGCAGNIAYNLHLLGGAPIPMGTVGQDFGPYREHFETLGIDLSRVKIIDDLFTPQAFITTDHDNNQITAFHPGAMMRSYENHVRDVPGVTLGLVGPDGREGMIQNAEEFAAGGIPFIFDPGQAMPLFNGPELREFIEQADYVVVNDYESNLLQERTGWNEQDIVSRVQAYITTQGPKGALVHTPEKTYDIPPAHERRVVDPTGCGDAFRAGLIYGIQHNYDWLTIGRMGNLMGALKVEHPGTQNQRFDFAEFNDQFKQKFGYAL

SEQ ID NO: 185 - DNA, 969 bp, synthetic construct
  misc_feature 1..969: note = Variant of adenosine kinase
  source 1..969: mol_type = other DNA
atgcaccatcatcaccatcacgggggctccggcatgagtgcactgatttgcggttctttagcgtatgataccatcatggtgtttccggaccagttcaagaaccatattctgcccgataaagttcacatcctcaatgtcagctttcttgtaccacgcatgcgtcgtgaatttggaggctgtgccggcaacattgcgtacaatctgcatctgttgggtggtgctccgatccctatgggaacggtgggccaagatttcggtccgtatcgcgagcacttcgaaactctgggcattgacttatcccgcgtcaagatcatcgatgatctgtttacaccgcaggccttcattaccaccgaccatgataacaaccagattacggcgtttcatccaggcgcaatgatgcgttcgtacgaaaatcacgttcgtgatgtgccgggtgttaccttgggcctcgtaggtcctgatggacgcgagggcatgatccaaaatgccgaagaatttgctgctggtggcattccgttcatttttgacccaggtcaggcaatgccgctgttcaacggccccgaactgcgcgagtttatcgaacaggcggactatgtggtggtcaacgattacgaaagcaatcttcttcaagaacgtactggctggaacgagcaggacattgtttcacgcgtgcaggcgtatatcaccacgcaaggtcctaaaggagccctggtacatacaccggagaagacctacgatattgtgccggcacacgaacgtcgtgtcgttgatccaactggttgcggcgacgcgtttcgcgccggcctgatctatggtattcagcataattatgattggttgaccattggccgcatgggaaacttaatgggtgcgctgaaagtggaacaccctggcacgcaaaatcagcgtttcgattttgccgaattcaacgaccagttcaaacaacagtttggctacgcgctctaatga

SEQ ID NO: 186 - protein, 321 aa, synthetic construct
  REGION 1..321: note = Variant of adenosine kinase
MHHHHHHGGSGMSALICGSLAYDTIMVFPDQFKNHILPDKVHILNVSFLVPRMRREFGGCAGNIAYNLHLLGGAPIPMGTVGQDFGPYREHFETLGIDLSRVKIIDDLFTPQAFITTDHDNNQITAFHPGAMMRSYENHVRDVPGVTLGLVGPDGREGMIQNAEEFAAGGIPFIFDPGQAMPLFNGPELREFIEQADYVVVNDYESNLLQERTGWNEQDIVSRVQAYITTQGPKGALVHTPEKTYDIVPAHERRVVDPTGCGDAFRAGLIYGIQHNYDWLTIGRMGNLMGALKVEHPGTQNQRFDFAEFNDQFKQQFGYAL

SEQ ID NO: 187 - DNA, 969 bp, synthetic construct
  misc_feature 1..969: note = Variant of adenosine kinase
  source 1..969: mol_type = other DNA
atgcaccatcatcaccatcacgggggctccggcatgagtgcactgatttgcggttctttagcgtatgataccatcatggtgtttccggaccagttcaagaaccatattctgcccgataaagttcacatcctcaatgtcagctttcttgtaccacgcatgcgtcgtgaatttggaggctgtgccggcaacattgcgtacaatctgcatctgttgggtggtgctccgatccctatgggaacggtgggccaagatttcggtccgtatcgcgagcacttcgaaactctgggcattgacttatcccgcgtcaagatcatcgatgatctgtttacaccgcaggccttcattaccaccgaccatgataacaaccagattacggcgtttcatccaggcgcaatgatgcgttcgtacgaaaatcacgttcgtgatgtgccgggtgttaccttgggcctcgtaggtcctgatggacgcgagggcatgatccaaaatgccgaagaatttgctgctggtggcattccgttcatttttgacccaggtcaggcaatgccgctgttcaacggccccgaactgcgcgagtttatcgaacaggcggactatgtggtggtcaacgattacgaaagcaatcttcttcaagaacgtactggctggaacgagcaggacattgtttcacgcgtgcaggcgtatatcaccacgcaaggtcctaaaggagccctggtacatacaccggagaagacctacgatattaagccggcacacgaacgtcgtgtcgttgatccaactggttgcggcgacgcgtttcgcgccggcctgatctatggtattcagcataattatgattggttgaccattggccgcatgggaaacttaatgggtgcgctgaaagtggaacaccctggcacgcaaaatcagcgtttcgattttgccgaattcaacgaccagttcaaacaacagtttggctacgcgctctaatga

SEQ ID NO: 188 - protein, 321 aa, synthetic construct
  REGION 1..321: note = Variant of adenosine kinase
MHHHHHHGGSGMSALICGSLAYDTIMVFPDQFKNHILPDKVHILNVSFLVPRMRREFGGCAGNIAYNLHLLGGAPIPMGTVGQDFGPYREHFETLGIDLSRVKIIDDLFTPQAFITTDHDNNQITAFHPGAMMRSYENHVRDVPGVTLGLVGPDGREGMIQNAEEFAAGGIPFIFDPGQAMPLFNGPELREFIEQADYVVVNDYESNLLQERTGWNEQDIVSRVQAYITTQGPKGALVHTPEKTYDIKPAHERRVVDPTGCGDAFRAGLIYGIQHNYDWLTIGRMGNLMGALKVEHPGTQNQRFDFAEFNDQFKQQFGYAL

SEQ ID NO: 189 - DNA, 969 bp, synthetic construct
  misc_feature 1..969: note = Variant of adenosine kinase
  source 1..969: mol_type = other DNA
atgcaccatcatcaccatcacgggggctccggcatgagtgcactgatttgcggttctttagcgtatgataccatcatggtgtttccggaccagttcaagaaccatattctgcccgataaagttcacatcctcaatgtcagctttcttgtaccacgcatgcgtcgtgaatttggaggctgtgccggcaacattgcgtacaatctgcatctgttgggtggtgctccgatccctatgggaacggtgggccaagatttcggtccgtatacggagcacttcgaaactctgggcattgacttatcccgcgtcaagatcatcgatgatctgtttacaccgcaggccttcattaccaccgaccatgataacaaccagattacggcgtttcatccaggcgcaatgatgcgttcgtacgaaaatcacgttcgtgatgtgccgggtgttaccttgggcctcgtaggtcctgatggacgcgagggcatgatccaaaatgccgaagaatttgctgctggtggcattccgttcatttttgacccaggtcaggcaatgccgctgttcaacggccccgaactgcgcgagtttatcgaacaggcggactatgtggtggtcaacgattacgaaagcaatcttcttcaagaacgtactggctggaacgagcaggacattgtttcacgcgtgcaggcgtatatcaccacgcaaggtcctaaaggagccctggtacatacaccggagaagacctacgatattccgccggcacacgaacgtcgtgtcgttgatccaactggttgcggcgacgcgtttcgcgccggcctgatctatggtattcagcataattatgattggttgaccattggccgcatgggaaacttaatgggtgcgctgaaagtggaacaccctggcacgcaaaatcagcgtttcgattttgccgaattcaacgaccagttcaaacaacagtttggctacgcgctctaatga

SEQ ID NO: 190 - protein, 321 aa, synthetic construct
  REGION 1..321: note = Variant of adenosine kinase
MHHHHHHGGSGMSALICGSLAYDTIMVFPDQFKNHILPDKVHILNVSFLVPRMRREFGGCAGNIAYNLHLLGGAPIPMGTVGQDFGPYTEHFETLGIDLSRVKIIDDLFTPQAFITTDHDNNQITAFHPGAMMRSYENHVRDVPGVTLGLVGPDGREGMIQNAEEFAAGGIPFIFDPGQAMPLFNGPELREFIEQADYVVVNDYESNLLQERTGWNEQDIVSRVQAYITTQGPKGALVHTPEKTYDIPPAHERRVVDPTGCGDAFRAGLIYGIQHNYDWLTIGRMGNLMGALKVEHPGTQNQRFDFAEFNDQFKQQFGYAL

SEQ ID NO: 191 - DNA, 969 bp, synthetic construct
  misc_feature 1..969: note = Variant of adenosine kinase
  source 1..969: mol_type = other DNA
atgcaccatcatcaccatcacgggggctccggcatgagtgcactgatttgcggttctttagcgtatgataccatcatggtgtttccggaccagttcaagaaccatattctgcccgataaagttcacatcctcaatgtcagctttcttgtaccacgcatgcgtcgtgaatttggaggctgtgccggcaacattgcgtacaatctgcatctgttgggtggtgctccgatccctatgggaacggtgggccaagatttcggtccgtatcgcgagcacttcgaaactctgggcattgacttatcccgcgtcaagatcatcgatgatctgtttacaccgcaggccttcattaccaccgaccatgataacaaccagattacggcgtttcatccaggcgcaatgatgcgttcgtacgaaaatcacgttcgtgatgtgccgggtgttaccttgggcctcgtaggtcctgatggacgcgagggcatgatccaaaatgccgaagaatttgctgctggtggcattccgttcatttttgacccaggtcaggcaatgccgctgttcaacggccccgaactgcgcgagtttatcgaacaggcggactatgtggtggtcaacgattacgaaagcaatcttcttcaagaacgtactggctggaacgagcaggacattgtttcacgcgtgcaggcgtatatcaccacgcaaggtcctaaaggagccctggtacatacaccggagaagacctacgatattccgccggcacacgaacgtcgtgtcgttgatccaactggttgcggcgacgcgtttcgcgccggcctgatctatggtattcagcataattatgattggttgaccattggccgcatgggaaacttaatgggtgcgctgaaagtggaacaccctggcacgcaaaatcagcgtttcgattttgccgtgttcaacgaccagttcaaacaacagtttggctacgcgctctaatga

SEQ ID NO: 192 - protein, 321 aa, synthetic construct
  REGION 1..321: note = Variant of adenosine kinase
MHHHHHHGGSGMSALICGSLAYDTIMVFPDQFKNHILPDKVHILNVSFLVPRMRREFGGCAGNIAYNLHLLGGAPIPMGTVGQDFGPYREHFETLGIDLSRVKIIDDLFTPQAFITTDHDNNQITAFHPGAMMRSYENHVRDVPGVTLGLVGPDGREGMIQNAEEFAAGGIPFIFDPGQAMPLFNGPELREFIEQADYVVVNDYESNLLQERTGWNEQDIVSRVQAYITTQGPKGALVHTPEKTYDIPPAHERRVVDPTGCGDAFRAGLIYGIQHNYDWLTIGRMGNLMGALKVEHPGTQNQRFDFAVFNDQFKQQFGYAL

SEQ ID NO: 193 - DNA, 969 bp, synthetic construct
  misc_feature 1..969: note = Variant of adenosine kinase
  source 1..969: mol_type = other DNA
atgcaccatcatcaccatcacgggggctccggcatgagtgcactgatttgcggttctttagcgtatgataccatcatggtgtttccggaccagttcaagaaccatattctgcccgataaagttcacatcctcaatgtcagctttcttgtaccacgcatgcgtcgtgaatttggaggctgtgccggcaacattgcgtacaatctgcatctgttgggtggtgctccgatccctatgggaacggtgggccaagatttcggtccgtatcgcgagcacttcgaaactctgggcattgacttatcccgcgtcaagatcatcagggatctgtttacagctcaggccttcattaccaccgaccatgataacaaccagattacggcgtttcatccaggcgcaatgatgcgttcgtacgaaaatcacgttcgtgatgtgccgggtgttaccttgggcctcgtaggtcctgatggacgcgagggcatgatccaaaatgccgaagaatttgctgctggtggcattccgttcatttttgacccaggtcaggcaatgccgctgttcaacggccccgaactgcgcgagtttatcgaacaggcggactatgtggtggtcaacgattacgaaagcaatcttcttcaagaacgtactggctggaacgagcaggacattgtttcacgcgtgcaggcgtatatcaccacgcaaggtcctaaaggagccctggtacatacaccggagaagacctacgatattccgccggcacacgaacgtcgtgtcgttgatccaactggttgcggcgacgcgtttcgcgccggcctgatctatggtattcagcataattatgattggttgaccattggccgcatgggaaacttaatgggtgcgctgaaagtggaacaccctggcacgcaaaatcagcgtttcgattttgccgaattcaacgaccagttcaaacaacagtttggctacgcgctctaatga

SEQ ID NO: 194 - protein, 321 aa, synthetic construct
  REGION 1..321: note = Variant of adenosine kinase
MHHHHHHGGSGMSALICGSLAYDTIMVFPDQFKNHILPDKVHILNVSFLVPRMRREFGGCAGNIAYNLHLLGGAPIPMGTVGQDFGPYREHFETLGIDLSRVKIIRDLFTAQAFITTDHDNNQITAFHPGAMMRSYENHVRDVPGVTLGLVGPDGREGMIQNAEEFAAGGIPFIFDPGQAMPLFNGPELREFIEQADYVVVNDYESNLLQERTGWNEQDIVSRVQAYITTQGPKGALVHTPEKTYDIPPAHERRVVDPTGCGDAFRAGLIYGIQHNYDWLTIGRMGNLMGALKVEHPGTQNQRFDFAEFNDQFKQQFGYAL

SEQ ID NO: 195 - DNA, 969 bp, synthetic construct
  misc_feature 1..969: note = Variant of adenosine kinase
  source 1..969: mol_type = other DNA
atgcaccatcatcaccatcacgggggctccggcatgagtgcactgatttgcggttctttagcgtatgataccatcatggtgtttccggaccagttcaagaaccatattctgcccgataaagttcacatcctcaatgtcagctttcttgtaccacgcatgcgtcgtgaatttggaggctgtgccggcaacattgcgtacgggctgcatctgttgggtggtgctccgatccctatgggaacggtgggccaagatttcggtccgtatcgcgagcacttcgaaactctgggcattgacttatcccgcgtcaagatcatcgatgatctgtttacaccgcaggccttcattaccaccgaccatgataacaaccagattacggcgtttcatccaggcgcaatgatgcgttcgtacgaaaatcacgttcgtgatgtgccgggtgttaccttgggcctcgtaggtcctgatggacgcgagggcatgatccaaaatgccgaagaatttgctgctggtggcattccgttcatttttgacccaggtcaggcaatgccgctgttcaacggccccgaactgcgcgagtttatcgaacaggcggactatgtggtggtcaacgattacgaaagcaatcttcttcaagaacgtactggctggaacgagcaggacattgtttcacgcgtgcaggcgtatatcaccacgcaaggtcctaaaggagccctggtacatacaccggagaagacctacgatattccgccggcacacgaacgtcgtgtcgttgatccaactggttgcggcgacgcgtttcgcgccggcctgatctatggtattcagcataattatgattggttgaccattggccgcatgggaaacttaatgggtgcgctgaaagtggaacaccctggcacgcaaaatcagcgtttcgattttgccgaattcaacgaccagttcaaacaacagtttggctacgcgctctaatga

SEQ ID NO: 196 - protein, 321 aa, synthetic construct
  REGION 1..321: note = Variant of adenosine kinase
MHHHHHHGGSGMSALICGSLAYDTIMVFPDQFKNHILPDKVHILNVSFLVPRMRREFGGCAGNIAYGLHLLGGAPIPMGTVGQDFGPYREHFETLGIDLSRVKIIDDLFTPQAFITTDHDNNQITAFHPGAMMRSYENHVRDVPGVTLGLVGPDGREGMIQNAEEFAAGGIPFIFDPGQAMPLFNGPELREFIEQADYVVVNDYESNLLQERTGWNEQDIVSRVQAYITTQGPKGALVHTPEKTYDIPPAHERRVVDPTGCGDAFRAGLIYGIQHNYDWLTIGRMGNLMGALKVEHPGTQNQRFDFAEFNDQFKQQFGYAL

SEQ ID NO: 197 - DNA, 969 bp, synthetic construct
  misc_feature 1..969: note = Variant of adenosine kinase
  source 1..969: mol_type = other DNA
atgcaccatcatcaccatcacgggggctccggcatgagtgcactgatttgcggttctttagcgtatgataccatcatggtgtttccggaccagttcaagaaccatattctgcccgataaagttcacatcctcaatgtcagctttcttgtaccacgcatgcgtcgtgaatttggaggctgtgccggcaacattgcgtacaatctgcatctgttgggtggtgctccgatccctatgggaacggtgggccaagatttcggtccgtatcgcgagcacttcgaaactctgggcattgacttatcccgcgtcaagatcatcgatgatctgttcacagcgcaggccttcattaccaccgaccatgatcataaccagattacggcgtttcatccaggggcaatgatgcgttcgtacgaaaatcacgttcgtgatgtgccgggtgttaccttgggcctcgtaggtcctgatggacgcgagggcatgatccaaaatgccgaagaatttgctgctggtggcattccgttcatttttgacccaggtcaggcaatgccgctgttcaacggccccgaactgcgcgagtttatcgaacaggcggactatgtggtggtcaacgattacgaaagcaatcttcttcaagaacgtactggctggaacgagcaggacattgtttcacgcgtgcaggcgtatatcaccacgcaaggttcgaaaggagccctggtacatacaccggagaagacctacgatattccgccggcacacgaacgtcgtgtcgttgatccaactggttgcggcgacgcgtttcgcgccggcctgatctatggtattcagcataattatgattggttgaccattggccgcatgggaaacttaatgggtgcgctgaaagtggaacaccctggcacgcaaaatcagcgtttcgattttgccgaattcaacgaccagttcaaacaaagctttggctacgcgctctaatga

SEQ ID NO: 198 - protein, 321 aa, synthetic construct
  REGION 1..321: note = Variant of adenosine kinase
MHHHHHHGGSGMSALICGSLAYDTIMVFPDQFKNHILPDKVHILNVSFLVPRMRREFGGCAGNIAYNLHLLGGAPIPMGTVGQDFGPYREHFETLGIDLSRVKIIDDLFTAQAFITTDHDHNQITAFHPGAMMRSYENHVRDVPGVTLGLVGPDGREGMIQNAEEFAAGGIPFIFDPGQAMPLFNGPELREFIEQADYVVVNDYESNLLQERTGWNEQDIVSRVQAYITTQGSKGALVHTPEKTYDIPPAHERRVVDPTGCGDAFRAGLIYGIQHNYDWLTIGRMGNLMGALKVEHPGTQNQRFDFAEFNDQFKQSFGYAL

SEQ ID NO: 199 - DNA, 969 bp, synthetic construct
  misc_feature 1..969: note = Variant of adenosine kinase
  source 1..969: mol_type = other DNA
atgcaccatcatcaccatcacgggggctccggcatgagtgcactgatttgcggttctttagcgtatgataccatcatggtgtttccggaccagttcaagaatcatattctgcccgataaagttcacatcctcaatgtcagctttcttgtaccacgcatgcgtcgtgaatttggaggctgtgccggcaacattgcgtacaatctgcatctgttgggtggtgctccgatccctatgggaacggtgggccaagatttcggtccgtatcgcgagcacttcgaaactctgggcattgacttatcccgcgtcaagatcatcgatgatctgtttacagcgcaggccttcattacgaccgaccatgatcataaccagattacggcgtttcatccaggggcaatgatgcgttcgtacgaaaatcacgttcgtgatgtgccgggtgttaccttgggcctcgtaggtcctgatggacgcgagggcatgatccaaaatgccgaagaatttgctgctggtggcattccgttcatttttgacccaggtcaggcactgccgctgttcaacggccccgaactgcgcgagtttatcgaacaggcggactatgtggtggtcaacgattacgaaagcaatctgcttcaaacgcgtactggctggaacgagcaggacattgtttcacgcgtgcaggcgtatatcaccacgcaaggttcgaaaggagccctggtacatacaccggagaagacctacgatattcgtccggcacacgaacgtcgtgtcgttgatccaactggttgcggcgacgcgtttcgcgccggcctgatctatggtattcagcataattatgattggttgaccattggccgcatgggaaacttaatgggtgcgctgaaagtggaacaccctggcacgcaaaatcagcgtttcgattttgccctgttcaacgaccagttcaaacaaagctttggctacgcgctctaatga

SEQ ID NO: 200 - protein, 321 aa, synthetic construct
  REGION 1..321: note = Variant of adenosine kinase
MHHHHHHGGSGMSALICGSLAYDTIMVFPDQFKNHILPDKVHILNVSFLVPRMRREFGGCAGNIAYNLHLLGGAPIPMGTVGQDFGPYREHFETLGIDLSRVKIIDDLFTAQAFITTDHDHNQITAFHPGAMMRSYENHVRDVPGVTLGLVGPDGREGMIQNAEEFAAGGIPFIFDPGQALPLFNGPELREFIEQADYVVVNDYESNLLQTRTGWNEQDIVSRVQAYITTQGSKGALVHTPEKTYDIRPAHERRVVDPTGCGDAFRAGLIYGIQHNYDWLTIGRMGNLMGALKVEHPGTQNQRFDFALFNDQFKQSFGYAL

SEQ ID NO: 201 - DNA, 969 bp, synthetic construct
  misc_feature 1..969: note = Variant of adenosine kinase
  source 1..969: mol_type = other DNA
atgcaccatcatcaccatcacgggggctccggcatgagtgcactgatttgcggttctttagcgtatgataccatcatggtgtttccggaccagttcaagaatcatattctgcccgataaagttcacatcctcaatgtcagctttcttgtaccacgcctgcgccgtgaatttggaggctgtgccggcaacattgcgtacaatctgcatctgttgggtggtgctccgatccctatgggaacggtgggccaagatttcggtccgtatcgcgagcacttcgaaactctgggcattgacttatcccgcgtcaagatcatcgatgatctgtttacagcgcaggccttcattacgaccgaccatgatcataaccagattacggcgtttcatccaggggcaatgatgcgttcgtacgaaaatcacgttcgtgatgtgccgggtgttaccttgggcctcgtaggtcctgatggccgcgagggtatgatccaaaatgccgaagaatttgctgctggtggcattccgttcatttttgacccaggtcaggcactgccgctgttcaacggccccgaactgcgcgagtttatcgaacaggcggactatgtggtggtcaacgattacgaaagcaatctgcttcaaacgcgtactggctggaacgagcaggacattgtttcacgcgtgcaggcgtatatcaccacgcaaggttcgaaaggagccctggtacatacaccggagaagacctacgatattcgtccggcacacgaacgtcgtgtcgttgatccaactggttgcggcgacgcgtttcgcgccggcctgatctatggtattcagcataattatgattggttgaccattggccgcatgggaaacttaatgggtgcgctgaaagtggaacaccctggcacgcaaaatcagcgtttcgattttgccctgttcaacgaccagttcaaacaaagctttggctacgcgctctaatga

SEQ ID NO: 202 - protein, 321 aa, synthetic construct
  REGION 1..321: note = Variant of adenosine kinase
MHHHHHHGGSGMSALICGSLAYDTIMVFPDQFKNHILPDKVHILNVSFLVPRLRREFGGCAGNIAYNLHLLGGAPIPMGTVGQDFGPYREHFETLGIDLSRVKIIDDLFTAQAFITTDHDHNQITAFHPGAMMRSYENHVRDVPGVTLGLVGPDGREGMIQNAEEFAAGGIPFIFDPGQALPLFNGPELREFIEQADYVVVNDYESNLLQTRTGWNEQDIVSRVQAYITTQGSKGALVHTPEKTYDIRPAHERRVVDPTGCGDAFRAGLIYGIQHNYDWLTIGRMGNLMGALKVEHPGTQNQRFDFALFNDQFKQSFGYAL

SEQ ID NO: 203 - DNA, 969 bp, synthetic construct
  misc_feature 1..969: note = Variant of adenosine kinase
  source 1..969: mol_type = other DNA
atgcaccatcatcaccatcacgggggctccggcatgagtgcactgatttgcggttctttagcgtatgataccatcatggtgtttccggaccagttcaagaatcatattctgcccgataaagttcacatcctcaatgtcagctttcttgtaccacgcctgcgccgtgaatttggaggctgtgccggcaacattgcgtacaatctgcatctgttgggtggtgctccgatccctatgggaacggtgggccaagatttcggtccgtatcgcgagcacttcgaaactctgggcattgacttatcccgcgtcaagatcatcgatgatctgtttacagcgcaggccttcattacgaccgaccatgatcataaccagattacggcgtttcatccaggggcaatgatgcgttcgtacgaaaatcacgttcgtgatgtgccgggtgttaccttgggcctcgtaggtcctgatggccgcgagggtatgatccaaaatgccgaagaatttgctgctggtggcattccgttcatttttgacccaggtcaggcactgccgctgttcaacggccccgaactgcgcgagtttatcgaacaggcggactatgtggtggtcaacgattacgaaagcaatctgcttcaaacgcgtactggctggaacgagcaggacattgtttcacgcgtgcaggcgtatatcaccacgcaaggttcgaaaggagccctggtacatacaccggagaagacctacgatattcgtccggcacacgaacgtcgtgtcgttgatccaactggttgcggcgacgcgtttcgcgccggcctgatctatggtattcagcataattatgattggttgaccattggccgcatgggaaacttaatgggtgcgctgaaagtggaacaccctggcacgcaaaatcagcgtttcgattttgccctgttcaacgaccagttcaaacaaagctttggctactcgctctaatga

SEQ ID NO: 204 - protein, 321 aa, synthetic construct
  REGION 1..321: note = Variant of adenosine kinase
MHHHHHHGGSGMSALICGSLAYDTIMVFPDQFKNHILPDKVHILNVSFLVPRLRREFGGCAGNIAYNLHLLGGAPIPMGTVGQDFGPYREHFETLGIDLSRVKIIDDLFTAQAFITTDHDHNQITAFHPGAMMRSYENHVRDVPGVTLGLVGPDGREGMIQNAEEFAAGGIPFIFDPGQALPLFNGPELREFIEQADYVVVNDYESNLLQTRTGWNEQDIVSRVQAYITTQGSKGALVHTPEKTYDIRPAHERRVVDPTGCGDAFRAGLIYGIQHNYDWLTIGRMGNLMGALKVEHPGTQNQRFDFALFNDQFKQSFGYSL

SEQ ID NO: 205 - DNA, 969 bp, synthetic construct
  misc_feature 1..969: note = Variant of adenosine kinase
  source 1..969: mol_type = other DNA
atgcaccatcatcaccatcacgggggctccggcatgagtgcactgatttgcggttctttagcgtatgataccatcatggtgtttccggaccaattcaagaatcatattctgcccgataaagttcacattctcaatgtcagctttcttgtaccacgcctgcgccgtgaatttggaggctgtgccggcaacattgcgtacaatctgcatctgttgggtggtgctccgatccctatgggaacggtgggccaagatttccagccgtatcgcgaacacttcgaaactctgggcattgacttatcccgcgtcaagatcatcgatgatctgtttacagcgcaggccttcattacgaccgaccatgatcataaccagattacggcgtttcatccaggggcaatgatgcgttcgtacgaaaatcacgttcgtgatgtgccgggtgttaccttgggcctcgtaggtcctgatggccgcgagggtatgatccaaaatgccgaagaatttgctgctgcgggcattccgttcatttttgacccaggtcaggcactgccgctgttcaacggccccgaactgcgcgagtttatcgaacaggcggactatgtggtggtcaacgattacgaaagcaatctgcttcaaacgcgtactggctggaacgagcaggacattgtttcacgcgtgcaggcgtatatcaccacgcaaggttcgaaaggagccctggtacatacaccggagaagacctacgatattcgtccggcacacgaacgtcgtgtcgttgatccaactggttgcggcgacgcgtttcgcgccggcctgatctatggtattcagcataattatgattggttgaccattggccgcatgggaaacttaatgggtgcgctgaaagtggaacaccctggcacgcaaaatcagcgtttcgattttgccctgttcaacgaccagttcaaacaaagctttggctactcgctctaatga

SEQ ID NO: 206 - protein, 321 aa, synthetic construct
  REGION 1..321: note = Variant of adenosine kinase
MHHHHHHGGSGMSALICGSLAYDTIMVFPDQFKNHILPDKVHILNVSFLVPRLRREFGGCAGNIAYNLHLLGGAPIPMGTVGQDFQPYREHFETLGIDLSRVKIIDDLFTAQAFITTDHDHNQITAFHPGAMMRSYENHVRDVPGVTLGLVGPDGREGMIQNAEEFAAAGIPFIFDPGQALPLFNGPELREFIEQADYVVVNDYESNLLQTRTGWNEQDIVSRVQAYITTQGSKGALVHTPEKTYDIRPAHERRVVDPTGCGDAFRAGLIYGIQHNYDWLTIGRMGNLMGALKVEHPGTQNQRFDFALFNDQFKQSFGYSL

SEQ ID NO: 207 - DNA, 969 bp, synthetic construct
  misc_feature 1..969: note = Variant of adenosine kinase
  source 1..969: mol_type = other DNA
atgcaccatcatcaccatcacgggggctccggcatgagtgcactgatttgcggttctttagcgtatgataccatcatggtgtttccggaccaattcaagaatcatattctgcccgataaagttcacattctcaatgtcagctttcttgtaccacgcctgcgccgtgaatttggaggctgtgccggcaacattgcgtacaatctgcatctgttgggtggtgcaccgatcgtcatggccacggtgggccaagatttccagccgtatcgcgaacacttcgaaactctgggcattgacttaagtcgcgtcaagatcatcgatgatctgtttacagcgcaggccttcattacgaccgaccatgatcataaccagattacggcgtttcatccaggggcaatgatgcgttcgtacgaaaatcacgttcgtgatgtgccgggtgttaccttgggcctcgtaggtcctgatgggcgcgagggcatgatccaaaatgccgaagaatttgctgcggcggacattccgttcatttttgacccaggtcaggcactgccgctgttcaacggccccgaactgcgcgagtttatcgaacaggcggactatgtggtggtcaacgattacgaaagcaatctgcttcaaacgcgtactggctggaacgagcaggacattgtttcacgcgtgcaggcgtatatcaccacgcaaggttcgcgcggagccctggtacatacaccggagaagacctacgatattcgtccggcacacgaacgtcgtgtcgttgatccaactggttgcggcgacgcgtttcgcgccggcctgatctatggtattcagcataattatgattggttgaccattggccgcatgggaaacttaatgggtgcgctgaaagtggaacaccctggcacgcaaaatcagcgtttcgattttgccctgttcaacgaccagttcaaacaaagctttggctactcgctctaatga

SEQ ID NO: 208 - protein, 321 aa, synthetic construct
  REGION 1..321: note = Variant of adenosine kinase
MHHHHHHGGSGMSALICGSLAYDTIMVFPDQFKNHILPDKVHILNVSFLVPRLRREFGGCAGNIAYNLHLLGGAPIVMATVGQDFQPYREHFETLGIDLSRVKIIDDLFTAQAFITTDHDHNQITAFHPGAMMRSYENHVRDVPGVTLGLVGPDGREGMIQNAEEFAAADIPFIFDPGQALPLFNGPELREFIEQADYVVVNDYESNLLQTRTGWNEQDIVSRVQAYITTQGSRGALVHTPEKTYDIRPAHERRVVDPTGCGDAFRAGLIYGIQHNYDWLTIGRMGNLMGALKVEHPGTQNQRFDFALFNDQFKQSFGYSL

SEQ ID NO: 209 - DNA, 969 bp, synthetic construct
  misc_feature 1..969: note = Variant of adenosine kinase
  source 1..969: mol_type = other DNA
atgcaccatcatcaccatcacgggggctccggcatgagtgcactgatttgcggttctttagcgtatgataccatcatggtgtttccggaccagttcaagaaccatattctgcccgataaagttcacatcctcaatgtcagctttcttgtaccacgcatgcgtcgtgaatttggaggctgtgccggcaacattgcgtacaatctgcatctgttgggtggtgctccgatccctatgggaacggtgggccaagatttcggtccgtatcgcgagcacttcgaaactctgggcattgacttatcccgcgtcaagatcatcgatgatctgttcacagcgcaggccttcattaccaccgaccatgatcataaccagattacggcgtttcatccaggcgcaatgatgcgttcgtacgaaaatcacgttcgtgatgtgccgggtgttaccttgggcctcgtaggtcctgatggacgcgagggcatgatccaaaatgccgaagaatttgctgctggtggcattccgttcatttttgacccaggtcaggcaatgccgctgttcaacggccccgaactgcgcgagtttatcgaacaggcggactatgtggtggtcaacgattacgaaagcaatcttcttcaagaacgtactggctggaacgagcaggacattgtttcacgcgtgcaggcgtatatcaccacgcaaggttcgaaaggagccctggtacatacaccggagaagacctacgatattccgccggcacacgaacgtcgtgtcgttgatccaactggttgcggcgacgcgtttcgcgccggcctgatctatggtattcagcataattatgattggttgaccattggccgcatgggaaacttaatgggtgcgctgaaagtggaacaccctggcacgcaaaatcagcgtttcgattttgccgaattcaacgaccagttcaaacaagaatttggctacgcgctctaatga

SEQ ID NO: 210 - protein, 321 aa, synthetic construct
  REGION 1..321: note = Variant of adenosine kinase
MHHHHHHGGSGMSALICGSLAYDTIMVFPDQFKNHILPDKVHILNVSFLVPRMRREFGGCAGNIAYNLHLLGGAPIPMGTVGQDFGPYREHFETLGIDLSRVKIIDDLFTAQAFITTDHDHNQITAFHPGAMMRSYENHVRDVPGVTLGLVGPDGREGMIQNAEEFAAGGIPFIFDPGQAMPLFNGPELREFIEQADYVVVNDYESNLLQERTGWNEQDIVSRVQAYITTQGSKGALVHTPEKTYDIPPAHERRVVDPTGCGDAFRAGLIYGIQHNYDWLTIGRMGNLMGALKVEHPGTQNQRFDFAEFNDQFKQEFGYAL

SEQ ID NO: 211 - DNA, 969 bp, synthetic construct
  misc_feature 1..969: note = Variant of adenosine kinase
  source 1..969: mol_type = other DNA
atgcaccatcatcaccatcacgggggctccggcatgagtgcactgatttgcggttctttagcgtatgataccatcatggtgtttccggaccagttcaagaaccatattctgcccgataaagttcacatcctcaatgtcagctttcttgtaccacgcatgcgtcgtgaatttggaggctgtgccggcaacattgcgtacaatctgcatctgttgggtggtgctccgatccctatgggaacggtgggccaagatttcggtccgtatcgcgagcacttcgaaactctgggcattgacttatcccgcgtcaagatcatcgatgatctgagtacagcgcaggccttcattaccaccgaccatgatcataaccagattacggcgtttcatccaggcgcaatgatgcgttcgtacgaaaatcacgttcgtgatgtgccgggtgttaccttgggcctcgtaggtcctgatggacgcgagggcatgatccaaaatgccgaagaatttgctgctggtggcattccgttcatttttgacccaggtcaggcactgccgctgttcaacggccccgaactgcgcgagtttatcgaacaggcggactatgtggtggtcaacgattacgaaagcaatcttcttcaagaacgtactggctggaacgagcaggacattgtttcacgcgtgcaggcgtatatcaccacgcaaggttcgaaaggagccctggtacatacaccggagaagacctacgatattccgccggcacacgaacgtcgtgtcgttgatccaactggttgcggcgacgcgtttcgcgccggcctgatctatggtattcagcataattatgattggttgaccattggccgcatgggaaacttaatgggtgcgctgaaagtggaacaccctggcacgcaaaatcagcgtttcgattttgccgaattcaacgaccagttcaaacaacagtttggctacgcgctctaatga

SEQ ID NO: 212 - protein, 321 aa, synthetic construct
  REGION 1..321: note = Variant of adenosine kinase
MHHHHHHGGSGMSALICGSLAYDTIMVFPDQFKNHILPDKVHILNVSFLVPRMRREFGGCAGNIAYNLHLLGGAPIPMGTVGQDFGPYREHFETLGIDLSRVKIIDDLSTAQAFITTDHDHNQITAFHPGAMMRSYENHVRDVPGVTLGLVGPDGREGMIQNAEEFAAGGIPFIFDPGQALPLFNGPELREFIEQADYVVVNDYESNLLQERTGWNEQDIVSRVQAYITTQGSKGALVHTPEKTYDIPPAHERRVVDPTGCGDAFRAGLIYGIQHNYDWLTIGRMGNLMGALKVEHPGTQNQRFDFAEFNDQFKQQFGYAL

SEQ ID NO: 213 - DNA, 969 bp, synthetic construct
  misc_feature 1..969: note = Variant of adenosine kinase
  source 1..969: mol_type = other DNA
atgcaccatcatcaccatcacgggggctccggcatgagtgcactgatttgcggttctttagcgtatgataccatcatggtgtttccggaccagttcaagaaccatattctgcccgataaagttcacatcctcaatgtcagctttcttgtaccacgcatgcgtcgtgaatttggaggctgtgccggcaacattgcgtacaatctgcatctgttgggtggtgctccgatccctatgggaacggtgggccaagatttcggtccgtatcgcgagcacttcgaaactctgggcattgacttatcccgcgtcaagatcatcgatgatctgagtacaccgcaggccttcattaccaccgaccatgatcataaccagattacggcgtttcatccaggcgcaatgatgcgttcgtacgaaaatcacgttcgtgatgtgccgggtgttaccttgggcctcgtaggtcctgatggacgcgagggcatgatccaaaatgccgaagaatttgctgctggtggcattccgttcatttttgacccaggtcaggcactgccgctgttcaacggccccgaactgcgcgagtttatcgaacaggcggactatgtggtggtcaacgattacgaaagcaatcttcttcaagaacgtactggctggaacgagcaggacattgtttcacgcgtgcaggcgtatatcaccacgcaaggtcctaaaggagccctggtacatacaccggagaagacctacgatattccgccggcacacgaacgtcgtgtcgttgatccaactggttgcggcgacgcgtttcgcgccggcctgatctatggtattcagcataattatgattggttgaccattggccgcatgggaaacttaatgggtgcgctgaaagtggaacaccctggcacgcaaaatcagcgtttcgattttgccgaattcaacgaccagttcaaacaacagtttggctacgcgctctaatga

SEQ ID NO: 214 - protein, 321 aa, synthetic construct
  REGION 1..321: note = Variant of adenosine kinase
MHHHHHHGGSGMSALICGSLAYDTIMVFPDQFKNHILPDKVHILNVSFLVPRMRREFGGCAGNIAYNLHLLGGAPIPMGTVGQDFGPYREHFETLGIDLSRVKIIDDLSTPQAFITTDHDHNQITAFHPGAMMRSYENHVRDVPGVTLGLVGPDGREGMIQNAEEFAAGGIPFIFDPGQALPLFNGPELREFIEQADYVVVNDYESNLLQERTGWNEQDIVSRVQAYITTQGPKGALVHTPEKTYDIPPAHERRVVDPTGCGDAFRAGLIYGIQHNYDWLTIGRMGNLMGALKVEHPGTQNQRFDFAEFNDQFKQQFGYAL

SEQ ID NO: 215 - DNA, 969 bp, synthetic construct
  misc_feature 1..969: note = Variant of adenosine kinase
  source 1..969: mol_type = other DNA
atgcaccatcatcaccatcacgggggctccggcatgagtgcactgatttgcggttctttagcgtatgataccatcatggtgtttccggaccagttcaagaaccatattctgcccgataaggttcaccgcctcaatgtcagctttcttgtaccacgcatgcgtcgtgaatttggaggctgtgccggcaacattgcgtacaatctgcatctgttgggtggtgctccgatccctatgggaacggtgggccaagatttcggtccgtatcgcgagcacttcgaaactctgggcattgacttatcccgcgtcaagatcatcgatgatctgttcacagcgcaggccttcattaccaccgaccatgatcataaccagattacggcgtttcatccaggcgcaatgatgcgttcgtacgaaaatcacgttcgtgatgtgccgggtgttaccttgggcctcgtaggtcctgatggacgcgagggcatgatccaaaatgccgaagaatttgctgctggtggcattccgttcatttttgacccaggtcaggcaatgccgctgttcaacggccccgaactgcgcgagtttatcgaacaggcggactatgtggtggtcaacgattacgaaagcaatcttcttcaagaacgtactggctggaacgagcaggacattgtttcacgcgtgcaggcgtatatcaccacgcaaggttcgaaaggagccctggtacatacaccggagaagacctacgatattccgccggcacacgaacgtcgtgtcgttgatccaactggttgcggcgacgcgtttcgcgccggcctgatctatggtattcagcataattatgattggttgaccattggccgcatgggaaacttaatgggtgcgctgaaagtggaacaccctggcacgcaaaatcagcgtttcgattttgccgaattcaacgaccagttcaaacaaagctttggctacgcgctctaatga

SEQ ID NO: 216 - protein, 321 aa, synthetic construct
  REGION 1..321: note = Variant of adenosine kinase
MHHHHHHGGSGMSALICGSLAYDTIMVFPDQFKNHILPDKVHRLNVSFLVPRMRREFGGCAGNIAYNLHLLGGAPIPMGTVGQDFGPYREHFETLGIDLSRVKIIDDLFTAQAFITTDHDHNQITAFHPGAMMRSYENHVRDVPGVTLGLVGPDGREGMIQNAEEFAAGGIPFIFDPGQAMPLFNGPELREFIEQADYVVVNDYESNLLQERTGWNEQDIVSRVQAYITTQGSKGALVHTPEKTYDIPPAHERRVVDPTGCGDAFRAGLIYGIQHNYDWLTIGRMGNLMGALKVEHPGTQNQRFDFAEFNDQFKQSFGYAL

SEQ ID NO: 217 - DNA, 969 bp, synthetic construct
  misc_feature 1..969: note = Variant of adenosine kinase
  source 1..969: mol_type = other DNA
atgcaccatcatcaccatcacgggggctccggcatgagtgcactgatttgcggttctttagcgtatgataccatcatggtgtttccggaccagttcaagaaccatattctgcccgataaagttcacatcctcaatgtcagctttcttgtaccacgcatgcgtcgtgaatttggaggctgtgccggcaacattgcgtacaatctgcatctgttgggtggtgctccgatccctatgggaacggtgggccaagatttcggtccgtatcgcgagcacttcgaaactctgggcattgacttatcccgcgtcaagatcatcgatgatctgttcacagcgcaggccttcattaccaccgaccatgatcataaccagattacggcgtttcatccaggcgcaatgatgcgttcgtacgaaaatcacgttcgtgatgtgccgggtgttaccttgggcctcgtaggtcctgatggacgcgagggcatgatccaaaatgccgaagaatttgctgctggtggcattccgttcatttttgacccaggtcaggcaatgccgctgttcaacggccccgaactgcgcgagtttatcgaacaggcggactatgtggtggtcaacgattacgaaagcaatcttcttcaagaacgtactggctggaacgagcaggacattgtttcacgcgtgcaggcgtatatcaccacgcaaggtcctaaaggagccctggtacatacaccggagaagacctacgatattccgccggcacacgaacgtcgtgtcgttgatccaactggttgcggcgacgcgtttcgcgccggcctgatctatggtattcagcataattatgattggttgaccattggccgcatgggaaacttaatgggtgcgctgaaagtggaacaccctggcacgcaaaatcagcgtttcgattttgccgaattcaacgaccagttcaaacaaagctttggctacgcgctctaatga

SEQ ID NO: 218 - protein, 321 aa, synthetic construct
  REGION 1..321: note = Variant of adenosine kinase
MHHHHHHGGSGMSALICGSLAYDTIMVFPDQFKNHILPDKVHILNVSFLVPRMRREFGGCAGNIAYNLHLLGGAPIPMGTVGQDFGPYREHFETLGIDLSRVKIIDDLFTAQAFITTDHDHNQITAFHPGAMMRSYENHVRDVPGVTLGLVGPDGREGMIQNAEEFAAGGIPFIFDPGQAMPLFNGPELREFIEQADYVVVNDYESNLLQERTGWNEQDIVSRVQAYITTQGPKGALVHTPEKTYDIPPAHERRVVDPTGCGDAFRAGLIYGIQHNYDWLTIGRMGNLMGALKVEHPGTQNQRFDFAEFNDQFKQSFGYAL

SEQ ID NO: 219 - DNA, 969 bp, synthetic construct
  misc_feature 1..969: note = Variant of adenosine kinase
  source 1..969: mol_type = other DNA
atgcaccatcatcaccatcacgggggctccggcatgagtgcactgatttgcggttctttagcgtatgataccatcatggtgtttccggaccagttcaagaaccatattctgcccgataaggttcacatcctcaatgtcagctttcttgtaccacgcatgcgtcgtgaatttggaggctgtgccggcaacattgcgtacaatctgcatctgttgggtggtgctccgatccctatgggaacggtgggccaagatttcggtccgtatcgcgagcacttcgaaactctgggcattgacttatcccgcgtcaagatcatcgatgatctgagtacaccgcaggccttcattaccaccgaccatgatcataaccagattacggcgtttcatccaggggcaatgatgcgttcgtacgaaaatcacgttcgtgatgtgccgggtgttaccttgggcctcgtaggtcctgatggacgcgagggcatgatccaaaatgccgaagaatttgctgctggtggcattccgttcatttttgacccaggtcaggcactgccgctgttcaacggccccgaactgcgcgagtttatcgaacaggcggactatgtggtggtcaacgattacgaaagcaatcttcttcaagaacgtactggctggaacgagcaggacattgtttcacgcgtgcaggcgtatatcaccacgcaaggtccgaaaggagccctggtacatacaccggagaagacctacgatattccgccggcacacgaacgtcgtgtcgttgatccaactggttgcggcgacgcgtttcgcgccggcctgatctatggtattcagcataattatgattggttgaccattggccgcatgggaaacttaatgggtgcgctgaaagtggaacaccctggcacgcaaaatcagcgtttcgattttgccgaattcaacgaccagttcaaacaaagctttggctacgcgctctaatga

SEQ ID NO: 220 - protein, 321 aa, synthetic construct
  REGION 1..321: note = Variant of adenosine kinase
MHHHHHHGGSGMSALICGSLAYDTIMVFPDQFKNHILPDKVHILNVSFLVPRMRREFGGCAGNIAYNLHLLGGAPIPMGTVGQDFGPYREHFETLGIDLSRVKIIDDLSTPQAFITTDHDHNQITAFHPGAMMRSYENHVRDVPGVTLGLVGPDGREGMIQNAEEFAAGGIPFIFDPGQALPLFNGPELREFIEQADYVVVNDYESNLLQERTGWNEQDIVSRVQAYITTQGPKGALVHTPEKTYDIPPAHERRVVDPTGCGDAFRAGLIYGIQHNYDWLTIGRMGNLMGALKVEHPGTQNQRFDFAEFNDQFKQSFGYAL

SEQ ID NO: 221 - DNA, 969 bp, synthetic construct
  misc_feature 1..969: note = Variant of adenosine kinase
  source 1..969: mol_type = other DNA
atgcaccatcatcaccatcacgggggctccggcatgagtgcactgatttgcggttctttagcgtatgataccatcatggtgtttccggaccagttcaagaaccatattctgcccgataaggttcacatcctcaatgtcagctttcttgtaccacgcatgcgtcgtgaatttggaggctgtgccggcaacattgcgtacaatctgcatctgttgggtggtgctccgatccctatgggaacggtgggccaagatttcggtccgtatcgcgagcacttcgaaactctgggcattgacttatcccgcgtcaagatcatcgatgatctgagtacaccgcaggccttcattaccaccgaccatgatcataaccagattacggcgtttcatccaggcgcaatgatgcgttcgtacgaaaatcacgttcgtgatgtgccgggtgttaccttgggcctcgtaggtcctgatggacgcgagggcatgatccaaaatgccgaagaatttgctgctggtggcattccgttcatttttgacccaggtcaggcaatgccgctgttcaacggccccgaactgcgcgagtttatcgaacaggcggactatgtggtggtcaacgattacgaaagcaatcttcttcaagaacgtactggctggaacgagcaggacattgtttcacgcgtgcaggcgtatatcaccacgcaaggtccgaaaggagccctggtacatacaccggagaagacctacgatattccgccggcacacgaacgtcgtgtcgttgatccaactggttgcggcgacgcgtttcgcgccggcctgatctatggtattcagcataattatgattggttgaccattggccgcatgggaaacttaatgggtgcgctgaaagtggaacaccctggcacgcaaaatcagcgtttcgattttgccgaattcaacgaccagttcaaacaagaatttggctacgcgctctaatga

SEQ ID NO: 222 - protein, 321 aa, synthetic construct
  REGION 1..321: note = Variant of adenosine kinase
MHHHHHHGGSGMSALICGSLAYDTIMVFPDQFKNHILPDKVHILNVSFLVPRMRREFGGCAGNIAYNLHLLGGAPIPMGTVGQDFGPYREHFETLGIDLSRVKIIDDLSTPQAFITTDHDHNQITAFHPGAMMRSYENHVRDVPGVTLGLVGPDGREGMIQNAEEFAAGGIPFIFDPGQAMPLFNGPELREFIEQADYVVVNDYESNLLQERTGWNEQDIVSRVQAYITTQGPKGALVHTPEKTYDIPPAHERRVVDPTGCGDAFRAGLIYGIQHNYDWLTIGRMGNLMGALKVEHPGTQNQRFDFAEFNDQFKQEFGYAL

SEQ ID NO: 223 - DNA, 969 bp, synthetic construct
  misc_feature 1..969: note = Variant of adenosine kinase
  source 1..969: mol_type = other DNA
atgcaccatcatcaccatcacgggggctccggcatgagtgcactgatttgcggttctttagcgtatgataccatcatggtgtttccggaccagttcaagaaccatattctgcccgataaggttcaccgcctcaatgtcagctttcttgtaccacgcatgcgtcgtgaatttggaggctgtgccggcaacattgcgtacaatctgcatctgttgggtggtgctccgatccctatgggaacggtgggccaagatttcggtccgtatcgcgagcacttcgaaactctgggcattgacttatcccgcgtcaagatcatcgatgatctgagtacagcgcaggccttcattaccaccgaccatgatcataaccagattacggcgtttcatccaggcgcaatgatgcgttcgtacgaaaatcacgttcgtgatgtgccgggtgttaccttgggcctcgtaggtcctgatggacgcgagggcatgatccaaaatgccgaagaatttgctgctggtggcattccgttcatttttgacccaggtcaggcaatgccgctgttcaacggccccgaactgcgcgagtttatcgaacaggcggactatgtggtggtcaacgattacgaaagcaatcttcttcaagaacgtactggctggaacgagcaggacattgtttcacgcgtgcaggcgtatatcaccacgcaaggttcgaaaggagccctggtacatacaccggagaagacctacgatattccgccggcacacgaacgtcgtgtcgttgatccaactggttgcggcgacgcgtttcgcgccggcctgatctatggtattcagcataattatgattggttgaccattggccgcatgggaaacttaatgggtgcgctgaaagtggaacaccctggcacgcaaaatcagcgtttcgattttgccgaattcaacgaccagttcaaacaagattttggctacgcgctctaatga

SEQ ID NO: 224 - protein, 321 aa, synthetic construct
  REGION 1..321: note = Variant of adenosine kinase
MHHHHHHGGSGMSALICGSLAYDTIMVFPDQFKNHILPDKVHRLNVSFLVPRMRREFGGCAGNIAYNLHLLGGAPIPMGTVGQDFGPYREHFETLGIDLSRVKIIDDLSTAQAFITTDHDHNQITAFHPGAMMRSYENHVRDVPGVTLGLVGPDGREGMIQNAEEFAAGGIPFIFDPGQAMPLFNGPELREFIEQADYVVVNDYESNLLQERTGWNEQDIVSRVQAYITTQGSKGALVHTPEKTYDIPPAHERRVVDPTGCGDAFRAGLIYGIQHNYDWLTIGRMGNLMGALKVEHPGTQNQRFDFAEFNDQFKQDFGYAL

SEQ ID NO: 225 - DNA, 969 bp, synthetic construct
  misc_feature 1..969: note = Variant of adenosine kinase
  source 1..969: mol_type = other DNA
atgcaccatcatcaccatcacgggggctccggcatgagtgcactgatttgcggttctttagcgtatgataccatcatggtgtttccggaccagttcaagaaccatattctgcccgataaggttcacatcctcaatgtcagctttcttgtaccacgcatgcgtcgtgaatttggaggctgtgccggcaacattgcgtacaatctgcatctgttgggtggtgctccgatccctatgggaacggtgggccaagatttcggtccgtatcgcgagcacttcgaaactctgggcattgacttatcccgcgtcaagatcatcgatgatctgttcacagcgcaggccttcattaccaccgaccatgatcataaccagattacggcgtttcatccaggggcaatgatgcgttcgtacgaaaatcacgttcgtgatgtgccgggtgttaccttgggcctcgtaggtcctgatggacgcgagggcatgatccaaaatgccgaagaatttgctgctggtggcattccgttcatttttgacccaggtcaggcaatgccgctgttcaacggccccgaactgcgcgagtttatcgaacaggcggactatgtggtggtcaacgattacgaaagcaatcttcttcaagaacgtactggctggaacgagcaggacattgtttcacgcgtgcaggcgtatatcaccacgcaaggttcgaaaggagccctggtacatacaccggagaagacctacgatattccgccggcacacgaacgtcgtgtcgttgatccaactggttgcggcgacgcgtttcgcgccggcctgatctatggtattcagcataattatgattggttgaccattggccgcatgggaaacttaatgggtgcgctgaaagtggaacaccctggcacgcaaaatcagcgtttcgattttgccgaattcaacgaccagttcaaacaacagtttggctacgcgctctaatga

SEQ ID NO: 226 - protein, 321 aa, synthetic construct
  REGION 1..321: note = Variant of adenosine kinase
MHHHHHHGGSGMSALICGSLAYDTIMVFPDQFKNHILPDKVHILNVSFLVPRMRREFGGCAGNIAYNLHLLGGAPIPMGTVGQDFGPYREHFETLGIDLSRVKIIDDLFTAQAFITTDHDHNQITAFHPGAMMRSYENHVRDVPGVTLGLVGPDGREGMIQNAEEFAAGGIPFIFDPGQAMPLFNGPELREFIEQADYVVVNDYESNLLQERTGWNEQDIVSRVQAYITTQGSKGALVHTPEKTYDIPPAHERRVVDPTGCGDAFRAGLIYGIQHNYDWLTIGRMGNLMGALKVEHPGTQNQRFDFAEFNDQFKQQFGYAL

SEQ ID NO: 227 - DNA, 969 bp, synthetic construct
  misc_feature 1..969: note = Variant of adenosine kinase
  source 1..969: mol_type = other DNA
atgcaccatcatcaccatcacgggggctccggcatgagtgcactgatttgcggttctttagcgtatgataccatcatggtgtttccggaccagttcaagaaccatattctgcccgataaagttcacatcctcaatgtcagctttcttgtaccacgcatgcgtcgtgaatttggaggctgtgccggcaacattgcgtacaatctgcatctgttgggtggtgctccgatccctatgggaacggtgggccaagatttcggtccgtatcgcgagcacttcgaaactctgggcattgacttatcccgcgtcaagatcatcgatgatctgagtacaccgcaggccttcattaccaccgaccatgatcataaccagattacggcgtttcatccaggggcaatgatgcgttcgtacgaaaatcacgttcgtgatgtgccgggtgttaccttgggcctcgtaggtcctgatggacgcgagggcatgatccaaaatgccgaagaatttgctgctggtggcattccgttcatttttgacccaggtcaggcaatgccgctgttcaacggccccgaactgcgcgagtttatcgaacaggcggactatgtggtggtcaacgattacgaaagcaatcttcttcaagaacgtactggctggaacgagcaggacattgtttcacgcgtgcaggcgtatatcaccacgcaaggttcgaaaggagccctggtacatacaccggagaagacctacgatattccgccggcacacgaacgtcgtgtcgttgatccaactggttgcggcgacgcgtttcgcgccggcctgatctatggtattcagcataattatgattggttgaccattggccgcatgggaaacttaatgggtgcgctgaaagtggaacaccctggcacgcaaaatcagcgtttcgattttgccgaattcaacgaccagttcaaacaagaatttggctacgcgctctaatga

SEQ ID NO: 228 - protein, 321 aa, synthetic construct
  REGION 1..321: note = Variant of adenosine kinase
MHHHHHHGGSGMSALICGSLAYDTIMVFPDQFKNHILPDKVHILNVSFLVPRMRREFGGCAGNIAYNLHLLGGAPIPMGTVGQDFGPYREHFETLGIDLSRVKIIDDLSTPQAFITTDHDHNQITAFHPGAMMRSYENHVRDVPGVTLGLVGPDGREGMIQNAEEFAAGGIPFIFDPGQAMPLFNGPELREFIEQADYVVVNDYESNLLQERTGWNEQDIVSRVQAYITTQGSKGALVHTPEKTYDIPPAHERRVVDPTGCGDAFRAGLIYGIQHNYDWLTIGRMGNLMGALKVEHPGTQNQRFDFAEFNDQFKQEFGYAL

SEQ ID NO: 229 - DNA, 969 bp, synthetic construct
  misc_feature 1..969: note = Variant of adenosine kinase
  source 1..969: mol_type = other DNA
atgcaccatcatcaccatcacgggggctccggcatgagtgcactgatttgcggttctttagcgtatgataccatcatggtgtttccggaccagttcaagaaccatattctgtgcgataaagttcacatcctcaatgtcagctttcttgtaccacgcatgcgtcgtgaatttggaggctgtgccggcaacattgcgtacaatctgcatctgttgggtggtgctccgatccctatgggaacggtgggccaagatttcggtccgtatcgcgagcacttcgaaactctgggcattgacttatcccgcgtcaagatcatcgatgatctgtttacaccgcaggccttcattaccaccgaccatgatcataaccagattacggcgtttcatccaggcgcaatgatgcgttcgtacgaaaatcacgttcgtgatgtgccgggtgttaccttgggcctcgtaggtcctgatggacgcgagggcatgatccaaaatgccgaagaatttgctgctggtggcattccgttcatttttgacccaggtcaggcaatgccgctgttcaacggccccgaactgcgcgagtttatcgaacaggcggactatgtggtggtcaacgattacgaaagcaatgtgcttcagacccgtactggctggaacgagcaggacattgtttcacgcgtgcaggcgtatatcaccacgcaaggtcctaaaggagccctggtacatacaccggagaagacctacgatattccgccggcacacgaacgtcgtgtcgttgatccaactggttgcggcgacgcgtttcgcgccggcctgatctatggtattcagcataattatgattggttgaccattggccgcatgggaaacttaatgggtgcgctgaaagtggaacaccctggcacgcaaaatcagcgtttcgattttgccttcttcaacgaccagttcaaacaacagtttggctacgcgctctaatga

SEQ ID NO: 230 - protein, 321 aa, synthetic construct
  REGION 1..321: note = Variant of adenosine kinase
MHHHHHHGGSGMSALICGSLAYDTIMVFPDQFKNHILCDKVHILNVSFLVPRMRREFGGCAGNIAYNLHLLGGAPIPMGTVGQDFGPYREHFETLGIDLSRVKIIDDLFTPQAFITTDHDHNQITAFHPGAMMRSYENHVRDVPGVTLGLVGPDGREGMIQNAEEFAAGGIPFIFDPGQAMPLFNGPELREFIEQADYVVVNDYESNVLQTRTGWNEQDIVSRVQAYITTQGPKGALVHTPEKTYDIPPAHERRVVDPTGCGDAFRAGLIYGIQHNYDWLTIGRMGNLMGALKVEHPGTQNQRFDFAFFNDQFKQQFGYAL

SEQ ID NO: 231 - DNA, 969 bp, synthetic construct
  misc_feature 1..969: note = Variant of adenosine kinase
  source 1..969: mol_type = other DNA
atgcaccatcatcaccatcacgggggctccggcatgagtgcactgatttgcggttctttagcgtatgataccatcatggtgtttccggaccagttcaagaaccatattctgcccgataaagttcacatcctcaatgtcagctttcttgtaccacgcatgcgtcgtgaatttggaggctgtgccggcaacattgcgtacaatctgcatctgttgggtggtgctccgatccctatgggaacggtgggccaagatttcggtccgtatcgcgagcacttcgaaactctgggcattgacttatcccgcgtcaagatcatcgatgatctgttcacagcgcaggccttcattaccaccgaccatgatcataaccagattacggcgtttcatccaggggcaatgatgcgttcgtacgaaaatcacgttcgtgatgtgccgggtgttaccttgggcctcgtaggtcctgatggacgcgagggcatgatccaaaatgccgaagaatttgctgctggtggcattccgttcatttttgacccaggtcaggcactgccgctgttcaacggccccgaactgcgcgagtttatcgaacaggcggactatgtggtggtcaacgattacgaaagcaatcttcttcaagaacgtactggctggaacgagcaggacattgtttcacgcgtgcaggcgtatatcaccacgcaaggttcgaaaggagccctggtacatacaccggagaagacctacgatattccgccggcacacgaacgtcgtgtcgttgatccaactggttgcggcgacgcgtttcgcgccggcctgatctatggtattcagcataattatgattggttgaccattggccgcatgggaaacttaatgggtgcgctgaaagtggaacaccctggcacgcaaaatcagcgtttcgattttgccgaattcaacgaccagttcaaacaaagctttggctacgcgctctaatga

SEQ ID NO: 232 - protein, 321 aa, synthetic construct
  REGION 1..321: note = Variant of adenosine kinase
MHHHHHHGGSGMSALICGSLAYDTIMVFPDQFKNHILPDKVHILNVSFLVPRMRREFGGCAGNIAYNLHLLGGAPIPMGTVGQDFGPYREHFETLGIDLSRVKIIDDLFTAQAFITTDHDHNQITAFHPGAMMRSYENHVRDVPGVTLGLVGPDGREGMIQNAEEFAAGGIPFIFDPGQALPLFNGPELREFIEQADYVVVNDYESNLLQERTGWNEQDIVSRVQAYITTQGSKGALVHTPEKTYDIPPAHERRVVDPTGCGDAFRAGLIYGIQHNYDWLTIGRMGNLMGALKVEHPGTQNQRFDFAEFNDQFKQSFGYAL

SEQ ID NO: 233 - DNA, 969 bp, synthetic construct
  misc_feature 1..969: note = Variant of adenosine kinase
  source 1..969: mol_type = other DNA
atgcaccatcatcaccatcacgggggctccggcatgagtgcactgatttgcggttctttagcgtatgataccatcatggtgtttccggaccagttcaagaaccatattctgcccgataaagttcacatcctcaatgtcagctttcttgtaccacgcatgcgtcgtgaatttggaggctgtgccggcaacattgcgtacaatctgcatctgttgggtggtgctccgatccctatgggaacggtgggccaagatttcggtccgtatcgcgagcacttcgaaactctgggcattgacttatcccgcgtcaagatcatcgatgatctgagtacagcgcaggccttcattaccaccgaccatgatcataaccagattacggcgtttcatccaggcgcaatgatgcgttcgtacgaaaatcacgttcgtgatgtgccgggtgttaccttgggcctcgtaggtcctgatggacgcgagggcatgatccaaaatgccgaagaatttgctgctggtggcattccgttcatttttgacccaggtcaggcaatgccgctgttcaacggccccgaactgcgcgagtttatcgaacaggcggactatgtggtggtcaacgattacgaaagcaatcttcttcaagaacgtactggctggaacgagcaggacattgtttcacgcgtgcaggcgtatatcaccacgcaaggttcgaaaggagccctggtacatacaccggagaagacctacgatattccgccggcacacgaacgtcgtgtcgttgatccaactggttgcggcgacgcgtttcgcgccggcctgatctatggtattcagcataattatgattggttgaccattggccgcatgggaaacttaatgggtgcgctgaaagtggaacaccctggcacgcaaaatcagcgtttcgattttgccgaattcaacgaccagttcaaacaaagctttggctacgcgctctaatga

SEQ ID NO: 234 - protein, 321 aa, synthetic construct
  REGION 1..321: note = Variant of adenosine kinase
MHHHHHHGGSGMSALICGSLAYDTIMVFPDQFKNHILPDKVHILNVSFLVPRMRREFGGCAGNIAYNLHLLGGAPIPMGTVGQDFGPYREHFETLGIDLSRVKIIDDLSTAQAFITTDHDHNQITAFHPGAMMRSYENHVRDVPGVTLGLVGPDGREGMIQNAEEFAAGGIPFIFDPGQAMPLFNGPELREFIEQADYVVVNDYESNLLQERTGWNEQDIVSRVQAYITTQGSKGALVHTPEKTYDIPPAHERRVVDPTGCGDAFRAGLIYGIQHNYDWLTIGRMGNLMGALKVEHPGTQNQRFDFAEFNDQFKQSFGYAL

SEQ ID NO: 235 - DNA, 969 bp, synthetic construct
  misc_feature 1..969: note = Variant of adenosine kinase
  source 1..969: mol_type = other DNA
atgcaccatcatcaccatcacgggggctccggcatgagtgcactgatttgcggttctttagcgtatgataccatcatggtgtttccggaccagttcaagaaccatattctgcccgataaggttcacatcctcaatgtcagctttcttgtaccacgcatgcgtcgtgaatttggaggctgtgccggcaacattgcgtacaatctgcatctgttgggtggtgctccgatccctatgggaacggtgggccaagatttcggtccgtatcgcgagcacttcgaaactctgggcattgacttatcccgcgtcaagatcatcgatgatctgttcacagcgcaggccttcattaccaccgaccatgatcataaccagattacggcgtttcatccaggggcaatgatgcgttcgtacgaaaatcacgttcgtgatgtgccgggtgttaccttgggcctcgtaggtcctgatggacgcgagggcatgatccaaaatgccgaagaatttgctgctggtggcattccgttcatttttgacccaggtcaggcactgccgctgttcaacggccccgaactgcgcgagtttatcgaacaggcggactatgtggtggtcaacgattacgaaagcaatcttcttcaagaacgtactggctggaacgagcaggacattgtttcacgcgtgcaggcgtatatcaccacgcaaggttcgaaaggagccctggtacaaacaccggagaagacctacgatattccgccggcacacgaacgtcgtgtcgttgatccaactggttgcggcgacgcgtttcgcgccggcctgatctatggtattcagcataattatgattggttgaccattggccgcatgggaaacttaatgggtgcgctgaaagtggaacaccctggcacgcaaaatcagcgtttcgattttgccgaattcaacgaccagttcaaacaaagctttggctacgcgctctaatga

SEQ ID NO: 236 - protein, 321 aa, synthetic construct
  REGION 1..321: note = Variant of adenosine kinase
MHHHHHHGGSGMSALICGSLAYDTIMVFPDQFKNHILPDKVHILNVSFLVPRMRREFGGCAGNIAYNLHLLGGAPIPMGTVGQDFGPYREHFETLGIDLSRVKIIDDLFTAQAFITTDHDHNQITAFHPGAMMRSYENHVRDVPGVTLGLVGPDGREGMIQNAEEFAAGGIPFIFDPGQALPLFNGPELREFIEQADYVVVNDYESNLLQERTGWNEQDIVSRVQAYITTQGSKGALVQTPEKTYDIPPAHERRVVDPTGCGDAFRAGLIYGIQHNYDWLTIGRMGNLMGALKVEHPGTQNQRFDFAEFNDQFKQSFGYAL

SEQ ID NO: 237 - DNA, 969 bp, synthetic construct
  misc_feature 1..969: note = Variant of adenosine kinase
  source 1..969: mol_type = other DNA
atgcaccatcatcaccatcacgggggctccggcatgagtgcactgatttgcggttctttagcgtatgataccatcatggtgtttccggaccagttcaagaaccatattctgcccgataaagttcacatcctcaatgtcagctttcttgtaccacgcatgcgtcgtgaatttggaggctgtgccggcaacattgcgtacaatctgcatctgttgggtggtgctccgatccctatgggaacggtgggccaagatttcggtccgtatcgcgagcacttcgaaactctgggcattgacttatcccgcgtcaagatcatcgatgatctgttcacagcgcaggccttcattaccaccgaccatgatcataaccagattacggcgtttcatccaggcgcaatgatgcgttcgtacgaaaatcacgttcgtgatgtgccgggtgttaccttgggcctcgtaggtcctgatggacgcgagggcatgatccaaaatgccgaagaatttgctgctggtggcattccgttcatttttgacccaggtcaggcaatgccgctgttcaacggccccgaactgcgcgagtttatcgaacaggcggactatgtggtggtcaacgattacgaaagcaatcttcttcaagaacgtactggctggaacgagcaggacattgtttcacgcgtgcaggcgtatatcaccacgcaaggttcgaaaggagccctggtacaaacaccggagaagacctacgatattccgccggcacacgaacgtcgtgtcgttgatccaactggttgcggcgacgcgtttcgcgccggcctgatctatggtattcagcataattatgattggttgaccattggccgcatgggaaacttaatgggtgcgctgaaagtggaacaccctggcacgcaaaatcagcgtttcgattttgccgaattcaacgaccagttcaaacaaagctttggctacgcgctctaatga

SEQ ID NO: 238 - protein, 321 aa, synthetic construct
  REGION 1..321: note = Variant of adenosine kinase
MHHHHHHGGSGMSALICGSLAYDTIMVFPDQFKNHILPDKVHILNVSFLVPRMRREFGGCAGNIAYNLHLLGGAPIPMGTVGQDFGPYREHFETLGIDLSRVKIIDDLFTAQAFITTDHDHNQITAFHPGAMMRSYENHVRDVPGVTLGLVGPDGREGMIQNAEEFAAGGIPFIFDPGQAMPLFNGPELREFIEQADYVVVNDYESNLLQERTGWNEQDIVSRVQAYITTQGSKGALVQTPEKTYDIPPAHERRVVDPTGCGDAFRAGLIYGIQHNYDWLTIGRMGNLMGALKVEHPGTQNQRFDFAEFNDQFKQSFGYAL

SEQ ID NO: 239 - DNA, 969 bp, synthetic construct
  misc_feature 1..969: note = Variant of adenosine kinase
  source 1..969: mol_type = other DNA
atgcaccatcatcaccatcacgggggctccggcatgagtgcactgatttgcggttctttagcgtatgataccatcatggtgtttccggaccagttcaagaaccatattctgcccgataaagttcacatcctcaatgtcagctttcttgtaccacgcatgcgtcgtgaatttggaggctgtgccggcaacattgcgtacaatctgcatctgttgggtggtgctccgatccctatgggaacggtgggccaagatttcggtccgtatcgcgagcacttcgaaactctgggcattgacttatcccgcgtcaagatcatcgatgatctgagtacagcgcaggccttcattaccaccgaccatgatcataaccagattacggcgtttcatccaggcgcaatgatgcgttcgtacgaaaatcacgttcgtgatgtgccgggtgttaccttgggcctcgtaggtcctgatggacgcgagggcatgatccaaaatgccgaagaatttgctgctggtggcattccgttcatttttgacccaggtcaggcactgccgctgttcaacggccccgaactgcgcgagtttatcgaacaggcggactatgtggtggtcaacgattacgaaagcaatcttcttcaagaacgtactggctggaacgagcaggacattgtttcacgcgtgcaggcgtatatcaccacgcaaggttcgaaaggagccctggtacatacaccggagaagacctacgatattccgccggcacacgaacgtcgtgtcgttgatccaactggttgcggcgacgcgtttcgcgccggcctgatctatggtattcagcataattatgattggttgaccattggccgcatgggaaacttaatgggtgcgctgaaagtggaacaccctggcacgcaaaatcagcgtttcgattttgccgaattcaacgaccagttcaaacaaagctttggctacgcgctctaatga

SEQ ID NO: 240 - protein, 321 aa, synthetic construct
  REGION 1..321: note = Variant of adenosine kinase
MHHHHHHGGSGMSALICGSLAYDTIMVFPDQFKNHILPDKVHILNVSFLVPRMRREFGGCAGNIAYNLHLLGGAPIPMGTVGQDFGPYREHFETLGIDLSRVKIIDDLSTAQAFITTDHDHNQITAFHPGAMMRSYENHVRDVPGVTLGLVGPDGREGMIQNAEEFAAGGIPFIFDPGQALPLFNGPELREFIEQADYVVVNDYESNLLQERTGWNEQDIVSRVQAYITTQGSKGALVHTPEKTYDIPPAHERRVVDPTGCGDAFRAGLIYGIQHNYDWLTIGRMGNLMGALKVEHPGTQNQRFDFAEFNDQFKQSFGYAL

SEQ ID NO: 241 - DNA, 969 bp, synthetic construct
  misc_feature 1..969: note = Variant of adenosine kinase
  source 1..969: mol_type = other DNA
atgcaccatcatcaccatcacgggggctccggcatgagtgcactgatttgcggttctttagcgtatgataccatcatggtgtttccggaccagttcaagaaccatattctgcccgataaggttcacatcctcaatgtcagctttcttgtaccacgcatgcgtcgtgaatttggaggctgtgccggcaacattgcgtacaatctgcatctgttgggtggtgctccgatccctatgggaacggtgggccaagatttcggtccgtatcgcgagcacttcgaaactctgggcattgacttatcccgcgtcaagatcatcgatgatctgagtacagcgcaggccttcattaccaccgaccatgatcataaccagattacggcgtttcatccaggggcaatgatgcgttcgtacgaaaatcacgttcgtgatgtgccgggtgttaccttgggcctcgtaggtcctgatggacgcgagggcatgatccaaaatgccgaagaatttgctgctggtggcattccgttcatttttgacccaggtcaggcaatgccgctgttcaacggccccgaactgcgcgagtttatcgaacaggcggactatgtggtggtcaacgattacgaaagcaatcttcttcaagaacgtactggctggaacgagcaggacattgtttcacgcgtgcaggcgtatatcaccacgcaaggttcgaaaggagccctggtacatacaccggagaagacctacgatattccgccggcacacgaacgtcgtgtcgttgatccaactggttgcggcgacgcgtttcgcgccggcctgatctatggtattcagcataattatgattggttgaccattggccgcatgggaaacttaatgggtgcgctgaaagtggaacaccctggcacgcaaaatcagcgtttcgattttgccgaattcaacgaccagttcaaacaacagtttggctacgcgctctaatga

SEQ ID NO: 242 - protein, 321 aa, synthetic construct
  REGION 1..321: note = Variant of adenosine kinase
MHHHHHHGGSGMSALICGSLAYDTIMVFPDQFKNHILPDKVHILNVSFLVPRMRREFGGCAGNIAYNLHLLGGAPIPMGTVGQDFGPYREHFETLGIDLSRVKIIDDLSTAQAFITTDHDHNQITAFHPGAMMRSYENHVRDVPGVTLGLVGPDGREGMIQNAEEFAAGGIPFIFDPGQAMPLFNGPELREFIEQADYVVVNDYESNLLQERTGWNEQDIVSRVQAYITTQGSKGALVHTPEKTYDIPPAHERRVVDPTGCGDAFRAGLIYGIQHNYDWLTIGRMGNLMGALKVEHPGTQNQRFDFAEFNDQFKQQFGYAL

SEQ ID NO: 243 - DNA, 969 bp, synthetic construct
  misc_feature 1..969: note = Variant of adenosine kinase
  source 1..969: mol_type = other DNA
atgcaccatcatcaccatcacgggggctccggcatgagtgcactgatttgcggttctttagcgtatgataccatcatggtgtttccggaccagttcaagaaccatattctgcccgataaggttcacatcctcaatgtcagctttcttgtaccacgcatgcgtcgtgaatttggaggctgtgccggcaacattgcgtacaatctgcatctgttgggtggtgctccgatccctatgggaacggtgggccaagatttcggtccgtatcgcgagcacttcgaaactctgggcattgacttatcccgcgtcaagatcatcgatgatctgttcacagcgcaggccttcattaccaccgaccatgatcataaccagattacggcgtttcatccaggcgcaatgatgcgttcgtacgaaaatcacgttcgtgatgtgccgggtgttaccttgggcctcgtaggtcctgatggacgcgagggcatgatccaaaatgccgaagaatttgctgctggtggcattccgttcatttttgacccaggtcaggcactgccgctgttcaacggccccgaactgcgcgagtttatcgaacaggcggactatgtggtggtcaacgattacgaaagcaatcttcttcaagaacgtactggctggaacgagcaggacattgtttcacgcgtgcaggcgtatatcaccacgcaaggtccgaaaggagccctggtacatacaccggagaagacctacgatattccgccggcacacgaacgtcgtgtcgttgatccaactggttgcggcgacgcgtttcgcgccggcctgatctatggtattcagcataattatgattggttgaccattggccgcatgggaaacttaatgggtgcgctgaaagtggaacaccctggcacgcaaaatcagcgtttcgattttgccgaattcaacgaccagttcaaacaagaatttggctacgcgctctaatga

SEQ ID NO: 244 - protein, 321 aa, synthetic construct
  REGION 1..321: note = Variant of adenosine kinase
MHHHHHHGGSGMSALICGSLAYDTIMVFPDQFKNHILPDKVHILNVSFLVPRMRREFGGCAGNIAYNLHLLGGAPIPMGTVGQDFGPYREHFETLGIDLSRVKIIDDLFTAQAFITTDHDHNQITAFHPGAMMRSYENHVRDVPGVTLGLVGPDGREGMIQNAEEFAAGGIPFIFDPGQALPLFNGPELREFIEQADYVVVNDYESNLLQERTGWNEQDIVSRVQAYITTQGPKGALVHTPEKTYDIPPAHERRVVDPTGCGDAFRAGLIYGIQHNYDWLTIGRMGNLMGALKVEHPGTQNQRFDFAEFNDQFKQEFGYAL

SEQ ID NO: 245 - DNA, 969 bp, synthetic construct
  misc_feature 1..969: note = Variant of adenosine kinase
  source 1..969: mol_type = other DNA
atgcaccatcatcaccatcacgggggctccggcatgagtgcactgatttgcggttctttagcgtatgataccatcatggtgtttccggaccagttcaagaaccatattctgcccgatcgtgttcacatcctcaatgtcagctttcttgtaccacgcatgcgtcgtgaatttggaggctgtgccggcaacattgcgtacaatctgcatctgttgggtggtgctccgatccctatgggaacggtgggccaagatttcggtccgtatcgcgagcacttcgaaactctgggcattgacttatcccgcgtcaagatcatcgatgatctgagtacaccgcaggccttcattaccaccgaccatgatcataaccagattacggcgtttcatccaggcgcaatgatgcgttcgtacgaaaatcacgttcgtgatgtgccgggtgttaccttgggcctcgtaggtcctgatggacgcgagggcatgatccaaaatgccgaagaatttgctgctggtggcattccgttcatttttgacccaggtcaggcactgccgctgttcaacggccccgaactgcgcgagtttatcgaacaggcggactatgtggtggtcaacgattacgaaagcaatcttcttcaagaacgtactggctggaacgagcaggacattgtttcacgcgtgcaggcgtatatcaccacgcaaggtcctaaaggagccctggtacatacaccggagaagacctacgatattccgccggcacacgaacgtcgtgtcgttgatccaactggttgcggcgacgcgtttcgcgccggcctgatctatggtattcagcataattatgattggttgaccattggccgcatgggaaacttaatgggtgcgctgaaagtggaacaccctggcacgcaaaatcagcgtttcgattttgccgaattcaacgaccagttcaaacaaagctttggctacgcgctctaatga

SEQ ID NO: 246 - protein, 321 aa, synthetic construct
  REGION 1..321: note = Variant of adenosine kinase
MHHHHHHGGSGMSALICGSLAYDTIMVFPDQFKNHILPDRVHILNVSFLVPRMRREFGGCAGNIAYNLHLLGGAPIPMGTVGQDFGPYREHFETLGIDLSRVKIIDDLSTPQAFITTDHDHNQITAFHPGAMMRSYENHVRDVPGVTLGLVGPDGREGMIQNAEEFAAGGIPFIFDPGQALPLFNGPELREFIEQADYVVVNDYESNLLQERTGWNEQDIVSRVQAYITTQGPKGALVHTPEKTYDIPPAHERRVVDPTGCGDAFRAGLIYGIQHNYDWLTIGRMGNLMGALKVEHPGTQNQRFDFAEFNDQFKQSFGYAL

SEQ ID NO: 247 - DNA, 969 bp, synthetic construct
  misc_feature 1..969: note = Variant of adenosine kinase
  source 1..969: mol_type = other DNA
atgcaccatcatcaccatcacgggggctccggcatgagtgcactgatttgcggttctttagcgtatgataccatcatggtgtttccggaccagttcaagaaccatattctgcccgataaggttcaccgcctcaatgtcagctttcttgtaccacgcatgcgtcgtgaatttggaggctgtgccggcaacattgcgtacaatctgcatctgttgggtggtgctccgatccctatgggaacggtgggccaagatttcggtccgtatcgcgagcacttcgaaactctgggcattgacttatcccgcgtcaagatcatcgatgatctgttcacaccgcaggccttcattaccaccgaccatgatcataaccagattacggcgtttcatccaggcgcaatgatgcgttcgtacgaaaatcacgttcgtgatgtgccgggtgttaccttgggcctcgtaggtcctgatggacgcgagggcatgatccaaaatgccgaagaatttgctgctggtggcattccgttcatttttgacccaggtcaggcaatgccgctgttcaacggccccgaactgcgcgagtttatcgaacaggcggactatgtggtggtcaacgattacgaaagcaatcttcttcaagaacgtactggctggaacgagcaggacattgtttcacgcgtgcaggcgtatatcaccacgcaaggttcgaaaggagccctggtacatacaccggagaagacctacgatattccgccggcacacgaacgtcgtgtcgttgatccaactggttgcggcgacgcgtttcgcgccggcctgatctatggtattcagcataattatgattggttgaccattggccgcatgggaaacttaatgggtgcgctgaaagtggaacaccctggcacgcaaaatcagcgtttcgattttgccgaattcaacgaccagttcaaacaacagtttggctacgcgctctaatga

SEQ ID NO: 248 - protein, 321 aa, synthetic construct
  REGION 1..321: note = Variant of adenosine kinase
MHHHHHHGGSGMSALICGSLAYDTIMVFPDQFKNHILPDKVHRLNVSFLVPRMRREFGGCAGNIAYNLHLLGGAPIPMGTVGQDFGPYREHFETLGIDLSRVKIIDDLFTPQAFITTDHDHNQITAFHPGAMMRSYENHVRDVPGVTLGLVGPDGREGMIQNAEEFAAGGIPFIFDPGQAMPLFNGPELREFIEQADYVVVNDYESNLLQERTGWNEQDIVSRVQAYITTQGSKGALVHTPEKTYDIPPAHERRVVDPTGCGDAFRAGLIYGIQHNYDWLTIGRMGNLMGALKVEHPGTQNQRFDFAEFNDQFKQQFGYAL

SEQ ID NO: 249 - DNA, 969 bp, synthetic construct
  misc_feature 1..969: note = Variant of adenosine kinase
  source 1..969: mol_type = other DNA
atgcaccatcatcaccatcacgggggctccggcatgagtgcactgatttgcggttctttagcgtatgataccatcatggtgtttccggaccagttcaagaaccatattctgcccgataaggttcacatcctcaatgtcagctttcttgtaccacgcatgcgtcgtgaatttggaggctgtgccggcaacattgcgtacaatctgcatctgttgggtggtgctccgatccctatgggaacggtgggccaagatttcggtccgtatcgcgagcacttcgaaactctgggcattgacttatcccgcgtcaagatcatcgatgatctgagtacagcgcaggccttcattaccaccgaccatgatcataaccagattacggcgtttcatccaggcgcaatgatgcgttcgtacgaaaatcacgttcgtgatgtgccgggtgttaccttgggcctcgtaggtcctgatggacgcgagggcatgatccaaaatgccgaagaatttgctgctggtggcattccgttcatttttgacccaggtcaggcaatgccgctgttcaacggccccgaactgcgcgagtttatcgaacaggcggactatgtggtggtcaacgattacgaaagcaatcttcttcaagaacgtactggctggaacgagcaggacattgtttcacgcgtgcaggcgtatatcaccacgcaaggtcctaaaggagccctggtacatacaccggagaagacctacgatattccgccggcacacgaacgtcgtgtcgttgatccaactggttgcggcgacgcgtttcgcgccggcctgatctatggtattcagcataattatgattggttgaccattggccgcatgggaaacttaatgggtgcgctgaaagtggaacaccctggcacgcaaaatcagcgtttcgattttgccgaattcaacgaccagttcaaacaaagctttggctacgcgctctaatga

SEQ ID NO: 250 - protein, 321 aa, synthetic construct
  REGION 1..321: note = Variant of adenosine kinase
MHHHHHHGGSGMSALICGSLAYDTIMVFPDQFKNHILPDKVHILNVSFLVPRMRREFGGCAGNIAYNLHLLGGAPIPMGTVGQDFGPYREHFETLGIDLSRVKIIDDLSTAQAFITTDHDHNQITAFHPGAMMRSYENHVRDVPGVTLGLVGPDGREGMIQNAEEFAAGGIPFIFDPGQAMPLFNGPELREFIEQADYVVVNDYESNLLQERTGWNEQDIVSRVQAYITTQGPKGALVHTPEKTYDIPPAHERRVVDPTGCGDAFRAGLIYGIQHNYDWLTIGRMGNLMGALKVEHPGTQNQRFDFAEFNDQFKQSFGYAL

SEQ ID NO: 251 - DNA, 969 bp, synthetic construct
  misc_feature 1..969: note = Variant of adenosine kinase
  source 1..969: mol_type = other DNA
atgcaccatcatcaccatcacgggggctccggcatgagtgcactgatttgcggttctttagcgtatgataccatcatggtgtttccggaccagttcaagaaccatattctgcccgataaggttcacatcctcaatgtcagctttcttgtaccacgcatgcgtcgtgaatttggaggctgtgccggcaacattgcgtacaatctgcatctgttgggtggtgctccgatccctatgggaacggtgggccaagatttcggtccgtatcgcgagcacttcgaaactctgggcattgacttatcccgcgtcaagatcatcgatgatctgagtacagcgcaggccttcattaccaccgaccatgatcataaccagattacggcgtttcatccaggggcaatgatgcgttcgtacgaaaatcacgttcgtgatgtgccgggtgttaccttgggcctcgtaggtcctgatggacgcgagggcatgatccaaaatgccgaagaatttgctgctggtggcattccgttcatttttgacccaggtcaggcaatgccgctgttcaacggccccgaactgcgcgagtttatcgaacaggcggactatgtggtggtcaacgattacgaaagcaatcttcttcaagaacgtactggctggaacgagcaggacattgtttcacgcgtgcaggcgtatatcaccacgcaaggttcgaaaggagccctggtacaaacaccggagaagacctacgatattccgccggcacacgaacgtcgtgtcgttgatccaactggttgcggcgacgcgtttcgcgccggcctgatctatggtattcagcataattatgattggttgaccattggccgcatgggaaacttaatgggtgcgctgaaagtggaacaccctggcacgcaaaatcagcgtttcgattttgccgaattcaacgaccagttcaaacaacagtttggctacgcgctctaatga

SEQ ID NO: 252 - protein, 321 aa, synthetic construct
  REGION 1..321: note = Variant of adenosine kinase
MHHHHHHGGSGMSALICGSLAYDTIMVFPDQFKNHILPDKVHILNVSFLVPRMRREFGGCAGNIAYNLHLLGGAPIPMGTVGQDFGPYREHFETLGIDLSRVKIIDDLSTAQAFITTDHDHNQITAFHPGAMMRSYENHVRDVPGVTLGLVGPDGREGMIQNAEEFAAGGIPFIFDPGQAMPLFNGPELREFIEQADYVVVNDYESNLLQERTGWNEQDIVSRVQAYITTQGSKGALVQTPEKTYDIPPAHERRVVDPTGCGDAFRAGLIYGIQHNYDWLTIGRMGNLMGALKVEHPGTQNQRFDFAEFNDQFKQQFGYAL

SEQ ID NO: 253 - DNA, 969 bp, synthetic construct
  misc_feature 1..969: note = Variant of adenosine kinase
  source 1..969: mol_type = other DNA
atgcaccatcatcaccatcacgggggctccggcatgagtgcactgatttgcggttctttagcgtatgataccatcatggtgtttccggaccagttcaagaaccatattctgcccgataaggttcaccgcctcaatgtcagctttcttgtaccacgcatgcgtcgtgaatttggaggctgtgccggcaacattgcgtacaatctgcatctgttgggtggtgctccgatccctatgggaacggtgggccaagatttcggtccgtatcgcgagcacttcgaaactctgggcattgacttatcccgcgtcaagatcatcgatgatctgttcacaccgcaggccttcattaccaccgaccatgatcataaccagattacggcgtttcatccaggcgcaatgatgcgttcgtacgaaaatcacgttcgtgatgtgccgggtgttaccttgggcctcgtaggtcctgatggacgcgagggcatgatccaaaatgccgaagaatttgctgctggtggcattccgttcatttttgacccaggtcaggcaatgccgctgttcaacggccccgaactgcgcgagtttatcgaacaggcggactatgtggtggtcaacgattacgaaagcaatcttcttcaagaacgtactggctggaacgagcaggacattgtttcacgcgtgcaggcgtatatcaccacgcaaggtcctaaaggagccctggtacatacaccggagaagacctacgatattccgccggcacacgaacgtcgtgtcgttgatccaactggttgcggcgacgcgtttcgcgccggcctgatctatggtattcagcataattatgattggttgaccattggccgcatgggaaacttaatgggtgcgctgaaagtggaacaccctggcacgcaaaatcagcgtttcgattttgccgaattcaacgaccagttcaaacaacagtttggctacgcgctctaatga

SEQ ID NO: 254 - protein, 321 aa, synthetic construct
  REGION 1..321: note = Variant of adenosine kinase
MHHHHHHGGSGMSALICGSLAYDTIMVFPDQFKNHILPDKVHRLNVSFLVPRMRREFGGCAGNIAYNLHLLGGAPIPMGTVGQDFGPYREHFETLGIDLSRVKIIDDLFTPQAFITTDHDHNQITAFHPGAMMRSYENHVRDVPGVTLGLVGPDGREGMIQNAEEFAAGGIPFIFDPGQAMPLFNGPELREFIEQADYVVVNDYESNLLQERTGWNEQDIVSRVQAYITTQGPKGALVHTPEKTYDIPPAHERRVVDPTGCGDAFRAGLIYGIQHNYDWLTIGRMGNLMGALKVEHPGTQNQRFDFAEFNDQFKQQFGYAL

SEQ ID NO: 255 - DNA, 969 bp, synthetic construct
  misc_feature 1..969: note = Variant of adenosine kinase
  source 1..969: mol_type = other DNA
atgcaccatcatcaccatcacgggggctccggcatgagtgcactgatttgcggttctttagcgtatgataccatcatggtgtttccggaccagttcaagaaccatattctgcccgataaggttcacatcctcaatgtcagctttcttgtaccacgcatgcgtcgtgaatttggaggctgtgccggcaacattgcgtacaatctgcatctgttgggtggtgctccgatccctatgggaacggtgggccaagatttcggtccgtatcgcgagcacttcgaaactctgggcattgacttatcccgcgtcaagatcatcgatgatctgtttacaccgcaggccttcattaccaccgaccatgatcataaccagattacggcgtttcatccaggggcaatgatgcgttcgtacgaaaatcacgttcgtgatgtgccgggtgttaccttgggcctcgtaggtcctgatggacgcgagggcatgatccaaaatgccgaagaatttgctgctggtggcattccgttcatttttgacccaggtcaggcactgccgctgttcaacggccccgaactgcgcgagtttatcgaacaggcggactatgtggtggtcaacgattacgaaagcaatcttcttcaagaacgtactggctggaacgagcaggacattgtttcacgcgtgcaggcgtatatcaccacgcaaggttcgaaaggagccctggtacatacaccggagaagacctacgatattccgccggcacacgaacgtcgtgtcgttgatccaactggttgcggcgacgcgtttcgcgccggcctgatctatggtattcagcataattatgattggttgaccattggccgcatgggaaacttaatgggtgcgctgaaagtggaacaccctggcacgcaaaatcagcgtttcgattttgccgaattcaacgaccagttcaaacaacagtttggctacgcgctctaatga

SEQ ID NO: 256 - protein, 321 aa, synthetic construct
  REGION 1..321: note = Variant of adenosine kinase
MHHHHHHGGSGMSALICGSLAYDTIMVFPDQFKNHILPDKVHILNVSFLVPRMRREFGGCAGNIAYNLHLLGGAPIPMGTVGQDFGPYREHFETLGIDLSRVKIIDDLFTPQAFITTDHDHNQITAFHPGAMMRSYENHVRDVPGVTLGLVGPDGREGMIQNAEEFAAGGIPFIFDPGQALPLFNGPELREFIEQADYVVVNDYESNLLQERTGWNEQDIVSRVQAYITTQGSKGALVHTPEKTYDIPPAHERRVVDPTGCGDAFRAGLIYGIQHNYDWLTIGRMGNLMGALKVEHPGTQNQRFDFAEFNDQFKQQFGYAL

SEQ ID NO: 257 - DNA, 969 bp, synthetic construct
  misc_feature 1..969: note = Variant of adenosine kinase
  source 1..969: mol_type = other DNA
atgcaccatcatcaccatcacgggggctccggcatgagtgcactgatttgcggttctttagcgtatgataccatcatggtgtttccggaccagttcaagaaacatattctgcctgataaagttcacatcctcaatgtcagctttcttgtaccacgcatgcgtcgtgaatttggaggctgtgccggcaacattgcgtacaatctgcatctgttgggtggtgctccgatccctatgggaacggtgggccaagatttcggtccgtatcgcgagcacttcgaaactctgggcattgacttatcccgcgtcaagatcatcgatgatctgtttacaccgcaggccttcattaccaccgaccatgatcataaccagattacggcgtttcatccaggcgcaatgatgcgttcgtacgaaaatcacgttcgtgatgtgccgggtgttaccttgggcctcgtaggtcctgatggacgcgagggcatgatccaaaatgccgaagaatttgctgctggtggcattccgttcatttttgacccaggtcaggcaatgccgctgttcaacggccccgaactgcgcgagtttatcgaacaggcggactatgtggtggtcaacgattacgaaagcaatctgcttcagacccgtactggctggaacgagcaggacattgtttcacgcgtgcaggcgtatatcaccacgcaaggtcctaaaggagccctggtacatacaccggagaagacctacgatattcgtggtgcacacgaacgtcgtgtcgttgatccaactggttgcggcgacgcgtttcgcgccggcctgatctatggtattcagcataattatgattggttgaccattggccgcatgggaaacttaatgggtgcgctgaaagtggaacaccctggcacgcaaaatcagcgtttcgattttgccgaattcaacgaccagttcaaacaacagtttggctacgcgctctaatga

SEQ ID NO: 258 - protein, 321 aa, synthetic construct
  REGION 1..321: note = Variant of adenosine kinase
MHHHHHHGGSGMSALICGSLAYDTIMVFPDQFKKHILPDKVHILNVSFLVPRMRREFGGCAGNIAYNLHLLGGAPIPMGTVGQDFGPYREHFETLGIDLSRVKIIDDLFTPQAFITTDHDHNQITAFHPGAMMRSYENHVRDVPGVTLGLVGPDGREGMIQNAEEFAAGGIPFIFDPGQAMPLFNGPELREFIEQADYVVVNDYESNLLQTRTGWNEQDIVSRVQAYITTQGPKGALVHTPEKTYDIRGAHERRVVDPTGCGDAFRAGLIYGIQHNYDWLTIGRMGNLMGALKVEHPGTQNQRFDFAEFNDQFKQQFGYAL

SEQ ID NO: 259 - DNA, 969 bp, synthetic construct
  misc_feature 1..969: note = Variant of adenosine kinase
  source 1..969: mol_type = other DNA
atgcaccatcatcaccatcacgggggctccggcatgagtgcactgatttgcggttctttagcgtatgataccatcatggtgtttccggaccagttcaagaaacatattctgtgcgataaagttcacatcctcaatgtcagctttcttgtaccacgcatgcgtcgtgaatttggaggctgtgccggcaacattgcgtacaatctgcatctgttgggtggtgctccgatccctatgggaacggtgggccaagatttcggtccgtatcgcgagcacttcgaaactctgggcattgacttatcccgcgtcaagatcatcgatgatctgtttacaccgcaggccttcattaccaccgaccatgatcataaccagattacggcgtttcatccaggcgcaatgatgcgttcgtacgaaaatcacgttcgtgatgtgccgggtgttaccttgggcctcgtaggtcctgatggacgcgagggcatgatccaaaatgccgaagaatttgctgctggtggcattccgttcatttttgacccaggtcaggcaatgccgctgttcaacggccccgaactgcgcgagtttatcgaacaggcggactatgtggtggtcaacgattacgaaagcaatcttcttcaagaacgtactggctggaacgagcaggacattgtttcacgcgtgcaggcgtatatcaccacgcaaggtcctaaaggagccctggtacatacaccggagaagacctacgatattcgtggtgcacacgaacgtcgtgtcgttgatccaactggttgcggcgacgcgtttcgcgccggcctgatctatggtattcagcataattatgattggttgaccattggccgcatgggaaacttaatgggtgcgctgaaagtggaacaccctggcacgcaaaatcagcgtttcgattttgccgagttcaacgaccagttcaaacaacagtttggctacgcgctctaatga

SEQ ID NO: 260 - protein, 321 aa, synthetic construct
  REGION 1..321: note = Variant of adenosine kinase
MHHHHHHGGSGMSALICGSLAYDTIMVFPDQFKKHILCDKVHILNVSFLVPRMRREFGGCAGNIAYNLHLLGGAPIPMGTVGQDFGPYREHFETLGIDLSRVKIIDDLFTPQAFITTDHDHNQITAFHPGAMMRSYENHVRDVPGVTLGLVGPDGREGMIQNAEEFAAGGIPFIFDPGQAMPLFNGPELREFIEQADYVVVNDYESNLLQERTGWNEQDIVSRVQAYITTQGPKGALVHTPEKTYDIRGAHERRVVDPTGCGDAFRAGLIYGIQHNYDWLTIGRMGNLMGALKVEHPGTQNQRFDFAEFNDQFKQQFGYAL

SEQ ID NO: 261 - DNA, 969 bp, synthetic construct
  misc_feature 1..969: note = Variant of adenosine kinase
  source 1..969: mol_type = other DNA
atgcaccatcatcaccatcacgggggctccggcatgagtgcactgatttgcggttctttagcgtatgataccatcatggtgtttccggaccagttcaagaaccatattctgtgcgataaagttcacatcctcaatgtcagctttcttgtaccacgcatgcgtcgtgaatttggaggctgtgccggcaacattgcgtacaatctgcatctgttgggtggtgctccgatccctatgggaacggtgggccaagatttcggtccgtatcgcgagcacttcgaaactctgggcattgacttatcccgcgtccgtatcatcgatgatctgtttacaccgcaggccttcattatgaccgaccatgatcataaccagattacggcgtttcatccaggcgcaatgatgcgttcgtacgaaaatcacgttcgtgatgtgccgggtgttaccttgggcctcgtaggtcctgatggacgcgagggcatgatccaaaatgccgaagaatttgctgctggtggcattccgttcatttttgacccaggtcaggcaatgccgctgttcaacggccccgaactgcgcgagtttatcgaacaggcggactatgtggtggtcaacgattacgaaagcaatcttcttcaagaacgtactggctggaacgagcaggacattgtttcacgcgtgcaggcgtatatcaccacgcaaggtcctaaaggagccctggtacatacaccggagaagacctacgatattcctccggcacacgaacctcgtgtcgttgatccaactggttgcggcgacgcgtttcgcgccggcctgatctatggtattcagcataattatgattggttgaccattggccgcatgggaaacttaatgggtgcgctgaaagtggaacaccctggcacgcaaaatcagcgtttcgattttgccttcttcaacgaccagttcaaacaacagtttggctacgcgctctaatga

SEQ ID NO: 262 - protein, 321 aa, synthetic construct
  REGION 1..321: note = Variant of adenosine kinase
MHHHHHHGGSGMSALICGSLAYDTIMVFPDQFKNHILCDKVHILNVSFLVPRMRREFGGCAGNIAYNLHLLGGAPIPMGTVGQDFGPYREHFETLGIDLSRVRIIDDLFTPQAFIMTDHDHNQITAFHPGAMMRSYENHVRDVPGVTLGLVGPDGREGMIQNAEEFAAGGIPFIFDPGQAMPLFNGPELREFIEQADYVVVNDYESNLLQERTGWNEQDIVSRVQAYITTQGPKGALVHTPEKTYDIPPAHEPRVVDPTGCGDAFRAGLIYGIQHNYDWLTIGRMGNLMGALKVEHPGTQNQRFDFAFFNDQFKQQFGYAL

SEQ ID NO: 263 - DNA, 969 bp, synthetic construct
  misc_feature 1..969: note = Variant of adenosine kinase
  source 1..969: mol_type = other DNA
atgcaccatcatcaccatcacgggggctccggcatgagtgcactgatttgcggttctttagcgtatgataccatcatggtgtttccggaccagttcaagaaccatattctgcccgataaggttcacatcctcaatgtcagctttcttgtaccacgcatgcgtcgtgaatttggaggctgtgccggcaacattgcgtacaatctgcatctgttgggtggtgctccgatccctatgggaacggtgggccaagatttcggtccgtatcgcgagcacttcgaaactctgggcattgacttatcccgcgtcaagatcatcgatgatctgttcacaccgcaggccttcattaccaccgaccatgatcataaccagattacggcgtttcatccaggcgcaatgatgcgttcgtacgaaaatcacgttcgtgatgtgccgggtgttaccttgggcctcgtaggtcctgatggacgcgagggcatgatccaaaatgccgaagaatttgctgctggtggcattccgttcatttttgacccaggtcaggcaatgccgctgttcaacggccccgaactgcgcgagtttatcgaacaggcggactatgtggtggtcaacgattacgaaagcaatcttcttcaagaacgtactggctggaacgagcaggacattgtttcacgcgtgcaggcgtatatcaccacgcaaggtccgaaaggagccctggtacatacaccggagaagacctacgatattccgccggcacacgaacgtcgtgtcgttgatccaactggttgcggcgacgcgtttcgcgccggcctgatctatggtattcagcataattatgattggttgaccattggccgcatgggaaacttaatgggtgcgctgaaagtggaacaccctggcacgcaaaatcagcgtttcgattttgccgaattcaacgaccagttcaaacaagaatttggctacgcgctctaatga

SEQ ID NO: 264 - protein, 321 aa, synthetic construct
  REGION 1..321: note = Variant of adenosine kinase
MHHHHHHGGSGMSALICGSLAYDTIMVFPDQFKNHILPDKVHILNVSFLVPRMRREFGGCAGNIAYNLHLLGGAPIPMGTVGQDFGPYREHFETLGIDLSRVKIIDDLFTPQAFITTDHDHNQITAFHPGAMMRSYENHVRDVPGVTLGLVGPDGREGMIQNAEEFAAGGIPFIFDPGQAMPLFNGPELREFIEQADYVVVNDYESNLLQERTGWNEQDIVSRVQAYITTQGPKGALVHTPEKTYDIPPAHERRVVDPTGCGDAFRAGLIYGIQHNYDWLTIGRMGNLMGALKVEHPGTQNQRFDFAEFNDQFKQEFGYAL

SEQ ID NO: 265 - DNA, 969 bp, synthetic construct
  misc_feature 1..969: note = Variant of adenosine kinase
  source 1..969: mol_type = other DNA
atgcaccatcatcaccatcacgggggctccggcatgagtgcactgatttgcggttctttagcgtatgataccatcatggtgtttccggaccagttcaagaaacatattctgcctgataaagttcacatcctcaatgtcagctttcttgtaccacgcatgcgtcgtgaatttggaggctgtgccggcaacattgcgtacaatctgcatctgttgggtggtgctccgatccctatgggaacggtgggccaagatttcggtccgtatcgcgagcacttcgaaactctgggcattgacttatcccgcgtcaagatcatcgatgatctgtttacaccgcaggccttcattaccaccgaccatgatcataaccagattacggcgtttcatccaggcgcaatgatgcgttcgtacgaaaatcacgttcgtgatgtgccgggtgttaccttgggcctcgtaggtcctgatggacgcgagggcatgatccaaaatgccgaagaatttgctgctggtggcattccgttcatttttgacccaggtcaggcaatgccgctgttcaacggccccgaactgcgcgagtttatcgaacaggcggactatgtggtggtcaacgattacgaaagcaatcttcttcaagaacgtactggctggaacgagcaggacattgtttcacgcgtgcaggcgtatatcaccacgcaaggtcctaaaggagccctggtacatacaccggagaagacctacgatattccgccggcacacgaacgtcgtgtcgttgatccaactggttgcggcgacgcgtttcgcgccggcctgatctatggtattcagcataattatgattggttgaccattggccgcatgggaaacttaatgggtgcgctgaaagtggaacaccctggcacgcaaaatcagcgtttcgattttgccttcttcaacgaccagttcaaacaacagtttggctacgcgctctaatga

SEQ ID NO: 266 - protein, 321 aa, synthetic construct
  REGION 1..321: note = Variant of adenosine kinase
MHHHHHHGGSGMSALICGSLAYDTIMVFPDQFKKHILPDKVHILNVSFLVPRMRREFGGCAGNIAYNLHLLGGAPIPMGTVGQDFGPYREHFETLGIDLSRVKIIDDLFTPQAFITTDHDHNQITAFHPGAMMRSYENHVRDVPGVTLGLVGPDGREGMIQNAEEFAAGGIPFIFDPGQAMPLFNGPELREFIEQADYVVVNDYESNLLQERTGWNEQDIVSRVQAYITTQGPKGALVHTPEKTYDIPPAHERRVVDPTGCGDAFRAGLIYGIQHNYDWLTIGRMGNLMGALKVEHPGTQNQRFDFAFFNDQFKQQFGYAL

SEQ ID NO: 267 - DNA, 969 bp, synthetic construct
  misc_feature 1..969: note = Variant of adenosine kinase
  source 1..969: mol_type = other DNA
atgcaccatcatcaccatcacgggggctccggcatgagtgcactgatttgcggttctttagcgtatgataccatcatggtgtttccggaccagttcaagaaccatattctgcccgataaagttcacatcctcaatgtcagctttcttgtaccacgcatgcgtcgtgaatttggaggctgtgccggcaacattgcgtacaatctgcatctgttgggtggtgctccgatccctatgggaacggtgggccaagatttcggtccgtatcgcgagcacttcgaaactctgggcattgacttatcccgcgtcaagatcatcgatgatctgtttacaccgcaggccttcattaccaccgaccatgatcataaccagattacggcgtttcatccaggcgcaatgatgcgttcgtacgaaaatcacgttcgtgatgtgccgggtgttaccttgggcctcgtaggtcctgatggacgcgagggcatgatccaaaatgccgaagaatttgctgctggtggcattccgttcatttttgacccaggtcaggcaatgccgctgttcaacggccccgaactgcgcgagtttatcgaacaggcggactatgtggtggtcaacgattacgaaagcaatcttcttcaagaacgtactggctggaacgagcaggacattgtttcacgcgtgcaggcgtatatcaccacgcaaggttcgaaaggagccctggtacatacaccggagaagacctacgatattccgccggcacacgaacgtcgtgtcgttgatccaactggttgcggcgacgcgtttcgcgccggcctgatctatggtattcagcataattatgattggttgaccattggccgcatgggaaacttaatgggtgcgctgaaagtggaacaccctggcacgcaaaatcagcgtttcgattttgccgaattcaacgaccagttcaaacaagaatttggctacgcgctctaatga

SEQ ID NO: 268 - protein, 321 aa, synthetic construct
  REGION 1..321: note = Variant of adenosine kinase
MHHHHHHGGSGMSALICGSLAYDTIMVFPDQFKNHILPDKVHILNVSFLVPRMRREFGGCAGNIAYNLHLLGGAPIPMGTVGQDFGPYREHFETLGIDLSRVKIIDDLFTPQAFITTDHDHNQITAFHPGAMMRSYENHVRDVPGVTLGLVGPDGREGMIQNAEEFAAGGIPFIFDPGQAMPLFNGPELREFIEQADYVVVNDYESNLLQERTGWNEQDIVSRVQAYITTQGSKGALVHTPEKTYDIPPAHERRVVDPTGCGDAFRAGLIYGIQHNYDWLTIGRMGNLMGALKVEHPGTQNQRFDFAEFNDQFKQEFGYAL

SEQ ID NO: 269 - DNA, 969 bp, synthetic construct
  misc_feature 1..969: note = Variant of adenosine kinase
  source 1..969: mol_type = other DNA
atgcaccatcatcaccatcacgggggctccggcatgagtgcactgatttgcggttctttagcgtatgataccatcatggtgtttccggaccagttcaagaaccatattctgcccgatcgtgttcaccgcctcaatgtcagctttcttgtaccacgcatgcgtcgtgaatttggaggctgtgccggcaacattgcgtacaatctgcatctgttgggtggtgctccgatccctatgggaacggtgggccaagatttcggtccgtatcgcgagcacttcgaaactctgggcattgacttatcccgcgtcaagatcatcgatgatctgagtacagcgcaggccttcattaccaccgaccatgatcataaccagattacggcgtttcatccaggcgcaatgatgcgttcgtacgaaaatcacgttcgtgatgtgccgggtgttaccttgggcctcgtaggtcctgatggacgcgagggcatgatccaaaatgccgaagaatttgctgctggtggcattccgttcatttttgacccaggtcaggcaatgccgctgttcaacggccccgaactgcgcgagtttatcgaacaggcggactatgtggtggtcaacgattacgaaagcaatcttcttcaagaacgtactggctggaacgagcaggacattgtttcacgcgtgcaggcgtatatcaccacgcaaggttcgaaaggagccctggtacatacaccggagaagacctacgatattccgccggcacacgaacgtcgtgtcgttgatccaactggttgcggcgacgcgtttcgcgccggcctgatctatggtattcagcataattatgattggttgaccattggccgcatgggaaacttaatgggtgcgctgaaagtggaacaccctggcacgcaaaatcagcgtttcgattttgccgaattcaacgaccagttcaaacaagaatttggctacgcgctctaatga

SEQ ID NO: 270 - protein, 321 aa, synthetic construct
  REGION 1..321: note = Variant of adenosine kinase
MHHHHHHGGSGMSALICGSLAYDTIMVFPDQFKNHILPDRVHRLNVSFLVPRMRREFGGCAGNIAYNLHLLGGAPIPMGTVGQDFGPYREHFETLGIDLSRVKIIDDLSTAQAFITTDHDHNQITAFHPGAMMRSYENHVRDVPGVTLGLVGPDGREGMIQNAEEFAAGGIPFIFDPGQAMPLFNGPELREFIEQADYVVVNDYESNLLQERTGWNEQDIVSRVQAYITTQGSKGALVHTPEKTYDIPPAHERRVVDPTGCGDAFRAGLIYGIQHNYDWLTIGRMGNLMGALKVEHPGTQNQRFDFAEFNDQFKQEFGYAL

SEQ ID NO: 271 - DNA, 969 bp, synthetic construct
  misc_feature 1..969: note = Variant of adenosine kinase
  source 1..969: mol_type = other DNA
atgcaccatcatcaccatcacgggggctccggcatgagtgcactgatttgcggttctttagcgtatgataccatcatggtgtttccggaccagttcaagaaccatattctgcccgataaggttcaccgcctcaatgtcagctttcttgtaccacgcatgcgtcgtgaatttggaggctgtgccggcaacattgcgtacaatctgcatctgttgggtggtgctccgatccctatgggaacggtgggccaagatttcggtccgtatcgcgagcacttcgaaactctgggcattgacttatcccgcgtcaagatcatcgatgatctgtttacaccgcaggccttcattaccaccgaccatgatcataaccagattacggcgtttcatccaggcgcaatgatgcgttcgtacgaaaatcacgttcgtgatgtgccgggtgttaccttgggcctcgtaggtcctgatggacgcgagggcatgatccaaaatgccgaagaatttgctgctggtggcattccgttcatttttgacccaggtcaggcaatgccgctgttcaacggccccgaactgcgcgagtttatcgaacaggcggactatgtggtggtcaacgattacgaaagcaatcttcttcaagaacgtactggctggaacgagcaggacattgtttcacgcgtgcaggcgtatatcaccacgcaaggttcgaaaggagccctggtacatacaccggagaagacctacgatattccgccggcacacgaacgtcgtgtcgttgatccaactggttgcggcgacgcgtttcgcgccggcctgatctatggtattcagcataattatgattggttgaccattggccgcatgggaaacttaatgggtgcgctgaaagtggaacaccctggcacgcaaaatcagcgtttcgattttgccgaattcaacgaccagttcaaacaagattttggctacgcgctctaatga

SEQ ID NO: 272 - protein, 321 aa, synthetic construct
  REGION 1..321: note = Variant of adenosine kinase
MHHHHHHGGSGMSALICGSLAYDTIMVFPDQFKNHILPDKVHRLNVSFLVPRMRREFGGCAGNIAYNLHLLGGAPIPMGTVGQDFGPYREHFETLGIDLSRVKIIDDLFTPQAFITTDHDHNQITAFHPGAMMRSYENHVRDVPGVTLGLVGPDGREGMIQNAEEFAAGGIPFIFDPGQAMPLFNGPELREFIEQADYVVVNDYESNLLQERTGWNEQDIVSRVQAYITTQGSKGALVHTPEKTYDIPPAHERRVVDPTGCGDAFRAGLIYGIQHNYDWLTIGRMGNLMGALKVEHPGTQNQRFDFAEFNDQFKQDFGYAL

SEQ ID NO: 273 - DNA, 969 bp, synthetic construct
  misc_feature 1..969: note = Variant of adenosine kinase
  source 1..969: mol_type = other DNA
atgcaccatcatcaccatcacgggggctccggcatgagtgcactgatttgcggttctttagcgtatgataccatcatggtgtttccggaccagttcaagaaccatattctgcccgatcgtgttcacatcctcaatgtcagctttcttgtaccacgcatgcgtcgtgaatttggaggctgtgccggcaacattgcgtacaatctgcatctgttgggtggtgctccgatccctatgggaacggtgggccaagatttcggtccgtatcgcgagcacttcgaaactctgggcattgacttatcccgcgtcaagatcatcgatgatctgagtacagcgcaggccttcattaccaccgaccatgatcataaccagattacggcgtttcatccaggggcaatgatgcgttcgtacgaaaatcacgttcgtgatgtgccgggtgttaccttgggcctcgtaggtcctgatggacgcgagggcatgatccaaaatgccgaagaatttgctgctggtggcattccgttcatttttgacccaggtcaggcaatgccgctgttcaacggccccgaactgcgcgagtttatcgaacaggcggactatgtggtggtcaacgattacgaaagcaatcttcttcaagaacgtactggctggaacgagcaggacattgtttcacgcgtgcaggcgtatatcaccacgcaaggtccgaaaggagccctggtacatacaccggagaagacctacgatattccgccggcacacgaacgtcgtgtcgttgatccaactggttgcggcgacgcgtttcgcgccggcctgatctatggtattcagcataattatgattggttgaccattggccgcatgggaaacttaatgggtgcgctgaaagtggaacaccctggcacgcaaaatcagcgtttcgattttgccgaattcaacgaccagttcaaacaacagtttggctacgcgctctaatga

SEQ ID NO: 274 - protein, 321 aa, synthetic construct
  REGION 1..321: note = Variant of adenosine kinase
MHHHHHHGGSGMSALICGSLAYDTIMVFPDQFKNHILPDRVHILNVSFLVPRMRREFGGCAGNIAYNLHLLGGAPIPMGTVGQDFGPYREHFETLGIDLSRVKIIDDLSTAQAFITTDHDHNQITAFHPGAMMRSYENHVRDVPGVTLGLVGPDGREGMIQNAEEFAAGGIPFIFDPGQAMPLFNGPELREFIEQADYVVVNDYESNLLQERTGWNEQDIVSRVQAYITTQGPKGALVHTPEKTYDIPPAHERRVVDPTGCGDAFRAGLIYGIQHNYDWLTIGRMGNLMGALKVEHPGTQNQRFDFAEFNDQFKQQFGYAL

SEQ ID NO: 275 - DNA, 969 bp, synthetic construct
  misc_feature 1..969: note = Variant of adenosine kinase
  source 1..969: mol_type = other DNA
atgcaccatcatcaccatcacgggggctccggcatgagtgcactgatttgcggttctttagcgtatgataccatcatggtgtttccggaccagttcaagaaacatattctgtgcgataaagttcacatcctcaatgtcagctttcttgtaccacgcatgcgtcgtgaatttggaggctgtgccggcaacattgcgtacaatctgcatctgttgggtggtgctccgatccctatgggaacggtgggccaagatttcggtccgtatcgcgagcacttcgaaactctgggcattgacttatcccgcgtccgtatcatcgatgatctgtttacaccgcaggccttcattaccaccgaccatgatcataaccagattacggcgtttcatccaggcgcaatgatgcgttcgtacgaaaatcacgttcgtgatgtgccgggtgttaccttgggcctcgtaggtcctgatggacgcgagggcatgatccaaaatgccgaagaatttgctgctggtggcattccgttcatttttgacccaggtcaggcaatgccgctgttcaacggccccgaactgcgcgagtttatcgaacaggcggactatgtggtggtcaacgattacgaaagcaatctgcttcaggaacgtactggctggaacgagcaggacattgtttcacgcgtgcaggcgtatatcaccacgcaaggtcctaaaggagccctggtacatacaccggagaagacctacgatattccgccggcacacgaacgtcgtgtcgttgatccaactggttgcggcgacgcgtttcgcgccggcctgatctatggtattcagcataattatgattggttgaccattggccgcatgggaaacttaatgggtgcgctgaaagtggaacaccctggcacgcaaaatcagcgtttcgattttgccgagttcaacgaccagttcaaacaacagtttggctacgcgctctaatga

SEQ ID NO: 276 - protein, 321 aa, synthetic construct
  REGION 1..321: note = Variant of adenosine kinase
MHHHHHHGGSGMSALICGSLAYDTIMVFPDQFKKHILCDKVHILNVSFLVPRMRREFGGCAGNIAYNLHLLGGAPIPMGTVGQDFGPYREHFETLGIDLSRVRIIDDLFTPQAFITTDHDHNQITAFHPGAMMRSYENHVRDVPGVTLGLVGPDGREGMIQNAEEFAAGGIPFIFDPGQAMPLFNGPELREFIEQADYVVVNDYESNLLQERTGWNEQDIVSRVQAYITTQGPKGALVHTPEKTYDIPPAHERRVVDPTGCGDAFRAGLIYGIQHNYDWLTIGRMGNLMGALKVEHPGTQNQRFDFAEFNDQFKQQFGYAL

SEQ ID NO: 277 - DNA, 969 bp, synthetic construct
  misc_feature 1..969: note = Variant of adenosine kinase
  source 1..969: mol_type = other DNA
atgcaccatcatcaccatcacgggggctccggcatgagtgcactgatttgcggttctttagcgtatgataccatcatggtgtttccggaccagttcaagaaccatattctgcccgataaagttcacatcctcaatgtcagctttcttgtaccacgcatgcgtcgtgaatttggaggctgtgccggcaacattgcgtacaatctgcatctgttgggtggtgctccgatccctatgggaacggtgggccaagatttcggtccgtatcgcgagcacttcgaaactctgggcattgacttatcccgcgtcaagatcatcgatgatctgtttacaccgcaggccttcattaccaccgaccatgatcataaccagattacggcgtttcatccagcggcaatgatgcgttcgtacgaaaatcacgttcgtgatgtgccgggtgttaccttgggcctcgtaggtcctgatggacgcgagggcatgatccaaaatgccgaagaatttgctgctggtggcattccgttcatttttgacccaggtcaggcaatgccgctgttcaacggccccgaactgcgcgagtttatcgaacaggcggactatgtggtggtcaacgattacgaaagcaatcttcttcaagaacgtactggctggaacgagcaggacattgtttcacgcgtgcaggcgtatatcaccacgcaaggtccgaaaggagccctggtacatacaccggagaagacctacgatattccgccggcacacgaacgtcgtgtcgttgatccaactggttgcggcgacgcgtttcgcgccggcctgatctatggtattcagcataattatgattggttgaccattggccgcatgggaaacttaatgggtgcgctgaaagtggaacaccctggcacgcaaaatcagcgtttcgattttgccgaattcaacgaccagttcaaacaagaatttggctacgcgctctaatga

SEQ ID NO: 278 - protein, 321 aa, synthetic construct
  REGION 1..321: note = Variant of adenosine kinase
MHHHHHHGGSGMSALICGSLAYDTIMVFPDQFKNHILPDKVHILNVSFLVPRMRREFGGCAGNIAYNLHLLGGAPIPMGTVGQDFGPYREHFETLGIDLSRVKIIDDLFTPQAFITTDHDHNQITAFHPAAMMRSYENHVRDVPGVTLGLVGPDGREGMIQNAEEFAAGGIPFIFDPGQAMPLFNGPELREFIEQADYVVVNDYESNLLQERTGWNEQDIVSRVQAYITTQGPKGALVHTPEKTYDIPPAHERRVVDPTGCGDAFRAGLIYGIQHNYDWLTIGRMGNLMGALKVEHPGTQNQRFDFAEFNDQFKQEFGYAL

SEQ ID NO: 279 - DNA, 969 bp, synthetic construct
  misc_feature 1..969: note = Variant of adenosine kinase
  source 1..969: mol_type = other DNA
atgcaccatcatcaccatcacgggggctccggcatgagtgcactgatttgcggttctttagcgtatgataccatcatggtgtttccggaccagttcaagcgtcatattctgtgcgataaagttcacatcctcaatgtcagctttcttgtaccacgcatgcgtcgtgaatttggaggctgtgccggcaacattgcgtacaatctgcatctgttgggtggtgctccgatccctatgggaacggtgggccaagatttcggtccgtatcgcgagcacttcgaaactctgggcattgacttatcccgcgtccgtatcatcgatgatctgtttacaccgcaggccttcattaccaccgaccatgatcataaccagattacggcgtttcatccaggcgcaatgatgcgttcgtacgaaaatcacgttcgtgatgtgccgggtgttaccttgggcctcgtaggtcctgatggacgcgagggcatgatccaaaatgccgaagaatttgctgctggtggcattccgttcatttttgacccaggtcaggcaatgccgctgttcaacggccccgaactgcgcgagtttatcgaacaggcggactatgtggtggtcaacgattacgaaagcaatgtgcttcaggaacgtactggctggaacgagcaggacattgtttcacgcgtgcaggcgtatatcaccacgcaaggtcctaaaggagccctggtacatacaccggagaagacctacgatattccgccggcacacgaacgtcgtgtcgttgatccaactggttgcggcgacgcgtttcgcgccggcctgatctatggtattcagcataattatgattggttgaccattggccgcatgggaaacttaatgggtgcgctgaaagtggaacaccctggcacgcaaaatcagcgtttcgattttgccttcttcaacgaccagttcaaacaacagtttggctacgcgctctaatga

SEQ ID NO: 280 - protein, 321 aa, synthetic construct
  REGION 1..321: note = Variant of adenosine kinase
MHHHHHHGGSGMSALICGSLAYDTIMVFPDQFKRHILCDKVHILNVSFLVPRMRREFGGCAGNIAYNLHLLGGAPIPMGTVGQDFGPYREHFETLGIDLSRVRIIDDLFTPQAFITTDHDHNQITAFHPGAMMRSYENHVRDVPGVTLGLVGPDGREGMIQNAEEFAAGGIPFIFDPGQAMPLFNGPELREFIEQADYVVVNDYESNVLQERTGWNEQDIVSRVQAYITTQGPKGALVHTPEKTYDIPPAHERRVVDPTGCGDAFRAGLIYGIQHNYDWLTIGRMGNLMGALKVEHPGTQNQRFDFAFFNDQFKQQFGYAL

SEQ ID NO: 281 - DNA, 969 bp, synthetic construct
  misc_feature 1..969: note = Variant of adenosine kinase
  source 1..969: mol_type = other DNA
atgcaccatcatcaccatcacgggggctccggcatgagtgcactgatttgcggttctttagcgtatgataccatcatggtgtttccggaccagttcaagaaccatattctgcccgataaagttcacatcctcaatgtcagctttcttgtaccacgcatgcgtcgtgaatttggaggctgtgccggcaacattgcgtacaatctgcatctgttgggtggtgctccgatccctatgggaacggtgggccaagatttcggtccgtatcgcgagcacttcgaaactctgggcattgacttatcccgcgtcaagatcatcgatgatctgtttacaccgcaggccttcattaccaccgaccatgatcataaccagattacggcgtttcatccaggcgcaatgatgcgttcgtacgaaaatcacgttcgtgatgtgccgggtgttaccttgggcctcgtaggtcctgatggacgcgagggcatgatccaaaatgccgaagaatttgctgctggtggcattccgttcatttttgacccaggtcaggcactgccgctgttcaacggccccgaactgcgcgagtttatcgaacaggcggactatgtggtggtcaacgattacgaaagcaatcttcttcaagaacgtactggctggaacgagcaggacattgtttcacgcgtgcaggcgtatatcaccacgcaaggtccgaaaggagccctggtacatacaccggagaagacctacgatattccgccggcacacgaacgtcgtgtcgttgatccaactggttgcggcgacgcgtttcgcgccggcctgatctatggtattcagcataattatgattggttgaccattggccgcatgggaaacttaatgggtgcgctgaaagtggaacaccctggcacgcaaaatcagcgtttcgattttgccgaattcaacgaccagttcaaacaaagctttggctacgcgctctaatga

SEQ ID NO: 282 - protein, 321 aa, synthetic construct
  REGION 1..321: note = Variant of adenosine kinase
MHHHHHHGGSGMSALICGSLAYDTIMVFPDQFKNHILPDKVHILNVSFLVPRMRREFGGCAGNIAYNLHLLGGAPIPMGTVGQDFGPYREHFETLGIDLSRVKIIDDLFTPQAFITTDHDHNQITAFHPGAMMRSYENHVRDVPGVTLGLVGPDGREGMIQNAEEFAAGGIPFIFDPGQALPLFNGPELREFIEQADYVVVNDYESNLLQERTGWNEQDIVSRVQAYITTQGPKGALVHTPEKTYDIPPAHERRVVDPTGCGDAFRAGLIYGIQHNYDWLTIGRMGNLMGALKVEHPGTQNQRFDFAEFNDQFKQSFGYAL

SEQ ID NO: 283 - DNA, 969 bp, synthetic construct
  misc_feature 1..969: note = Variant of adenosine kinase
  source 1..969: mol_type = other DNA
atgcaccatcatcaccatcacgggggctccggcatgagtgcactgatttgcggttctttagcgtatgataccatcatggtgtttccggaccagttcaagaaccatattctgcccgataaagttcacatcctcaatgtcagctttcttgtaccacgcatgcgtcgtgaatttggaggctgtgccggcaacattgcgtacaatctgcatctgttgggtggtgctccgatccctatgggaacggtgggccaagatttcggtccgtatcgcgagcacttcgaaactctgggcattgacttatcccgcgtcaagatcatcgatgatctgagtacagcgcaggccttcattaccaccgaccatgatcataaccagattacggcgtttcatccaggcgcaatgatgcgttcgtacgaaaatcacgttcgtgatgtgccgggtgttaccttgggcctcgtaggtcctgatggacgcgagggcatgatccaaaatgccgaagaatttgctgctggtggcattccgttcatttttgacccaggtcaggcaatgccgctgttcaacggccccgaactgcgcgagtttatcgaacaggcggactatgtggtggtcaacgattacgaaagcaatcttcttcaagaacgtactggctggaacgagcaggacattgtttcacgcgtgcaggcgtatatcaccacgcaaggtccgaaaggagccctggtacatacaccggagaagacctacgatattccgccggcacacgaacgtcgtgtcgttgatccaactggttgcggcgacgcgtttcgcgccggcctgatctatggtattcagcataattatgattggttgaccattggccgcatgggaaacttaatgggtgcgctgaaagtggaacaccctggcacgcaaaatcagcgtttcgattttgccgaattcaacgaccagttcaaacaacagtttggctacgcgctctaatga

SEQ ID NO: 284 - protein, 321 aa, synthetic construct
  REGION 1..321: note = Variant of adenosine kinase
MHHHHHHGGSGMSALICGSLAYDTIMVFPDQFKNHILPDKVHILNVSFLVPRMRREFGGCAGNIAYNLHLLGGAPIPMGTVGQDFGPYREHFETLGIDLSRVKIIDDLSTAQAFITTDHDHNQITAFHPGAMMRSYENHVRDVPGVTLGLVGPDGREGMIQNAEEFAAGGIPFIFDPGQAMPLFNGPELREFIEQADYVVVNDYESNLLQERTGWNEQDIVSRVQAYITTQGPKGALVHTPEKTYDIPPAHERRVVDPTGCGDAFRAGLIYGIQHNYDWLTIGRMGNLMGALKVEHPGTQNQRFDFAEFNDQFKQQFGYAL

SEQ ID NO: 285 - DNA, 969 bp, synthetic construct
  misc_feature 1..969: note = Variant of adenosine kinase
  source 1..969: mol_type = other DNA
atgcaccatcatcaccatcacgggggctccggcatgagtgcactgatttgcggttctttagcgtatgataccatcatggtgtttccggaccagttcaagaaccatattctgcccgatcgtgttcacatcctcaatgtcagctttcttgtaccacgcatgcgtcgtgaatttggaggctgtgccggcaacattgcgtacaatctgcatctgttgggtggtgctccgatccctatgggaacggtgggccaagatttcggtccgtatcgcgagcacttcgaaactctgggcattgacttatcccgcgtcaagatcatcgatgatctgttcacaccgcaggccttcattaccaccgaccatgatcataaccagattacggcgtttcatccaggcgcaatgatgcgttcgtacgaaaatcacgttcgtgatgtgccgggtgttaccttgggcctcgtaggtcctgatggacgcgagggcatgatccaaaatgccgaagaatttgctgctggtggcattccgttcatttttgacccaggtcaggcaatgccgctgttcaacggccccgaactgcgcgagtttatcgaacaggcggactatgtggtggtcaacgattacgaaagcaatcttcttcaagaacgtactggctggaacgagcaggacattgtttcacgcgtgcaggcgtatatcaccacgcaaggtcctaaaggagccctggtacatacaccggagaagacctacgatattccgccggcacacgaacgtcgtgtcgttgatccaactggttgcggcgacgcgtttcgcgccggcctgatctatggtattcagcataattatgattggttgaccattggccgcatgggaaacttaatgggtgcgctgaaagtggaacaccctggcacgcaaaatcagcgtttcgattttgccgaattcaacgaccagttcaaacaagattttggctacgcgctctaatga

SEQ ID NO: 286 - protein, 321 aa, synthetic construct
  REGION 1..321: note = Variant of adenosine kinase
MHHHHHHGGSGMSALICGSLAYDTIMVFPDQFKNHILPDRVHILNVSFLVPRMRREFGGCAGNIAYNLHLLGGAPIPMGTVGQDFGPYREHFETLGIDLSRVKIIDDLFTPQAFITTDHDHNQITAFHPGAMMRSYENHVRDVPGVTLGLVGPDGREGMIQNAEEFAAGGIPFIFDPGQAMPLFNGPELREFIEQADYVVVNDYESNLLQERTGWNEQDIVSRVQAYITTQGPKGALVHTPEKTYDIPPAHERRVVDPTGCGDAFRAGLIYGIQHNYDWLTIGRMGNLMGALKVEHPGTQNQRFDFAEFNDQFKQDFGYAL

SEQ ID NO: 287 - DNA, 969 bp, synthetic construct
  misc_feature 1..969: note = Variant of adenosine kinase
  source 1..969: mol_type = other DNA
atgcaccatcatcaccatcacgggggctccggcatgagtgcactgatttgcggttctttagcgtatgataccatcatggtgtttccggaccagttcaagaaccatattctgcctgataaagttcacatcctcaatgtcagctttcttgtaccacgcatgcgtcgtgaatttggaggctgtgccggcaacattgcgtacaatctgcatctgttgggtggtgctccgatccctatgggaacggtgggccaagatttcggtccgtatcgcgagcacttcgaaactctgggcattgacttatcccgcgtcaagatcatcgatgatctgtttacaccgcaggccttcattaccaccgaccatgatcataaccagattacggcgtttcatccaggcgcaatgatgcgttcgtacgaaaatcacgttcgtgatgtgccgggtgttaccttgggcctcgtaggtcctgatggacgcgagggcatgatccaaaatgccgaagaatttgctgctggtggcattccgttcatttttgacccaggtcaggcaatgccgctgttcaacggccccgaactgcgcgagtttatcgaacaggcggactatgtggtggtcaacgattacgaaagcaatcttcttcaagaacgtactggctggaacgagcaggacattgtttcacgcgtgcaggcgtatatcaccacgcaaggtcctaaaggagccctggtacatacaccggagaagacctacgatattcgtggtgcacacgaacgtcgtgtcgttgatccaactggttgcggcgacgcgtttcgcgccggcctgatctatggtattcagcataattatgattggttgaccattggccgcatgggaaacttaatgggtgcgctgaaagtggaacaccctggcacgcaaaatcagcgtttcgattttgccgaattcaacgaccagttcaaacaacagtttggctacgcgctctaatga

SEQ ID NO: 288 - protein, 321 aa, synthetic construct
  REGION 1..321: note = Variant of adenosine kinase
MHHHHHHGGSGMSALICGSLAYDTIMVFPDQFKNHILPDKVHILNVSFLVPRMRREFGGCAGNIAYNLHLLGGAPIPMGTVGQDFGPYREHFETLGIDLSRVKIIDDLFTPQAFITTDHDHNQITAFHPGAMMRSYENHVRDVPGVTLGLVGPDGREGMIQNAEEFAAGGIPFIFDPGQAMPLFNGPELREFIEQADYVVVNDYESNLLQERTGWNEQDIVSRVQAYITTQGPKGALVHTPEKTYDIRGAHERRVVDPTGCGDAFRAGLIYGIQHNYDWLTIGRMGNLMGALKVEHPGTQNQRFDFAEFNDQFKQQFGYAL

SEQ ID NO: 289 - DNA, 969 bp, synthetic construct
  misc_feature 1..969: note = Variant of adenosine kinase
  source 1..969: mol_type = other DNA
atgcaccatcatcaccatcacgggggctccggcatgagtgcactgatttgcggttctttagcgtatgataccatcatggtgtttccggaccagttcaagaaccatattctgcccgataaagttcacatcctcaatgtcagctttcttgtaccacgcatgcgtcgtgaatttggaggctgtgccggcaacattgcgtacaatctgcatctgttgggtggtgctccgatccctatgggaacggtgggccaagatttcggtccgtatcgcgagcacttcgaaactctgggcattgacttatcccgcgtcaagatcatcgatgatctgtttacaccgcaggccttcattaccaccgaccatgatcataaccagattacggcgtttcatccaggcgcaatgatgcgttcgtacgaaaatcacgttcgtgatgtgccgggtgttaccttgggcctcgtaggtcctgatggacgcgagggcatgatccaaaatgccgaagaatttgctgctggtggcattccgttcatttttgacccaggtcaggcactgccgctgttcaacggccccgaactgcgcgagtttatcgaacaggcggactatgtggtggtcaacgattacgaaagcaatcttcttcaagaacgtactggctggaacgagcaggacattgtttcacgcgtgcaggcgtatatcaccacgcaaggtccgaaaggagccctggtacatacaccggagaagacctacgatattccgccggcacacgaacgtcgtgtcgttgatccaactggttgcggcgacgcgtttcgcgccggcctgatctatggtattcagcataattatgattggttgaccattggccgcatgggaaacttaatgggtgcgctgaaagtggaacaccctggcacgcaaaatcagcgtttcgattttgccgaattcaacgaccagttcaaacaacagtttggctacgcgctctaatga

SEQ ID NO: 290 - protein, 321 aa, synthetic construct
  REGION 1..321: note = Variant of adenosine kinase
MHHHHHHGGSGMSALICGSLAYDTIMVFPDQFKNHILPDKVHILNVSFLVPRMRREFGGCAGNIAYNLHLLGGAPIPMGTVGQDFGPYREHFETLGIDLSRVKIIDDLFTPQAFITTDHDHNQITAFHPGAMMRSYENHVRDVPGVTLGLVGPDGREGMIQNAEEFAAGGIPFIFDPGQALPLFNGPELREFIEQADYVVVNDYESNLLQERTGWNEQDIVSRVQAYITTQGPKGALVHTPEKTYDIPPAHERRVVDPTGCGDAFRAGLIYGIQHNYDWLTIGRMGNLMGALKVEHPGTQNQRFDFAEFNDQFKQQFGYAL

SEQ ID NO: 291 - DNA, 969 bp, synthetic construct
  misc_feature 1..969: note = Variant of adenosine kinase
  source 1..969: mol_type = other DNA
atgcaccatcatcaccatcacgggggctccggcatgagtgcactgatttgcggttctttagcgtatgataccatcatggtgtttccggaccagttcaagaaccatattctgcccgataaagttcacatcctcaatgtcagctttcttgtaccacgcatgcgtcgtgaatttggaggctgtgccggcaacattgcgtacaatctgcatctgttgggtggtgctccgatccctatgggaacggtgggccaagatttcggtccgtatcgcgagcacttcgaaactctgggcattgacttatcccgcgtcaagatcatcgatgatctgttcacagcgcaggccttcattaccaccgaccatgatcataaccagattacggcgtttcatccaggggcaatgatgcgttcgtacgaaaatcacgttcgtgatgtgccgggtgttaccttgggcctcgtaggtcctgatggacgcgagggcatgatccaaaatgccgaagaatttgctgctggtggcattccgttcatttttgacccaggtcaggcaatgccgctgttcaacggccccgaactgcgcgagtttatcgaacaggcggactatgtggtggtcaacgattacgaaagcaatcttcttcaagaacgtactggctggaacgagcaggacattgtttcacgcgtgcaggcgtatatcaccacgcaaggtcctaaaggagccctggtacatacaccggagaagacctacgatattccgccggcacacgaacgtcgtgtcgttgatccaactggttgcggcgacgcgtttcgcgccggcctgatctatggtattcagcataattatgattggttgaccattggccgcatgggaaacttaatgggtgcgctgaaagtggaacaccctggcacgcaaaatcagcgtttcgattttgccgaattcaacgaccagttcaaacaacagtttggctacgcgctctaatga

SEQ ID NO: 292 - protein, 321 aa, synthetic construct
  REGION 1..321: note = Variant of adenosine kinase
MHHHHHHGGSGMSALICGSLAYDTIMVFPDQFKNHILPDKVHILNVSFLVPRMRREFGGCAGNIAYNLHLLGGAPIPMGTVGQDFGPYREHFETLGIDLSRVKIIDDLFTAQAFITTDHDHNQITAFHPGAMMRSYENHVRDVPGVTLGLVGPDGREGMIQNAEEFAAGGIPFIFDPGQAMPLFNGPELREFIEQADYVVVNDYESNLLQERTGWNEQDIVSRVQAYITTQGPKGALVHTPEKTYDIPPAHERRVVDPTGCGDAFRAGLIYGIQHNYDWLTIGRMGNLMGALKVEHPGTQNQRFDFAEFNDQFKQQFGYAL

SEQ ID NO: 293 - DNA, 969 bp, synthetic construct
  misc_feature 1..969: note = Variant of adenosine kinase
  source 1..969: mol_type = other DNA
atgcaccatcatcaccatcacgggggctccggcatgagtgcactgatttgcggttctttagcgtatgataccatcatggtgtttccggaccagttcaagaaccatattctgcccgatcgtgttcacatcctcaatgtcagctttcttgtaccacgcatgcgtcgtgaatttggaggctgtgccggcaacattgcgtacaatctgcatctgttgggtggtgctccgatccctatgggaacggtgggccaagatttcggtccgtatcgcgagcacttcgaaactctgggcattgacttatcccgcgtcaagatcatcgatgatctgagtacagcgcaggccttcattaccaccgaccatgatcataaccagattacggcgtttcatccaggggcaatgatgcgttcgtacgaaaatcacgttcgtgatgtgccgggtgttaccttgggcctcgtaggtcctgatggacgcgagggcatgatccaaaatgccgaagaatttgctgctggtggcattccgttcatttttgacccaggtcaggcaatgccgctgttcaacggccccgaactgcgcgagtttatcgaacaggcggactatgtggtggtcaacgattacgaaagcaatcttcttcaagaacgtactggctggaacgagcaggacattgtttcacgcgtgcaggcgtatatcaccacgcaaggttcgaaaggagccctggtacatacaccggagaagacctacgatattccgccggcacacgaacgtcgtgtcgttgatccaactggttgcggcgacgcgtttcgcgccggcctgatctatggtattcagcataattatgattggttgaccattggccgcatgggaaacttaatgggtgcgctgaaagtggaacaccctggcacgcaaaatcagcgtttcgattttgccgaattcaacgaccagttcaaacaacagtttggctacgcgctctaatga

SEQ ID NO: 294 - protein, 321 aa, synthetic construct
  REGION 1..321: note = Variant of adenosine kinase
MHHHHHHGGSGMSALICGSLAYDTIMVFPDQFKNHILPDRVHILNVSFLVPRMRREFGGCAGNIAYNLHLLGGAPIPMGTVGQDFGPYREHFETLGIDLSRVKIIDDLSTAQAFITTDHDHNQITAFHPGAMMRSYENHVRDVPGVTLGLVGPDGREGMIQNAEEFAAGGIPFIFDPGQAMPLFNGPELREFIEQADYVVVNDYESNLLQERTGWNEQDIVSRVQAYITTQGSKGALVHTPEKTYDIPPAHERRVVDPTGCGDAFRAGLIYGIQHNYDWLTIGRMGNLMGALKVEHPGTQNQRFDFAEFNDQFKQQFGYAL

SEQ ID NO: 295 - DNA, 969 bp, synthetic construct
  misc_feature 1..969: note = Variant of adenosine kinase
  source 1..969: mol_type = other DNA
atgcaccatcatcaccatcacgggggctccggcatgagtgcactgatttgcggttctttagcgtatgataccatcatggtgtttccggaccagttcaagcgtcatattctgcctgataaagttcacatcctcaatgtcagctttcttgtaccacgcatgcgtcgtgaatttggaggctgtgccggcaacattgcgtacaatctgcatctgttgggtggtgctccgatccctatgggaacggtgggccaagatttcggtccgtatcgcgagcacttcgaaactctgggcattgacttatcccgcgtcaagatcatcgatgatctgtttacaccgcaggccttcattaccaccgaccatgatcataaccagattacggcgtttcatccaggcgcaatgatgcgttcgtacgaaaatcacgttcgtgatgtgccgggtgttaccttgggcctcgtaggtcctgatggacgcgagggcatgatccaaaatgccgaagaatttgctgctggtggcattccgttcatttttgacccaggtcaggcaatgccgctgttcaacggccccgaactgcgcgagtttatcgaacaggcggactatgtggtggtcaacgattacgaaagcaatcttcttcaagaacgtactggctggaacgagcaggacattgtttcacgcgtgcaggcgtatatcaccacgcaaggtcctaaaggagccctggtacatacaccggagaagacctacgatattcctggtgcacacgaacgtcgtgtcgttgatccaactggttgcggcgacgcgtttcgcgccggcctgatctatggtattcagcataattatgattggttgaccattggccgcatgggaaacttaatgggtgcgctgaaagtggaacaccctggcacgcaaaatcagcgtttcgattttgccgaattcaacgaccagttcaaacaacagtttggctacgcgctctaatga

SEQ ID NO: 296 - protein, 321 aa, synthetic construct
  REGION 1..321: note = Variant of adenosine kinase
MHHHHHHGGSGMSALICGSLAYDTIMVFPDQFKRHILPDKVHILNVSFLVPRMRREFGGCAGNIAYNLHLLGGAPIPMGTVGQDFGPYREHFETLGIDLSRVKIIDDLFTPQAFITTDHDHNQITAFHPGAMMRSYENHVRDVPGVTLGLVGPDGREGMIQNAEEFAAGGIPFIFDPGQAMPLFNGPELREFIEQADYVVVNDYESNLLQERTGWNEQDIVSRVQAYITTQGPKGALVHTPEKTYDIPGAHERRVVDPTGCGDAFRAGLIYGIQHNYDWLTIGRMGNLMGALKVEHPGTQNQRFDFAEFNDQFKQQFGYAL

SEQ ID NO: 297 - DNA, 969 bp, synthetic construct
  misc_feature 1..969: note = Variant of adenosine kinase
  source 1..969: mol_type = other DNA
atgcaccatcatcaccatcacgggggctccggcatgagtgcactgatttgcggttctttagcgtatgataccatcatggtgtttccggaccagttcaagaaccatattctgcccgataaggttcaccgcctcaatgtcagctttcttgtaccacgcatgcgtcgtgaatttggaggctgtgccggcaacattgcgtacaatctgcatctgttgggtggtgctccgatccctatgggaacggtgggccaagatttcggtccgtatcgcgagcacttcgaaactctgggcattgacttatcccgcgtcaagatcatcgatgatctgttcacaccgcaggccttcattaccaccgaccatgatcataaccagattacggcgtttcatccaggcgcaatgatgcgttcgtacgaaaatcacgttcgtgatgtgccgggtgttaccttgggcctcgtaggtcctgatggacgcgagggcatgatccaaaatgccgaagaatttgctgctggtggcattccgttcatttttgacccaggtcaggcaatgccgctgttcaacggccccgaactgcgcgagtttatcgaacaggcggactatgtggtggtcaacgattacgaaagcaatcttcttcaagaacgtactggctggaacgagcaggacattgtttcacgcgtgcaggcgtatatcaccacgcaaggttcgaaaggagccctggtacatacaccggagaagacctacgatattccgccggcacacgaacgtcgtgtcgttgatccaactggttgcggcgacgcgtttcgcgccggcctgatctatggtattcagcataattatgattggttgaccattggccgcatgggaaacttaatgggtgcgctgaaagtggaacaccctggcacgcaaaatcagcgtttcgattttgccgaattcaacgaccagttcaaacaaagctttggctacgcgctctaatga

SEQ ID NO: 298 - protein, 321 aa, synthetic construct
  REGION 1..321: note = Variant of adenosine kinase
MHHHHHHGGSGMSALICGSLAYDTIMVFPDQFKNHILPDKVHRLNVSFLVPRMRREFGGCAGNIAYNLHLLGGAPIPMGTVGQDFGPYREHFETLGIDLSRVKIIDDLFTPQAFITTDHDHNQITAFHPGAMMRSYENHVRDVPGVTLGLVGPDGREGMIQNAEEFAAGGIPFIFDPGQAMPLFNGPELREFIEQADYVVVNDYESNLLQERTGWNEQDIVSRVQAYITTQGSKGALVHTPEKTYDIPPAHERRVVDPTGCGDAFRAGLIYGIQHNYDWLTIGRMGNLMGALKVEHPGTQNQRFDFAEFNDQFKQSFGYAL

SEQ ID NO: 299 - DNA, 969 bp, synthetic construct
  misc_feature 1..969: note = Variant of adenosine kinase
  source 1..969: mol_type = other DNA
atgcaccatcatcaccatcacgggggctccggcatgagtgcactgatttgcggttctttagcgtatgataccatcatggtgtttccggaccagttcaagaaacatattctgtgcgataaagttcacatcctcaatgtcagctttcttgtaccacgcatgcgtcgtgaatttggaggctgtgccggcaacattgcgtacaatctgcatctgttgggtggtgctccgatccctatgggaacggtgggccaagatttcggtccgtatcgcgagcacttcgaaactctgggcattgacttatcccgcgtccgtatcatcgatgatctgtttacaccgcaggccttcattatgaccgaccatgatcataaccagattacggcgtttcatccaggcgcaatgatgcgttcgtacgaaaatcacgttcgtgatgtgccgggtgttaccttgggcctcgtaggtcctgatggacgcgagggcatgatccaaaatgccgaagaatttgctgctggtggcattccgttcatttttgacccaggtcaggcaatgccgctgttcaacggccccgaactgcgcgagtttatcgaacaggcggactatgtggtggtcaacgattacgaaagcaatgtgcttcagacccgtactggctggaacgagcaggacattgtttcacgcgtgcaggcgtatatcaccacgcaaggtcctaaaggagccctggtacatacaccggagaagacctacgatattcgtccggcacacgaacctcgtgtcgttgatccaactggttgcggcgacgcgtttcgcgccggcctgatctatggtattcagcataattatgattggttgaccattggccgcatgggaaacttaatgggtgcgctgaaagtggaacaccctggcacgcaaaatcagcgtttcgattttgccgagttcaacgaccagttcaaacaacagtttggctacgcgctctaatga

SEQ ID NO: 300 - protein, 321 aa, synthetic construct
  REGION 1..321: note = Variant of adenosine kinase
MHHHHHHGGSGMSALICGSLAYDTIMVFPDQFKKHILCDKVHILNVSFLVPRMRREFGGCAGNIAYNLHLLGGAPIPMGTVGQDFGPYREHFETLGIDLSRVRIIDDLFTPQAFIMTDHDHNQITAFHPGAMMRSYENHVRDVPGVTLGLVGPDGREGMIQNAEEFAAGGIPFIFDPGQAMPLFNGPELREFIEQADYVVVNDYESNVLQTRTGWNEQDIVSRVQAYITTQGPKGALVHTPEKTYDIRPAHEPRVVDPTGCGDAFRAGLIYGIQHNYDWLTIGRMGNLMGALKVEHPGTQNQRFDFAEFNDQFKQQFGYAL

SEQ ID NO: 301 - DNA, 969 bp, synthetic construct
  misc_feature 1..969: note = Variant of adenosine kinase
  source 1..969: mol_type = other DNA
atgcaccatcatcaccatcacgggggctccggcatgagtgcactgatttgcggttctttagcgtatgataccatcatggtgtttccggaccagttcaagaaccatattctgcccgataaggttcaccgcctcaatgtcagctttcttgtaccacgcatgcgtcgtgaatttggaggctgtgccggcaacattgcgtacaatctgcatctgttgggtggtgctccgatccctatgggaacggtgggccaagatttcggtccgtatcgcgagcacttcgaaactctgggcattgacttatcccgcgtcaagatcatcgatgatctgttcacaccgcaggccttcattaccaccgaccatgatcataaccagattacggcgtttcatccaggggcaatgatgcgttcgtacgaaaatcacgttcgtgatgtgccgggtgttaccttgggcctcgtaggtcctgatggacgcgagggcatgatccaaaatgccgaagaatttgctgctggtggcattccgttcatttttgacccaggtcaggcactgccgctgttcaacggccccgaactgcgcgagtttatcgaacaggcggactatgtggtggtcaacgattacgaaagcaatcttcttcaagaacgtactggctggaacgagcaggacattgtttcacgcgtgcaggcgtatatcaccacgcaaggttcgaaaggagccctggtacatacaccggagaagacctacgatattccgccggcacacgaacgtcgtgtcgttgatccaactggttgcggcgacgcgtttcgcgccggcctgatctatggtattcagcataattatgattggttgaccattggccgcatgggaaacttaatgggtgcgctgaaagtggaacaccctggcacgcaaaatcagcgtttcgattttgccgaattcaacgaccagttcaaacaaagctttggctacgcgctctaatga

SEQ ID NO: 302 - protein, 321 aa, synthetic construct
  REGION 1..321: note = Variant of adenosine kinase
MHHHHHHGGSGMSALICGSLAYDTIMVFPDQFKNHILPDKVHRLNVSFLVPRMRREFGGCAGNIAYNLHLLGGAPIPMGTVGQDFGPYREHFETLGIDLSRVKIIDDLFTPQAFITTDHDHNQITAFHPGAMMRSYENHVRDVPGVTLGLVGPDGREGMIQNAEEFAAGGIPFIFDPGQALPLFNGPELREFIEQADYVVVNDYESNLLQERTGWNEQDIVSRVQAYITTQGSKGALVHTPEKTYDIPPAHERRVVDPTGCGDAFRAGLIYGIQHNYDWLTIGRMGNLMGALKVEHPGTQNQRFDFAEFNDQFKQSFGYAL

SEQ ID NO: 303 - DNA, 969 bp, synthetic construct
  misc_feature 1..969: note = Variant of adenosine kinase
  source 1..969: mol_type = other DNA
atgcaccatcatcaccatcacgggggctccggcatgagtgcactgatttgcggttctttagcgtatgataccatcatggtgtttccggaccagttcaagcgtcatattctgtgcgataaagttcacatcctcaatgtcagctttcttgtaccacgcatgcgtcgtgaatttggaggctgtgccggcaacattgcgtacaatctgcatctgttgggtggtgctccgatccctatgggaacggtgggccaagatttcggtccgtatcgcgagcacttcgaaactctgggcattgacttatcccgcgtccgtatcatcgatgatctgtttacaccgcaggccttcattatgaccgaccatgatcataaccagattacggcgtttcatccaggcgcaatgatgcgttcgtacgaaaatcacgttcgtgatgtgccgggtgttaccttgggcctcgtaggtcctgatggacgcgagggcatgatccaaaatgccgaagaatttgctgctggtggcattccgttcatttttgacccaggtcaggcaatgccgctgttcaacggccccgaactgcgcgagtttatcgaacaggcggactatgtggtggtcaacgattacgaaagcaatcttcttcaagaacgtactggctggaacgagcaggacattgtttcacgcgtgcaggcgtatatcaccacgcaaggtcctaaaggagccctggtacatacaccggagaagacctacgatattccgccggcacacgaacctcgtgtcgttgatccaactggttgcggcgacgcgtttcgcgccggcctgatctatggtattcagcataattatgattggttgaccattggccgcatgggaaacttaatgggtgcgctgaaagtggaacaccctggcacgcaaaatcagcgtttcgattttgccgaattcaacgaccagttcaaacaacagtttggctacgcgctctaatga

SEQ ID NO: 304 - protein, 321 aa, synthetic construct
  REGION 1..321: note = Variant of adenosine kinase
MHHHHHHGGSGMSALICGSLAYDTIMVFPDQFKRHILCDKVHILNVSFLVPRMRREFGGCAGNIAYNLHLLGGAPIPMGTVGQDFGPYREHFETLGIDLSRVRIIDDLFTPQAFIMTDHDHNQITAFHPGAMMRSYENHVRDVPGVTLGLVGPDGREGMIQNAEEFAAGGIPFIFDPGQAMPLFNGPELREFIEQADYVVVNDYESNLLQERTGWNEQDIVSRVQAYITTQGPKGALVHTPEKTYDIPPAHEPRVVDPTGCGDAFRAGLIYGIQHNYDWLTIGRMGNLMGALKVEHPGTQNQRFDFAEFNDQFKQQFGYAL

SEQ ID NO: 305 - DNA, 969 bp, synthetic construct
  misc_feature 1..969: note = Variant of adenosine kinase
  source 1..969: mol_type = other DNA
atgcaccatcatcaccatcacgggggctccggcatgagtgcactgatttgcggttctttagcgtatgataccatcatggtgtttccggaccagttcaagaaccatattctgcccgatcgtgttcaccgcctcaatgtcagctttcttgtaccacgcatgcgtcgtgaatttggaggctgtgccggcaacattgcgtacaatctgcatctgttgggtggtgctccgatccctatgggaacggtgggccaagatttcggtccgtatcgcgagcacttcgaaactctgggcattgacttatcccgcgtcaagatcatcgatgatctgttcacagcgcaggccttcattaccaccgaccatgatcataaccagattacggcgtttcatccaggcgcaatgatgcgttcgtacgaaaatcacgttcgtgatgtgccgggtgttaccttgggcctcgtaggtcctgatggacgcgagggcatgatccaaaatgccgaagaatttgctgctggtggcattccgttcatttttgacccaggtcaggcaatgccgctgttcaacggccccgaactgcgcgagtttatcgaacaggcggactatgtggtggtcaacgattacgaaagcaatcttcttcaagaacgtactggctggaacgagcaggacattgtttcacgcgtgcaggcgtatatcaccacgcaaggttcgaaaggagccctggtacatacaccggagaagacctacgatattccgccggcacacgaacgtcgtgtcgttgatccaactggttgcggcgacgcgtttcgcgccggcctgatctatggtattcagcataattatgattggttgaccattggccgcatgggaaacttaatgggtgcgctgaaagtggaacaccctggcacgcaaaatcagcgtttcgattttgccgaattcaacgaccagttcaaacaagattttggctacgcgctctaatga

SEQ ID NO: 306 - protein, 321 aa, synthetic construct
  REGION 1..321: note = Variant of adenosine kinase
MHHHHHHGGSGMSALICGSLAYDTIMVFPDQFKNHILPDRVHRLNVSFLVPRMRREFGGCAGNIAYNLHLLGGAPIPMGTVGQDFGPYREHFETLGIDLSRVKIIDDLFTAQAFITTDHDHNQITAFHPGAMMRSYENHVRDVPGVTLGLVGPDGREGMIQNAEEFAAGGIPFIFDPGQAMPLFNGPELREFIEQADYVVVNDYESNLLQERTGWNEQDIVSRVQAYITTQGSKGALVHTPEKTYDIPPAHERRVVDPTGCGDAFRAGLIYGIQHNYDWLTIGRMGNLMGALKVEHPGTQNQRFDFAEFNDQFKQDFGYAL

SEQ ID NO: 307 - DNA, 969 bp, synthetic construct
  misc_feature 1..969: note = Variant of adenosine kinase
  source 1..969: mol_type = other DNA
atgcaccatcatcaccatcacgggggctccggcatgagtgcactgatttgcggttctttagcgtatgataccatcatggtgtttccggaccagttcaagaaacatattctgcctgataaagttcacatcctcaatgtcagctttcttgtaccacgcatgcgtcgtgaatttggaggctgtgccggcaacattgcgtacaatctgcatctgttgggtggtgctccgatccctatgggaacggtgggccaagatttcggtccgtatcgcgagcacttcgaaactctgggcattgacttatcccgcgtcaagatcatcgatgatctgtttacaccgcaggccttcattaccaccgaccatgatcataaccagattacggcgtttcatccaggcgcaatgatgcgttcgtacgaaaatcacgttcgtgatgtgccgggtgttaccttgggcctcgtaggtcctgatggacgcgagggcatgatccaaaatgccgaagaatttgctgctggtggcattccgttcatttttgacccaggtcaggcaatgccgctgttcaacggccccgaactgcgcgagtttatcgaacaggcggactatgtggtggtcaacgattacgaaagcaatcttcttcaagaacgtactggctggaacgagcaggacattgtttcacgcgtgcaggcgtatatcaccacgcaaggtcctaaaggagccctggtacatacaccggagaagacctacgatattccgccggcacacgaacgtcgtgtcgttgatccaactggttgcggcgacgcgtttcgcgccggcctgatctatggtattcagcataattatgattggttgaccattggccgcatgggaaacttaatgggtgcgctgaaagtggaacaccctggcacgcaaaatcagcgtttcgattttgccgagttcaacgaccagttcaaacaacagtttggctacgcgctctaatga

SEQ ID NO: 308 - protein, 321 aa, synthetic construct
  REGION 1..321: note = Variant of adenosine kinase
MHHHHHHGGSGMSALICGSLAYDTIMVFPDQFKKHILPDKVHILNVSFLVPRMRREFGGCAGNIAYNLHLLGGAPIPMGTVGQDFGPYREHFETLGIDLSRVKIIDDLFTPQAFITTDHDHNQITAFHPGAMMRSYENHVRDVPGVTLGLVGPDGREGMIQNAEEFAAGGIPFIFDPGQAMPLFNGPELREFIEQADYVVVNDYESNLLQERTGWNEQDIVSRVQAYITTQGPKGALVHTPEKTYDIPPAHERRVVDPTGCGDAFRAGLIYGIQHNYDWLTIGRMGNLMGALKVEHPGTQNQRFDFAEFNDQFKQQFGYAL

SEQ ID NO: 309 - DNA, 969 bp, synthetic construct
  misc_feature 1..969: note = Variant of adenosine kinase
  source 1..969: mol_type = other DNA
atgcaccatcatcaccatcacgggggctccggcatgagtgcactgatttgcggttctttagcgtatgataccatcatggtgtttccggaccagttcaagaaccatattctgcccgatcgtgttcacatcctcaatgtcagctttcttgtaccacgcatgcgtcgtgaatttggaggctgtgccggcaacattgcgtacaatctgcatctgttgggtggtgctccgatccctatgggaacggtgggccaagatttcggtccgtatcgcgagcacttcgaaactctgggcattgacttatcccgcgtcaagatcatcgatgatctgtttacaccgcaggccttcattaccaccgaccatgatcataaccagattacggcgtttcatccaggcgcaatgatgcgttcgtacgaaaatcacgttcgtgatgtgccgggtgttaccttgggcctcgtaggtcctgatggacgcgagggcatgatccaaaatgccgaagaatttgctgctggtggcattccgttcatttttgacccaggtcaggcaatgccgctgttcaacggccccgaactgcgcgagtttatcgaacaggcggactatgtggtggtcaacgattacgaaagcaatcttcttcaagaacgtactggctggaacgagcaggacattgtttcacgcgtgcaggcgtatatcaccacgcaaggttcgaaaggagccctggtacatacaccggagaagacctacgatattccgccggcacacgaacgtcgtgtcgttgatccaactggttgcggcgacgcgtttcgcgccggcctgatctatggtattcagcataattatgattggttgaccattggccgcatgggaaacttaatgggtgcgctgaaagtggaacaccctggcacgcaaaatcagcgtttcgattttgccgaattcaacgaccagttcaaacaacagtttggctacgcgctctaatga

SEQ ID NO: 310 - protein, 321 aa, synthetic construct
  REGION 1..321: note = Variant of adenosine kinase
MHHHHHHGGSGMSALICGSLAYDTIMVFPDQFKNHILPDRVHILNVSFLVPRMRREFGGCAGNIAYNLHLLGGAPIPMGTVGQDFGPYREHFETLGIDLSRVKIIDDLFTPQAFITTDHDHNQITAFHPGAMMRSYENHVRDVPGVTLGLVGPDGREGMIQNAEEFAAGGIPFIFDPGQAMPLFNGPELREFIEQADYVVVNDYESNLLQERTGWNEQDIVSRVQAYITTQGSKGALVHTPEKTYDIPPAHERRVVDPTGCGDAFRAGLIYGIQHNYDWLTIGRMGNLMGALKVEHPGTQNQRFDFAEFNDQFKQQFGYAL

SEQ ID NO: 311 - DNA, 969 bp, synthetic construct
  misc_feature 1..969: note = Variant of adenosine kinase
  source 1..969: mol_type = other DNA
atgcaccatcatcaccatcacgggggctccggcatgagtgcactgatttgcggttctttagcgtatgataccatcatggtgtttccggaccagttcaagaaccatattctgcccgataaggttcacatcctcaatgtcagctttcttgtaccacgcatgcgtcgtgaatttggaggctgtgccggcaacattgcgtacaatctgcatctgttgggtggtgctccgatccctatgggaacggtgggccaagatttcggtccgtatcgcgagcacttcgaaactctgggcattgacttatcccgcgtcaagatcatcgatgatctgagtacaccgcaggccttcattaccaccgaccatgatcataaccagattacggcgtttcatccaggggcaatgatgcgttcgtacgaaaatcacgttcgtgatgtgccgggtgttaccttgggcctcgtaggtcctgatggacgcgagggcatgatccaaaatgccgaagaatttgctgctggtggcattccgttcatttttgacccaggtcaggcaatgccgctgttcaacggccccgaactgcgcgagtttatcgaacaggcggactatgtggtggtcaacgattacgaaagcaatcttcttcaagaacgtactggctggaacgagcaggacattgtttcacgcgtgcaggcgtatatcaccacgcaaggtccgaaaggagccctggtacatacaccggagaagacctacgatattccgccggcacacgaacgtcgtgtcgttgatccaactggttgcggcgacgcgtttcgcgccggcctgatctatggtattcagcataattatgattggttgaccattggccgcatgggaaacttaatgggtgcgctgaaagtggaacaccctggcacgcaaaatcagcgtttcgattttgccgaattcaacgaccagttcaaacaacagtttggctacgcgctctaatga

SEQ ID NO: 312 - protein, 321 aa, synthetic construct
  REGION 1..321: note = Variant of adenosine kinase
MHHHHHHGGSGMSALICGSLAYDTIMVFPDQFKNHILPDKVHILNVSFLVPRMRREFGGCAGNIAYNLHLLGGAPIPMGTVGQDFGPYREHFETLGIDLSRVKIIDDLSTPQAFITTDHDHNQITAFHPGAMMRSYENHVRDVPGVTLGLVGPDGREGMIQNAEEFAAGGIPFIFDPGQAMPLFNGPELREFIEQADYVVVNDYESNLLQERTGWNEQDIVSRVQAYITTQGPKGALVHTPEKTYDIPPAHERRVVDPTGCGDAFRAGLIYGIQHNYDWLTIGRMGNLMGALKVEHPGTQNQRFDFAEFNDQFKQQFGYAL

SEQ ID NO: 313 - DNA, 969 bp, synthetic construct
  misc_feature 1..969: note = Variant of adenosine kinase
  source 1..969: mol_type = other DNA
atgcaccatcatcaccatcacgggggctccggcatgagtgcactgatttgcggttctttagcgtatgataccatcatggtgtttccggaccagttcaagaaccatattctgcctgataaagttcacatcctcaatgtcagctttcttgtaccacgcatgcgtcgtgaatttggaggctgtgccggcaacattgcgtacaatctgcatctgttgggtggtgctccgatccctatgggaacggtgggccaagatttcggtccgtatcgcgagcacttcgaaactctgggcattgacttatcccgcgtcaagatcatcgatgatctgtttacaccgcaggccttcattaccaccgaccatgatcataaccagattacggcgtttcatccaggcgcaatgatgcgttcgtacgaaaatcacgttcgtgatgtgccgggtgttaccttgggcctcgtaggtcctgatggacgcgagggcatgatccaaaatgccgaagaatttgctgctggtggcattccgttcatttttgacccaggtcaggcaatgccgctgttcaacggccccgaactgcgcgagtttatcgaacaggcggactatgtggtggtcaacgattacgaaagcaatctgcttcaggaacgtactggctggaacgagcaggacattgtttcacgcgtgcaggcgtatatcaccacgcaaggtcctaaaggagccctggtacatacaccggagaagacctacgatattccgccggcacacgaacgtcgtgtcgttgatccaactggttgcggcgacgcgtttcgcgccggcctgatctatggtattcagcataattatgattggttgaccattggccgcatgggaaacttaatgggtgcgctgaaagtggaacaccctggcacgcaaaatcagcgtttcgattttgccttcttcaacgaccagttcaaacaacagtttggctacgcgctctaatga

SEQ ID NO: 314 - protein, 321 aa, synthetic construct
  REGION 1..321: note = Variant of adenosine kinase
MHHHHHHGGSGMSALICGSLAYDTIMVFPDQFKNHILPDKVHILNVSFLVPRMRREFGGCAGNIAYNLHLLGGAPIPMGTVGQDFGPYREHFETLGIDLSRVKIIDDLFTPQAFITTDHDHNQITAFHPGAMMRSYENHVRDVPGVTLGLVGPDGREGMIQNAEEFAAGGIPFIFDPGQAMPLFNGPELREFIEQADYVVVNDYESNLLQERTGWNEQDIVSRVQAYITTQGPKGALVHTPEKTYDIPPAHERRVVDPTGCGDAFRAGLIYGIQHNYDWLTIGRMGNLMGALKVEHPGTQNQRFDFAFFNDQFKQQFGYAL

SEQ ID NO: 315 - DNA, 969 bp, synthetic construct
  misc_feature 1..969: note = Variant of adenosine kinase
  source 1..969: mol_type = other DNA
atgcaccatcatcaccatcacgggggctccggcatgagtgcactgatttgcggttctttagcgtatgataccatcatggtgtttccggaccagttcaagaaccatattctgcccgatcgtgttcaccgcctcaatgtcagctttcttgtaccacgcatgcgtcgtgaatttggaggctgtgccggcaacattgcgtacaatctgcatctgttgggtggtgctccgatccctatgggaacggtgggccaagatttcggtccgtatcgcgagcacttcgaaactctgggcattgacttatcccgcgtcaagatcatcgatgatctgagtacaccgcaggccttcattaccaccgaccatgatcataaccagattacggcgtttcatccaggcgcaatgatgcgttcgtacgaaaatcacgttcgtgatgtgccgggtgttaccttgggcctcgtaggtcctgatggacgcgagggcatgatccaaaatgccgaagaatttgctgctggtggcattccgttcatttttgacccaggtcaggcactgccgctgttcaacggccccgaactgcgcgagtttatcgaacaggcggactatgtggtggtcaacgattacgaaagcaatcttcttcaagaacgtactggctggaacgagcaggacattgtttcacgcgtgcaggcgtatatcaccacgcaaggttcgaaaggagccctggtacatacaccggagaagacctacgatattccgccggcacacgaacgtcgtgtcgttgatccaactggttgcggcgacgcgtttcgcgccggcctgatctatggtattcagcataattatgattggttgaccattggccgcatgggaaacttaatgggtgcgctgaaagtggaacaccctggcacgcaaaatcagcgtttcgattttgccgaattcaacgaccagttcaaacaagattttggctacgcgctctaatga

SEQ ID NO: 316 - protein, 321 aa, synthetic construct
  REGION 1..321: note = Variant of adenosine kinase
MHHHHHHGGSGMSALICGSLAYDTIMVFPDQFKNHILPDRVHRLNVSFLVPRMRREFGGCAGNIAYNLHLLGGAPIPMGTVGQDFGPYREHFETLGIDLSRVKIIDDLSTPQAFITTDHDHNQITAFHPGAMMRSYENHVRDVPGVTLGLVGPDGREGMIQNAEEFAAGGIPFIFDPGQALPLFNGPELREFIEQADYVVVNDYESNLLQERTGWNEQDIVSRVQAYITTQGSKGALVHTPEKTYDIPPAHERRVVDPTGCGDAFRAGLIYGIQHNYDWLTIGRMGNLMGALKVEHPGTQNQRFDFAEFNDQFKQDFGYAL

SEQ ID NO: 317 - DNA, 969 bp, synthetic construct
  misc_feature 1..969: note = Variant of adenosine kinase
  source 1..969: mol_type = other DNA
atgcaccatcatcaccatcacgggggctccggcatgagtgcactgatttgcggttctttagcgtatgataccatcatggtgtttccggaccagttcaagcgtcatattctgtgcgataaagttcacatcctcaatgtcagctttcttgtaccacgcatgcgtcgtgaatttggaggctgtgccggcaacattgcgtacaatctgcatctgttgggtggtgctccgatccctatgggaacggtgggccaagatttcggtccgtatcgcgagcacttcgaaactctgggcattgacttatcccgcgtcaagatcatcgatgatctgtttacaccgcaggccttcattaccaccgaccatgatcataaccagattacggcgtttcatccaggcgcaatgatgcgttcgtacgaaaatcacgttcgtgatgtgccgggtgttaccttgggcctcgtaggtcctgatggacgcgagggcatgatccaaaatgccgaagaatttgctgctggtggcattccgttcatttttgacccaggtcaggcaatgccgctgttcaacggccccgaactgcgcgagtttatcgaacaggcggactatgtggtggtcaacgattacgaaagcaatgtgcttcaggaacgtactggctggaacgagcaggacattgtttcacgcgtgcaggcgtatatcaccacgcaaggtcctaaaggagccctggtacatacaccggagaagacctacgatattcctccggcacacgaacctcgtgtcgttgatccaactggttgcggcgacgcgtttcgcgccggcctgatctatggtattcagcataattatgattggttgaccattggccgcatgggaaacttaatgggtgcgctgaaagtggaacaccctggcacgcaaaatcagcgtttcgattttgccgagttcaacgaccagttcaaacaacagtttggctacgcgctctaatga

SEQ ID NO: 318 - protein, 321 aa, synthetic construct
  REGION 1..321: note = Variant of adenosine kinase
MHHHHHHGGSGMSALICGSLAYDTIMVFPDQFKRHILCDKVHILNVSFLVPRMRREFGGCAGNIAYNLHLLGGAPIPMGTVGQDFGPYREHFETLGIDLSRVKIIDDLFTPQAFITTDHDHNQITAFHPGAMMRSYENHVRDVPGVTLGLVGPDGREGMIQNAEEFAAGGIPFIFDPGQAMPLFNGPELREFIEQADYVVVNDYESNVLQERTGWNEQDIVSRVQAYITTQGPKGALVHTPEKTYDIPPAHEPRVVDPTGCGDAFRAGLIYGIQHNYDWLTIGRMGNLMGALKVEHPGTQNQRFDFAEFNDQFKQQFGYAL

SEQ ID NO: 319 - DNA, 969 bp, synthetic construct
  misc_feature 1..969: note = Variant of adenosine kinase
  source 1..969: mol_type = other DNA
atgcaccatcatcaccatcacgggggctccggcatgagtgcactgatttgcggttctttagcgtatgataccatcatggtgtttccggaccagttcaagaaccatattctgcctgataaagttcacatcctcaatgtcagctttcttgtaccacgcatgcgtcgtgaatttggaggctgtgccggcaacattgcgtacaatctgcatctgttgggtggtgctccgatccctatgggaacggtgggccaagatttcggtccgtatcgcgagcacttcgaaactctgggcattgacttatcccgcgtccgtatcatcgatgatctgtttacaccgcaggccttcattaccaccgaccatgatcataaccagattacggcgtttcatccaggcgcaatgatgcgttcgtacgaaaatcacgttcgtgatgtgccgggtgttaccttgggcctcgtaggtcctgatggacgcgagggcatgatccaaaatgccgaagaatttgctgctggtggcattccgttcatttttgacccaggtcaggcaatgccgctgttcaacggccccgaactgcgcgagtttatcgaacaggcggactatgtggtggtcaacgattacgaaagcaatcttcttcaagaacgtactggctggaacgagcaggacattgtttcacgcgtgcaggcgtatatcaccacgcaaggtcctaaaggagccctggtacatacaccggagaagacctacgatattcctggtgcacacgaacctcgtgtcgttgatccaactggttgcggcgacgcgtttcgcgccggcctgatctatggtattcagcataattatgattggttgaccattggccgcatgggaaacttaatgggtgcgctgaaagtggaacaccctggcacgcaaaatcagcgtttcgattttgccttcttcaacgaccagttcaaacaacagtttggctacgcgctctaatga

SEQ ID NO: 320 - protein, 321 aa, synthetic construct
  REGION 1..321: note = Variant of adenosine kinase
MHHHHHHGGSGMSALICGSLAYDTIMVFPDQFKNHILPDKVHILNVSFLVPRMRREFGGCAGNIAYNLHLLGGAPIPMGTVGQDFGPYREHFETLGIDLSRVRIIDDLFTPQAFITTDHDHNQITAFHPGAMMRSYENHVRDVPGVTLGLVGPDGREGMIQNAEEFAAGGIPFIFDPGQAMPLFNGPELREFIEQADYVVVNDYESNLLQERTGWNEQDIVSRVQAYITTQGPKGALVHTPEKTYDIPGAHEPRVVDPTGCGDAFRAGLIYGIQHNYDWLTIGRMGNLMGALKVEHPGTQNQRFDFAFFNDQFKQQFGYAL

SEQ ID NO: 321 - DNA, 969 bp, synthetic construct
  misc_feature 1..969: note = Variant of adenosine kinase
  source 1..969: mol_type = other DNA
atgcaccatcatcaccatcacgggggctccggcatgagtgcactgatttgcggttctttagcgtatgataccatcatggtgtttccggaccagttcaagcgtcatattctgtgcgataaagttcacatcctcaatgtcagctttcttgtaccacgcatgcgtcgtgaatttggaggctgtgccggcaacattgcgtacaatctgcatctgttgggtggtgctccgatccctatgggaacggtgggccaagatttcggtccgtatcgcgagcacttcgaaactctgggcattgacttatcccgcgtcaagatcatcgatgatctgtttacaccgcaggccttcattatgaccgaccatgatcataaccagattacggcgtttcatccaggcgcaatgatgcgttcgtacgaaaatcacgttcgtgatgtgccgggtgttaccttgggcctcgtaggtcctgatggacgcgagggcatgatccaaaatgccgaagaatttgctgctggtggcattccgttcatttttgacccaggtcaggcaatgccgctgttcaacggccccgaactgcgcgagtttatcgaacaggcggactatgtggtggtcaacgattacgaaagcaatgtgcttcaggaacgtactggctggaacgagcaggacattgtttcacgcgtgcaggcgtatatcaccacgcaaggtcctaaaggagccctggtacatacaccggagaagacctacgatattccgccggcacacgaacgtcgtgtcgttgatccaactggttgcggcgacgcgtttcgcgccggcctgatctatggtattcagcataattatgattggttgaccattggccgcatgggaaacttaatgggtgcgctgaaagtggaacaccctggcacgcaaaatcagcgtttcgattttgccgagttcaacgaccagttcaaacaacagtttggctacgcgctctaatga

SEQ ID NO: 322 - protein, 321 aa, synthetic construct
  REGION 1..321: note = Variant of adenosine kinase
MHHHHHHGGSGMSALICGSLAYDTIMVFPDQFKRHILCDKVHILNVSFLVPRMRREFGGCAGNIAYNLHLLGGAPIPMGTVGQDFGPYREHFETLGIDLSRVKIIDDLFTPQAFIMTDHDHNQITAFHPGAMMRSYENHVRDVPGVTLGLVGPDGREGMIQNAEEFAAGGIPFIFDPGQAMPLFNGPELREFIEQADYVVVNDYESNVLQERTGWNEQDIVSRVQAYITTQGPKGALVHTPEKTYDIPPAHERRVVDPTGCGDAFRAGLIYGIQHNYDWLTIGRMGNLMGALKVEHPGTQNQRFDFAEFNDQFKQQFGYAL

SEQ ID NO: 323 - DNA, 969 bp, synthetic construct
  misc_feature 1..969: note = Variant of adenosine kinase
  source 1..969: mol_type = other DNA
atgcaccatcatcaccatcacgggggctccggcatgagtgcactgatttgcggttctttagcgtatgataccatcatggtgtttccggaccagttcaagaaccatattctgtgcgataaagttcacatcctcaatgtcagctttcttgtaccacgcatgcgtcgtgaatttggaggctgtgccggcaacattgcgtacaatctgcatctgttgggtggtgctccgatccctatgggaacggtgggccaagatttcggtccgtatcgcgagcacttcgaaactctgggcattgacttatcccgcgtcaagatcatcgatgatctgtttacaccgcaggccttcattaccaccgaccatgatcataaccagattacggcgtttcatccaggcgcaatgatgcgttcgtacgaaaatcacgttcgtgatgtgccgggtgttaccttgggcctcgtaggtcctgatggacgcgagggcatgatccaaaatgccgaagaatttgctgctggtggcattccgttcatttttgacccaggtcaggcaatgccgctgttcaacggccccgaactgcgcgagtttatcgaacaggcggactatgtggtggtcaacgattacgaaagcaatcttcttcaagaacgtactggctggaacgagcaggacattgtttcacgcgtgcaggcgtatatcaccacgcaaggtcctaaaggagccctggtacatacaccggagaagacctacgatattcctggtgcacacgaacgtcgtgtcgttgatccaactggttgcggcgacgcgtttcgcgccggcctgatctatggtattcagcataattatgattggttgaccattggccgcatgggaaacttaatgggtgcgctgaaagtggaacaccctggcacgcaaaatcagcgtttcgattttgccgaattcaacgaccagttcaaacaacagtttggctacgcgctctaatga

SEQ ID NO: 324 - protein, 321 aa, synthetic construct
  REGION 1..321: note = Variant of adenosine kinase
MHHHHHHGGSGMSALICGSLAYDTIMVFPDQFKNHILCDKVHILNVSFLVPRMRREFGGCAGNIAYNLHLLGGAPIPMGTVGQDFGPYREHFETLGIDLSRVKIIDDLFTPQAFITTDHDHNQITAFHPGAMMRSYENHVRDVPGVTLGLVGPDGREGMIQNAEEFAAGGIPFIFDPGQAMPLFNGPELREFIEQADYVVVNDYESNLLQERTGWNEQDIVSRVQAYITTQGPKGALVHTPEKTYDIPGAHERRVVDPTGCGDAFRAGLIYGIQHNYDWLTIGRMGNLMGALKVEHPGTQNQRFDFAEFNDQFKQQFGYAL

SEQ ID NO: 325 - DNA, 969 bp, synthetic construct
  misc_feature 1..969: note = Variant of adenosine kinase
  source 1..969: mol_type = other DNA
atgcaccatcatcaccatcacgggggctccggcatgagtgcactgatttgcggttctttagcgtatgataccatcatggtgtttccggaccagttcaagaaacatattctgtgtgataaagttcacatcctcaatgtcagctttcttgtaccacgcatgcgtcgtgaatttggaggctgtgccggcaacattgcgtacaatctgcatctgttgggtggtgctccgatccctatgggaacggtgggccaagatttcggtccgtatcgcgagcacttcgaaactctgggcattgacttatcccgcgtcaagatcatcgatgatctgtttacaccgcaggccttcattatgaccgaccatgatcataaccagattacggcgtttcatccaggcgcaatgatgcgttcgtacgaaaatcacgttcgtgatgtgccgggtgttaccttgggcctcgtaggtcctgatggacgcgagggcatgatccaaaatgccgaagaatttgctgctggtggcattccgttcatttttgacccaggtcaggcaatgccgctgttcaacggccccgaactgcgcgagtttatcgaacaggcggactatgtggtggtcaacgattacgaaagcaatctgcttcagacccgtactggctggaacgagcaggacattgtttcacgcgtgcaggcgtatatcaccacgcaaggtcctaaaggagccctggtacatacaccggagaagacctacgatattcgtccggcacacgaacctcgtgtcgttgatccaactggttgcggcgacgcgtttcgcgccggcctgatctatggtattcagcataattatgattggttgaccattggccgcatgggaaacttaatgggtgcgctgaaagtggaacaccctggcacgcaaaatcagcgtttcgattttgccttgttcaacgaccagttcaaacaacagtttggctacgcgctctaatta

SEQ ID NO: 326 - protein, 321 aa, synthetic construct
  REGION 1..321: note = Variant of adenosine kinase
MHHHHHHGGSGMSALICGSLAYDTIMVFPDQFKKHILCDKVHILNVSFLVPRMRREFGGCAGNIAYNLHLLGGAPIPMGTVGQDFGPYREHFETLGIDLSRVKIIDDLFTPQAFIMTDHDHNQITAFHPGAMMRSYENHVRDVPGVTLGLVGPDGREGMIQNAEEFAAGGIPFIFDPGQAMPLFNGPELREFIEQADYVVVNDYESNLLQTRTGWNEQDIVSRVQAYITTQGPKGALVHTPEKTYDIRPAHEPRVVDPTGCGDAFRAGLIYGIQHNYDWLTIGRMGNLMGALKVEHPGTQNQRFDFALFNDQFKQQFGYAL

SEQ ID NO: 327 - DNA, 969 bp, synthetic construct
  misc_feature 1..969: note = Variant of adenosine kinase
  source 1..969: mol_type = other DNA
atgcaccatcatcaccatcacgggggctccggcatgagtgcactgatttgcggttctttagcgtatgataccatcatggtgtttccggaccagttcaagaaccatattctgcccgatcgtgttcaccgcctcaatgtcagctttcttgtaccacgcatgcgtcgtgaatttggaggctgtgccggcaacattgcgtacaatctgcatctgttgggtggtgctccgatccctatgggaacggtgggccaagatttcggtccgtatcgcgagcacttcgaaactctgggcattgacttatcccgcgtcaagatcatcgatgatctgtttacaccgcaggccttcattaccaccgaccatgatcataaccagattacggcgtttcatccaggcgcaatgatgcgttcgtacgaaaatcacgttcgtgatgtgccgggtgttaccttgggcctcgtaggtcctgatggacgcgagggcatgatccaaaatgccgaagaatttgctgctggtggcattccgttcatttttgacccaggtcaggcaatgccgctgttcaacggccccgaactgcgcgagtttatcgaacaggcggactatgtggtggtcaacgattacgaaagcaatcttcttcaagaacgtactggctggaacgagcaggacattgtttcacgcgtgcaggcgtatatcaccacgcaaggtcctaaaggagccctggtacatacaccggagaagacctacgatattccgccggcacacgaacgtcgtgtcgttgatccaactggttgcggcgacgcgtttcgcgccggcctgatctatggtattcagcataattatgattggttgaccattggccgcatgggaaacttaatgggtgcgctgaaagtggaacaccctggcacgcaaaatcagcgtttcgattttgccgaattcaacgaccagttcaaacaacagtttggctacgcgctctaatga

SEQ ID NO: 328 - protein, 321 aa, synthetic construct
  REGION 1..321: note = Variant of adenosine kinase
MHHHHHHGGSGMSALICGSLAYDTIMVFPDQFKNHILPDRVHRLNVSFLVPRMRREFGGCAGNIAYNLHLLGGAPIPMGTVGQDFGPYREHFETLGIDLSRVKIIDDLFTPQAFITTDHDHNQITAFHPGAMMRSYENHVRDVPGVTLGLVGPDGREGMIQNAEEFAAGGIPFIFDPGQAMPLFNGPELREFIEQADYVVVNDYESNLLQERTGWNEQDIVSRVQAYITTQGPKGALVHTPEKTYDIPPAHERRVVDPTGCGDAFRAGLIYGIQHNYDWLTIGRMGNLMGALKVEHPGTQNQRFDFAEFNDQFKQQFGYAL

SEQ ID NO: 329 - DNA, 969 bp, synthetic construct
  misc_feature 1..969: note = Variant of adenosine kinase
  source 1..969: mol_type = other DNA
atgcaccatcatcaccatcacgggggctccggcatgagtgcactgatttgcggttctttagcgtatgataccatcatggtgtttccggaccagttcaagcgtcatattctgcctgataaagttcacatcctcaatgtcagctttcttgtaccacgcatgcgtcgtgaatttggaggctgtgccggcaacattgcgtacaatctgcatctgttgggtggtgctccgatccctatgggaacggtgggccaagatttcggtccgtatcgcgagcacttcgaaactctgggcattgacttatcccgcgtcaagatcatcgatgatctgtttacaccgcaggccttcattaccaccgaccatgatcataaccagattacggcgtttcatccaggcgcaatgatgcgttcgtacgaaaatcacgttcgtgatgtgccgggtgttaccttgggcctcgtaggtcctgatggacgcgagggcatgatccaaaatgccgaagaatttgctgctggtggcattccgttcatttttgacccaggtcaggcaatgccgctgttcaacggccccgaactgcgcgagtttatcgaacaggcggactatgtggtggtcaacgattacgaaagcaatcttcttcaagaacgtactggctggaacgagcaggacattgtttcacgcgtgcaggcgtatatcaccacgcaaggtcctaaaggagccctggtacatacaccggagaagacctacgatattccgccggcacacgaacgtcgtgtcgttgatccaactggttgcggcgacgcgtttcgcgccggcctgatctatggtattcagcataattatgattggttgaccattggccgcatgggaaacttaatgggtgcgctgaaagtggaacaccctggcacgcaaaatcagcgtttcgattttgccgaattcaacgaccagttcaaacaacagtttggctacgcgctctaatga

SEQ ID NO: 330 - protein, 321 aa, synthetic construct
  REGION 1..321: note = Variant of adenosine kinase
MHHHHHHGGSGMSALICGSLAYDTIMVFPDQFKRHILPDKVHILNVSFLVPRMRREFGGCAGNIAYNLHLLGGAPIPMGTVGQDFGPYREHFETLGIDLSRVKIIDDLFTPQAFITTDHDHNQITAFHPGAMMRSYENHVRDVPGVTLGLVGPDGREGMIQNAEEFAAGGIPFIFDPGQAMPLFNGPELREFIEQADYVVVNDYESNLLQERTGWNEQDIVSRVQAYITTQGPKGALVHTPEKTYDIPPAHERRVVDPTGCGDAFRAGLIYGIQHNYDWLTIGRMGNLMGALKVEHPGTQNQRFDFAEFNDQFKQQFGYAL

SEQ ID NO: 331 - DNA, 969 bp, synthetic construct
  misc_feature 1..969: note = Variant of adenosine kinase
  source 1..969: mol_type = other DNA
atgcaccatcatcaccatcacgggggctccggcatgagtgcactgatttgcggttctttagcgtatgataccatcatggtgtttccggaccagttcaagaaccatattctgcccgataaggttcaccgcctcaatgtcagctttcttgtaccacgcatgcgtcgtgaatttggaggctgtgccggcaacattgcgtacaatctgcatctgttgggtggtgctccgatccctatgggaacggtgggccaagatttcggtccgtatcgcgagcacttcgaaactctgggcattgacttatcccgcgtcaagatcatcgatgatctgagtacaccgcaggccttcattaccaccgaccatgatcataaccagattacggcgtttcatccaggcgcaatgatgcgttcgtacgaaaatcacgttcgtgatgtgccgggtgttaccttgggcctcgtaggtcctgatggacgcgagggcatgatccaaaatgccgaagaatttgctgctggtggcattccgttcatttttgacccaggtcaggcaatgccgctgttcaacggccccgaactgcgcgagtttatcgaacaggcggactatgtggtggtcaacgattacgaaagcaatcttcttcaagaacgtactggctggaacgagcaggacattgtttcacgcgtgcaggcgtatatcaccacgcaaggtcctaaaggagccctggtacatacaccggagaagacctacgatattccgccggcacacgaacgtcgtgtcgttgatccaactggttgcggcgacgcgtttcgcgccggcctgatctatggtattcagcataattatgattggttgaccattggccgcatgggaaacttaatgggtgcgctgaaagtggaacaccctggcacgcaaaatcagcgtttcgattttgccgaattcaacgaccagttcaaacaaagctttggctacgcgctctaatga

SEQ ID NO: 332 - protein, 321 aa, synthetic construct
  REGION 1..321: note = Variant of adenosine kinase
MHHHHHHGGSGMSALICGSLAYDTIMVFPDQFKNHILPDKVHRLNVSFLVPRMRREFGGCAGNIAYNLHLLGGAPIPMGTVGQDFGPYREHFETLGIDLSRVKIIDDLSTPQAFITTDHDHNQITAFHPGAMMRSYENHVRDVPGVTLGLVGPDGREGMIQNAEEFAAGGIPFIFDPGQAMPLFNGPELREFIEQADYVVVNDYESNLLQERTGWNEQDIVSRVQAYITTQGPKGALVHTPEKTYDIPPAHERRVVDPTGCGDAFRAGLIYGIQHNYDWLTIGRMGNLMGALKVEHPGTQNQRFDFAEFNDQFKQSFGYAL

SEQ ID NO: 333 - DNA, 969 bp, synthetic construct
  misc_feature 1..969: note = Variant of adenosine kinase
  source 1..969: mol_type = other DNA
atgcaccatcatcaccatcacgggggctccggcatgagtgcactgatttgcggttctttagcgtatgataccatcatggtgtttccggaccagttcaagaaacatattctgtgcgataaagttcacatcctcaatgtcagctttcttgtaccacgcatgcgtcgtgaatttggaggctgtgccggcaacattgcgtacaatctgcatctgttgggtggtgctccgatccctatgggaacggtgggccaagatttcggtccgtatcgcgagcacttcgaaactctgggcattgacttatcccgcgtcaagatcatcgatgatctgtttacaccgcaggccttcattatgaccgaccatgatcataaccagattacggcgtttcatccaggcgcaatgatgcgttcgtacgaaaatcacgttcgtgatgtgccgggtgttaccttgggcctcgtaggtcctgatggacgcgagggcatgatccaaaatgccgaagaatttgctgctggtggcattccgttcatttttgacccaggtcaggcaatgccgctgttcaacggccccgaactgcgcgagtttatcgaacaggcggactatgtggtggtcaacgattacgaaagcaatcttcttcaagaacgtactggctggaacgagcaggacattgtttcacgcgtgcaggcgtatatcaccacgcaaggtcctaaaggagccctggtacatacaccggagaagacctacgatattccgccggcacacgaacctcgtgtcgttgatccaactggttgcggcgacgcgtttcgcgccggcctgatctatggtattcagcataattatgattggttgaccattggccgcatgggaaacttaatgggtgcgctgaaagtggaacaccctggcacgcaaaatcagcgtttcgattttgccgaattcaacgaccagttcaaacaacagtttggctacgcgctctaatga

SEQ ID NO: 334 - protein, 321 aa, synthetic construct
  REGION 1..321: note = Variant of adenosine kinase
MHHHHHHGGSGMSALICGSLAYDTIMVFPDQFKKHILCDKVHILNVSFLVPRMRREFGGCAGNIAYNLHLLGGAPIPMGTVGQDFGPYREHFETLGIDLSRVKIIDDLFTPQAFIMTDHDHNQITAFHPGAMMRSYENHVRDVPGVTLGLVGPDGREGMIQNAEEFAAGGIPFIFDPGQAMPLFNGPELREFIEQADYVVVNDYESNLLQERTGWNEQDIVSRVQAYITTQGPKGALVHTPEKTYDIPPAHEPRVVDPTGCGDAFRAGLIYGIQHNYDWLTIGRMGNLMGALKVEHPGTQNQRFDFAEFNDQFKQQFGYAL

SEQ ID NO: 335 - DNA, 969 bp, synthetic construct
  misc_feature 1..969: note = Variant of adenosine kinase
  source 1..969: mol_type = other DNA
atgcaccatcatcaccatcacgggggctccggcatgagtgcactgatttgcggttctttagcgtatgataccatcatggtgtttccggaccagttcaagaaccatattctgcctgataaagttcacatcctcaatgtcagctttcttgtaccacgcatgcgtcgtgaatttggaggctgtgccggcaacattgcgtacaatctgcatctgttgggtggtgctccgatccctatgggaacggtgggccaagatttcggtccgtatcgcgagcacttcgaaactctgggcattgacttatcccgcgtcaagatcatcgatgatctgtttacaccgcaggccttcattaccaccgaccatgatcataaccagattacggcgtttcatccaggcgcaatgatgcgttcgtacgaaaatcacgttcgtgatgtgccgggtgttaccttgggcctcgtaggtcctgatggacgcgagggcatgatccaaaatgccgaagaatttgctgctggtggcattccgttcatttttgacccaggtcaggcaatgccgctgttcaacggccccgaactgcgcgagtttatcgaacaggcggactatgtggtggtcaacgattacgaaagcaatctgcttcaggaacgtactggctggaacgagcaggacattgtttcacgcgtgcaggcgtatatcaccacgcaaggtcctaaaggagccctggtacatacaccggagaagacctacgatattcctccggcacacgaacctcgtgtcgttgatccaactggttgcggcgacgcgtttcgcgccggcctgatctatggtattcagcataattatgattggttgaccattggccgcatgggaaacttaatgggtgcgctgaaagtggaacaccctggcacgcaaaatcagcgtttcgattttgccttcttcaacgaccagttcaaacaacagtttggctacgcgctctaatga

SEQ ID NO: 336 - protein, 321 aa, synthetic construct
  REGION 1..321: note = Variant of adenosine kinase
MHHHHHHGGSGMSALICGSLAYDTIMVFPDQFKNHILPDKVHILNVSFLVPRMRREFGGCAGNIAYNLHLLGGAPIPMGTVGQDFGPYREHFETLGIDLSRVKIIDDLFTPQAFITTDHDHNQITAFHPGAMMRSYENHVRDVPGVTLGLVGPDGREGMIQNAEEFAAGGIPFIFDPGQAMPLFNGPELREFIEQADYVVVNDYESNLLQERTGWNEQDIVSRVQAYITTQGPKGALVHTPEKTYDIPPAHEPRVVDPTGCGDAFRAGLIYGIQHNYDWLTIGRMGNLMGALKVEHPGTQNQRFDFAFFNDQFKQQFGYAL

SEQ ID NO: 337 - DNA, 969 bp, synthetic construct
  misc_feature 1..969: note = Variant of adenosine kinase
  source 1..969: mol_type = other DNA
atgcaccatcatcaccatcacgggggctccggcatgagtgcactgatttgcggttctttagcgtatgataccatcatggtgtttccggaccagttcaagcgtcatattctgcctgataaagttcacatcctcaatgtcagctttcttgtaccacgcatgcgtcgtgaatttggaggctgtgccggcaacattgcgtacaatctgcatctgttgggtggtgctccgatccctatgggaacggtgggccaagatttcggtccgtatcgcgagcacttcgaaactctgggcattgacttatcccgcgtccgtatcatcgatgatctgtttacaccgcaggccttcattatgaccgaccatgatcataaccagattacggcgtttcatccaggcgcaatgatgcgttcgtacgaaaatcacgttcgtgatgtgccgggtgttaccttgggcctcgtaggtcctgatggacgcgagggcatgatccaaaatgccgaagaatttgctgctggtggcattccgttcatttttgacccaggtcaggcaatgccgctgttcaacggccccgaactgcgcgagtttatcgaacaggcggactatgtggtggtcaacgattacgaaagcaatgtgcttcaggaacgtactggctggaacgagcaggacattgtttcacgcgtgcaggcgtatatcaccacgcaaggtcctaaaggagccctggtacatacaccggagaagacctacgatattcgtccggcacacgaacctcgtgtcgttgatccaactggttgcggcgacgcgtttcgcgccggcctgatctatggtattcagcataattatgattggttgaccattggccgcatgggaaacttaatgggtgcgctgaaagtggaacaccctggcacgcaaaatcagcgtttcgattttgccgaattcaacgaccagttcaaacaacagtttggctacgcgctctaatga

SEQ ID NO: 338 - protein, 321 aa, synthetic construct
  REGION 1..321: note = Variant of adenosine kinase
MHHHHHHGGSGMSALICGSLAYDTIMVFPDQFKRHILPDKVHILNVSFLVPRMRREFGGCAGNIAYNLHLLGGAPIPMGTVGQDFGPYREHFETLGIDLSRVRIIDDLFTPQAFIMTDHDHNQITAFHPGAMMRSYENHVRDVPGVTLGLVGPDGREGMIQNAEEFAAGGIPFIFDPGQAMPLFNGPELREFIEQADYVVVNDYESNVLQERTGWNEQDIVSRVQAYITTQGPKGALVHTPEKTYDIRPAHEPRVVDPTGCGDAFRAGLIYGIQHNYDWLTIGRMGNLMGALKVEHPGTQNQRFDFAEFNDQFKQQFGYAL

SEQ ID NO: 339 - DNA, 969 bp, synthetic construct
  misc_feature 1..969: note = Variant of adenosine kinase
  source 1..969: mol_type = other DNA
atgcaccatcatcaccatcacgggggctccggcatgagtgcactgatttgcggttctttagcgtatgataccatcatggtgtttccggaccagttcaagaaccatattctgcctgataaagttcacatcctcaatgtcagctttcttgtaccacgcatgcgtcgtgaatttggaggctgtgccggcaacattgcgtacaatctgcatctgttgggtggtgctccgatccctatgggaacggtgggccaagatttcggtccgtatcgcgagcacttcgaaactctgggcattgacttatcccgcgtcaagatcatcgatgatctgtttacaccgcaggccttcattatgaccgaccatgatcataaccagattacggcgtttcatccaggcgcaatgatgcgttcgtacgaaaatcacgttcgtgatgtgccgggtgttaccttgggcctcgtaggtcctgatggacgcgagggcatgatccaaaatgccgaagaatttgctgctggtggcattccgttcatttttgacccaggtcaggcaatgccgctgttcaacggccccgaactgcgcgagtttatcgaacaggcggactatgtggtggtcaacgattacgaaagcaatcttcttcaagaacgtactggctggaacgagcaggacattgtttcacgcgtgcaggcgtatatcaccacgcaaggtcctaaaggagccctggtacatacaccggagaagacctacgatattccgccggcacacgaacctcgtgtcgttgatccaactggttgcggcgacgcgtttcgcgccggcctgatctatggtattcagcataattatgattggttgaccattggccgcatgggaaacttaatgggtgcgctgaaagtggaacaccctggcacgcaaaatcagcgtttcgattttgccgagttcaacgaccagttcaaacaacagtttggctacgcgctctaatga

SEQ ID NO: 340 - protein, 321 aa, synthetic construct
  REGION 1..321: note = Variant of adenosine kinase
MHHHHHHGGSGMSALICGSLAYDTIMVFPDQFKNHILPDKVHILNVSFLVPRMRREFGGCAGNIAYNLHLLGGAPIPMGTVGQDFGPYREHFETLGIDLSRVKIIDDLFTPQAFIMTDHDHNQITAFHPGAMMRSYENHVRDVPGVTLGLVGPDGREGMIQNAEEFAAGGIPFIFDPGQAMPLFNGPELREFIEQADYVVVNDYESNLLQERTGWNEQDIVSRVQAYITTQGPKGALVHTPEKTYDIPPAHEPRVVDPTGCGDAFRAGLIYGIQHNYDWLTIGRMGNLMGALKVEHPGTQNQRFDFAEFNDQFKQQFGYAL

SEQ ID NO: 341 - DNA, 969 bp, synthetic construct
  misc_feature 1..969: note = Variant of adenosine kinase
  source 1..969: mol_type = other DNA
atgcaccatcatcaccatcacgggggctccggcatgagtgcactgatttgcggttctttagcgtatgataccatcatggtgtttccggaccagttcaagaaccatattctgcccgataaagttcacatcctcaatgtcagctttcttgtaccacgcatgcgtcgtgaatttggaggctgtgccggcaacattgcgtacaatctgcatctgttgggtggtgctccgatccctatgggaacggtgggccaagatttcggtccgtatcgcgagcacttcgaaactctgggcattgacttatcccgcgtcaagatcatcgatgatctgagtacagcgcaggccttcattaccaccgaccatgatcataaccagattacggcgtttcatccaggcgcaatgatgcgttcgtacgaaaatcacgttcgtgatgtgccgggtgttaccttgggcctcgtaggtcctgatggacgcgagggcatgatccaaaatgccgaagaatttgctgctggtggcattccgttcatttttgacccaggtcaggcaatgccgctgttcaacggccccgaactgcgcgagtttatcgaacaggcggactatgtggtggtcaacgattacgaaagcaatcttcttcaagaacgtactggctggaacgagcaggacattgtttcacgcgtgcaggcgtatatcaccacgcaaggttcgaaaggagccctggtacatacaccggagaagacctacgatattccgccggcacacgaacgtcgtgtcgttgatccaactggttgcggcgacgcgtttcgcgccggcctgatctatggtattcagcataattatgattggttgaccattggccgcatgggaaacttaatgggtgcgctgaaagtggaacaccctggcacgcaaaatcagcgtttcgattttgccgaattcaacgaccagttcaaacaagattttggctacgcgctctaatga

SEQ ID NO: 342 - protein, 321 aa, synthetic construct
  REGION 1..321: note = Variant of adenosine kinase
MHHHHHHGGSGMSALICGSLAYDTIMVFPDQFKNHILPDKVHILNVSFLVPRMRREFGGCAGNIAYNLHLLGGAPIPMGTVGQDFGPYREHFETLGIDLSRVKIIDDLSTAQAFITTDHDHNQITAFHPGAMMRSYENHVRDVPGVTLGLVGPDGREGMIQNAEEFAAGGIPFIFDPGQAMPLFNGPELREFIEQADYVVVNDYESNLLQERTGWNEQDIVSRVQAYITTQGSKGALVHTPEKTYDIPPAHERRVVDPTGCGDAFRAGLIYGIQHNYDWLTIGRMGNLMGALKVEHPGTQNQRFDFAEFNDQFKQDFGYAL

SEQ ID NO: 343 - DNA, 969 bp, synthetic construct
  misc_feature 1..969: note = Variant of adenosine kinase
  source 1..969: mol_type = other DNA
atgcaccatcatcaccatcacgggggctccggcatgagtgcactgatttgcggttctttagcgtatgataccatcatggtgtttccggaccagttcaagaaccatattctgcccgataaagttcaccgcctcaatgtcagctttcttgtaccacgcatgcgtcgtgaatttggaggctgtgccggcaacattgcgtacaatctgcatctgttgggtggtgctccgatccctatgggaacggtgggccaagatttcggtccgtatcgcgagcacttcgaaactctgggcattgacttatcccgcgtcaagatcatcgatgatctgttcacagcgcaggccttcattaccaccgaccatgatcataaccagattacggcgtttcatccaggggcaatgatgcgttcgtacgaaaatcacgttcgtgatgtgccgggtgttaccttgggcctcgtaggtcctgatggacgcgagggcatgatccaaaatgccgaagaatttgctgctggtggcattccgttcatttttgacccaggtcaggcactgccgctgttcaacggccccgaactgcgcgagtttatcgaacaggcggactatgtggtggtcaacgattacgaaagcaatcttcttcaagaacgtactggctggaacgagcaggacattgtttcacgcgtgcaggcgtatatcaccacgcaaggtcctaaaggagccctggtacatacaccggagaagacctacgatattccgccggcacacgaacgtcgtgtcgttgatccaactggttgcggcgacgcgtttcgcgccggcctgatctatggtattcagcataattatgattggttgaccattggccgcatgggaaacttaatgggtgcgctgaaagtggaacaccctggcacgcaaaatcagcgtttcgattttgccgaattcaacgaccagttcaaacaagaatttggctacgcgctctaatga

SEQ ID NO: 344 - protein, 321 aa, synthetic construct
  REGION 1..321: note = Variant of adenosine kinase
MHHHHHHGGSGMSALICGSLAYDTIMVFPDQFKNHILPDKVHRLNVSFLVPRMRREFGGCAGNIAYNLHLLGGAPIPMGTVGQDFGPYREHFETLGIDLSRVKIIDDLFTAQAFITTDHDHNQITAFHPGAMMRSYENHVRDVPGVTLGLVGPDGREGMIQNAEEFAAGGIPFIFDPGQALPLFNGPELREFIEQADYVVVNDYESNLLQERTGWNEQDIVSRVQAYITTQGPKGALVHTPEKTYDIPPAHERRVVDPTGCGDAFRAGLIYGIQHNYDWLTIGRMGNLMGALKVEHPGTQNQRFDFAEFNDQFKQEFGYAL

SEQ ID NO: 345 - DNA, 969 bp, synthetic construct
  misc_feature 1..969: note = Variant of adenosine kinase
  source 1..969: mol_type = other DNA
atgcaccatcatcaccatcacgggggctccggcatgagtgcactgatttgcggttctttagcgtatgataccatcatggtgtttccggaccagttcaagcgtcatattctgcctgataaagttcacatcctcaatgtcagctttcttgtaccacgcatgcgtcgtgaatttggaggctgtgccggcaacattgcgtacaatctgcatctgttgggtggtgctccgatccctatgggaacggtgggccaagatttcggtccgtatcgcgagcacttcgaaactctgggcattgacttatcccgcgtcaagatcatcgatgatctgtttacaccgcaggccttcattaccaccgaccatgatcataaccagattacggcgtttcatccaggcgcaatgatgcgttcgtacgaaaatcacgttcgtgatgtgccgggtgttaccttgggcctcgtaggtcctgatggacgcgagggcatgatccaaaatgccgaagaatttgctgctggtggcattccgttcatttttgacccaggtcaggcaatgccgctgttcaacggccccgaactgcgcgagtttatcgaacaggcggactatgtggtggtcaacgattacgaaagcaatgtgcttcagacccgtactggctggaacgagcaggacattgtttcacgcgtgcaggcgtatatcaccacgcaaggtcctaaaggagccctggtacatacaccggagaagacctacgatattcgtggtgcacacgaacgtcgtgtcgttgatccaactggttgcggcgacgcgtttcgcgccggcctgatctatggtattcagcataattatgattggttgaccattggccgcatgggaaacttaatgggtgcgctgaaagtggaacaccctggcacgcaaaatcagcgtttcgattttgccgaattcaacgaccagttcaaacaacagtttggctacgcgctctaatga

SEQ ID NO: 346 - protein, 321 aa, synthetic construct
  REGION 1..321: note = Variant of adenosine kinase
MHHHHHHGGSGMSALICGSLAYDTIMVFPDQFKRHILPDKVHILNVSFLVPRMRREFGGCAGNIAYNLHLLGGAPIPMGTVGQDFGPYREHFETLGIDLSRVKIIDDLFTPQAFITTDHDHNQITAFHPGAMMRSYENHVRDVPGVTLGLVGPDGREGMIQNAEEFAAGGIPFIFDPGQAMPLFNGPELREFIEQADYVVVNDYESNVLQTRTGWNEQDIVSRVQAYITTQGPKGALVHTPEKTYDIRGAHERRVVDPTGCGDAFRAGLIYGIQHNYDWLTIGRMGNLMGALKVEHPGTQNQRFDFAEFNDQFKQQFGYAL

SEQ ID NO: 347 - DNA, 969 bp, synthetic construct
  misc_feature 1..969: note = Variant of adenosine kinase
  source 1..969: mol_type = other DNA
atgcaccatcatcaccatcacgggggctccggcatgagtgcactgatttgcggttctttagcgtatgataccatcatggtgtttccggaccagttcaagaaccatattctgcccgatcgtgttcacatcctcaatgtcagctttcttgtaccacgcatgcgtcgtgaatttggaggctgtgccggcaacattgcgtacaatctgcatctgttgggtggtgctccgatccctatgggaacggtgggccaagatttcggtccgtatcgcgagcacttcgaaactctgggcattgacttatcccgcgtcaagatcatcgatgatctgagtacagcgcaggccttcattaccaccgaccatgatcataaccagattacggcgtttcatccaggggcaatgatgcgttcgtacgaaaatcacgttcgtgatgtgccgggtgttaccttgggcctcgtaggtcctgatggacgcgagggcatgatccaaaatgccgaagaatttgctgctggtggcattccgttcatttttgacccaggtcaggcaatgccgctgttcaacggccccgaactgcgcgagtttatcgaacaggcggactatgtggtggtcaacgattacgaaagcaatcttcttcaagaacgtactggctggaacgagcaggacattgtttcacgcgtgcaggcgtatatcaccacgcaaggtcctaaaggagccctggtacatacaccggagaagacctacgatattccgccggcacacgaacgtcgtgtcgttgatccaactggttgcggcgacgcgtttcgcgccggcctgatctatggtattcagcataattatgattggttgaccattggccgcatgggaaacttaatgggtgcgctgaaagtggaacaccctggcacgcaaaatcagcgtttcgattttgccgaattcaacgaccagttcaaacaagaatttggctacgcgctctaatga

SEQ ID NO: 348 - protein, 321 aa, synthetic construct
  REGION 1..321: note = Variant of adenosine kinase
MHHHHHHGGSGMSALICGSLAYDTIMVFPDQFKNHILPDRVHILNVSFLVPRMRREFGGCAGNIAYNLHLLGGAPIPMGTVGQDFGPYREHFETLGIDLSRVKIIDDLSTAQAFITTDHDHNQITAFHPGAMMRSYENHVRDVPGVTLGLVGPDGREGMIQNAEEFAAGGIPFIFDPGQAMPLFNGPELREFIEQADYVVVNDYESNLLQERTGWNEQDIVSRVQAYITTQGPKGALVHTPEKTYDIPPAHERRVVDPTGCGDAFRAGLIYGIQHNYDWLTIGRMGNLMGALKVEHPGTQNQRFDFAEFNDQFKQEFGYAL

SEQ ID NO: 349 - DNA, 969 bp, synthetic construct
  misc_feature 1..969: note = Variant of adenosine kinase
  source 1..969: mol_type = other DNA
atgcaccatcatcaccatcacgggggctccggcatgagtgcactgatttgcggttctttagcgtatgataccatcatggtgtttccggaccagttcaagcgtcatattctgtgcgataaagttcacatcctcaatgtcagctttcttgtaccacgcatgcgtcgtgaatttggaggctgtgccggcaacattgcgtacaatctgcatctgttgggtggtgctccgatccctatgggaacggtgggccaagatttcggtccgtatcgcgagcacttcgaaactctgggcattgacttatcccgcgtcaagatcatcgatgatctgtttacaccgcaggccttcattaccaccgaccatgatcataaccagattacggcgtttcatccaggcgcaatgatgcgttcgtacgaaaatcacgttcgtgatgtgccgggtgttaccttgggcctcgtaggtcctgatggacgcgagggcatgatccaaaatgccgaagaatttgctgctggtggcattccgttcatttttgacccaggtcaggcaatgccgctgttcaacggccccgaactgcgcgagtttatcgaacaggcggactatgtggtggtcaacgattacgaaagcaatcttcttcaagaacgtactggctggaacgagcaggacattgtttcacgcgtgcaggcgtatatcaccacgcaaggtcctaaaggagccctggtacatacaccggagaagacctacgatattccgccggcacacgaacgtcgtgtcgttgatccaactggttgcggcgacgcgtttcgcgccggcctgatctatggtattcagcataattatgattggttgaccattggccgcatgggaaacttaatgggtgcgctgaaagtggaacaccctggcacgcaaaatcagcgtttcgattttgccttcttcaacgaccagttcaaacaacagtttggctacgcgctctaatga

SEQ ID NO: 350 - protein, 321 aa, synthetic construct
  REGION 1..321: note = Variant of adenosine kinase
MHHHHHHGGSGMSALICGSLAYDTIMVFPDQFKRHILCDKVHILNVSFLVPRMRREFGGCAGNIAYNLHLLGGAPIPMGTVGQDFGPYREHFETLGIDLSRVKIIDDLFTPQAFITTDHDHNQITAFHPGAMMRSYENHVRDVPGVTLGLVGPDGREGMIQNAEEFAAGGIPFIFDPGQAMPLFNGPELREFIEQADYVVVNDYESNLLQERTGWNEQDIVSRVQAYITTQGPKGALVHTPEKTYDIPPAHERRVVDPTGCGDAFRAGLIYGIQHNYDWLTIGRMGNLMGALKVEHPGTQNQRFDFAFFNDQFKQQFGYAL

SEQ ID NO: 351 - DNA, 969 bp, synthetic construct
  misc_feature 1..969: note = Variant of adenosine kinase
  source 1..969: mol_type = other DNA
atgcaccatcatcaccatcacgggggctccggcatgagtgcactgatttgcggttctttagcgtatgataccatcatggtgtttccggaccagttcaagaaccatattctgcccgataaagttcacatcctcaatgtcagctttcttgtaccacgcatgcgtcgtgaatttggaggctgtgccggcaacattgcgtacaatctgcatctgttgggtggtgctccgatccctatgggaacggtgggccaagatttcggtccgtatcgcgagcacttcgaaactctgggcattgacttatcccgcgtcaagatcatcgatgatctgagtacagcgcaggccttcattaccaccgaccatgatcataaccagattacggcgtttcatccaggggcaatgatgcgttcgtacgaaaatcacgttcgtgatgtgccgggtgttaccttgggcctcgtaggtcctgatggacgcgagggcatgatccaaaatgccgaagaatttgctgctggtggcattccgttcatttttgacccaggtcaggcactgccgctgttcaacggccccgaactgcgcgagtttatcgaacaggcggactatgtggtggtcaacgattacgaaagcaatcttcttcaagaacgtactggctggaacgagcaggacattgtttcacgcgtgcaggcgtatatcaccacgcaaggtccgaaaggagccctggtacatacaccggagaagacctacgatattccgccggcacacgaacgtcgtgtcgttgatccaactggttgcggcgacgcgtttcgcgccggcctgatctatggtattcagcataattatgattggttgaccattggccgcatgggaaacttaatgggtgcgctgaaagtggaacaccctggcacgcaaaatcagcgtttcgattttgccgaattcaacgaccagttcaaacaacagtttggctacgcgctctaatga

SEQ ID NO: 352 - protein, 321 aa, synthetic construct
  REGION 1..321: note = Variant of adenosine kinase
MHHHHHHGGSGMSALICGSLAYDTIMVFPDQFKNHILPDKVHILNVSFLVPRMRREFGGCAGNIAYNLHLLGGAPIPMGTVGQDFGPYREHFETLGIDLSRVKIIDDLSTAQAFITTDHDHNQITAFHPGAMMRSYENHVRDVPGVTLGLVGPDGREGMIQNAEEFAAGGIPFIFDPGQALPLFNGPELREFIEQADYVVVNDYESNLLQERTGWNEQDIVSRVQAYITTQGPKGALVHTPEKTYDIPPAHERRVVDPTGCGDAFRAGLIYGIQHNYDWLTIGRMGNLMGALKVEHPGTQNQRFDFAEFNDQFKQQFGYAL

SEQ ID NO: 353 - DNA, 969 bp, synthetic construct
  misc_feature 1..969: note = Variant of adenosine kinase
  source 1..969: mol_type = other DNA
atgcaccatcatcaccatcacgggggctccggcatgagtgcactgatttgcggttctttagcgtatgataccatcatggtgtttccggaccagttcaagaaccatattctgcccgataaagttcacatcctcaatgtcagctttcttgtaccacgcatgcgtcgtgaatttggaggctgtgccggcaacattgcgtacaatctgcatctgttgggtggtgctccgatccctatgggaacggtgggccaagatttcggtccgtatcgcgagcacttcgaaactctgggcattgacttatcccgcgtcaagatcatcgatgatctgttcacagcgcaggccttcattaccaccgaccatgatcataaccagattacggcgtttcatccagcggcaatgatgcgttcgtacgaaaatcacgttcgtgatgtgccgggtgttaccttgggcctcgtaggtcctgatggacgcgagggcatgatccaaaatgccgaagaatttgctgctggtggcattccgttcatttttgacccaggtcaggcaatgccgctgttcaacggccccgaactgcgcgagtttatcgaacaggcggactatgtggtggtcaacgattacgaaagcaatcttcttcaagaacgtactggctggaacgagcaggacattgtttcacgcgtgcaggcgtatatcaccacgcaaggttcgaaaggagccctggtacatacaccggagaagacctacgatattccgccggcacacgaacgtcgtgtcgttgatccaactggttgcggcgacgcgtttcgcgccggcctgatctatggtattcagcataattatgattggttgaccattggccgcatgggaaacttaatgggtgcgctgaaagtggaacaccctggcacgcaaaatcagcgtttcgattttgccgaattcaacgaccagttcaaacaacagtttggctacgcgctctaatga

SEQ ID NO: 354 - protein, 321 aa, synthetic construct
  REGION 1..321: note = Variant of adenosine kinase
MHHHHHHGGSGMSALICGSLAYDTIMVFPDQFKNHILPDKVHILNVSFLVPRMRREFGGCAGNIAYNLHLLGGAPIPMGTVGQDFGPYREHFETLGIDLSRVKIIDDLFTAQAFITTDHDHNQITAFHPAAMMRSYENHVRDVPGVTLGLVGPDGREGMIQNAEEFAAGGIPFIFDPGQAMPLFNGPELREFIEQADYVVVNDYESNLLQERTGWNEQDIVSRVQAYITTQGSKGALVHTPEKTYDIPPAHERRVVDPTGCGDAFRAGLIYGIQHNYDWLTIGRMGNLMGALKVEHPGTQNQRFDFAEFNDQFKQQFGYAL

SEQ ID NO: 355 - DNA, 969 bp, synthetic construct
  misc_feature 1..969: note = Variant of adenosine kinase
  source 1..969: mol_type = other DNA
atgcaccatcatcaccatcacgggggctccggcatgagtgcactgatttgcggttctttagcgtatgataccatcatggtgtttccggaccagttcaagaaccatattctgcccgataaggttcacatcctcaatgtcagctttcttgtaccacgcatgcgtcgtgaatttggaggctgtgccggcaacattgcgtacaatctgcatctgttgggtggtgctccgatccctatgggaacggtgggccaagatttcggtccgtatcgcgagcacttcgaaactctgggcattgacttatcccgcgtcaagatcatcgatgatctgtttacaccgcaggccttcattaccaccgaccatgatcataaccagattacggcgtttcatccaggggcaatgatgcgttcgtacgaaaatcacgttcgtgatgtgccgggtgttaccttgggcctcgtaggtcctgatggacgcgagggcatgatccaaaatgccgaagaatttgctgctggtggcattccgttcatttttgacccaggtcaggcaatgccgctgttcaacggccccgaactgcgcgagtttatcgaacaggcggactatgtggtggtcaacgattacgaaagcaatcttcttcaagaacgtactggctggaacgagcaggacattgtttcacgcgtgcaggcgtatatcaccacgcaaggttcgaaaggagccctggtacatacaccggagaagacctacgatattccgccggcacacgaacgtcgtgtcgttgatccaactggttgcggcgacgcgtttcgcgccggcctgatctatggtattcagcataattatgattggttgaccattggccgcatgggaaacttaatgggtgcgctgaaagtggaacaccctggcacgcaaaatcagcgtttcgattttgccgaattcaacgaccagttcaaacaacagtttggctacgcgctctaatga

SEQ ID NO: 356 - protein, 321 aa, synthetic construct
  REGION 1..321: note = Variant of adenosine kinase
MHHHHHHGGSGMSALICGSLAYDTIMVFPDQFKNHILPDKVHILNVSFLVPRMRREFGGCAGNIAYNLHLLGGAPIPMGTVGQDFGPYREHFETLGIDLSRVKIIDDLFTPQAFITTDHDHNQITAFHPGAMMRSYENHVRDVPGVTLGLVGPDGREGMIQNAEEFAAGGIPFIFDPGQAMPLFNGPELREFIEQADYVVVNDYESNLLQERTGWNEQDIVSRVQAYITTQGSKGALVHTPEKTYDIPPAHERRVVDPTGCGDAFRAGLIYGIQHNYDWLTIGRMGNLMGALKVEHPGTQNQRFDFAEFNDQFKQQFGYAL

SEQ ID NO: 357 - DNA, 969 bp, synthetic construct
  misc_feature 1..969: note = Variant of adenosine kinase
  source 1..969: mol_type = other DNA
atgcaccatcatcaccatcacgggggctccggcatgagtgcactgatttgcggttctttagcgtatgataccatcatggtgtttccggaccagttcaagcgtcatattctgtgcgataaagttcacatcctcaatgtcagctttcttgtaccacgcatgcgtcgtgaatttggaggctgtgccggcaacattgcgtacaatctgcatctgttgggtggtgctccgatccctatgggaacggtgggccaagatttcggtccgtatcgcgagcacttcgaaactctgggcattgacttatcccgcgtcaagatcatcgatgatctgtttacaccgcaggccttcattatgaccgaccatgatcataaccagattacggcgtttcatccaggcgcaatgatgcgttcgtacgaaaatcacgttcgtgatgtgccgggtgttaccttgggcctcgtaggtcctgatggacgcgagggcatgatccaaaatgccgaagaatttgctgctggtggcattccgttcatttttgacccaggtcaggcaatgccgctgttcaacggccccgaactgcgcgagtttatcgaacaggcggactatgtggtggtcaacgattacgaaagcaatctgcttcaggaacgtactggctggaacgagcaggacattgtttcacgcgtgcaggcgtatatcaccacgcaaggtcctaaaggagccctggtacatacaccggagaagacctacgatattccgccggcacacgaacgtcgtgtcgttgatccaactggttgcggcgacgcgtttcgcgccggcctgatctatggtattcagcataattatgattggttgaccattggccgcatgggaaacttaatgggtgcgctgaaagtggaacaccctggcacgcaaaatcagcgtttcgattttgccttcttcaacgaccagttcaaacaacagtttggctacgcgctctaatga

SEQ ID NO: 358 - protein, 321 aa, synthetic construct
  REGION 1..321: note = Variant of adenosine kinase
MHHHHHHGGSGMSALICGSLAYDTIMVFPDQFKRHILCDKVHILNVSFLVPRMRREFGGCAGNIAYNLHLLGGAPIPMGTVGQDFGPYREHFETLGIDLSRVKIIDDLFTPQAFIMTDHDHNQITAFHPGAMMRSYENHVRDVPGVTLGLVGPDGREGMIQNAEEFAAGGIPFIFDPGQAMPLFNGPELREFIEQADYVVVNDYESNLLQERTGWNEQDIVSRVQAYITTQGPKGALVHTPEKTYDIPPAHERRVVDPTGCGDAFRAGLIYGIQHNYDWLTIGRMGNLMGALKVEHPGTQNQRFDFAFFNDQFKQQFGYAL

SEQ ID NO: 359 - DNA, 969 bp, synthetic construct
  misc_feature 1..969: note = Variant of adenosine kinase
  source 1..969: mol_type = other DNA
atgcaccatcatcaccatcacgggggctccggcatgagtgcactgatttgcggttctttagcgtatgataccatcatggtgtttccggaccagttcaagaaccatattctgcccgataaggttcacatcctcaatgtcagctttcttgtaccacgcatgcgtcgtgaatttggaggctgtgccggcaacattgcgtacaatctgcatctgttgggtggtgctccgatccctatgggaacggtgggccaagatttcggtccgtatcgcgagcacttcgaaactctgggcattgacttatcccgcgtcaagatcatcgatgatctgagtacaccgcaggccttcattaccaccgaccatgatcataaccagattacggcgtttcatccaggcgcaatgatgcgttcgtacgaaaatcacgttcgtgatgtgccgggtgttaccttgggcctcgtaggtcctgatggacgcgagggcatgatccaaaatgccgaagaatttgctgctggtggcattccgttcatttttgacccaggtcaggcaatgccgctgttcaacggccccgaactgcgcgagtttatcgaacaggcggactatgtggtggtcaacgattacgaaagcaatcttcttcaagaacgtactggctggaacgagcaggacattgtttcacgcgtgcaggcgtatatcaccacgcaaggttcgaaaggagccctggtacatacaccggagaagacctacgatattccgccggcacacgaacgtcgtgtcgttgatccaactggttgcggcgacgcgtttcgcgccggcctgatctatggtattcagcataattatgattggttgaccattggccgcatgggaaacttaatgggtgcgctgaaagtggaacaccctggcacgcaaaatcagcgtttcgattttgccgaattcaacgaccagttcaaacaacagtttggctacgcgctctaatga

SEQ ID NO: 360 - protein, 321 aa, synthetic construct
  REGION 1..321: note = Variant of adenosine kinase
MHHHHHHGGSGMSALICGSLAYDTIMVFPDQFKNHILPDKVHILNVSFLVPRMRREFGGCAGNIAYNLHLLGGAPIPMGTVGQDFGPYREHFETLGIDLSRVKIIDDLSTPQAFITTDHDHNQITAFHPGAMMRSYENHVRDVPGVTLGLVGPDGREGMIQNAEEFAAGGIPFIFDPGQAMPLFNGPELREFIEQADYVVVNDYESNLLQERTGWNEQDIVSRVQAYITTQGSKGALVHTPEKTYDIPPAHERRVVDPTGCGDAFRAGLIYGIQHNYDWLTIGRMGNLMGALKVEHPGTQNQRFDFAEFNDQFKQQFGYAL

SEQ ID NO: 361 - DNA, 969 bp, synthetic construct
  misc_feature 1..969: note = Variant of adenosine kinase
  source 1..969: mol_type = other DNA
atgcaccatcatcaccatcacgggggctccggcatgagtgcactgatttgcggttctttagcgtatgataccatcatggtgtttccggaccagttcaagaaccatattctgcccgatcgtgttcaccgcctcaatgtcagctttcttgtaccacgcatgcgtcgtgaatttggaggctgtgccggcaacattgcgtacaatctgcatctgttgggtggtgctccgatccctatgggaacggtgggccaagatttcggtccgtatcgcgagcacttcgaaactctgggcattgacttatcccgcgtcaagatcatcgatgatctgagtacagcgcaggccttcattaccaccgaccatgatcataaccagattacggcgtttcatccaggggcaatgatgcgttcgtacgaaaatcacgttcgtgatgtgccgggtgttaccttgggcctcgtaggtcctgatggacgcgagggcatgatccaaaatgccgaagaatttgctgctggtggcattccgttcatttttgacccaggtcaggcactgccgctgttcaacggccccgaactgcgcgagtttatcgaacaggcggactatgtggtggtcaacgattacgaaagcaatcttcttcaagaacgtactggctggaacgagcaggacattgtttcacgcgtgcaggcgtatatcaccacgcaaggttcgaaaggagccctggtacatacaccggagaagacctacgatattccgccggcacacgaacgtcgtgtcgttgatccaactggttgcggcgacgcgtttcgcgccggcctgatctatggtattcagcataattatgattggttgaccattggccgcatgggaaacttaatgggtgcgctgaaagtggaacaccctggcacgcaaaatcagcgtttcgattttgccgaattcaacgaccagttcaaacaaagctttggctacgcgctctaatga

SEQ ID NO: 362 - protein, 321 aa, synthetic construct
  REGION 1..321: note = Variant of adenosine kinase
MHHHHHHGGSGMSALICGSLAYDTIMVFPDQFKNHILPDRVHRLNVSFLVPRMRREFGGCAGNIAYNLHLLGGAPIPMGTVGQDFGPYREHFETLGIDLSRVKIIDDLSTAQAFITTDHDHNQITAFHPGAMMRSYENHVRDVPGVTLGLVGPDGREGMIQNAEEFAAGGIPFIFDPGQALPLFNGPELREFIEQADYVVVNDYESNLLQERTGWNEQDIVSRVQAYITTQGSKGALVHTPEKTYDIPPAHERRVVDPTGCGDAFRAGLIYGIQHNYDWLTIGRMGNLMGALKVEHPGTQNQRFDFAEFNDQFKQSFGYAL

SEQ ID NO: 363 - DNA, 969 bp, synthetic construct
  misc_feature 1..969: note = Variant of adenosine kinase
  source 1..969: mol_type = other DNA
atgcaccatcatcaccatcacgggggctccggcatgagtgcactgatttgcggttctttagcgtatgataccatcatggtgtttccggaccagttcaagaaccatattctgcccgataaagttcacatcctcaatgtcagctttcttgtaccacgcatgcgtcgtgaatttggaggctgtgccggcaacattgcgtacaatctgcatctgttgggtggtgctccgatccctatgggaacggtgggccaagatttcggtccgtatcgcgagcacttcgaaactctgggcattgacttatcccgcgtcaagatcatcgatgatctgagtacaccgcaggccttcattaccaccgaccatgatcataaccagattacggcgtttcatccagcggcaatgatgcgttcgtacgaaaatcacgttcgtgatgtgccgggtgttaccttgggcctcgtaggtcctgatggacgcgagggcatgatccaaaatgccgaagaatttgctgctggtggcattccgttcatttttgacccaggtcaggcactgccgctgttcaacggccccgaactgcgcgagtttatcgaacaggcggactatgtggtggtcaacgattacgaaagcaatcttcttcaagaacgtactggctggaacgagcaggacattgtttcacgcgtgcaggcgtatatcaccacgcaaggttcgaaaggagccctggtacatacaccggagaagacctacgatattccgccggcacacgaacgtcgtgtcgttgatccaactggttgcggcgacgcgtttcgcgccggcctgatctatggtattcagcataattatgattggttgaccattggccgcatgggaaacttaatgggtgcgctgaaagtggaacaccctggcacgcaaaatcagcgtttcgattttgccgaattcaacgaccagttcaaacaacagtttggctacgcgctctaatga

SEQ ID NO: 364 - protein, 321 aa, synthetic construct
  REGION 1..321: note = Variant of adenosine kinase
MHHHHHHGGSGMSALICGSLAYDTIMVFPDQFKNHILPDKVHILNVSFLVPRMRREFGGCAGNIAYNLHLLGGAPIPMGTVGQDFGPYREHFETLGIDLSRVKIIDDLSTPQAFITTDHDHNQITAFHPAAMMRSYENHVRDVPGVTLGLVGPDGREGMIQNAEEFAAGGIPFIFDPGQALPLFNGPELREFIEQADYVVVNDYESNLLQERTGWNEQDIVSRVQAYITTQGSKGALVHTPEKTYDIPPAHERRVVDPTGCGDAFRAGLIYGIQHNYDWLTIGRMGNLMGALKVEHPGTQNQRFDFAEFNDQFKQQFGYAL

SEQ ID NO: 365 - DNA, 969 bp, synthetic construct
  misc_feature 1..969: note = Variant of adenosine kinase
  source 1..969: mol_type = other DNA
atgcaccatcatcaccatcacgggggctccggcatgagtgcactgatttgcggttctttagcgtatgataccatcatggtgtttccggaccagttcaagaaacatattctgtgcgataaagttcacatcctcaatgtcagctttcttgtaccacgcatgcgtcgtgaatttggaggctgtgccggcaacattgcgtacaatctgcatctgttgggtggtgctccgatccctatgggaacggtgggccaagatttcggtccgtatcgcgagcacttcgaaactctgggcattgacttatcccgcgtcaagatcatcgatgatctgtttacaccgcaggccttcattaccaccgaccatgatcataaccagattacggcgtttcatccaggcgcaatgatgcgttcgtacgaaaatcacgttcgtgatgtgccgggtgttaccttgggcctcgtaggtcctgatggacgcgagggcatgatccaaaatgccgaagaatttgctgctggtggcattccgttcatttttgacccaggtcaggcaatgccgctgttcaacggccccgaactgcgcgagtttatcgaacaggcggactatgtggtggtcaacgattacgaaagcaatcttcttcaagaacgtactggctggaacgagcaggacattgtttcacgcgtgcaggcgtatatcaccacgcaaggtcctaaaggagccctggtacatacaccggagaagacctacgatattcctccggcacacgaacctcgtgtcgttgatccaactggttgcggcgacgcgtttcgcgccggcctgatctatggtattcagcataattatgattggttgaccattggccgcatgggaaacttaatgggtgcgctgaaagtggaacaccctggcacgcaaaatcagcgtttcgattttgccgagttcaacgaccagttcaaacaacagtttggctacgcgctctaatga

SEQ ID NO: 366 - protein, 321 aa, synthetic construct
  REGION 1..321: note = Variant of adenosine kinase
MHHHHHHGGSGMSALICGSLAYDTIMVFPDQFKKHILCDKVHILNVSFLVPRMRREFGGCAGNIAYNLHLLGGAPIPMGTVGQDFGPYREHFETLGIDLSRVKIIDDLFTPQAFITTDHDHNQITAFHPGAMMRSYENHVRDVPGVTLGLVGPDGREGMIQNAEEFAAGGIPFIFDPGQAMPLFNGPELREFIEQADYVVVNDYESNLLQERTGWNEQDIVSRVQAYITTQGPKGALVHTPEKTYDIPPAHEPRVVDPTGCGDAFRAGLIYGIQHNYDWLTIGRMGNLMGALKVEHPGTQNQRFDFAEFNDQFKQQFGYAL

SEQ ID NO: 367 - DNA, 969 bp, synthetic construct
  misc_feature 1..969: note = Variant of adenosine kinase
  source 1..969: mol_type = other DNA
atgcaccatcatcaccatcacgggggctccggcatgagtgcactgatttgcggttctttagcgtatgataccatcatggtgtttccggaccagttcaagaaccatattctgcccgataaagttcacatcctcaatgtcagctttcttgtaccacgcatgcgtcgtgaatttggaggctgtgccggcaacattgcgtacaatctgcatctgttgggtggtgctccgatccctatgggaacggtgggccaagatttcggtccgtatcgcgagcacttcgaaactctgggcattgacttatcccgcgtcaagatcatcgatgatctgtttacaccgcaggccttcattaccaccgaccatgatcataaccagattacggcgtttcatccaggcgcaatgatgcgttcgtacgaaaatcacgttcgtgatgtgccgggtgttaccttgggcctcgtaggtcctgatggacgcgagggcatgatccaaaatgccgaagaatttgctgctggtggcattccgttcatttttgacccaggtcaggcaatgccgctgttcaacggccccgaactgcgcgagtttatcgaacaggcggactatgtggtggtcaacgattacgaaagcaatcttcttcaagaacgtactggctggaacgagcaggacattgtttcacgcgtgcaggcgtatatcaccacgcaaggtcctaaaggagccctggtacatacaccggagaagacctacgatattcctccggcacacgaacctcgtgtcgttgatccaactggttgcggcgacgcgtttcgcgccggcctgatctatggtattcagcataattatgattggttgaccattggccgcatgggaaacttaatgggtgcgctgaaagtggaacaccctggcacgcaaaatcagcgtttcgattttgccgagttcaacgaccagttcaaacaacagtttggctacgcgctctaatga

SEQ ID NO: 368 - protein, 321 aa, synthetic construct
  REGION 1..321: note = Variant of adenosine kinase
MHHHHHHGGSGMSALICGSLAYDTIMVFPDQFKNHILPDKVHILNVSFLVPRMRREFGGCAGNIAYNLHLLGGAPIPMGTVGQDFGPYREHFETLGIDLSRVKIIDDLFTPQAFITTDHDHNQITAFHPGAMMRSYENHVRDVPGVTLGLVGPDGREGMIQNAEEFAAGGIPFIFDPGQAMPLFNGPELREFIEQADYVVVNDYESNLLQERTGWNEQDIVSRVQAYITTQGPKGALVHTPEKTYDIPPAHEPRVVDPTGCGDAFRAGLIYGIQHNYDWLTIGRMGNLMGALKVEHPGTQNQRFDFAEFNDQFKQQFGYAL

SEQ ID NO: 369 - DNA, 969 bp, synthetic construct
  misc_feature 1..969: note = Variant of adenosine kinase
  source 1..969: mol_type = other DNA
atgcaccatcatcaccatcacgggggctccggcatgagtgcactgatttgcggttctttagcgtatgataccatcatggtgtttccggaccagttcaagcgtcatattctgtgcgataaagttcacatcctcaatgtcagctttcttgtaccacgcatgcgtcgtgaatttggaggctgtgccggcaacattgcgtacaatctgcatctgttgggtggtgctccgatccctatgggaacggtgggccaagatttcggtccgtatcgcgagcacttcgaaactctgggcattgacttatcccgcgtccgtatcatcgatgatctgtttacaccgcaggccttcattaccaccgaccatgatcataaccagattacggcgtttcatccaggcgcaatgatgcgttcgtacgaaaatcacgttcgtgatgtgccgggtgttaccttgggcctcgtaggtcctgatggacgcgagggcatgatccaaaatgccgaagaatttgctgctggtggcattccgttcatttttgacccaggtcaggcaatgccgctgttcaacggccccgaactgcgcgagtttatcgaacaggcggactatgtggtggtcaacgattacgaaagcaatgtgcttcaggaacgtactggctggaacgagcaggacattgtttcacgcgtgcaggcgtatatcaccacgcaaggtcctaaaggagccctggtacatacaccggagaagacctacgatattcctagtgcacacgaacgtcgtgtcgttgatccaactggttgcggcgacgcgtttcgcgccggcctgatctatggtattcagcataattatgattggttgaccattggccgcatgggaaacttaatgggtgcgctgaaagtggaacaccctggcacgcaaaatcagcgtttcgattttgccgagttcaacgaccagttcaaacaacagtttggctacgcgctctaatga

SEQ ID NO: 370 - protein, 321 aa, synthetic construct
  REGION 1..321: note = Variant of adenosine kinase
MHHHHHHGGSGMSALICGSLAYDTIMVFPDQFKRHILCDKVHILNVSFLVPRMRREFGGCAGNIAYNLHLLGGAPIPMGTVGQDFGPYREHFETLGIDLSRVRIIDDLFTPQAFITTDHDHNQITAFHPGAMMRSYENHVRDVPGVTLGLVGPDGREGMIQNAEEFAAGGIPFIFDPGQAMPLFNGPELREFIEQADYVVVNDYESNVLQERTGWNEQDIVSRVQAYITTQGPKGALVHTPEKTYDIPSAHERRVVDPTGCGDAFRAGLIYGIQHNYDWLTIGRMGNLMGALKVEHPGTQNQRFDFAEFNDQFKQQFGYAL

SEQ ID NO: 371 - DNA, 969 bp, synthetic construct
  misc_feature 1..969: note = Variant of adenosine kinase
  source 1..969: mol_type = other DNA
atgcaccatcatcaccatcacgggggctccggcatgagtgcactgatttgcggttctttagcgtatgataccatcatggtgtttccggaccagttcaagaaccatattctgcctgataaagttcacatcctcaatgtcagctttcttgtaccacgcatgcgtcgtgaatttggaggctgtgccggcaacattgcgtacaatctgcatctgttgggtggtgctccgatccctatgggaacggtgggccaagatttcggtccgtatcgcgagcacttcgaaactctgggcattgacttatcccgcgtccgtatcatcgatgatctgtttacaccgcaggccttcattaccaccgaccatgatcataaccagattacggcgtttcatccaggcgcaatgatgcgttcgtacgaaaatcacgttcgtgatgtgccgggtgttaccttgggcctcgtaggtcctgatggacgcgagggcatgatccaaaatgccgaagaatttgctgctggtggcattccgttcatttttgacccaggtcaggcaatgccgctgttcaacggccccgaactgcgcgagtttatcgaacaggcggactatgtggtggtcaacgattacgaaagcaatgtgcttgaggaacgtactggctggaacgagcaggacattgtttcacgcgtgcaggcgtatatcaccacgcaaggtcctaaaggagccctggtacatacaccggagaagacctacgatattccgccggcacacgaacctcgtgtcgttgatccaactggttgcggcgacgcgtttcgcgccggcctgatctatggtattcagcataattatgattggttgaccattggccgcatgggaaacttaatgggtgcgctgaaagtggaacaccctggcacgcaaaatcagcgtttcgattttgccgagttcaacgaccagttcaaacaacagtttggctacgcgctctaatga

SEQ ID NO: 372 - protein, 321 aa, synthetic construct
  REGION 1..321: note = Variant of adenosine kinase
MHHHHHHGGSGMSALICGSLAYDTIMVFPDQFKNHILPDKVHILNVSFLVPRMRREFGGCAGNIAYNLHLLGGAPIPMGTVGQDFGPYREHFETLGIDLSRVRIIDDLFTPQAFITTDHDHNQITAFHPGAMMRSYENHVRDVPGVTLGLVGPDGREGMIQNAEEFAAGGIPFIFDPGQAMPLFNGPELREFIEQADYVVVNDYESNVLEERTGWNEQDIVSRVQAYITTQGPKGALVHTPEKTYDIPPAHEPRVVDPTGCGDAFRAGLIYGIQHNYDWLTIGRMGNLMGALKVEHPGTQNQRFDFAEFNDQFKQQFGYAL

SEQ ID NO: 373 - DNA, 969 bp, synthetic construct
  misc_feature 1..969: note = Variant of adenosine kinase
  source 1..969: mol_type = other DNA
atgcaccatcatcaccatcacgggggctccggcatgagtgcactgatttgcggttctttagcgtatgataccatcatggtgtttccggaccagttcaagaaccatattctgcccgataaggttcacatcctcaatgtcagctttcttgtaccacgcatgcgtcgtgaatttggaggctgtgccggcaacattgcgtacaatctgcatctgttgggtggtgctccgatccctatgggaacggtgggccaagatttcggtccgtatcgcgagcacttcgaaactctgggcattgacttatcccgcgtcaagatcatcgatgatctgtttacaccgcaggccttcattaccaccgaccatgatcataaccagattacggcgtttcatccagcggcaatgatgcgttcgtacgaaaatcacgttcgtgatgtgccgggtgttaccttgggcctcgtaggtcctgatggacgcgagggcatgatccaaaatgccgaagaatttgctgctggtggcattccgttcatttttgacccaggtcaggcactgccgctgttcaacggccccgaactgcgcgagtttatcgaacaggcggactatgtggtggtcaacgattacgaaagcaatcttcttcaagaacgtactggctggaacgagcaggacattgtttcacgcgtgcaggcgtatatcaccacgcaaggttcgaaaggagccctggtacatacaccggagaagacctacgatattccgccggcacacgaacgtcgtgtcgttgatccaactggttgcggcgacgcgtttcgcgccggcctgatctatggtattcagcataattatgattggttgaccattggccgcatgggaaacttaatgggtgcgctgaaagtggaacaccctggcacgcaaaatcagcgtttcgattttgccgaattcaacgaccagttcaaacaagattttggctacgcgctctaatga

SEQ ID NO: 374 - protein, 321 aa, synthetic construct
  REGION 1..321: note = Variant of adenosine kinase
MHHHHHHGGSGMSALICGSLAYDTIMVFPDQFKNHILPDKVHILNVSFLVPRMRREFGGCAGNIAYNLHLLGGAPIPMGTVGQDFGPYREHFETLGIDLSRVKIIDDLFTPQAFITTDHDHNQITAFHPAAMMRSYENHVRDVPGVTLGLVGPDGREGMIQNAEEFAAGGIPFIFDPGQALPLFNGPELREFIEQADYVVVNDYESNLLQERTGWNEQDIVSRVQAYITTQGSKGALVHTPEKTYDIPPAHERRVVDPTGCGDAFRAGLIYGIQHNYDWLTIGRMGNLMGALKVEHPGTQNQRFDFAEFNDQFKQDFGYAL

SEQ ID NO: 375 - DNA, 969 bp, synthetic construct
  misc_feature 1..969: note = Variant of adenosine kinase
  source 1..969: mol_type = other DNA
atgcaccatcatcaccatcacgggggctccggcatgagtgcactgatttgcggttctttagcgtatgataccatcatggtgtttccggaccagttcaagaaccatattctgcccgataaggttcacatcctcaatgtcagctttcttgtaccacgcatgcgtcgtgaatttggaggctgtgccggcaacattgcgtacaatctgcatctgttgggtggtgctccgatccctatgggaacggtgggccaagatttcggtccgtatcgcgagcacttcgaaactctgggcattgacttatcccgcgtcaagatcatcgatgatctgagtacagcgcaggccttcattaccaccgaccatgatcataaccagattacggcgtttcatccagcggcaatgatgcgttcgtacgaaaatcacgttcgtgatgtgccgggtgttaccttgggcctcgtaggtcctgatggacgcgagggcatgatccaaaatgccgaagaatttgctgctggtggcattccgttcatttttgacccaggtcaggcactgccgctgttcaacggccccgaactgcgcgagtttatcgaacaggcggactatgtggtggtcaacgattacgaaagcaatcttcttcaagaacgtactggctggaacgagcaggacattgtttcacgcgtgcaggcgtatatcaccacgcaaggttcgaaaggagccctggtacatacaccggagaagacctacgatattccgccggcacacgaacgtcgtgtcgttgatccaactggttgcggcgacgcgtttcgcgccggcctgatctatggtattcagcataattatgattggttgaccattggccgcatgggaaacttaatgggtgcgctgaaagtggaacaccctggcacgcaaaatcagcgtttcgattttgccgaattcaacgaccagttcaaacaacagtttggctacgcgctctaatga

SEQ ID NO: 376 - protein, 321 aa, synthetic construct
  REGION 1..321: note = Variant of adenosine kinase
MHHHHHHGGSGMSALICGSLAYDTIMVFPDQFKNHILPDKVHILNVSFLVPRMRREFGGCAGNIAYNLHLLGGAPIPMGTVGQDFGPYREHFETLGIDLSRVKIIDDLSTAQAFITTDHDHNQITAFHPAAMMRSYENHVRDVPGVTLGLVGPDGREGMIQNAEEFAAGGIPFIFDPGQALPLFNGPELREFIEQADYVVVNDYESNLLQERTGWNEQDIVSRVQAYITTQGSKGALVHTPEKTYDIPPAHERRVVDPTGCGDAFRAGLIYGIQHNYDWLTIGRMGNLMGALKVEHPGTQNQRFDFAEFNDQFKQQFGYAL

SEQ ID NO: 377 - DNA, 969 bp, synthetic construct
  misc_feature 1..969: note = Variant of adenosine kinase
  source 1..969: mol_type = other DNA
atgcaccatcatcaccatcacgggggctccggcatgagtgcactgatttgcggttctttagcgtatgataccatcatggtgtttccggaccagttcaagcgtcatattctgtgcgataaagttcacatcctcaatgtcagctttcttgtaccacgcatgcgtcgtgaatttggaggctgtgccggcaacattgcgtacaatctgcatctgttgggtggtgctccgatccctatgggaacggtgggccaagatttcggtccgtatcgcgagcacttcgaaactctgggcattgacttatcccgcgtcaagatcatcgatgatctgtttacaccgcaggccttcattaccaccgaccatgatcataaccagattacggcgtttcatccaggcgcaatgatgcgttcgtacgaaaatcacgttcgtgatgtgccgggtgttaccttgggcctcgtaggtcctgatggacgcgagggcatgatccaaaatgccgaagaatttgctgctggtggcattccgttcatttttgacccaggtcaggcaatgccgctgttcaacggccccgaactgcgcgagtttatcgaacaggcggactatgtggtggtcaacgattacgaaagcaatctgcttgagacccgtactggctggaacgagcaggacattgtttcacgcgtgcaggcgtatatcaccacgcaaggtcctaaaggagccctggtacatacaccggagaagacctacgatattccgccggcacacgaacctcgtgtcgttgatccaactggttgcggcgacgcgtttcgcgccggcctgatctatggtattcagcataattatgattggttgaccattggccgcatgggaaacttaatgggtgcgctgaaagtggaacaccctggcacgcaaaatcagcatttcgattttgccgagttcaacgaccagttcaaacaacagtttggctacgcgctctaatga

SEQ ID NO: 378 - protein, 321 aa, synthetic construct
  REGION 1..321: note = Variant of adenosine kinase
MHHHHHHGGSGMSALICGSLAYDTIMVFPDQFKRHILCDKVHILNVSFLVPRMRREFGGCAGNIAYNLHLLGGAPIPMGTVGQDFGPYREHFETLGIDLSRVKIIDDLFTPQAFITTDHDHNQITAFHPGAMMRSYENHVRDVPGVTLGLVGPDGREGMIQNAEEFAAGGIPFIFDPGQAMPLFNGPELREFIEQADYVVVNDYESNLLETRTGWNEQDIVSRVQAYITTQGPKGALVHTPEKTYDIPPAHEPRVVDPTGCGDAFRAGLIYGIQHNYDWLTIGRMGNLMGALKVEHPGTQNQHFDFAEFNDQFKQQFGYAL

SEQ ID NO: 379 - DNA, 969 bp, synthetic construct
  misc_feature 1..969: note = Variant of adenosine kinase
  source 1..969: mol_type = other DNA
atgcaccatcatcaccatcacgggggctccggcatgagtgcactgatttgcggttctttagcgtatgataccatcatggtgtttccggaccagttcaagaaccatattctgcctgataaagttcacatcctcaatgtcagctttcttgtaccacgcatgcgtcgtgaatttggaggctgtgccggcaacattgcgtacaatctgcatctgttgggtggtgctccgatccctatgggaacggtgggccaagatttcggtccgtatcgcgagcacttcgaaactctgggcattgacttatcccgcgtccgtatcatcgatgatctgtttacaccgcaggccttcattatgaccgaccatgatcataaccagattacggcgtttcatccaggcgcaatgatgcgttcgtacgaaaatcacgttcgtgatgtgccgggtgttaccttgggcctcgtaggtcctgatggacgcgagggcatgatccaaaatgccgaagaatttgctgctggtggcattccgttcatttttgacccaggtcaggcaatgccgctgttcaacggccccgaactgcgcgagtttatcgaacaggcggactatgtggtggtcaacgattacgaaagcaatgtgcttcaggaacgtactggctggaacgagcaggacattgtttcacgcgtgcaggcgtatatcaccacgcaaggtcctaaaggagccctggtacatacaccggagaagacctacgatattcctccggcacacgaacgtcgtgtcgttgatccaactggttgcggcgacgcgtttcgcgccggcctgatctatggtattcagcataattatgattggttgaccattggccgcatgggaaacttaatgggtgcgctgaaagtggaacaccctggcacgcaaaatcagcgtttcgattttgccgagttcaacgaccagttcaaacaacagtttggctacgcgctctaatga

SEQ ID NO: 380 - protein, 321 aa, synthetic construct
  REGION 1..321: note = Variant of adenosine kinase
MHHHHHHGGSGMSALICGSLAYDTIMVFPDQFKNHILPDKVHILNVSFLVPRMRREFGGCAGNIAYNLHLLGGAPIPMGTVGQDFGPYREHFETLGIDLSRVRIIDDLFTPQAFIMTDHDHNQITAFHPGAMMRSYENHVRDVPGVTLGLVGPDGREGMIQNAEEFAAGGIPFIFDPGQAMPLFNGPELREFIEQADYVVVNDYESNVLQERTGWNEQDIVSRVQAYITTQGPKGALVHTPEKTYDIPPAHERRVVDPTGCGDAFRAGLIYGIQHNYDWLTIGRMGNLMGALKVEHPGTQNQRFDFAEFNDQFKQQFGYAL

SEQ ID NO: 381 - DNA, 969 bp, synthetic construct
  misc_feature 1..969: note = Variant of adenosine kinase
  source 1..969: mol_type = other DNA
atgcaccatcatcaccatcacgggggctccggcatgagtgcactgatttgcggttctttagcgtatgataccatcatggtgtttccggaccagttcaagcgtcatattctgcctgataaagttcacatcctcaatgtcagctttcttgtaccacgcatgcgtcgtgaatttggaggctgtgccggcaacattgcgtacaatctgcatctgttgggtggtgctccgatccctatgggaacggtgggccaagatttcggtccgtatcgcgagcacttcgaaactctgggcattgacttatcccgcgtcaagatcatcgatgatctgtttacaccgcaggccttcattatgaccgaccatgatcataaccagattacggcgtttcatccaggcgcaatgatgcgttcgtacgaaaatcacgttcgtgatgtgccgggtgttaccttgggcctcgtaggtcctgatggacgcgagggcatgatccaaaatgccgaagaatttgctgctggtggcattccgttcatttttgacccaggtcaggcaatgccgctgttcaacggccccgaactgcgcgagtttatcgaacaggcggactatgtggtggtcaacgattacgaaagcaatcttcttcaagaacgtactggctggaacgagcaggacattgtttcacgcgtgcaggcgtatatcaccacgcaaggtcctaaaggagccctggtacatacaccggagaagacctacgatattcgtccggcacacaaacctcgtgtcgttgatccaactggttgcggcgacgcgtttcgcgccggcctgatctatggtattcagcataattatgattggttgaccattggccgcatgggaaacttaatgggtgcgctgaaagtggaacaccctggcacgcaaaatcagcgtttcgattttgccgaattcaacgaccagttcaaacaacagtttggctacgcgctctaatga

SEQ ID NO: 382 - protein, 321 aa, synthetic construct
  REGION 1..321: note = Variant of adenosine kinase
MHHHHHHGGSGMSALICGSLAYDTIMVFPDQFKRHILPDKVHILNVSFLVPRMRREFGGCAGNIAYNLHLLGGAPIPMGTVGQDFGPYREHFETLGIDLSRVKIIDDLFTPQAFIMTDHDHNQITAFHPGAMMRSYENHVRDVPGVTLGLVGPDGREGMIQNAEEFAAGGIPFIFDPGQAMPLFNGPELREFIEQADYVVVNDYESNLLQERTGWNEQDIVSRVQAYITTQGPKGALVHTPEKTYDIRPAHKPRVVDPTGCGDAFRAGLIYGIQHNYDWLTIGRMGNLMGALKVEHPGTQNQRFDFAEFNDQFKQQFGYAL

SEQ ID NO: 383 - DNA, 969 bp, synthetic construct
  misc_feature 1..969: note = Variant of adenosine kinase
  source 1..969: mol_type = other DNA
atgcaccatcatcaccatcacgggggctccggcatgagtgcactgatttgcggttctttagcgtatgataccatcatggtgtttccggaccagttcaagcgtcatattctgtgcgataaagttcacatcctcaatgtcagctttcttgtaccacgcatgcgtcgtgaatttggaggctgtgccggcaacattgcgtacaatctgcatctgttgggtggtgctccgatccctatgggaacggtgggccaagatttcggtccgtatcgcgagcacttcgaaactctgggcattgacttatcccgcgtccgtatcatcgatgatctgtttacaccgcaggccttcattaccaccgaccatgatcataaccagattacggcgtttcatccaggcgcaatgatgcgttcgtacgaaaatcacgttcgtgatgtgccgggtgttaccttgggcctcgtaggtcctgatggacgcgagggcatgatccaaaatgccgaagaatttgctgctggtggcattccgttcatttttgacccaggtcaggcaatgccgctgttcaacggccccgaactgcgcgagtttatcgaacaggcggactatgtggtggtcaacgattacgaaagcaatctgcttgagacccgtactggctggaacgagcaggacattgtttcacgcgtgcaggcgtatatcaccacgcaaggtcctaaaggagccctggtacatacaccggagaagacctacgatattcctggtgcacacgaacgtcgtgtcgttgatccaactggttgcggcgacgcgtttcgcgccggcctgatctatggtattcagcataattatgattggttgaccattggccgcatgggaaacttaatgggtgcgctgaaagtggaacaccctggcacgcaaaatcagcgtttcgattttgccgagttcaacgaccagttcaaacaacagtttggctacgcgctctaatga

SEQ ID NO: 384 - protein, 321 aa, synthetic construct
  REGION 1..321: note = Variant of adenosine kinase
MHHHHHHGGSGMSALICGSLAYDTIMVFPDQFKRHILCDKVHILNVSFLVPRMRREFGGCAGNIAYNLHLLGGAPIPMGTVGQDFGPYREHFETLGIDLSRVRIIDDLFTPQAFITTDHDHNQITAFHPGAMMRSYENHVRDVPGVTLGLVGPDGREGMIQNAEEFAAGGIPFIFDPGQAMPLFNGPELREFIEQADYVVVNDYESNLLETRTGWNEQDIVSRVQAYITTQGPKGALVHTPEKTYDIPGAHERRVVDPTGCGDAFRAGLIYGIQHNYDWLTIGRMGNLMGALKVEHPGTQNQRFDFAEFNDQFKQQFGYAL

SEQ ID NO: 385 - DNA, 969 bp, synthetic construct
  misc_feature 1..969: note = Variant of adenosine kinase
  source 1..969: mol_type = other DNA
atgcaccatcatcaccatcacgggggctccggcatgagtgcactgatttgcggttctttagcgtatgataccatcatggtgtttccggaccagttcaagaaccatattctgcccgatcgtgttcacatcctcaatgtcagctttcttgtaccacgcatgcgtcgtgaatttggaggctgtgccggcaacattgcgtacaatctgcatctgttgggtggtgctccgatccctatgggaacggtgggccaagatttcggtccgtatcgcgagcacttcgaaactctgggcattgacttatcccgcgtcaagatcatcgatgatctgtttacaccgcaggccttcattaccaccgaccatgatcataaccagattacggcgtttcatccaggggcaatgatgcgttcgtacgaaaatcacgttcgtgatgtgccgggtgttaccttgggcctcgtaggtcctgatggacgcgagggcatgatccaaaatgccgaagaatttgctgctggtggcattccgttcatttttgacccaggtcaggcaatgccgctgttcaacggccccgaactgcgcgagtttatcgaacaggcggactatgtggtggtcaacgattacgaaagcaatcttcttcaagaacgtactggctggaacgagcaggacattgtttcacgcgtgcaggcgtatatcaccacgcaaggttcgaaaggagccctggtacatacaccggagaagacctacgatattccgccggcacacgaacgtcgtgtcgttgatccaactggttgcggcgacgcgtttcgcgccggcctgatctatggtattcagcataattatgattggttgaccattggccgcatgggaaacttaatgggtgcgctgaaagtggaacaccctggcacgcaaaatcagcgtttcgattttgccgaattcaacgaccagttcaaacaaagctttggctacgcgctctaatga

SEQ ID NO: 386 - protein, 321 aa, synthetic construct
  REGION 1..321: note = Variant of adenosine kinase
MHHHHHHGGSGMSALICGSLAYDTIMVFPDQFKNHILPDRVHILNVSFLVPRMRREFGGCAGNIAYNLHLLGGAPIPMGTVGQDFGPYREHFETLGIDLSRVKIIDDLFTPQAFITTDHDHNQITAFHPGAMMRSYENHVRDVPGVTLGLVGPDGREGMIQNAEEFAAGGIPFIFDPGQAMPLFNGPELREFIEQADYVVVNDYESNLLQERTGWNEQDIVSRVQAYITTQGSKGALVHTPEKTYDIPPAHERRVVDPTGCGDAFRAGLIYGIQHNYDWLTIGRMGNLMGALKVEHPGTQNQRFDFAEFNDQFKQSFGYAL

SEQ ID NO: 387 - DNA, 969 bp, synthetic construct
  misc_feature 1..969: note = Variant of adenosine kinase
  source 1..969: mol_type = other DNA
atgcaccatcatcaccatcacgggggctccggcatgagtgcactgatttgcggttctttagcgtatgataccatcatggtgtttccggaccagttcaagcgtcatattctgtgcgataaagttcacatcctcaatgtcagctttcttgtaccacgcatgcgtcgtgaatttggaggctgtgccggcaacattgcgtacaatctgcatctgttgggtggtgctccgatccctatgggaacggtgggccaagatttcggtccgtatcgcgagcacttcgaaactctgggcattgacttatcccgcgtcaagatcatcgatgatctgtttacaccgcaggccttcattaccaccgaccatgatcataaccagattacggcgtttcatccaggcgcaatgatgcgttcgtacgaaaatcacgttcgtgatgtgccgggtgttaccttgggcctcgtaggtcctgatggacgcgagggcatgatccaaaatgccgaagaatttgctgctggtggcattccgttcatttttgacccaggtcaggcaatgccgctgttcaacggccccgaactgcgcgagtttatcgaacaggcggactatgtggtggtcaacgattacgaaagcaatcttcttcaagaacgtactggctggaacgagcaggacattgtttcacgcgtgcaggcgtatatcaccacgcaaggtcctaaaggagccctggtacatacaccggagaagacctacgatattccgccggcacacgaacgtcgtgtcgttgatccaactggttgcggcgacgcgtttcgcgccggcctgatctatggtattcagcataattatgattggttgaccattggccgcatgggaaacttaatgggtgcgctgaaagtggaacaccctggcacgcaaaatcagcgtttcgattttgccgagttcaacgaccagttcaaacaacagtttggctacgcgctctaatga

SEQ ID NO: 388 - protein, 321 aa, synthetic construct
  REGION 1..321: note = Variant of adenosine kinase
MHHHHHHGGSGMSALICGSLAYDTIMVFPDQFKRHILCDKVHILNVSFLVPRMRREFGGCAGNIAYNLHLLGGAPIPMGTVGQDFGPYREHFETLGIDLSRVKIIDDLFTPQAFITTDHDHNQITAFHPGAMMRSYENHVRDVPGVTLGLVGPDGREGMIQNAEEFAAGGIPFIFDPGQAMPLFNGPELREFIEQADYVVVNDYESNLLQERTGWNEQDIVSRVQAYITTQGPKGALVHTPEKTYDIPPAHERRVVDPTGCGDAFRAGLIYGIQHNYDWLTIGRMGNLMGALKVEHPGTQNQRFDFAEFNDQFKQQFGYAL

SEQ ID NO: 389 - DNA, 969 bp, synthetic construct
  misc_feature 1..969: note = Variant of adenosine kinase
  source 1..969: mol_type = other DNA
atgcaccatcatcaccatcacgggggctccggcatgagtgcactgatttgcggttctttagcgtatgataccatcatggtgtttccggaccagttcaagaaccatattctgcccgataaggttcacatcctcaatgtcagctttcttgtaccacgcatgcgtcgtgaatttggaggctgtgccggcaacattgcgtacaatctgcatctgttgggtggtgctccgatccctatgggaacggtgggccaagatttcggtccgtatcgcgagcacttcgaaactctgggcattgacttatcccgcgtcaagatcatcgatgatctgagtacaccgcaggccttcattaccaccgaccatgatcataaccagattacggcgtttcatccagcggcaatgatgcgttcgtacgaaaatcacgttcgtgatgtgccgggtgttaccttgggcctcgtaggtcctgatggacgcgagggcatgatccaaaatgccgaagaatttgctgctggtggcattccgttcatttttgacccaggtcaggcaatgccgctgttcaacggccccgaactgcgcgagtttatcgaacaggcggactatgtggtggtcaacgattacgaaagcaatcttcttcaagaacgtactggctggaacgagcaggacattgtttcacgcgtgcaggcgtatatcaccacgcaaggttcgaaaggagccctggtacatacaccggagaagacctacgatattccgccggcacacgaacgtcgtgtcgttgatccaactggttgcggcgacgcgtttcgcgccggcctgatctatggtattcagcataattatgattggttgaccattggccgcatgggaaacttaatgggtgcgctgaaagtggaacaccctggcacgcaaaatcagcgtttcgattttgccgaattcaacgaccagttcaaacaacagtttggctacgcgctctaatga

SEQ ID NO: 390 - protein, 321 aa, synthetic construct
  REGION 1..321: note = Variant of adenosine kinase
MHHHHHHGGSGMSALICGSLAYDTIMVFPDQFKNHILPDKVHILNVSFLVPRMRREFGGCAGNIAYNLHLLGGAPIPMGTVGQDFGPYREHFETLGIDLSRVKIIDDLSTPQAFITTDHDHNQITAFHPAAMMRSYENHVRDVPGVTLGLVGPDGREGMIQNAEEFAAGGIPFIFDPGQAMPLFNGPELREFIEQADYVVVNDYESNLLQERTGWNEQDIVSRVQAYITTQGSKGALVHTPEKTYDIPPAHERRVVDPTGCGDAFRAGLIYGIQHNYDWLTIGRMGNLMGALKVEHPGTQNQRFDFAEFNDQFKQQFGYAL

SEQ ID NO: 391 - DNA, 969 bp, synthetic construct
  misc_feature 1..969: note = Variant of adenosine kinase
  source 1..969: mol_type = other DNA
atgcaccatcatcaccatcacgggggctccggcatgagtgcactgatttgcggttctttagcgtatgataccatcatggtgtttccggaccagttcaagaaccatattctgcccgataaggttcacatcctcaatgtcagctttcttgtaccacgcatgcgtcgtgaatttggaggctgtgccggcaacattgcgtacaatctgcatctgttgggtggtgctccgatccctatgggaacggtgggccaagatttcggtccgtatcgcgagcacttcgaaactctgggcattgacttatcccgcgtcaagatcatcgatgatctgttcacagcgcaggccttcattaccaccgaccatgatcataaccagattacggcgtttcatccagcggcaatgatgcgttcgtacgaaaatcacgttcgtgatgtgccgggtgttaccttgggcctcgtaggtcctgatggacgcgagggcatgatccaaaatgccgaagaatttgctgctggtggcattccgttcatttttgacccaggtcaggcactgccgctgttcaacggccccgaactgcgcgagtttatcgaacaggcggactatgtggtggtcaacgattacgaaagcaatcttcttcaagaacgtactggctggaacgagcaggacattgtttcacgcgtgcaggcgtatatcaccacgcaaggttcgaaaggagccctggtacatacaccggagaagacctacgatattccgccggcacacgaacgtcgtgtcgttgatccaactggttgcggcgacgcgtttcgcgccggcctgatctatggtattcagcataattatgattggttgaccattggccgcatgggaaacttaatgggtgcgctgaaagtggaacaccctggcacgcaaaatcagcgtttcgattttgccgaattcaacgaccagttcaaacaaagctttggctacgcgctctaatga

SEQ ID NO: 392 - protein, 321 aa, synthetic construct
  REGION 1..321: note = Variant of adenosine kinase
MHHHHHHGGSGMSALICGSLAYDTIMVFPDQFKNHILPDKVHILNVSFLVPRMRREFGGCAGNIAYNLHLLGGAPIPMGTVGQDFGPYREHFETLGIDLSRVKIIDDLFTAQAFITTDHDHNQITAFHPAAMMRSYENHVRDVPGVTLGLVGPDGREGMIQNAEEFAAGGIPFIFDPGQALPLFNGPELREFIEQADYVVVNDYESNLLQERTGWNEQDIVSRVQAYITTQGSKGALVHTPEKTYDIPPAHERRVVDPTGCGDAFRAGLIYGIQHNYDWLTIGRMGNLMGALKVEHPGTQNQRFDFAEFNDQFKQSFGYAL

SEQ ID NO: 393 - DNA, 969 bp, synthetic construct
  misc_feature 1..969: note = Variant of adenosine kinase
  source 1..969: mol_type = other DNA
atgcaccatcatcaccatcacgggggctccggcatgagtgcactgatttgcggttctttagcgtatgataccatcatggtgtttccggaccagttcaagaaacatattctgtgcgataaagttcacatcctcaatgtcagctttcttgtaccacgcatgcgtcgtgaatttggaggctgtgccggcaacattgcgtacaatctgcatctgttgggtggtgctccgatccctatgggaacggtgggccaagatttcggtccgtatcgcgagcacttcgaaactctgggcattgacttatcccgcgtcaagatcatcgatgatctgtttacaccgcaggccttcattaccaccgaccatgatcataaccagattacggcgtttcatccaggcgcaatgatgcgttcgtacgaaaatcacgttcgtgatgtgccgggtgttaccttgggcctcgtaggtcctgatggacgcgagggcatgatccaaaatgccgaagaatttgctgctggtggcattccgttcatttttgacccaggtcaggcaatgccgctgttcaacggccccgaactgcgcgagtttatcgaacaggcggactatgtggtggtcaacgattacgaaagcaatcttcttcaggaacgtactggctggaacgagcaggacattgtttcacgcgtgcaggcgtatatcaccacgcaaggtcctaaaggagccctggtacatacaccggagaagacctacgatattcctggtgcacacgaacctcgtgtcgttgatccaactggttgcggcgacgcgtttcgcgccggcctgatctatggtattcagcataattatgattggttgaccattggccgcatgggaaacttaatgggtgcgctgaaagtggaacaccctggcacgcaaaatcagcgtttcgattttgccgagttcaacgaccagttcaaacaacagtttggctacgcgctctaatga

SEQ ID NO: 394 - protein, 321 aa, synthetic construct
  REGION 1..321: note = Variant of adenosine kinase
MHHHHHHGGSGMSALICGSLAYDTIMVFPDQFKKHILCDKVHILNVSFLVPRMRREFGGCAGNIAYNLHLLGGAPIPMGTVGQDFGPYREHFETLGIDLSRVKIIDDLFTPQAFITTDHDHNQITAFHPGAMMRSYENHVRDVPGVTLGLVGPDGREGMIQNAEEFAAGGIPFIFDPGQAMPLFNGPELREFIEQADYVVVNDYESNLLQERTGWNEQDIVSRVQAYITTQGPKGALVHTPEKTYDIPGAHEPRVVDPTGCGDAFRAGLIYGIQHNYDWLTIGRMGNLMGALKVEHPGTQNQRFDFAEFNDQFKQQFGYAL

SEQ ID NO: 395 - DNA, 969 bp, synthetic construct
  misc_feature 1..969: note = Variant of adenosine kinase
  source 1..969: mol_type = other DNA
atgcaccatcatcaccatcacgggggctccggcatgagtgcactgatttgcggttctttagcgtatgataccatcatggtgtttccggaccagttcaagaaacatattctgtgcgataaagttcacatcctcaatgtcagctttcttgtaccacgcatgcgtcgtgaatttggaggctgtgccggcaacattgcgtacaatctgcatctgttgggtggtgctccgatccctatgggaacggtgggccaagatttcggtccgtatcgcgagcacttcgaaactctgggcattgacttatcccgcgtcaagatcatcgatgatctgtttacaccgcaggccttcattaccaccgaccatgatcataaccagattacggcgtttcatccaggcgcaatgatgcgttcgtacgaaaatcacgttcgtgatgtgccgggtgttaccttgggcctcgtaggtcctgatggacgcgagggcatgatccaaaatgccgaagaatttgctgctggtggcattccgttcatttttgacccaggtcaggcaatgccgctgttcaacggccccgaactgcgcgagtttatcgaacaggcggactatgtggtggtcaacgattacgaaagcaatgtgcttcaggaacgtactggctggaacgagcaggacattgtttcacgcgtgcaggcgtatatcaccacgcaaggtcctaaaggagccctggtacatacaccggagaagacctacgatattcgtccggcacacgaacgtcgtgtcgttgatccaactggttgcggcgacgcgtttcgcgccggcctgatctatggtattcagcataattatgattggttgaccattggccgcatgggaaacttaatgggtgcgctgaaagtggaacaccctggcacgcaaaatcagcgtttcgattttgccgagttcaacgaccagttcaaacaacagtttggctacgcgctctaatga

SEQ ID NO: 396 - protein, 321 aa, synthetic construct
  REGION 1..321: note = Variant of adenosine kinase
MHHHHHHGGSGMSALICGSLAYDTIMVFPDQFKKHILCDKVHILNVSFLVPRMRREFGGCAGNIAYNLHLLGGAPIPMGTVGQDFGPYREHFETLGIDLSRVKIIDDLFTPQAFITTDHDHNQITAFHPGAMMRSYENHVRDVPGVTLGLVGPDGREGMIQNAEEFAAGGIPFIFDPGQAMPLFNGPELREFIEQADYVVVNDYESNVLQERTGWNEQDIVSRVQAYITTQGPKGALVHTPEKTYDIRPAHERRVVDPTGCGDAFRAGLIYGIQHNYDWLTIGRMGNLMGALKVEHPGTQNQRFDFAEFNDQFKQQFGYAL

SEQ ID NO: 397 - DNA, 969 bp, synthetic construct
  misc_feature 1..969: note = Variant of adenosine kinase
  source 1..969: mol_type = other DNA
atgcaccatcatcaccatcacgggggctccggcatgagtgcactgatttgcggttctttagcgtatgataccatcatggtgtttccggaccagttcaagaaccatattctgcccgatcgtgttcacatcctcaatgtcagctttcttgtaccacgcatgcgtcgtgaatttggaggctgtgccggcaacattgcgtacaatctgcatctgttgggtggtgctccgatccctatgggaacggtgggccaagatttcggtccgtatcgcgagcacttcgaaactctgggcattgacttatcccgcgtcaagatcatcgatgatctgagtacagcgcaggccttcattaccaccgaccatgatcataaccagattacggcgtttcatccaggggcaatgatgcgttcgtacgaaaatcacgttcgtgatgtgccgggtgttaccttgggcctcgtaggtcctgatggacgcgagggcatgatccaaaatgccgaagaatttgctgctggtggcattccgttcatttttgacccaggtcaggcactgccgctgttcaacggccccgaactgcgcgagtttatcgaacaggcggactatgtggtggtcaacgattacgaaagcaatcttcttcaagaacgtactggctggaacgagcaggacattgtttcacgcgtgcaggcgtatatcaccacgcaaggttcgaaaggagccctggtacatacaccggagaagacctacgatattccgccggcacacgaacgtcgtgtcgttgatccaactggttgcggcgacgcgtttcgcgccggcctgatctatggtattcagcataattatgattggttgaccattggccgcatgggaaacttaatgggtgcgctgaaagtggaacaccctggcacgcaaaatcagcgtttcgattttgccgaattcaacgaccagttcaaacaaagctttggctacgcgctctaatga

SEQ ID NO: 398 - protein, 321 aa, synthetic construct
  REGION 1..321: note = Variant of adenosine kinase
MHHHHHHGGSGMSALICGSLAYDTIMVFPDQFKNHILPDRVHILNVSFLVPRMRREFGGCAGNIAYNLHLLGGAPIPMGTVGQDFGPYREHFETLGIDLSRVKIIDDLSTAQAFITTDHDHNQITAFHPGAMMRSYENHVRDVPGVTLGLVGPDGREGMIQNAEEFAAGGIPFIFDPGQALPLFNGPELREFIEQADYVVVNDYESNLLQERTGWNEQDIVSRVQAYITTQGSKGALVHTPEKTYDIPPAHERRVVDPTGCGDAFRAGLIYGIQHNYDWLTIGRMGNLMGALKVEHPGTQNQRFDFAEFNDQFKQSFGYAL

SEQ ID NO: 399 - DNA, 969 bp, synthetic construct
  misc_feature 1..969: note = Variant of adenosine kinase
  source 1..969: mol_type = other DNA
atgcaccatcatcaccatcacgggggctccggcatgagtgcactgatttgcggttctttagcgtatgataccatcatggtgtttccggaccagttcaagaaccatattctgcccgataaagttcacatcctcaatgtcagctttcttgtaccacgcatgcgtcgtgaatttggaggctgtgccggcaacattgcgtacaatctgcatctgttgggtggtgctccgatccctatgggaacggtgggccaagatttcggtccgtatcgcgagcacttcgaaactctgggcattgacttatcccgcgtcaagatcatcgatgatctgtttacaccgcaggccttcattaccaccgaccatgatcataaccagattacggcgtttcatccagcggcaatgatgcgttcgtacgaaaatcacgttcgtgatgtgccgggtgttaccttgggcctcgtaggtcctgatggacgcgagggcatgatccaaaatgccgaagaatttgctgctggtggcattccgttcatttttgacccaggtcaggcaatgccgctgttcaacggccccgaactgcgcgagtttatcgaacaggcggactatgtggtggtcaacgattacgaaagcaatcttcttcaagaacgtactggctggaacgagcaggacattgtttcacgcgtgcaggcgtatatcaccacgcaaggtcctaaaggagccctggtacatacaccggagaagacctacgatattccgccggcacacgaacgtcgtgtcgttgatccaactggttgcggcgacgcgtttcgcgccggcctgatctatggtattcagcataattatgattggttgaccattggccgcatgggaaacttaatgggtgcgctgaaagtggaacaccctggcacgcaaaatcagcgtttcgattttgccgaattcaacgaccagttcaaacaaagctttggctacgcgctctaatga

SEQ ID NO: 400 - protein, 321 aa, synthetic construct
  REGION 1..321: note = Variant of adenosine kinase
MHHHHHHGGSGMSALICGSLAYDTIMVFPDQFKNHILPDKVHILNVSFLVPRMRREFGGCAGNIAYNLHLLGGAPIPMGTVGQDFGPYREHFETLGIDLSRVKIIDDLFTPQAFITTDHDHNQITAFHPAAMMRSYENHVRDVPGVTLGLVGPDGREGMIQNAEEFAAGGIPFIFDPGQAMPLFNGPELREFIEQADYVVVNDYESNLLQERTGWNEQDIVSRVQAYITTQGPKGALVHTPEKTYDIPPAHERRVVDPTGCGDAFRAGLIYGIQHNYDWLTIGRMGNLMGALKVEHPGTQNQRFDFAEFNDQFKQSFGYAL

SEQ ID NO: 401 - DNA, 969 bp, synthetic construct
  misc_feature 1..969: note = Variant of adenosine kinase
  source 1..969: mol_type = other DNA
atgcaccatcatcaccatcacgggggctccggcatgagtgcactgatttgcggttctttagcgtatgataccatcatggtgtttccggaccagttcaagaaccatattctgcccgatcgtgttcacatcctcaatgtcagctttcttgtaccacgcatgcgtcgtgaatttggaggctgtgccggcaacattgcgtacaatctgcatctgttgggtggtgctccgatccctatgggaacggtgggccaagatttcggtccgtatcgcgagcacttcgaaactctgggcattgacttatcccgcgtcaagatcatcgatgatctgtttacaccgcaggccttcattaccaccgaccatgatcataaccagattacggcgtttcatccaggggcaatgatgcgttcgtacgaaaatcacgttcgtgatgtgccgggtgttaccttgggcctcgtaggtcctgatggacgcgagggcatgatccaaaatgccgaagaatttgctgctggtggcattccgttcatttttgacccaggtcaggcaatgccgctgttcaacggccccgaactgcgcgagtttatcgaacaggcggactatgtggtggtcaacgattacgaaagcaatcttcttcaagaacgtactggctggaacgagcaggacattgtttcacgcgtgcaggcgtatatcaccacgcaaggtccgaaaggagccctggtacatacaccggagaagacctacgatattccgccggcacacgaacgtcgtgtcgttgatccaactggttgcggcgacgcgtttcgcgccggcctgatctatggtattcagcataattatgattggttgaccattggccgcatgggaaacttaatgggtgcgctgaaagtggaacaccctggcacgcaaaatcagcgtttcgattttgccgaattcaacgaccagttcaaacaaagctttggctacgcgctctaatga

SEQ ID NO: 402 - protein, 321 aa, synthetic construct
  REGION 1..321: note = Variant of adenosine kinase
MHHHHHHGGSGMSALICGSLAYDTIMVFPDQFKNHILPDRVHILNVSFLVPRMRREFGGCAGNIAYNLHLLGGAPIPMGTVGQDFGPYREHFETLGIDLSRVKIIDDLFTPQAFITTDHDHNQITAFHPGAMMRSYENHVRDVPGVTLGLVGPDGREGMIQNAEEFAAGGIPFIFDPGQAMPLFNGPELREFIEQADYVVVNDYESNLLQERTGWNEQDIVSRVQAYITTQGPKGALVHTPEKTYDIPPAHERRVVDPTGCGDAFRAGLIYGIQHNYDWLTIGRMGNLMGALKVEHPGTQNQRFDFAEFNDQFKQSFGYAL

SEQ ID NO: 403 - DNA, 969 bp, synthetic construct
  misc_feature 1..969: note = Variant of adenosine kinase
  source 1..969: mol_type = other DNA
atgcaccatcatcaccatcacgggggctccggcatgagtgcactgatttgcggttctttagcgtatgataccatcatggtgtttccggaccagttcaagaaccatattctgtgcgataaagttcacatcctcaatgtcagctttcttgtaccacgcatgcgtcgtgaatttggaggctgtgccggcaacattgcgtacaatctgcatctgttgggtggtgctccgatccctatgggaacggtgggccaagatttcggtccgtatcgcgagcacttcgaaactctgggcattgacttatcccgcgtcaagatcatcgatgatctgtttacaccgcaggccttcattatgaccgaccatgatcataaccagattacggcgtttcatccaggcgcaatgatgcgttcgtacgaaaatcacgttcgtgatgtgccgggtgttaccttgggcctcgtaggtcctgatggacgcgagggcatgatccaaaatgccgaagaatttgctgctggtggcattccgttcatttttgacccaggtcaggcaatgccgctgttcaacggccccgaactgcgcgagtttatcgaacaggcggactatgtggtggtcaacgattacgaaagcaatcttcttcaggaacgtactggctggaacgagcaggacattgtttcacgcgtgcaggcgtatatcaccacgcaaggtcctaaaggagccctggtacatacaccggagaagacctacgatattccgccggcacacgaacgtcgtgtcgttgatccaactggttgcggcgacgcgtttcgcgccggcctgatctatggtattcagcataattatgattggttgaccattggccgcatgggaaacttaatgggtgcgctgaaagtggaacaccctggcacgcaaaatcagcgtttcgattttgccgaattcaacgaccagttcaaacaacagtttggctacgcgctctaatga

SEQ ID NO: 404 - protein, 321 aa, synthetic construct
  REGION 1..321: note = Variant of adenosine kinase
MHHHHHHGGSGMSALICGSLAYDTIMVFPDQFKNHILCDKVHILNVSFLVPRMRREFGGCAGNIAYNLHLLGGAPIPMGTVGQDFGPYREHFETLGIDLSRVKIIDDLFTPQAFIMTDHDHNQITAFHPGAMMRSYENHVRDVPGVTLGLVGPDGREGMIQNAEEFAAGGIPFIFDPGQAMPLFNGPELREFIEQADYVVVNDYESNLLQERTGWNEQDIVSRVQAYITTQGPKGALVHTPEKTYDIPPAHERRVVDPTGCGDAFRAGLIYGIQHNYDWLTIGRMGNLMGALKVEHPGTQNQRFDFAEFNDQFKQQFGYAL

SEQ ID NO: 405 - DNA, 969 bp, synthetic construct
  misc_feature 1..969: note = Variant of adenosine kinase
  source 1..969: mol_type = other DNA
atgcaccatcatcaccatcacgggggctccggcatgagtgcactgatttgcggttctttagcgtatgataccatcatggtgtttccggaccagttcaagaaacatattctgtgcgataaagttcacatcctcaatgtcagctttcttgtaccacgcatgcgtcgtgaatttggaggctgtgccggcaacattgcgtacaatctgcatctgttgggtggtgctccgatccctatgggaacggtgggccaagatttcggtccgtatcgcgagcacttcgaaactctgggcattgacttatcccgcgtcaagatcatcgatgatctgtttacaccgcaggccttcattatgaccgaccatgatcataaccagattacggcgtttcatccaggcgcaatgatgcgttcgtacgaaaatcacgttcgtgatgtgccgggtgttaccttgggcctcgtaggtcctgatggacgcgagggcatgatccaaaatgccgaagaatttgctgctggtggcattccgttcatttttgacccaggtcaggcaatgccgctgttcaacggccccgaactgcgcgagtttatcgaacaggcggactatgtggtggtcaacgattacgaaagcaatctgcttcaggaacgtactggctggaacgagcaggacattgtttcacgcgtgcaggcgtatatcaccacgcaaggtcctaaaggagccctggtacatacaccggagaagacctacgatattcctccggcacacgaacgtcgtgtcgttgatccaactggttgcggcgacgcgtttcgcgccggcctgatctatggtattcagcataattatgattggttgaccattggccgcatgggaaacttaatgggtgcgctgaaagtggaacaccctggcacgcaaaatcagcgtttcgattttgccgaattcaacgaccagttcaaacaacagtttggctacgcgctctaatga

SEQ ID NO: 406 - protein, 321 aa, synthetic construct
  REGION 1..321: note = Variant of adenosine kinase
MHHHHHHGGSGMSALICGSLAYDTIMVFPDQFKKHILCDKVHILNVSFLVPRMRREFGGCAGNIAYNLHLLGGAPIPMGTVGQDFGPYREHFETLGIDLSRVKIIDDLFTPQAFIMTDHDHNQITAFHPGAMMRSYENHVRDVPGVTLGLVGPDGREGMIQNAEEFAAGGIPFIFDPGQAMPLFNGPELREFIEQADYVVVNDYESNLLQERTGWNEQDIVSRVQAYITTQGPKGALVHTPEKTYDIPPAHERRVVDPTGCGDAFRAGLIYGIQHNYDWLTIGRMGNLMGALKVEHPGTQNQRFDFAEFNDQFKQQFGYAL

SEQ ID NO: 407 - DNA, 969 bp, synthetic construct
  misc_feature 1..969: note = Variant of adenosine kinase
  source 1..969: mol_type = other DNA
atgcaccatcatcaccatcacgggggctccggcatgagtgcactgatttgcggttctttagcgtatgataccatcatggtgtttccggaccagttcaagaaccatattctgtgcgataaagttcacatcctcaatgtcagctttcttgtaccacgcatgcgtcgtgaatttggaggctgtgccggcaacattgcgtacaatctgcatctgttgggtggtgctccgatccctatgggaacggtgggccaagatttcggtccgtatcgcgagcacttcgaaactctgggcattgacttatcccgcgtcaagatcatcgatgatctgtttacaccgcaggccttcattatgaccgaccatgatcataaccagattacggcgtttcatccaggcgcaatgatgcgttcgtacgaaaatcacgttcgtgatgtgccgggtgttaccttgggcctcgtaggtcctgatggacgcgagggcatgatccaaaatgccgaagaatttgctgctggtggcattccgttcatttttgacccaggtcaggcaatgccgctgttcaacggccccgaactgcgcgagtttatcgaacaggcggactatgtggtggtcaacgattacgaaagcaatgtgcttgaggaacgtactggctggaacgagcaggacattgtttcacgcgtgcaggcgtatatcaccacgcaaggtcctaaaggagccctggtacatacaccggagaagacctacgatattcctggtgcacacgaacctcgtgtcgttgatccaactggttgcggcgacgcgtttcgcgccggcctgatctatggtattcagcataattatgattggttgaccattggccgcatgggaaacttaatgggtgcgctgaaagtggaacaccctggcacgcaaaatcagcgtttcgattttgccgagttcaacgaccagttcaaacaacagtttggctacgcgctctaatga

SEQ ID NO: 408 - protein, 321 aa, synthetic construct
  REGION 1..321: note = Variant of adenosine kinase
MHHHHHHGGSGMSALICGSLAYDTIMVFPDQFKNHILCDKVHILNVSFLVPRMRREFGGCAGNIAYNLHLLGGAPIPMGTVGQDFGPYREHFETLGIDLSRVKIIDDLFTPQAFIMTDHDHNQITAFHPGAMMRSYENHVRDVPGVTLGLVGPDGREGMIQNAEEFAAGGIPFIFDPGQAMPLFNGPELREFIEQADYVVVNDYESNVLEERTGWNEQDIVSRVQAYITTQGPKGALVHTPEKTYDIPGAHEPRVVDPTGCGDAFRAGLIYGIQHNYDWLTIGRMGNLMGALKVEHPGTQNQRFDFAEFNDQFKQQFGYAL

SEQ ID NO: 409 - DNA, 969 bp, synthetic construct
  misc_feature 1..969: note = Variant of adenosine kinase
  source 1..969: mol_type = other DNA
atgcaccatcatcaccatcacgggggctccggcatgagtgcactgatttgcggttctttagcgtatgataccatcatggtgtttccggaccagttcaagaaccatattctgcccgatcgtgttcacatcctcaatgtcagctttcttgtaccacgcatgcgtcgtgaatttggaggctgtgccggcaacattgcgtacaatctgcatctgttgggtggtgctccgatccctatgggaacggtgggccaagatttcggtccgtatcgcgagcacttcgaaactctgggcattgacttatcccgcgtcaagatcatcgatgatctgtttacaccgcaggccttcattaccaccgaccatgatcataaccagattacggcgtttcatccagcggcaatgatgcgttcgtacgaaaatcacgttcgtgatgtgccgggtgttaccttgggcctcgtaggtcctgatggacgcgagggcatgatccaaaatgccgaagaatttgctgctggtggcattccgttcatttttgacccaggtcaggcactgccgctgttcaacggccccgaactgcgcgagtttatcgaacaggcggactatgtggtggtcaacgattacgaaagcaatcttcttcaagaacgtactggctggaacgagcaggacattgtttcacgcgtgcaggcgtatatcaccacgcaaggttcgaaaggagccctggtacatacaccggagaagacctacgatattccgccggcacacgaacgtcgtgtcgttgatccaactggttgcggcgacgcgtttcgcgccggcctgatctatggtattcagcataattatgattggttgaccattggccgcatgggaaacttaatgggtgcgctgaaagtggaacaccctggcacgcaaaatcagcgtttcgattttgccgaattcaacgaccagttcaaacaagattttggctacgcgctctaatga

SEQ ID NO: 410 - protein, 321 aa, synthetic construct
  REGION 1..321: note = Variant of adenosine kinase
MHHHHHHGGSGMSALICGSLAYDTIMVFPDQFKNHILPDRVHILNVSFLVPRMRREFGGCAGNIAYNLHLLGGAPIPMGTVGQDFGPYREHFETLGIDLSRVKIIDDLFTPQAFITTDHDHNQITAFHPAAMMRSYENHVRDVPGVTLGLVGPDGREGMIQNAEEFAAGGIPFIFDPGQALPLFNGPELREFIEQADYVVVNDYESNLLQERTGWNEQDIVSRVQAYITTQGSKGALVHTPEKTYDIPPAHERRVVDPTGCGDAFRAGLIYGIQHNYDWLTIGRMGNLMGALKVEHPGTQNQRFDFAEFNDQFKQDFGYAL

SEQ ID NO: 411 - DNA, 969 bp, synthetic construct
  misc_feature 1..969: note = Variant of adenosine kinase
  source 1..969: mol_type = other DNA
atgcaccatcatcaccatcacgggggctccggcatgagtgcactgatttgcggttctttagcgtatgataccatcatggtgtttccggaccagttcaagcgtcatattctgtgcgataaagttcacatcctcaatgtcagctttcttgtaccacgcatgcgtcgtgaatttggaggctgtgccggcaacattgcgtacaatctgcatctgttgggtggtgctccgatccctatgggaacggtgggccaagatttcggtccgtatcgcgagcacttcgaaactctgggcattgacttatcccgcgtcaagatcatcgatgatctgtttacaccgcaggccttcattatgaccgaccatgatcataaccagattacggcgtttcatccaggcgcaatgatgcgttcgtacgaaaatcacgttcgtgatgtgccgggtgttaccttgggcctcgtaggtcctgatggacgcgagggcatgatccaaaatgccgaagaatttgctgctggtggcattccgttcatttttgacccaggtcaggcaatgccgctgttcaacggccccgaactgcgcgagtttatcgaacaggcggactatgtggtggtcaacgattacgaaagcaatctgcttcaggaacgtactggctggaacgagcaggacattgtttcacgcgtgcaggcgtatatcaccacgcaaggtcctaaaggagccctggtacatacaccggagaagacctacgatattccgccggcacacgaacgtcgtgtcgttgatccaactggttgcggcgacgcgtttcgcgccggcctgatctatggtattcagcataattatgattggttgaccattggccgcatgggaaacttaatgggtgcgctgaaagtggaacaccctggcacgcaaaatcagcgtttcgattttgccgagttcaacgaccagttcaaacaacagtttggctacgcgctctaatga

SEQ ID NO: 412 - protein, 321 aa, synthetic construct
  REGION 1..321: note = Variant of adenosine kinase
MHHHHHHGGSGMSALICGSLAYDTIMVFPDQFKRHILCDKVHILNVSFLVPRMRREFGGCAGNIAYNLHLLGGAPIPMGTVGQDFGPYREHFETLGIDLSRVKIIDDLFTPQAFIMTDHDHNQITAFHPGAMMRSYENHVRDVPGVTLGLVGPDGREGMIQNAEEFAAGGIPFIFDPGQAMPLFNGPELREFIEQADYVVVNDYESNLLQERTGWNEQDIVSRVQAYITTQGPKGALVHTPEKTYDIPPAHERRVVDPTGCGDAFRAGLIYGIQHNYDWLTIGRMGNLMGALKVEHPGTQNQRFDFAEFNDQFKQQFGYAL

SEQ ID NO: 413 - DNA, 969 bp, synthetic construct
  misc_feature 1..969: note = Variant of adenosine kinase
  source 1..969: mol_type = other DNA
atgcaccatcatcaccatcacgggggctccggcatgagtgcactgatttgcggttctttagcgtatgataccatcatggtgtttccggaccagttcaagcgtcatattctgtgcgataaagttcacatcctcaatgtcagctttcttgtaccacgcatgcgtcgtgaatttggaggctgtgccggcaacattgcgtacaatctgcatctgttgggtggtgctccgatccctatgggaacggtgggccaagatttcggtccgtatcgcgagcacttcgaaactctgggcattgacttatcccgcgtcaagatcatcgatgatctgtttacaccgcaggccttcattaccaccgaccatgatcataaccagattacggcgtttcatccaggcgcaatgatgcgttcgtacgaaaatcacgttcgtgatgtgccgggtgttaccttgggcctcgtaggtcctgatggacgcgagggcatgatccaaaatgccgaagaatttgctgctggtggcattccgttcatttttgacccaggtcaggcaatgccgctgttcaacggccccgaactgcgcgagtttatcgaacaggcggactatgtggtggtcaacgattacgaaagcaatcttcttcaagaacgtactggctggaacgagcaggacattgtttcacgcgtgcaggcgtatatcaccacgcaaggtcctaaaggagccctggtacatacaccggagaagacctacgatattccgccggcacacgaacctcgtgtcgttgatccaactggttgcggcgacgcgtttcgcgccggcctgatctatggtattcagcataattatgattggttgaccattggccgcatgggaaacttaatgggtgcgctgaaagtggaacaccctggcacgcaaaatcagcgtttcgattttgccgaattcaacgaccagttcaaacaacagtttggctacgcgctctaatga

SEQ ID NO: 414 - protein, 321 aa, synthetic construct
  REGION 1..321: note = Variant of adenosine kinase
MHHHHHHGGSGMSALICGSLAYDTIMVFPDQFKRHILCDKVHILNVSFLVPRMRREFGGCAGNIAYNLHLLGGAPIPMGTVGQDFGPYREHFETLGIDLSRVKIIDDLFTPQAFITTDHDHNQITAFHPGAMMRSYENHVRDVPGVTLGLVGPDGREGMIQNAEEFAAGGIPFIFDPGQAMPLFNGPELREFIEQADYVVVNDYESNLLQERTGWNEQDIVSRVQAYITTQGPKGALVHTPEKTYDIPPAHEPRVVDPTGCGDAFRAGLIYGIQHNYDWLTIGRMGNLMGALKVEHPGTQNQRFDFAEFNDQFKQQFGYAL

SEQ ID NO: 415 - DNA, 969 bp, synthetic construct
  misc_feature 1..969: note = Variant of adenosine kinase
  source 1..969: mol_type = other DNA
atgcaccatcatcaccatcacgggggctccggcatgagtgcactgatttgcggttctttagcgtatgataccatcatggtgtttccggaccagttcaagaaccatattctgcccgataaagttcacatcctcaatgtcagctttcttgtaccacgcatgcgtcgtgaatttggaggctgtgccggcaacattgcgtacaatctgcatctgttgggtggtgctccgatccctatgggaacggtgggccaagatttcggtccgtatcgcgagcacttcgaaactctgggcattgacttatcccgcgtcaagatcatcgatgatctgtttacaccgcaggccttcattaccaccgaccatgatcataaccagattacggcgtttcatccagcggcaatgatgcgttcgtacgaaaatcacgttcgtgatgtgccgggtgttaccttgggcctcgtaggtcctgatggacgcgagggcatgatccaaaatgccgaagaatttgctgctggtggcattccgttcatttttgacccaggtcaggcaatgccgctgttcaacggccccgaactgcgcgagtttatcgaacaggcggactatgtggtggtcaacgattacgaaagcaatcttcttcaagaacgtactggctggaacgagcaggacattgtttcacgcgtgcaggcgtatatcaccacgcaaggtcctaaaggagccctggtacatacaccggagaagacctacgatattccgccggcacacgaacgtcgtgtcgttgatccaactggttgcggcgacgcgtttcgcgccggcctgatctatggtattcagcataattatgattggttgaccattggccgcatgggaaacttaatgggtgcgctgaaagtggaacaccctggcacgcaaaatcagcgtttcgattttgccgaattcaacgaccagttcaaacaagattttggctacgcgctctaatga

SEQ ID NO: 416 - protein, 321 aa, synthetic construct
  REGION 1..321: note = Variant of adenosine kinase
MHHHHHHGGSGMSALICGSLAYDTIMVFPDQFKNHILPDKVHILNVSFLVPRMRREFGGCAGNIAYNLHLLGGAPIPMGTVGQDFGPYREHFETLGIDLSRVKIIDDLFTPQAFITTDHDHNQITAFHPAAMMRSYENHVRDVPGVTLGLVGPDGREGMIQNAEEFAAGGIPFIFDPGQAMPLFNGPELREFIEQADYVVVNDYESNLLQERTGWNEQDIVSRVQAYITTQGPKGALVHTPEKTYDIPPAHERRVVDPTGCGDAFRAGLIYGIQHNYDWLTIGRMGNLMGALKVEHPGTQNQRFDFAEFNDQFKQDFGYAL

SEQ ID NO: 417 - DNA, 969 bp, synthetic construct
  misc_feature 1..969: note = Variant of adenosine kinase
  source 1..969: mol_type = other DNA
atgcaccatcatcaccatcacgggggctccggcatgagtgcactgatttgcggttctttagcgtatgataccatcatggtgtttccggaccagttcaagaaccatattctgcctgataaagttcacatcctcaatgtcagctttcttgtaccacgcatgcgtcgtgaatttggaggctgtgccggcaacattgcgtacaatctgcatctgttgggtggtgctccgatccctatgggaacggtgggccaagatttcggtccgtatcgcgagcacttcgaaactctgggcattgacttatcccgcgtccgtatcatcgatgatctgtttacaccgcaggccttcattaccaccgaccatgatcataaccagattacggcgtttcatccaggcgcaatgatgcgttcgtacgaaaatcacgttcgtgatgtgccgggtgttaccttgggcctcgtaggtcctgatggacgcgagggcatgatccaaaatgccgaagaatttgctgctggtggcattccgttcatttttgacccaggtcaggcaatgccgctgttcaacggccccgaactgcgcgagtttatcgaacaggcggactatgtggtggtcaacgattacgaaagcaatcttcttcaagaacgtactggctggaacgagcaggacattgtttcacgcgtgcaggcgtatatcaccacgcaaggtcctaaaggagccctggtacatacaccggagaagacctacgatattcgtggtgcacacgaacgtcgtgtcgttgatccaactggttgcggcgacgcgtttcgcgccggcctgatctatggtattcagcataattatgattggttgaccattggccgcatgggaaacttaatgggtgcgctgaaagtggaacaccctggcacgcaaaatcagcgtttcgattttgccgagttcaacgaccagttcaaacaacagtttggctacgcgctctaatga

SEQ ID NO: 418 - protein, 321 aa, synthetic construct
  REGION 1..321: note = Variant of adenosine kinase
MHHHHHHGGSGMSALICGSLAYDTIMVFPDQFKNHILPDKVHILNVSFLVPRMRREFGGCAGNIAYNLHLLGGAPIPMGTVGQDFGPYREHFETLGIDLSRVRIIDDLFTPQAFITTDHDHNQITAFHPGAMMRSYENHVRDVPGVTLGLVGPDGREGMIQNAEEFAAGGIPFIFDPGQAMPLFNGPELREFIEQADYVVVNDYESNLLQERTGWNEQDIVSRVQAYITTQGPKGALVHTPEKTYDIRGAHERRVVDPTGCGDAFRAGLIYGIQHNYDWLTIGRMGNLMGALKVEHPGTQNQRFDFAEFNDQFKQQFGYAL

SEQ ID NO: 419 - DNA, 969 bp, synthetic construct
  misc_feature 1..969: note = Variant of adenosine kinase
  source 1..969: mol_type = other DNA
atgcaccatcatcaccatcacgggggctccggcatgagtgcactgatttgcggttctttagcgtatgataccatcatggtgtttccggaccagttcaagaaccatattctgcccgataaagttcacatcctcaatgtcagctttcttgtaccacgcatgcgtcgtgaatttggaggctgtgccggcaacattgcgtacaatctgcatctgttgggtggtgctccgatccctatgggaacggtgggccaagatttcggtccgtatcgcgagcacttcgaaactctgggcattgacttatcccgcgtccgtatcatcgatgatctgtttacaccgcaggccttcattaccaccgaccatgatcataaccagattacggcgtttcatccaggcgcaatgatgcgttcgtacgaaaatcacgttcgtgatgtgccgggtgttaccttgggcctcgtaggtcctgatggacgcgagggcatgatccaaaatgccgaagaatttgctgctggtggcattccgttcatttttgacccaggtcaggcaatgccgctgttcaacggccccgaactgcgcgagtttatcgaacaggcggactatgtggtggtcaacgattacgaaagcaatcttcttcaagaacgtactggctggaacgagcaggacattgtttcacgcgtgcaggcgtatatcaccacgcaaggtcctaaaggagccctggtacatacaccggagaagacctacgatattcgtccggcacacgaacgtcgtgtcgttgatccaactggttgcggcgacgcgtttcgcgccggcctgatctatggtattcagcataattatgattggttgaccattggccgcatgggaaacttaatgggtgcgctgaaagtggaacaccctggcacgcaaaatcagcgtttcgattttgccgaattcaacgaccagttcaaacaacagtttggctacgcgctctaatga

SEQ ID NO: 420 - protein, 321 aa, synthetic construct
  REGION 1..321: note = Variant of adenosine kinase
MHHHHHHGGSGMSALICGSLAYDTIMVFPDQFKNHILPDKVHILNVSFLVPRMRREFGGCAGNIAYNLHLLGGAPIPMGTVGQDFGPYREHFETLGIDLSRVRIIDDLFTPQAFITTDHDHNQITAFHPGAMMRSYENHVRDVPGVTLGLVGPDGREGMIQNAEEFAAGGIPFIFDPGQAMPLFNGPELREFIEQADYVVVNDYESNLLQERTGWNEQDIVSRVQAYITTQGPKGALVHTPEKTYDIRPAHERRVVDPTGCGDAFRAGLIYGIQHNYDWLTIGRMGNLMGALKVEHPGTQNQRFDFAEFNDQFKQQFGYAL

SEQ ID NO: 421 - DNA, 969 bp, synthetic construct
  misc_feature 1..969: note = Variant of adenosine kinase
  source 1..969: mol_type = other DNA
atgcaccatcatcaccatcacgggggctccggcatgagtgcactgatttgcggttctttagcgtatgataccatcatggtgtttccggaccagttcaagaaccatattctgcccgatcgtgttcaccgcctcaatgtcagctttcttgtaccacgcatgcgtcgtgaatttggaggctgtgccggcaacattgcgtacaatctgcatctgttgggtggtgctccgatcgtaatgggtacggtgggccaagatttcggtccgtatcgcgagcacttcgaaactctgggcattgacttatcccgcgtcaagatcatcgatgatctgagtacagctcaggccttcattaccaccgaccatgatcataaccagattacggcgtttcatccaggcgcaatgatgcgttcgtacgaaaatcacgttcgtgatgtgccgggtgttaccttgggcctcgtaggtcctgatggacgcgagggcatgatccaaaatgccgaagaatttgctgctggtgatattccgttcatttttgacccaggtcaggcactgccgctgttcaacggccccgaactgcgcgagtttatcgaacaggcggactatgtggtggtcaacgattacgaaagcaatcttcttcaaacgcgtactggctggaacgagcaggacattgtttcacgcgtgcaggcgtatatcaccacgcaaggttcgaaaggagtcctggtacatacaccggagaagacctacgatattcctccggcacacgaacgtcgtgtcgttgatccaactggttgcggcgacgcgtttcgcgccggcctgatctatggtattcagcataattatgattggttgaccattggccgcatgggaaacttaatgggtgcgctgaaagtggaacaccctggcacgcaaaatcagcgtttcgattttgccgaattcaacgaccagttcaaacaagattttggctacgcgctctaatga

SEQ ID NO: 422 - protein, 321 aa, synthetic construct
  REGION 1..321: note = Variant of adenosine kinase
MHHHHHHGGSGMSALICGSLAYDTIMVFPDQFKNHILPDRVHRLNVSFLVPRMRREFGGCAGNIAYNLHLLGGAPIVMGTVGQDFGPYREHFETLGIDLSRVKIIDDLSTAQAFITTDHDHNQITAFHPGAMMRSYENHVRDVPGVTLGLVGPDGREGMIQNAEEFAAGDIPFIFDPGQALPLFNGPELREFIEQADYVVVNDYESNLLQTRTGWNEQDIVSRVQAYITTQGSKGVLVHTPEKTYDIPPAHERRVVDPTGCGDAFRAGLIYGIQHNYDWLTIGRMGNLMGALKVEHPGTQNQRFDFAEFNDQFKQDFGYAL

SEQ ID NO: 423 - DNA, 969 bp, synthetic construct
  misc_feature 1..969: note = Variant of adenosine kinase
  source 1..969: mol_type = other DNA
atgcaccatcatcaccatcacgggggctccggcatgagtgcactgatttgcggttctttagcgtatgataccatcatggtgtttccggaccagttcaagaaccatattctgcccgatcgtgttcaccgcctcaatgtcagctttcttgtaccacgcatgcgtcgtgaatttggaggctgtgccggcaacattgcgtacaatctgcatctgttgggtggtgctccgatcgtaatgggtacggtgggccaagatttcggtccgtatcgcgagcacttcgaaactctgggcattgacttatcccgcgtcaagatcatcgatgatctgagtacagctcaggccttcattaccaccgaccatgatcataaccagattacggcgtttcatccaggcgcaatgatgcgttcgtacgaaaatcacgttcgtgatgtgccgggtgttaccttgggcctcgtaggtcctgatggacgcgagggcatgatccaaaatgccgaagaatttgctgctggtggcattccgttcatttttgacccaggtcaggcactgccgctgttcaacggccccgaactgcgcgagtttatcgaacaggcggactatgtggtggtcaacgattacgaaagcaatcttcttcaaacgcgtactggctggaacgagcaggacattgtttcacgcgtgcaggcgtatatcaccacgcaaggttcgaaaggagccctggtacatacaccggagaagacctacgatattccgccggcacacgaacgtcgtgtcgttgatccaactggttgcggcgacgcgtttcgcgccggcctgatctatggtattcagcataattatgattggttgaccattggccgcatgggaaacttaatgggtgcgctgaaagtggaacaccctggcacgcaaaatcagcgtttcgattttgccgaattcaacgaccagttcaaacaagattttggctacgcgctctaatga

SEQ ID NO: 424 - protein, 321 aa, synthetic construct
  REGION 1..321: note = Variant of adenosine kinase
MHHHHHHGGSGMSALICGSLAYDTIMVFPDQFKNHILPDRVHRLNVSFLVPRMRREFGGCAGNIAYNLHLLGGAPIVMGTVGQDFGPYREHFETLGIDLSRVKIIDDLSTAQAFITTDHDHNQITAFHPGAMMRSYENHVRDVPGVTLGLVGPDGREGMIQNAEEFAAGGIPFIFDPGQALPLFNGPELREFIEQADYVVVNDYESNLLQTRTGWNEQDIVSRVQAYITTQGSKGALVHTPEKTYDIPPAHERRVVDPTGCGDAFRAGLIYGIQHNYDWLTIGRMGNLMGALKVEHPGTQNQRFDFAEFNDQFKQDFGYAL

SEQ ID NO: 425 - DNA, 969 bp, synthetic construct
  misc_feature 1..969: note = Variant of adenosine kinase
  source 1..969: mol_type = other DNA
atgcaccatcatcaccatcacgggggctccggcatgagtgcactgatttgcggttctttagcgtatgataccatcatggtgtttccggaccagttcaagaaccatattctgcccgatcgtgttcaccgcctcaatgtcagctttcttgtaccacgcatgcgtcgtgaatttggaggctgtgccggcaacattgcgtacaatctgcatctgttgggtggtgctccgatcgtaatgggtacggtgggccaagatttcgggccgtatcgcgagcacttcgaaactctgggcattgacttatcccgcgtcaagatcatcgatgatctgagtacacctcaggccttcattaccaccgaccatgatcataaccagattacggcgtttcatccaggcgcaatgatgcgttcgtacgaaaatcacgttcgtgatgtgccgggtgttaccttgggcctcgtaggtcctgatggacgcgagggcatgatccaaaatgccgaagaatttgctgctggtggtattccgttcatttttgacccaggtcaggcactgccgctgttcaacggccccgaactgcgcgagtttatcgaacaggcggactatgtggtggtcaacgattacgaaagcaatcttcttcaaacgcgtactggctggaacgagcaggacattgtttcacgcgtgcaggcgtatatcaccacgcaaggttcgaaaggagccctggtacatacaccggagaagacctacgatattccgccggcacacgaacgtcgtgtcgttgatccaactggttgcggcgacgcgtttcgcgccggcctgatctatggtattcagcataattatgattggttgaccattggccgcatgggaaacttaatgggtgcgctgaaagtggaacaccctggcacgcaaaatcagcgtttcgattttgccgaattcaacgaccagttcaaacaagattttggctacgcgctctaatga

SEQ ID NO: 426 - protein, 321 aa, synthetic construct
  REGION 1..321: note = Variant of adenosine kinase
MHHHHHHGGSGMSALICGSLAYDTIMVFPDQFKNHILPDRVHRLNVSFLVPRMRREFGGCAGNIAYNLHLLGGAPIVMGTVGQDFGPYREHFETLGIDLSRVKIIDDLSTPQAFITTDHDHNQITAFHPGAMMRSYENHVRDVPGVTLGLVGPDGREGMIQNAEEFAAGGIPFIFDPGQALPLFNGPELREFIEQADYVVVNDYESNLLQTRTGWNEQDIVSRVQAYITTQGSKGALVHTPEKTYDIPPAHERRVVDPTGCGDAFRAGLIYGIQHNYDWLTIGRMGNLMGALKVEHPGTQNQRFDFAEFNDQFKQDFGYAL

SEQ ID NO: 427 - DNA, 969 bp, synthetic construct
  misc_feature 1..969: note = Variant of adenosine kinase
  source 1..969: mol_type = other DNA
atgcaccatcatcaccatcacgggggctccggcatgagtgcactgatttgcggttctttagcgtatgataccatcatggtgtttccggaccagttcaagaaccatattctgcccgatcgtgttcaccgcctcaatgtcagctttcttgtaccacgcctgcgtcgtgaatttggaggctgtgccggcaacattgcgtacaatctgcatctgttgggtggtgctccgatcgtaatgggtacggtgggccaagatttcgggccgtatcgcgagcacttcgaaactctgggcattgacttatcccgcgtcaagatcatcgatgatctgagtacacctcaggccttcattaccaccgaccatgatcataaccagattacggcgtttcatccaggcgcaatgatgcgttcgtacgaaaatcacgttcgtgatgtgccgggtgttaccttgggcctcgtaggtcctgatggacgcgagggcatgatccaaaatgccgaagaatttgctgctggtgatattccgttcatttttgacccaggtcaggcactgccgctgttcaacggccccgaactgcgcgagtttatcgaacaggcggactatgtggtggtcaacgattacgaaagcaatcttcttcaaacgcgtactggctggaacgagcaggacattgtttcacgcgtgcaggcgtatatcaccacgcaaggttcgaaaggagccctggtacatacaccggagaagacctacgatattccgccggcacacgaacgtcgtgtcgttgatccaactggttgcggcgacgcgtttcgcgccggcctgatctatggtattcagcataattatgattggttgaccattggccgcatgggaaacttaatgggtgcgctgaaagtggaacaccctggcacgcaaaatcagcgtttcgattttgccgaattcaacgaccagttcaaacaagattttggctactcgctctaatga

SEQ ID NO: 428 - protein, 321 aa, synthetic construct
  REGION 1..321: note = Variant of adenosine kinase
MHHHHHHGGSGMSALICGSLAYDTIMVFPDQFKNHILPDRVHRLNVSFLVPRLRREFGGCAGNIAYNLHLLGGAPIVMGTVGQDFGPYREHFETLGIDLSRVKIIDDLSTPQAFITTDHDHNQITAFHPGAMMRSYENHVRDVPGVTLGLVGPDGREGMIQNAEEFAAGDIPFIFDPGQALPLFNGPELREFIEQADYVVVNDYESNLLQTRTGWNEQDIVSRVQAYITTQGSKGALVHTPEKTYDIPPAHERRVVDPTGCGDAFRAGLIYGIQHNYDWLTIGRMGNLMGALKVEHPGTQNQRFDFAEFNDQFKQDFGYSL

SEQ ID NO: 429 - DNA, 969 bp, synthetic construct
  misc_feature 1..969: note = Variant of adenosine kinase
  source 1..969: mol_type = other DNA
atgcaccatcatcaccatcacgggggctccggcatgagtgcactgatttgcggttctttagcgtatgataccatcatggtgtttccggaccagttcaagaaccatattctgcccgatcgtgttcaccgcctcaatgtcagctttcttgtaccacgcctgcgtcgtgaatttggaggctgtgccggcaacattgcgtacaatctgcatctgttgggtggtgctccgatcgtaatgggtacggtgggccaagatttcgggccgtatcgcgagcacttcgaaactctgggcattgacttatcccgcgtcaagatcatcgatgatctgagtacaccgcaggccttcattaccaccgaccatgatcataaccagattacggcgtttcatccaggcgcaatgatgcgttcgtacgaaaatcacgttcgtgatgtgccgggtgttaccttgggcctcgtaggtcctgatggacgcgagggcatgatccaaaatgccgaagaatttgctgctggtggcattccgttcatttttgacccaggtcaggcactgccgctgttcaacggccccgaactgcgcgagtttatcgaacaggcggactatgtggtggtcaacgattacgaaagcaatcttcttcaaacgcgtactggctggaacgagcaggacattgtttcacgcgtgcaggcgtatatcaccacgcaaggttcgcgcggagccctggtacatacaccggagaagacctacgatattcctccggcacacgaacgtcgtgtcgttgatccaactggttgcggcgacgcgtttcgcgccggcctgatctatggtattcagcataattatgattggttgaccattggccgcatgggaaacttaatgggtgcgctgaaagtggaacaccctggcacgcaaaatcagcgtttcgattttgccgaattcaacgaccagttcaaacaagattttggctactcgctctaatga

SEQ ID NO: 430 - protein, 321 aa, synthetic construct
  REGION 1..321: note = Variant of adenosine kinase
MHHHHHHGGSGMSALICGSLAYDTIMVFPDQFKNHILPDRVHRLNVSFLVPRLRREFGGCAGNIAYNLHLLGGAPIVMGTVGQDFGPYREHFETLGIDLSRVKIIDDLSTPQAFITTDHDHNQITAFHPGAMMRSYENHVRDVPGVTLGLVGPDGREGMIQNAEEFAAGGIPFIFDPGQALPLFNGPELREFIEQADYVVVNDYESNLLQTRTGWNEQDIVSRVQAYITTQGSRGALVHTPEKTYDIPPAHERRVVDPTGCGDAFRAGLIYGIQHNYDWLTIGRMGNLMGALKVEHPGTQNQRFDFAEFNDQFKQDFGYSL

SEQ ID NO: 431 - DNA, 969 bp, synthetic construct
  misc_feature 1..969: note = Variant of adenosine kinase
  source 1..969: mol_type = other DNA
atgcaccatcatcaccatcacgggggctccggcatgagtgcactgatttgcggttctttagcgtatgataccatcatggtgtttccggaccagttcaagaaccatattctgcccgatcgtgttcaccgcctcaatgtcagctttcttgtaccacgcatgcgtcgtgaatttggaggctgtgccggcaacattgcgtacaatctgcatctgttgggtggtgctccgatcgtaatggctacggtgggccaagatttcggtccgtatcgcgagcacttcgaaactctgggcattgacttatcccgcgtcaagatcatcgatgatctgagtacaccgcaggccttcattaccaccgaccatgatcataaccagattacggcgtttcatccaggcgcaatgatgcgttcgtacgaaaatcacgttcgtgatgtgccgggtgttaccttgggcctcgtaggtcctgatggacgcgagggcatgatccaaaatgccgaagaatttgctgctggtggcattccgttcatttttgacccaggtcaggcactgccgctgttcaacggccccgaactgcgcgagtttatcgaacaggcggactatgtggtggtcaacgattacgaaagcaatcttcttcaaacgcgtactggctggaacgagcaggacattgtttcacgcgtgcaggcgtatatcaccacgcaaggttcgaaaggagccctggtacatacaccggagaagacctacgatattccgccggcacacgaacgtcgtgtcgttgatccaactggttgcggcgacgcgtttcgcgccggcctgatctatggtattcagcataattatgattggttgaccattggccgcatgggaaacttaatgggtgcgctgaaagtggaacaccctggcacgcaaaatcagcgtttcgattttgccgaattcaacgaccagttcaaacaatattttggctacgcgctctaatga

SEQ ID NO: 432 - protein, 321 aa, synthetic construct
  REGION 1..321: note = Variant of adenosine kinase
MHHHHHHGGSGMSALICGSLAYDTIMVFPDQFKNHILPDRVHRLNVSFLVPRMRREFGGCAGNIAYNLHLLGGAPIVMATVGQDFGPYREHFETLGIDLSRVKIIDDLSTPQAFITTDHDHNQITAFHPGAMMRSYENHVRDVPGVTLGLVGPDGREGMIQNAEEFAAGGIPFIFDPGQALPLFNGPELREFIEQADYVVVNDYESNLLQTRTGWNEQDIVSRVQAYITTQGSKGALVHTPEKTYDIPPAHERRVVDPTGCGDAFRAGLIYGIQHNYDWLTIGRMGNLMGALKVEHPGTQNQRFDFAEFNDQFKQYFGYAL

SEQ ID NO: 433 - DNA, 969 bp, synthetic construct
  misc_feature 1..969: note = Variant of adenosine kinase
  source 1..969: mol_type = other DNA
atgcaccatcatcaccatcacgggggctccggcatgagtgcactgatttgcggttctttagcgtatgataccatcatggtgtttccggaccagttcaagaaccatattctgcccgatcgtgttcaccgcctcaatgtcagctttcttgtaccacgcatgcgtcgtgaatttggaggctgtgccggcaacattgcgtacaatctgcatctgttgggtggtgctccgatcgtaatgggtacggtgggccaagatttcgggccgtatcgcgagcacttcgaaactctgggcattgacttatcccgcgtcaagatcatcgatgatctgagtacagctcaggccttcattaccaccgaccatgatcataaccagattacggcgtttcatccaggcgcaatgatgcgttcgtacgaaaatcacgttcgtgatgtgccgggtgttaccttgggcctcgtaggtcctgatggacgcgagggcatgatccaaaatgccgaagaatttgctgctggtggcattccgttcatttttgacccaggtcaggcactgccgctgttcaacggccccgaactgcgcgagtttatcgaacaggcggactatgtggtggtcaacgattacgaaagcaatcttcttcaagaacgtactggctggaacgagcaggacattgtttcacgcgtgcaggcgtatatcaccacgcaaggttcgcgcggagtcctggtacatacaccggagaagacctacgatattccgccggcacacgaacgtcgtgtcgttgatccaactggttgcggcgacgcgtttcgcgccggcctgatctatggtattcagcataattatgattggttgaccattggccgcatgggaaacttaatgggtgcgctgaaagtggaacaccctggcacgcaaaatcagcgtttcgattttgccctgttcaacgaccagttcaaacaagattttggctacgcgctctaatga

SEQ ID NO: 434 - protein, 321 aa, synthetic construct
  REGION 1..321: note = Variant of adenosine kinase
MHHHHHHGGSGMSALICGSLAYDTIMVFPDQFKNHILPDRVHRLNVSFLVPRMRREFGGCAGNIAYNLHLLGGAPIVMGTVGQDFGPYREHFETLGIDLSRVKIIDDLSTAQAFITTDHDHNQITAFHPGAMMRSYENHVRDVPGVTLGLVGPDGREGMIQNAEEFAAGGIPFIFDPGQALPLFNGPELREFIEQADYVVVNDYESNLLQERTGWNEQDIVSRVQAYITTQGSRGVLVHTPEKTYDIPPAHERRVVDPTGCGDAFRAGLIYGIQHNYDWLTIGRMGNLMGALKVEHPGTQNQRFDFALFNDQFKQDFGYAL

SEQ ID NO: 435 - DNA, 969 bp, synthetic construct
  misc_feature 1..969: note = Variant of adenosine kinase
  source 1..969: mol_type = other DNA
atgcaccatcatcaccatcacgggggctccggcatgagtgcactgatttgcggttctttagcgtatgataccatcatggtgtttccggaccagttcaagaaccatattctgcccgatcgtgttcaccgcctcaatgtcagctttcttgtaccacgcatgcgtcgtgaatttggaggctgtgccggcaacattgcgtacaatctgcatctgttgggtggtgctccgatcccaatgggtacggtgggccaagatttcgggccgtatcgcgagcacttcgaaactctgggcattgacttatcccgcgtcaagatcatcgatgatctgagtacagctcaggccttcattaccaccgaccatgatcataaccagattacggcgtttcatccaggcgcaatgatgcgttcgtacgaaaatcacgttcgtgatgtgccgggtgttaccttgggcctcgtaggtcctgatggacgcgagggcatgatccaaaatgccgaagaatttgctgctggtgatattccgttcatttttgacccaggtcaggcactgccgctgttcaacggccccgaactgcgcgagtttatcgaacaggcggactatgtggtggtcaacgattacgaaagcaatcttcttcaaacgcgtactggctggaacgagcaggacattgtttcacgcgtgcaggcgtatatcaccacgcaaggttcgcgcggagtcctggtacatacaccggagaagacctacgatattcgtccggcacacgaacgtcgtgtcgttgatccaactggttgcggcgacgcgtttcgcgccggcctgatctatggtattcagcataattatgattggttgaccattggccgcatgggaaacttaatgggtgcgctgaaagtggaacaccctggcacgcaaaatcagcgtttcgattttgccgaattcaacgaccagttcaaacaagattttggctacgcgctctaatga

SEQ ID NO: 436 - protein, 321 aa, synthetic construct
  REGION 1..321: note = Variant of adenosine kinase
MHHHHHHGGSGMSALICGSLAYDTIMVFPDQFKNHILPDRVHRLNVSFLVPRMRREFGGCAGNIAYNLHLLGGAPIPMGTVGQDFGPYREHFETLGIDLSRVKIIDDLSTAQAFITTDHDHNQITAFHPGAMMRSYENHVRDVPGVTLGLVGPDGREGMIQNAEEFAAGDIPFIFDPGQALPLFNGPELREFIEQADYVVVNDYESNLLQTRTGWNEQDIVSRVQAYITTQGSRGVLVHTPEKTYDIRPAHERRVVDPTGCGDAFRAGLIYGIQHNYDWLTIGRMGNLMGALKVEHPGTQNQRFDFAEFNDQFKQDFGYAL

SEQ ID NO: 437 - DNA, 969 bp, synthetic construct
  misc_feature 1..969: note = Variant of adenosine kinase
  source 1..969: mol_type = other DNA
atgcaccatcatcaccatcacgggggctccggcatgagtgcactgatttgcggttctttagcgtatgataccatcatggtgtttccggaccagttcaagaaccatattctgcccgatcgtgttcaccgcctcaatgtcagctttcttgtaccacgcatgcgtcgtgaatttggaggctgtgccggcaacattgcgtacaatctgcatctgttgggtggtgctccgatcccaatgggtacggtgggccaagatttcgggccgtatcgcgagcacttcgaaactctgggcattgacttatcccgcgtcaagatcatcgatgatctgagtacagctcaggccttcattaccaccgaccatgatcataaccagattacggcgtttcatccaggcgcaatgatgcgttcgtacgaaaatcacgttcgtgatgtgccgggtgttaccttgggcctcgtaggtcctgatggacgcgagggcatgatccaaaatgccgaagaatttgctgctgctgatattccgttcatttttgacccaggtcaggcactgccgctgttcaacggccccgaactgcgcgagtttatcgaacaggcggactatgtggtggtcaacgattacgaaagcaatcttcttcaagagcgtactggctggaacgagcaggacattgtttcacgcgtgcaggcgtatatcaccacgcaaggttcgcgcggagtcctggtacatacaccggagaagacctacgatattcgtccggcacacgaacgtcgtgtcgttgatccaactggttgcggcgacgcgtttcgcgccggcctgatctatggtattcagcataattatgattggttgaccattggccgcatgggaaacttaatgggtgcgctgaaagtggaacaccctggcacgcaaaatcagcgtttcgattttgccgaattcaacgaccagttcaaacaagattttggctacgcgctctaatga

SEQ ID NO: 438 - protein, 321 aa, synthetic construct
  REGION 1..321: note = Variant of adenosine kinase
MHHHHHHGGSGMSALICGSLAYDTIMVFPDQFKNHILPDRVHRLNVSFLVPRMRREFGGCAGNIAYNLHLLGGAPIPMGTVGQDFGPYREHFETLGIDLSRVKIIDDLSTAQAFITTDHDHNQITAFHPGAMMRSYENHVRDVPGVTLGLVGPDGREGMIQNAEEFAAADIPFIFDPGQALPLFNGPELREFIEQADYVVVNDYESNLLQERTGWNEQDIVSRVQAYITTQGSRGVLVHTPEKTYDIRPAHERRVVDPTGCGDAFRAGLIYGIQHNYDWLTIGRMGNLMGALKVEHPGTQNQRFDFAEFNDQFKQDFGYAL

SEQ ID NO: 439 - DNA, 969 bp, synthetic construct
  misc_feature 1..969: note = Variant of adenosine kinase
  source 1..969: mol_type = other DNA
atgcaccatcatcaccatcacgggggctccggcatgagtgcactgatttgcggttctttagcgtatgataccatcatggtgtttccggaccagttcaagaaccatattctgcccgatcgtgttcaccgcctcaatgtcagctttcttgtaccacgcatgcgtcgtgaatttggaggctgtgccggcaacattgcgtacaatctgcatctgttgggtggtgctccgatcgtaatgggtacggtgggccaagatttcgggccgtatcgcgagcacttcgaaactctgggcattgacttatcccgcgtcaagatcatcgatgatctgagtacaccgcaggccttcattaccaccgaccatgatcataaccagattacggcgtttcatccaggcgcaatgatgcgttcgtacgaaaatcacgttcgtgatgtgccgggtgttaccttgggcctcgtaggtcctgatggacgcgagggcatgatccaaaatgccgaagaatttgctgctggtggtattccgttcatttttgacccaggtcaggcactgccgctgttcaacggccccgaactgcgcgagtttatcgaacaggcggactatgtggtggtcaacgattacgaaagcaatcttcttcaaacgcgtactggctggaacgagcaggacattgtttcacgcgtgcaggcgtatatcaccacgcaaggttcgaaaggagccctggtacatacaccggagaagacctacgatattcgtccggcacacgaacgtcgtgtcgttgatccaactggttgcggcgacgcgtttcgcgccggcctgatctatggtattcagcataattatgattggttgaccattggccgcatgggaaacttaatgggtgcgctgaaagtggaacaccctggcacgcaaaatcagcgtttcgattttgccgaattcaacgaccagttcaaacaagattttggctactcgctctaatga

SEQ ID NO: 440 - protein, 321 aa, synthetic construct
  REGION 1..321: note = Variant of adenosine kinase
MHHHHHHGGSGMSALICGSLAYDTIMVFPDQFKNHILPDRVHRLNVSFLVPRMRREFGGCAGNIAYNLHLLGGAPIVMGTVGQDFGPYREHFETLGIDLSRVKIIDDLSTPQAFITTDHDHNQITAFHPGAMMRSYENHVRDVPGVTLGLVGPDGREGMIQNAEEFAAGGIPFIFDPGQALPLFNGPELREFIEQADYVVVNDYESNLLQTRTGWNEQDIVSRVQAYITTQGSKGALVHTPEKTYDIRPAHERRVVDPTGCGDAFRAGLIYGIQHNYDWLTIGRMGNLMGALKVEHPGTQNQRFDFAEFNDQFKQDFGYSL

SEQ ID NO: 441 - DNA, 969 bp, synthetic construct
  misc_feature 1..969: note = Variant of adenosine kinase
  source 1..969: mol_type = other DNA
atgcaccatcatcaccatcacgggggctccggcatgagtgcactgatttgcggttctttagcgtatgataccatcatggtgtttccggaccagttcaagaaccatattctgcccgatcgtgttcaccgcctcaatgtcagctttcttgtaccacgcctgcgtcgtgaatttggaggctgtgccggcaacattgcgtacaatctgcatctgttgggtggtgctccgatcccaatgggtacggtgggccaagatttcggtccgtatcgcgagcacttcgaaactctgggcattgacttatcccgcgtcaagatcatcgatgatctgagtacacctcaggccttcattaccaccgaccatgatcataaccagattacggcgtttcatccaggcgcaatgatgcgttcgtacgaaaatcacgttcgtgatgtgccgggtgttaccttgggcctcgtaggtcctgatggacgcgagggcatgatccaaaatgccgaagaatttgctgctgctgatattccgttcatttttgacccaggtcaggcactgccgctgttcaacggccccgaactgcgcgagtttatcgaacaggcggactatgtggtggtcaacgattacgaaagcaatcttcttcaagaacgtactggctggaacgagcaggacattgtttcacgcgtgcaggcgtatatcaccacgcaaggttcgcgcggagccctggtacatacaccggagaagacctacgatattcctccggcacacgaacgtcgtgtcgttgatccaactggttgcggcgacgcgtttcgcgccggcctgatctatggtattcagcataattatgattggttgaccattggccgcatgggaaacttaatgggtgcgctgaaagtggaacaccctggcacgcaaaatcagcgtttcgattttgccgaattcaacgaccagttcaaacaagattttggctactcgctctaatga

SEQ ID NO: 442 - protein, 321 aa, synthetic construct
  REGION 1..321: note = Variant of adenosine kinase
MHHHHHHGGSGMSALICGSLAYDTIMVFPDQFKNHILPDRVHRLNVSFLVPRLRREFGGCAGNIAYNLHLLGGAPIPMGTVGQDFGPYREHFETLGIDLSRVKIIDDLSTPQAFITTDHDHNQITAFHPGAMMRSYENHVRDVPGVTLGLVGPDGREGMIQNAEEFAAADIPFIFDPGQALPLFNGPELREFIEQADYVVVNDYESNLLQERTGWNEQDIVSRVQAYITTQGSRGALVHTPEKTYDIPPAHERRVVDPTGCGDAFRAGLIYGIQHNYDWLTIGRMGNLMGALKVEHPGTQNQRFDFAEFNDQFKQDFGYSL

SEQ ID NO: 443 - DNA, 969 bp, synthetic construct
  misc_feature 1..969: note = Variant of adenosine kinase
  source 1..969: mol_type = other DNA
atgcaccatcatcaccatcacgggggctccggcatgagtgcactgatttgcggttctttagcgtatgataccatcatggtgtttccggaccagttcaagaaccatattctgcccgatcgtgttcaccgcctcaatgtcagctttcttgtaccacgcatgcgtcgtgaatttggaggctgtgccggcaacattgcgtacaatctgcatctgttgggtggtgctccgatcccaatgggtacggtgggccaagatttcgggccgtatcgcgagcacttcgaaactctgggcattgacttatcccgcgtcaagatcatcgatgatctgagtacagctcaggccttcattaccaccgaccatgatcataaccagattacggcgtttcatccaggcgcaatgatgcgttcgtacgaaaatcacgttcgtgatgtgccgggtgttaccttgggcctcgtaggtcctgatggacgcgagggcatgatccaaaatgccgaagaatttgctgctggtggtattccgttcatttttgacccaggtcaggcactgccgctgttcaacggccccgaactgcgcgagtttatcgaacaggcggactatgtggtggtcaacgattacgaaagcaatcttcttcaaacgcgtactggctggaacgagcaggacattgtttcacgcgtgcaggcgtatatcaccacgcaaggttcgcgcggagtcctggtacatacaccggagaagacctacgatattcgtccggcacacgaacgtcgtgtcgttgatccaactggttgcggcgacgcgtttcgcgccggcctgatctatggtattcagcataattatgattggttgaccattggccgcatgggaaacttaatgggtgcgctgaaagtggaacaccctggcacgcaaaatcagcgtttcgattttgccgaattcaacgaccagttcaaacaagattttggctacgcgctctaatga

SEQ ID NO: 444 - protein, 321 aa, synthetic construct
  REGION 1..321: note = Variant of adenosine kinase
MHHHHHHGGSGMSALICGSLAYDTIMVFPDQFKNHILPDRVHRLNVSFLVPRMRREFGGCAGNIAYNLHLLGGAPIPMGTVGQDFGPYREHFETLGIDLSRVKIIDDLSTAQAFITTDHDHNQITAFHPGAMMRSYENHVRDVPGVTLGLVGPDGREGMIQNAEEFAAGGIPFIFDPGQALPLFNGPELREFIEQADYVVVNDYESNLLQTRTGWNEQDIVSRVQAYITTQGSRGVLVHTPEKTYDIRPAHERRVVDPTGCGDAFRAGLIYGIQHNYDWLTIGRMGNLMGALKVEHPGTQNQRFDFAEFNDQFKQDFGYAL

SEQ ID NO: 445 - DNA, 969 bp, synthetic construct
  misc_feature 1..969: note = Variant of adenosine kinase
  source 1..969: mol_type = other DNA
atgcaccatcatcaccatcacgggggctccggcatgagtgcactgatttgcggttctttagcgtatgataccatcatggtgtttccggaccagttcaagaaccatattctgcccgatcgtgttcaccgcctcaatgtcagctttcttgtaccacgcatgcgtcgtgaatttggaggctgtgccggcaacattgcgtacaatctgcatctgttgggtggtgctccgatcgtaatgggtacggtgggccaagatttcgggccgtatcgcgagcacttcgaaactctgggcattgacttatcccgcgtcaagatcatcgatgatctgagtacaccgcaggccttcattaccaccgaccatgatcataaccagattacggcgtttcatccaggcgcaatgatgcgttcgtacgaaaatcacgttcgtgatgtgccgggtgttaccttgggcctcgtaggtcctgatggacgcgagggcatgatccaaaatgccgaagaatttgctgctggtggcattccgttcatttttgacccaggtcaggcactgccgctgttcaacggccccgaactgcgcgagtttatcgaacaggcggactatgtggtggtcaacgattacgaaagcaatcttcttcaagaacgtactggctggaacgagcaggacattgtttcacgcgtgcaggcgtatatcaccacgcaaggttcgaaaggagccctggtacatacaccggagaagacctacgatattccgccggcacacgaacgtcgtgtcgttgatccaactggttgcggcgacgcgtttcgcgccggcctgatctatggtattcagcataattatgattggttgaccattggccgcatgggaaacttaatgggtgcgctgaaagtggaacaccctggcacgcaaaatcagcgtttcgattttgccgaattcaacgaccagttcaaacaagattttggctacgcgctctaatga

SEQ ID NO: 446 - protein, 321 aa, synthetic construct
  REGION 1..321: note = Variant of adenosine kinase
MHHHHHHGGSGMSALICGSLAYDTIMVFPDQFKNHILPDRVHRLNVSFLVPRMRREFGGCAGNIAYNLHLLGGAPIVMGTVGQDFGPYREHFETLGIDLSRVKIIDDLSTPQAFITTDHDHNQITAFHPGAMMRSYENHVRDVPGVTLGLVGPDGREGMIQNAEEFAAGGIPFIFDPGQALPLFNGPELREFIEQADYVVVNDYESNLLQERTGWNEQDIVSRVQAYITTQGSKGALVHTPEKTYDIPPAHERRVVDPTGCGDAFRAGLIYGIQHNYDWLTIGRMGNLMGALKVEHPGTQNQRFDFAEFNDQFKQDFGYAL

SEQ ID NO: 447 - DNA, 969 bp, synthetic construct
  misc_feature 1..969: note = Variant of adenosine kinase
  source 1..969: mol_type = other DNA
atgcaccatcatcaccatcacgggggctccggcatgagtgcactgatttgcggttctttagcgtatgataccatcatggtgtttccggaccagttcaagaaccatattctgcccgatcgtgttcaccgcctcaatgtcagctttcttgtaccacgcctgcgtcgtgaatttggaggctgtgccggcaacattgcgtacaatctgcatctgttgggtggtgctccgatcgtaatgggtacggtgggccaagatttcgggccgtatcgcgagcacttcgaaactctgggcattgacttatcccgcgtcaagatcatcgatgatctgagtacagctcaggccttcattaccaccgaccatgatcataaccagattacggcgtttcatccaggcgcaatgatgcgttcgtacgaaaatcacgttcgtgatgtgccgggtgttaccttgggcctcgtaggtcctgatggacgcgagggcatgatccaaaatgccgaagaatttgctgctggtgatattccgttcatttttgacccaggtcaggcactgccgctgttcaacggccccgaactgcgcgagtttatcgaacaggcggactatgtggtggtcaacgattacgaaagcaatcttcttcaagagcgtactggctggaacgagcaggacattgtttcacgcgtgcaggcgtatatcaccacgcaaggttcgaaaggagccctggtacatacaccggagaagacctacgatattcgtccggcacacgaacgtcgtgtcgttgatccaactggttgcggcgacgcgtttcgcgccggcctgatctatggtattcagcataattatgattggttgaccattggccgcatgggaaacttaatgggtgcgctgaaagtggaacaccctggcacgcaaaatcagcgtttcgattttgccgaattcaacgaccagttcaaacaagattttggctacgcgctctaatga

SEQ ID NO: 448 - protein, 321 aa, synthetic construct
  REGION 1..321: note = Variant of adenosine kinase
MHHHHHHGGSGMSALICGSLAYDTIMVFPDQFKNHILPDRVHRLNVSFLVPRLRREFGGCAGNIAYNLHLLGGAPIVMGTVGQDFGPYREHFETLGIDLSRVKIIDDLSTAQAFITTDHDHNQITAFHPGAMMRSYENHVRDVPGVTLGLVGPDGREGMIQNAEEFAAGDIPFIFDPGQALPLFNGPELREFIEQADYVVVNDYESNLLQERTGWNEQDIVSRVQAYITTQGSKGALVHTPEKTYDIRPAHERRVVDPTGCGDAFRAGLIYGIQHNYDWLTIGRMGNLMGALKVEHPGTQNQRFDFAEFNDQFKQDFGYAL

SEQ ID NO: 449 - DNA, 969 bp, synthetic construct
  misc_feature 1..969: note = Variant of adenosine kinase
  source 1..969: mol_type = other DNA
atgcaccatcatcaccatcacgggggctccggcatgagtgcactgatttgcggttctttagcgtatgataccatcatggtgtttccggaccagttcaagaaccatattctgcccgatcgtgttcaccgcctcaatgtcagctttcttgtaccacgcatgcgtcgtgaatttggaggctgtgccggcaacattgcgtacaatctgcatctgttgggtggtgctccgatcccaatgggtacggtgggccaagatttcggtccgtatcgcgagcacttcgaaactctgggcattgacttatcccgcgtcaagatcatcgatgatctgagtacaccgcaggccttcattaccaccgaccatgatcataaccagattacggcgtttcatccaggcgcaatgatgcgttcgtacgaaaatcacgttcgtgatgtgccgggtgttaccttgggcctcgtaggtcctgatggacgcgagggcatgatccaaaatgccgaagaatttgctgctggtggcattccgttcatttttgacccaggtcaggcactgccgctgttcaacggccccgaactgcgcgagtttatcgaacaggcggactatgtggtggtcaacgattacgaaagcaatcttcttcaaacgcgtactggctggaacgagcaggacattgtttcacgcgtgcaggcgtatatcaccacgcaaggttcgcgcggagccctggtacatacaccggagaagacctacgatattcgtccggcacacgaacgtcgtgtcgttgatccaactggttgcggcgacgcgtttcgcgccggcctgatctatggtattcagcataattatgattggttgaccattggccgcatgggaaacttaatgggtgcgctgaaagtggaacaccctggcacgcaaaatcagcgtttcgattttgccgaattcaacgaccagttcaaacaagattttggctacgcgctctaatga

SEQ ID NO: 450 - protein, 321 aa, synthetic construct
  REGION 1..321: note = Variant of adenosine kinase
MHHHHHHGGSGMSALICGSLAYDTIMVFPDQFKNHILPDRVHRLNVSFLVPRMRREFGGCAGNIAYNLHLLGGAPIPMGTVGQDFGPYREHFETLGIDLSRVKIIDDLSTPQAFITTDHDHNQITAFHPGAMMRSYENHVRDVPGVTLGLVGPDGREGMIQNAEEFAAGGIPFIFDPGQALPLFNGPELREFIEQADYVVVNDYESNLLQTRTGWNEQDIVSRVQAYITTQGSRGALVHTPEKTYDIRPAHERRVVDPTGCGDAFRAGLIYGIQHNYDWLTIGRMGNLMGALKVEHPGTQNQRFDFAEFNDQFKQDFGYAL

SEQ ID NO: 451 - DNA, 969 bp, synthetic construct
  misc_feature 1..969: note = Variant of adenosine kinase
  source 1..969: mol_type = other DNA
atgcaccatcatcaccatcacgggggctccggcatgagtgcactgatttgcggttctttagcgtatgataccatcatggtgtttccggaccagttcaagaaccatattctgcccgatcgtgttcaccgcctcaatgtcagctttcttgtaccacgcatgcgtcgtgaatttggaggctgtgccggcaacattgcgtacaatctgcatctgttgggtggtgctccgatcgtaatgggtacggtgggccaagatttccagccatatcgcgagcacttcgaaactctgggcattgacttatcccgcgtcaagatcatcgatgatctgagtacaccgcaggccttcattaccaccgaccatgatcataaccagattacggcgtttcatccaggcgcaatgatgcgttcgtacgaaaatcacgttcgtgatgtgccgggtgttaccttgggcctcgtaggtcctgatggacgcgagggcatgatccaaaatgccgaagaatttgctgctggtgatattccgttcatttttgacccaggtcaggcactgccgctgttcaacggccccgaactgcgcgagtttatcgaacaggcggactatgtggtggtcaacgattacgaaagcaatcttcttcaaacgcgtactggctggaacgagcaggacattgtttcacgcgtgcaggcgtatatcaccacgcaaggttcgcgcggagccctggtacatacaccggagaagacctacgatattccgccggcacacgaacgtcgtgtcgttgatccaactggttgcggcgacgcgtttcgcgccggcctgatctatggtattcagcataattatgattggttgaccattggccgcatgggaaacttaatgggtgcgctgaaagtggaacaccctggcacgcaaaatcagcgtttcgattttgccctgttcaacgaccagttcaaacaagattttggctactcgctctaatga

SEQ ID NO: 452 - protein, 321 aa, synthetic construct
  REGION 1..321: note = Variant of adenosine kinase
MHHHHHHGGSGMSALICGSLAYDTIMVFPDQFKNHILPDRVHRLNVSFLVPRMRREFGGCAGNIAYNLHLLGGAPIVMGTVGQDFQPYREHFETLGIDLSRVKIIDDLSTPQAFITTDHDHNQITAFHPGAMMRSYENHVRDVPGVTLGLVGPDGREGMIQNAEEFAAGDIPFIFDPGQALPLFNGPELREFIEQADYVVVNDYESNLLQTRTGWNEQDIVSRVQAYITTQGSRGALVHTPEKTYDIPPAHERRVVDPTGCGDAFRAGLIYGIQHNYDWLTIGRMGNLMGALKVEHPGTQNQRFDFALFNDQFKQDFGYSL

SEQ ID NO: 453 - DNA, 969 bp, synthetic construct
  misc_feature 1..969: note = Variant of adenosine kinase
  source 1..969: mol_type = other DNA
atgcaccatcatcaccatcacgggggctccggcatgagtgcactgatttgcggttctttagcgtatgataccatcatggtgtttccggaccagttcaagaaccatattctgcccgatcgtgttcaccgcctcaatgtcagctttcttgtaccacgcatgcgtcgtgaatttggaggctgtgccggcaacattgcgtacaatctgcatctgttgggtggtgctccgatcgtaatgggtacggtgggccaagatttccagccgtatcgcgagcacttcgaaactctgggcattgacttatcccgcgtcaagatcatcgatgatctgagtacaccgcaggccttcattaccaccgaccatgatcataaccagattacggcgtttcatccaggcgcaatgatgcgttcgtacgaaaatcacgttcgtgatgtgccgggtgttaccttgggcctcgtaggtcctgatggacgcgagggcatgatccaaaatgccgaagaatttgctgctggtggcattccgttcatttttgacccaggtcaggcactgccgctgttcaacggccccgaactgcgcgagtttatcgaacaggcggactatgtggtggtcaacgattacgaaagcaatcttcttcaagagcgtactggctggaacgagcaggacattgtttcacgcgtgcaggcgtatatcaccacgcaaggttcgaaaggagccctggtacatacaccggagaagacctacgatattccgccggcacacgaacgtcgtgtcgttgatccaactggttgcggcgacgcgtttcgcgccggcctgatctatggtattcagcataattatgattggttgaccattggccgcatgggaaacttaatgggtgcgctgaaagtggaacaccctggcacgcaaaatcagcgtttcgattttgccgaattcaacgaccagttcaaacaagattttggctacgcgctctaatga

SEQ ID NO: 454 - protein, 321 aa, synthetic construct
  REGION 1..321: note = Variant of adenosine kinase
MHHHHHHGGSGMSALICGSLAYDTIMVFPDQFKNHILPDRVHRLNVSFLVPRMRREFGGCAGNIAYNLHLLGGAPIVMGTVGQDFQPYREHFETLGIDLSRVKIIDDLSTPQAFITTDHDHNQITAFHPGAMMRSYENHVRDVPGVTLGLVGPDGREGMIQNAEEFAAGGIPFIFDPGQALPLFNGPELREFIEQADYVVVNDYESNLLQERTGWNEQDIVSRVQAYITTQGSKGALVHTPEKTYDIPPAHERRVVDPTGCGDAFRAGLIYGIQHNYDWLTIGRMGNLMGALKVEHPGTQNQRFDFAEFNDQFKQDFGYAL

SEQ ID NO: 455 - DNA, 969 bp, synthetic construct
  misc_feature 1..969: note = Variant of adenosine kinase
  source 1..969: mol_type = other DNA
atgcaccatcatcaccatcacgggggctccggcatgagtgcactgatttgcggttctttagcgtatgataccatcatggtgtttccggaccagttcaagaaccatattctgcccgatcgtgttcaccgcctcaatgtcagctttcttgtaccacgcctgcgtcgtgaatttggaggctgtgccggcaacattgcgtacaatctgcatctgttgggtggtgctccgatcccaatgggtacggtgggccaagatttcggtccgtatcgcgagcacttcgaaactctgggcattgacttatcccgcgtcaagatcatcgatgatctgagtacagctcaggccttcattaccaccgaccatgatcataaccagattacggcgtttcatccaggcgcaatgatgcgttcgtacgaaaatcacgttcgtgatgtgccgggtgttaccttgggcctcgtaggtcctgatggacgcgagggcatgatccaaaatgccgaagaatttgctgctggtgatattccgttcatttttgacccaggtcaggcactgccgctgttcaacggccccgaactgcgcgagtttatcgaacaggcggactatgtggtggtcaacgattacgaaagcaatcttcttcaagagcgtactggctggaacgagcaggacattgtttcacgcgtgcaggcgtatatcaccacgcaaggttcgaaaggagccctggtacatacaccggagaagacctacgatattccgccggcacacgaacgtcgtgtcgttgatccaactggttgcggcgacgcgtttcgcgccggcctgatctatggtattcagcataattatgattggttgaccattggccgcatgggaaacttaatgggtgcgctgaaagtggaacaccctggcacgcaaaatcagcgtttcgattttgccgaattcaacgaccagttcaaacaagattttggctacgcgctctaatga

SEQ ID NO: 456 - protein, 321 aa, synthetic construct
  REGION 1..321: note = Variant of adenosine kinase
MHHHHHHGGSGMSALICGSLAYDTIMVFPDQFKNHILPDRVHRLNVSFLVPRLRREFGGCAGNIAYNLHLLGGAPIPMGTVGQDFGPYREHFETLGIDLSRVKIIDDLSTAQAFITTDHDHNQITAFHPGAMMRSYENHVRDVPGVTLGLVGPDGREGMIQNAEEFAAGDIPFIFDPGQALPLFNGPELREFIEQADYVVVNDYESNLLQERTGWNEQDIVSRVQAYITTQGSKGALVHTPEKTYDIPPAHERRVVDPTGCGDAFRAGLIYGIQHNYDWLTIGRMGNLMGALKVEHPGTQNQRFDFAEFNDQFKQDFGYAL

SEQ ID NO: 457 - DNA, 969 bp, synthetic construct
  misc_feature 1..969: note = Variant of adenosine kinase
  source 1..969: mol_type = other DNA
atgcaccatcatcaccatcacgggggctccggcatgagtgcactgatttgcggttctttagcgtatgataccatcatggtgtttccggaccagttcaagaaccatattctgcccgatcgtgttcaccgcctcaatgtcagctttcttgtaccacgcatgcgtcgtgaatttggaggctgtgccggcaacattgcgtacaatctgcatctgttgggtggtgctccgatcgtaatggctacggtgggccaagatttcggtccgtatcgcgagcacttcgaaactctgggcattgacttatcccgcgtcaagatcatcgatgatctgagtacagctcaggccttcattaccaccgaccatgatcataaccagattacggcgtttcatccaggcgcaatgatgcgttcgtacgaaaatcacgttcgtgatgtgccgggtgttaccttgggcctcgtaggtcctgatggacgcgagggcatgatccaaaatgccgaagaatttgctgctggtggcattccgttcatttttgacccaggtcaggcactgccgctgttcaacggccccgaactgcgcgagtttatcgaacaggcggactatgtggtggtcaacgattacgaaagcaatcttcttcaagagcgtactggctggaacgagcaggacattgtttcacgcgtgcaggcgtatatcaccacgcaaggttcgaaaggagccctggtacatacaccggagaagacctacgatattccgccggcacacgaacgtcgtgtcgttgatccaactggttgcggcgacgcgtttcgcgccggcctgatctatggtattcagcataattatgattggttgaccattggccgcatgggaaacttaatgggtgcgctgaaagtggaacaccctggcacgcaaaatcagcgtttcgattttgccgaattcaacgaccagttcaaacaagattttggctacgcgctctaatga

SEQ ID NO: 458 - protein, 321 aa, synthetic construct
  REGION 1..321: note = Variant of adenosine kinase
MHHHHHHGGSGMSALICGSLAYDTIMVFPDQFKNHILPDRVHRLNVSFLVPRMRREFGGCAGNIAYNLHLLGGAPIVMATVGQDFGPYREHFETLGIDLSRVKIIDDLSTAQAFITTDHDHNQITAFHPGAMMRSYENHVRDVPGVTLGLVGPDGREGMIQNAEEFAAGGIPFIFDPGQALPLFNGPELREFIEQADYVVVNDYESNLLQERTGWNEQDIVSRVQAYITTQGSKGALVHTPEKTYDIPPAHERRVVDPTGCGDAFRAGLIYGIQHNYDWLTIGRMGNLMGALKVEHPGTQNQRFDFAEFNDQFKQDFGYAL

SEQ ID NO: 459 - DNA, 969 bp, synthetic construct
  misc_feature 1..969: note = Variant of adenosine kinase
  source 1..969: mol_type = other DNA
atgcaccatcatcaccatcacgggggctccggcatgagtgcactgatttgcggttctttagcgtatgataccatcatggtgtttccggaccagttcaagaaccatattctgcccgatcgtgttcaccgcctcaatgtcagctttcttgtaccacgcctgcgtcgtgaatttggaggctgtgccggcaacattgcgtacaatctgcatctgttgggtggtgctccgatcgtaatgggtacggtgggccaagatttcgggccgtatcgcgagcacttcgaaactctgggcattgacttatcccgcgtcaagatcatcgatgatctgagtacagctcaggccttcattaccaccgaccatgatcataaccagattacggcgtttcatccaggcgcaatgatgcgttcgtacgaaaatcacgttcgtgatgtgccgggtgttaccttgggcctcgtaggtcctgatggacgcgagggcatgatccaaaatgccgaagaatttgctgctgctggtattccgttcatttttgacccaggtcaggcactgccgctgttcaacggccccgaactgcgcgagtttatcgaacaggcggactatgtggtggtcaacgattacgaaagcaatcttcttcaagagcgtactggctggaacgagcaggacattgtttcacgcgtgcaggcgtatatcaccacgcaaggttcgaaaggagtcctggtacatacaccggagaagacctacgatattcctccggcacacgaacgtcgtgtcgttgatccaactggttgcggcgacgcgtttcgcgccggcctgatctatggtattcagcataattatgattggttgaccattggccgcatgggaaacttaatgggtgcgctgaaagtggaacaccctggcacgcaaaatcagcgtttcgattttgccgaattcaacgaccagttcaaacaagattttggctacgcgctctaatga

SEQ ID NO: 460 - protein, 321 aa, synthetic construct
  REGION 1..321: note = Variant of adenosine kinase
MHHHHHHGGSGMSALICGSLAYDTIMVFPDQFKNHILPDRVHRLNVSFLVPRLRREFGGCAGNIAYNLHLLGGAPIVMGTVGQDFGPYREHFETLGIDLSRVKIIDDLSTAQAFITTDHDHNQITAFHPGAMMRSYENHVRDVPGVTLGLVGPDGREGMIQNAEEFAAAGIPFIFDPGQALPLFNGPELREFIEQADYVVVNDYESNLLQERTGWNEQDIVSRVQAYITTQGSKGVLVHTPEKTYDIPPAHERRVVDPTGCGDAFRAGLIYGIQHNYDWLTIGRMGNLMGALKVEHPGTQNQRFDFAEFNDQFKQDFGYAL

SEQ ID NO: 461 - DNA, 969 bp, synthetic construct
  misc_feature 1..969: note = Variant of adenosine kinase
  source 1..969: mol_type = other DNA
atgcaccatcatcaccatcacgggggctccggcatgagtgcactgatttgcggttctttagcgtatgataccatcatggtgtttccggaccagttcaagaaccatattctgcccgatcgtgttcaccgcctcaatgtcagctttcttgtaccacgcatgcgtcgtgaatttggaggctgtgccggcaacattgcgtacaatctgcatctgttgggtggtgctccgatcgtaatgggtacggtgggccaagatttcggtccgtatcgcgagcacttcgaaactctgggcattgacttatcccgcgtcaagatcatcgatgatctgagtacaccgcaggccttcattaccaccgaccatgatcataaccagattacggcgtttcatccaggcgcaatgatgcgttcgtacgaaaatcacgttcgtgatgtgccgggtgttaccttgggcctcgtaggtcctgatggacgcgagggcatgatccaaaatgccgaagaatttgctgctggtggcattccgttcatttttgacccaggtcaggcactgccgctgttcaacggccccgaactgcgcgagtttatcgaacaggcggactatgtggtggtcaacgattacgaaagcaatcttcttcaaacgcgtactggctggaacgagcaggacattgtttcacgcgtgcaggcgtatatcaccacgcaaggttcgcgcggagccctggtacatacaccggagaagacctacgatattccgccggcacacgaacgtcgtgtcgttgatccaactggttgcggcgacgcgtttcgcgccggcctgatctatggtattcagcataattatgattggttgaccattggccgcatgggaaacttaatgggtgcgctgaaagtggaacaccctggcacgcaaaatcagcgtttcgattttgccgaattcaacgaccagttcaaacaagattttggctacgcgctctaatga

SEQ ID NO: 462 - protein, 321 aa, synthetic construct
  REGION 1..321: note = Variant of adenosine kinase
MHHHHHHGGSGMSALICGSLAYDTIMVFPDQFKNHILPDRVHRLNVSFLVPRMRREFGGCAGNIAYNLHLLGGAPIVMGTVGQDFGPYREHFETLGIDLSRVKIIDDLSTPQAFITTDHDHNQITAFHPGAMMRSYENHVRDVPGVTLGLVGPDGREGMIQNAEEFAAGGIPFIFDPGQALPLFNGPELREFIEQADYVVVNDYESNLLQTRTGWNEQDIVSRVQAYITTQGSRGALVHTPEKTYDIPPAHERRVVDPTGCGDAFRAGLIYGIQHNYDWLTIGRMGNLMGALKVEHPGTQNQRFDFAEFNDQFKQDFGYAL

SEQ ID NO: 463 - DNA, 969 bp, synthetic construct
  misc_feature 1..969: note = Variant of adenosine kinase
  source 1..969: mol_type = other DNA
atgcaccatcatcaccatcacgggggctccggcatgagtgcactgatttgcggttctttagcgtatgataccatcatggtgtttccggaccagttcaagaaccatattctgcccgatcgtgttcaccgcctcaatgtcagctttcttgtaccacgcatgcgtcgtgaatttggaggctgtgccggcaacattgcgtacaatctgcatctgttgggtggtgctccgatcccaatgggtacggtgggccaagatttcgggccgtatcgcgagcacttcgaaactctgggcattgacttatcccgcgtcaagatcatcgatgatctgagtacacctcaggccttcattaccaccgaccatgatcataaccagattacggcgtttcatccaggcgcaatgatgcgttcgtacgaaaatcacgttcgtgatgtgccgggtgttaccttgggcctcgtaggtcctgatggacgcgagggcatgatccaaaatgccgaagaatttgctgctggtggcattccgttcatttttgacccaggtcaggcactgccgctgttcaacggccccgaactgcgcgagtttatcgaacaggcggactatgtggtggtcaacgattacgaaagcaatcttcttcaaacgcgtactggctggaacgagcaggacattgtttcacgcgtgcaggcgtatatcaccacgcaaggttcgaaaggagccctggtacatacaccggagaagacctacgatattccgccggcacacgaacgtcgtgtcgttgatccaactggttgcggcgacgcgtttcgcgccggcctgatctatggtattcagcataattatgattggttgaccattggccgcatgggaaacttaatgggtgcgctgaaagtggaacaccctggcacgcaaaatcagcgtttcgattttgccgaattcaacgaccagttcaaacaagattttggctacgcgctctaatga

SEQ ID NO: 464 - protein, 321 aa, synthetic construct
  REGION 1..321: note = Variant of adenosine kinase
MHHHHHHGGSGMSALICGSLAYDTIMVFPDQFKNHILPDRVHRLNVSFLVPRMRREFGGCAGNIAYNLHLLGGAPIPMGTVGQDFGPYREHFETLGIDLSRVKIIDDLSTPQAFITTDHDHNQITAFHPGAMMRSYENHVRDVPGVTLGLVGPDGREGMIQNAEEFAAGGIPFIFDPGQALPLFNGPELREFIEQADYVVVNDYESNLLQTRTGWNEQDIVSRVQAYITTQGSKGALVHTPEKTYDIPPAHERRVVDPTGCGDAFRAGLIYGIQHNYDWLTIGRMGNLMGALKVEHPGTQNQRFDFAEFNDQFKQDFGYAL

SEQ ID NO: 465 - DNA, 969 bp, synthetic construct
  misc_feature 1..969: note = Variant of adenosine kinase
  source 1..969: mol_type = other DNA
atgcaccatcatcaccatcacgggggctccggcatgagtgcactgatttgcggttctttagcgtatgataccatcatggtgtttccggaccagttcaagaaccatattctgcccgatcgtgttcaccgcctcaatgtcagctttcttgtaccacgcctgcgtcgtgaatttggaggctgtgccggcaacattgcgtacaatctgcatctgttgggtggtgctccgatcgtaatgggtacggtgggccaagatttcggtccgtatcgcgagcacttcgaaactctgggcattgacttatcccgcgtcaagatcatcgatgatctgagtacaccgcaggccttcattaccaccgaccatgatcataaccagattacggcgtttcatccaggcgcaatgatgcgttcgtacgaaaatcacgttcgtgatgtgccgggtgttaccttgggcctcgtaggtcctgatggacgcgagggcatgatccaaaatgccgaagaatttgctgctggtggcattccgttcatttttgacccaggtcaggcactgccgctgttcaacggccccgaactgcgcgagtttatcgaacaggcggactatgtggtggtcaacgattacgaaagcaatcttcttcaagaacgtactggctggaacgagcaggacattgtttcacgcgtgcaggcgtatatcaccacgcaaggttcgaaaggagccctggtacatacaccggagaagacctacgatattccgccggcacacgaacgtcgtgtcgttgatccaactggttgcggcgacgcgtttcgcgccggcctgatctatggtattcagcataattatgattggttgaccattggccgcatgggaaacttaatgggtgcgctgaaagtggaacaccctggcacgcaaaatcagcgtttcgattttgccgaattcaacgaccagttcaaacaagattttggctacgcgctctaatga

SEQ ID NO: 466 - protein, 321 aa, synthetic construct
  REGION 1..321: note = Variant of adenosine kinase
MHHHHHHGGSGMSALICGSLAYDTIMVFPDQFKNHILPDRVHRLNVSFLVPRLRREFGGCAGNIAYNLHLLGGAPIVMGTVGQDFGPYREHFETLGIDLSRVKIIDDLSTPQAFITTDHDHNQITAFHPGAMMRSYENHVRDVPGVTLGLVGPDGREGMIQNAEEFAAGGIPFIFDPGQALPLFNGPELREFIEQADYVVVNDYESNLLQERTGWNEQDIVSRVQAYITTQGSKGALVHTPEKTYDIPPAHERRVVDPTGCGDAFRAGLIYGIQHNYDWLTIGRMGNLMGALKVEHPGTQNQRFDFAEFNDQFKQDFGYAL

SEQ ID NO: 467 - DNA, 969 bp, synthetic construct
  misc_feature 1..969: note = Variant of adenosine kinase
  source 1..969: mol_type = other DNA
atgcaccatcatcaccatcacgggggctccggcatgagtgcactgatttgcggttctttagcgtatgataccatcatggtgtttccggaccagttcaagaaccatattctgcccgatcgtgttcaccgcctcaatgtcagctttcttgtaccacgcatgcgtcgtgaatttggaggctgtgccggcaacattgcgtacaatctgcatctgttgggtggtgctccgatccctatgggaacggtgggccaagatttccagccgtatcgcgagcacttcgaaactctgggcattgacttatcccgcgtcaagatcatcgatgatctgagtacaccgcaggccttcattaccaccgaccatgatcataaccagattacggcgtttcatccaggcgcaatgatgcgttcgtacgaaaatcacgttcgtgatgtgccgggtgttaccttgggcctcgtaggtcctgatggacgcgagggcatgatccaaaatgccgaagaatttgctgctgctggtattccgttcatttttgacccaggtcaggcactgccgctgttcaacggccccgaactgcgcgagtttatcgaacaggcggactatgtggtggtcaacgattacgaaagcaatcttcttcaagagcgtactggctggaacgagcaggacattgtttcacgcgtgcaggcgtatatcaccacgcaaggttcgcgcggagccctggtacatacaccggagaagacctacgatattccgccggcacacgaacgtcgtgtcgttgatccaactggttgcggcgacgcgtttcgcgccggcctgatctatggtattcagcataattatgattggttgaccattggccgcatgggaaacttaatgggtgcgctgaaagtggaacaccctggcacgcaaaatcagcgtttcgattttgccgaattcaacgaccagttcaaacaagattttggctacgcgctctaatga

SEQ ID NO: 468 - protein, 321 aa, synthetic construct
  REGION 1..321: note = Variant of adenosine kinase
MHHHHHHGGSGMSALICGSLAYDTIMVFPDQFKNHILPDRVHRLNVSFLVPRMRREFGGCAGNIAYNLHLLGGAPIPMGTVGQDFQPYREHFETLGIDLSRVKIIDDLSTPQAFITTDHDHNQITAFHPGAMMRSYENHVRDVPGVTLGLVGPDGREGMIQNAEEFAAAGIPFIFDPGQALPLFNGPELREFIEQADYVVVNDYESNLLQERTGWNEQDIVSRVQAYITTQGSRGALVHTPEKTYDIPPAHERRVVDPTGCGDAFRAGLIYGIQHNYDWLTIGRMGNLMGALKVEHPGTQNQRFDFAEFNDQFKQDFGYAL

SEQ ID NO: 469 - DNA, 969 bp, synthetic construct
  misc_feature 1..969: note = Variant of adenosine kinase
  source 1..969: mol_type = other DNA
atgcaccatcatcaccatcacgggggctccggcatgagtgcactgatttgcggttctttagcgtatgataccatcatggtgtttccggaccagttcaagaaccatattctgcccgatcgtgttcaccgcctcaatgtcagctttcttgtaccacgcctgcgtcgtgaatttggaggctgtgccggcaacattgcgtacaatctgcatctgttgggtggtgctccgatccctatgggaacggtgggccaagatttcgggccgtatcgcgagcacttcgaaactctgggcattgacttatcccgcgtcaagatcatcgatgatctgagtacacctcaggccttcattaccaccgaccatgatcataaccagattacggcgtttcatccaggcgcaatgatgcgttcgtacgaaaatcacgttcgtgatgtgccgggtgttaccttgggcctcgtaggtcctgatggacgcgagggcatgatccaaaatgccgaagaatttgctgctggtggtattccgttcatttttgacccaggtcaggcactgccgctgttcaacggccccgaactgcgcgagtttatcgaacaggcggactatgtggtggtcaacgattacgaaagcaatcttcttcaaacgcgtactggctggaacgagcaggacattgtttcacgcgtgcaggcgtatatcaccacgcaaggttcgcgcggagccctggtacatacaccggagaagacctacgatattcgtccggcacacgaacgtcgtgtcgttgatccaactggttgcggcgacgcgtttcgcgccggcctgatctatggtattcagcataattatgattggttgaccattggccgcatgggaaacttaatgggtgcgctgaaagtggaacaccctggcacgcaaaatcagcgtttcgattttgccgaattcaacgaccagttcaaacaagattttggctacgcgctctaatga

SEQ ID NO: 470 - protein, 321 aa, synthetic construct
  REGION 1..321: note = Variant of adenosine kinase
MHHHHHHGGSGMSALICGSLAYDTIMVFPDQFKNHILPDRVHRLNVSFLVPRLRREFGGCAGNIAYNLHLLGGAPIPMGTVGQDFGPYREHFETLGIDLSRVKIIDDLSTPQAFITTDHDHNQITAFHPGAMMRSYENHVRDVPGVTLGLVGPDGREGMIQNAEEFAAGGIPFIFDPGQALPLFNGPELREFIEQADYVVVNDYESNLLQTRTGWNEQDIVSRVQAYITTQGSRGALVHTPEKTYDIRPAHERRVVDPTGCGDAFRAGLIYGIQHNYDWLTIGRMGNLMGALKVEHPGTQNQRFDFAEFNDQFKQDFGYAL

SEQ ID NO: 471 - DNA, 969 bp, synthetic construct
  misc_feature 1..969: note = Variant of adenosine kinase
  source 1..969: mol_type = other DNA
atgcaccatcatcaccatcacgggggctccggcatgagtgcactgatttgcggttctttagcgtatgataccatcatggtgtttccggaccagttcaagaaccatattctgcccgatcgtgttcaccgcctcaatgtcagctttcttgtaccacgcatgcgtcgtgaatttggaggctgtgccggcaacattgcgtacaatctgcatctgttgggtggtgctccgatcccaatgggtacggtgggccaagatttcggtccgtatcgcgagcacttcgaaactctgggcattgacttatcccgcgtcaagatcatcgatgatctgagtacagctcaggccttcattaccaccgaccatgatcataaccagattacggcgtttcatccaggcgcaatgatgcgttcgtacgaaaatcacgttcgtgatgtgccgggtgttaccttgggcctcgtaggtcctgatggacgcgagggcatgatccaaaatgccgaagaatttgctgctgctgatattccgttcatttttgacccaggtcaggcactgccgctgttcaacggccccgaactgcgcgagtttatcgaacaggcggactatgtggtggtcaacgattacgaaagcaatcttcttcaagagcgtactggctggaacgagcaggacattgtttcacgcgtgcaggcgtatatcaccacgcaaggttcgaaaggagtcctggtacatacaccggagaagacctacgatattcgtccggcacacgaacgtcgtgtcgttgatccaactggttgcggcgacgcgtttcgcgccggcctgatctatggtattcagcataattatgattggttgaccattggccgcatgggaaacttaatgggtgcgctgaaagtggaacaccctggcacgcaaaatcagcgtttcgattttgccgaattcaacgaccagttcaaacaagattttggctacgcgctctaatga

SEQ ID NO: 472 - protein, 321 aa, synthetic construct
  REGION 1..321: note = Variant of adenosine kinase
MHHHHHHGGSGMSALICGSLAYDTIMVFPDQFKNHILPDRVHRLNVSFLVPRMRREFGGCAGNIAYNLHLLGGAPIPMGTVGQDFGPYREHFETLGIDLSRVKIIDDLSTAQAFITTDHDHNQITAFHPGAMMRSYENHVRDVPGVTLGLVGPDGREGMIQNAEEFAAADIPFIFDPGQALPLFNGPELREFIEQADYVVVNDYESNLLQERTGWNEQDIVSRVQAYITTQGSKGVLVHTPEKTYDIRPAHERRVVDPTGCGDAFRAGLIYGIQHNYDWLTIGRMGNLMGALKVEHPGTQNQRFDFAEFNDQFKQDFGYAL

SEQ ID NO: 473 - DNA, 969 bp, synthetic construct
  misc_feature 1..969: note = Variant of adenosine kinase
  source 1..969: mol_type = other DNA
atgcaccatcatcaccatcacgggggctccggcatgagtgcactgatttgcggttctttagcgtatgataccatcatggtgtttccggaccagttcaagaaccatattctgcccgatcgtgttcaccgcctcaatgtcagctttcttgtaccacgcatgcgtcgtgaatttggaggctgtgccggcaacattgcgtacaatctgcatctgttgggtggtgctccgatcgtaatggctacggtgggccaagatttcgggccgtatcgcgagcacttcgaaactctgggcattgacttatcccgcgtcaagatcatcgatgatctgagtacaccgcaggccttcattaccaccgaccatgatcataaccagattacggcgtttcatccaggcgcaatgatgcgttcgtacgaaaatcacgttcgtgatgtgccgggtgttaccttgggcctcgtaggtcctgatggacgcgagggcatgatccaaaatgccgaagaatttgctgctggtggcattccgttcatttttgacccaggtcaggcactgccgctgttcaacggccccgaactgcgcgagtttatcgaacaggcggactatgtggtggtcaacgattacgaaagcaatcttcttcaaacgcgtactggctggaacgagcaggacattgtttcacgcgtgcaggcgtatatcaccacgcaaggttcgaaaggagccctggtacatacaccggagaagacctacgatattcctccggcacacgaacgtcgtgtcgttgatccaactggttgcggcgacgcgtttcgcgccggcctgatctatggtattcagcataattatgattggttgaccattggccgcatgggaaacttaatgggtgcgctgaaagtggaacaccctggcacgcaaaatcagcgtttcgattttgccgaattcaacgaccagttcaaacaagattttggctacgcgctctaatga

SEQ ID NO: 474 - protein, 321 aa, synthetic construct
  REGION 1..321: note = Variant of adenosine kinase
MHHHHHHGGSGMSALICGSLAYDTIMVFPDQFKNHILPDRVHRLNVSFLVPRMRREFGGCAGNIAYNLHLLGGAPIVMATVGQDFGPYREHFETLGIDLSRVKIIDDLSTPQAFITTDHDHNQITAFHPGAMMRSYENHVRDVPGVTLGLVGPDGREGMIQNAEEFAAGGIPFIFDPGQALPLFNGPELREFIEQADYVVVNDYESNLLQTRTGWNEQDIVSRVQAYITTQGSKGALVHTPEKTYDIPPAHERRVVDPTGCGDAFRAGLIYGIQHNYDWLTIGRMGNLMGALKVEHPGTQNQRFDFAEFNDQFKQDFGYAL

SEQ ID NO: 475 - DNA, 969 bp, synthetic construct
  misc_feature 1..969: note = Variant of adenosine kinase
  source 1..969: mol_type = other DNA
atgcaccatcatcaccatcacgggggctccggcatgagtgcactgatttgcggttctttagcgtatgataccatcatggtgtttccggaccagttcaagaaccatattctgcccgatcgtgttcaccgcctcaatgtcagctttcttgtaccacgcatgcgtcgtgaatttggaggctgtgccggcaacattgcgtacaatctgcatctgttgggtggtgctccgatcgtaatggctacggtgggccaagatttcggtccgtatcgcgagcacttcgaaactctgggcattgacttatcccgcgtcaagatcatcgatgatctgagtacacctcaggccttcattaccaccgaccatgatcataaccagattacggcgtttcatccaggcgcaatgatgcgttcgtacgaaaatcacgttcgtgatgtgccgggtgttaccttgggcctcgtaggtcctgatggacgcgagggcatgatccaaaatgccgaagaatttgctgctgctgatattccgttcatttttgacccaggtcaggcactgccgctgttcaacggccccgaactgcgcgagtttatcgaacaggcggactatgtggtggtcaacgattacgaaagcaatcttcttcaagagcgtactggctggaacgagcaggacattgtttcacgcgtgcaggcgtatatcaccacgcaaggttcgaaaggagccctggtacatacaccggagaagacctacgatattccgccggcacacgaacgtcgtgtcgttgatccaactggttgcggcgacgcgtttcgcgccggcctgatctatggtattcagcataattatgattggttgaccattggccgcatgggaaacttaatgggtgcgctgaaagtggaacaccctggcacgcaaaatcagcgtttcgattttgccgaattcaacgaccagttcaaacaagattttggctacgcgctctaatga

SEQ ID NO: 476 - protein, 321 aa, synthetic construct
  REGION 1..321: note = Variant of adenosine kinase
MHHHHHHGGSGMSALICGSLAYDTIMVFPDQFKNHILPDRVHRLNVSFLVPRMRREFGGCAGNIAYNLHLLGGAPIVMATVGQDFGPYREHFETLGIDLSRVKIIDDLSTPQAFITTDHDHNQITAFHPGAMMRSYENHVRDVPGVTLGLVGPDGREGMIQNAEEFAAADIPFIFDPGQALPLFNGPELREFIEQADYVVVNDYESNLLQERTGWNEQDIVSRVQAYITTQGSKGALVHTPEKTYDIPPAHERRVVDPTGCGDAFRAGLIYGIQHNYDWLTIGRMGNLMGALKVEHPGTQNQRFDFAEFNDQFKQDFGYAL

SEQ ID NO: 477 - DNA, 969 bp, synthetic construct
  misc_feature 1..969: note = Variant of adenosine kinase
  source 1..969: mol_type = other DNA
atgcaccatcatcaccatcacgggggctccggcatgagtgcactgatttgcggttctttagcgtatgataccatcatggtgtttccggaccagttcaagaaccatattctgcccgatcgtgttcaccgcctcaatgtcagctttcttgtaccacgcatgcgtcgtgaatttggaggctgtgccggcaacattgcgtacaatctgcatctgttgggtggtgctccgatcgtaatggctacggtgggccaagatttccagccgtatcgcgagcacttcgaaactctgggcattgacttatcccgcgtcaagatcatcgatgatctgagtacaccgcaggccttcattaccaccgaccatgatcataaccagattacggcgtttcatccaggcgcaatgatgcgttcgtacgaaaatcacgttcgtgatgtgccgggtgttaccttgggcctcgtaggtcctgatggacgcgagggcatgatccaaaatgccgaagaatttgctgctgctggtattccgttcatttttgacccaggtcaggcactgccgctgttcaacggccccgaactgcgcgagtttatcgaacaggcggactatgtggtggtcaacgattacgaaagcaatcttcttcaagagcgtactggctggaacgagcaggacattgtttcacgcgtgcaggcgtatatcaccacgcaaggttcgaaaggagtcctggtacatacaccggagaagacctacgatattcctccggcacacgaacgtcgtgtcgttgatccaactggttgcggcgacgcgtttcgcgccggcctgatctatggtattcagcataattatgattggttgaccattggccgcatgggaaacttaatgggtgcgctgaaagtggaacaccctggcacgcaaaatcagcgtttcgattttgccgaattcaacgaccagttcaaacaagattttggctacgcgctctaatga

SEQ ID NO: 478 - protein, 321 aa, synthetic construct
  REGION 1..321: note = Variant of adenosine kinase
MHHHHHHGGSGMSALICGSLAYDTIMVFPDQFKNHILPDRVHRLNVSFLVPRMRREFGGCAGNIAYNLHLLGGAPIVMATVGQDFQPYREHFETLGIDLSRVKIIDDLSTPQAFITTDHDHNQITAFHPGAMMRSYENHVRDVPGVTLGLVGPDGREGMIQNAEEFAAAGIPFIFDPGQALPLFNGPELREFIEQADYVVVNDYESNLLQERTGWNEQDIVSRVQAYITTQGSKGVLVHTPEKTYDIPPAHERRVVDPTGCGDAFRAGLIYGIQHNYDWLTIGRMGNLMGALKVEHPGTQNQRFDFAEFNDQFKQDFGYAL

SEQ ID NO: 479 - DNA, 969 bp, synthetic construct
  misc_feature 1..969: note = Variant of adenosine kinase
  source 1..969: mol_type = other DNA
atgcaccatcatcaccatcacgggggctccggcatgagtgcactgatttgcggttctttagcgtatgataccatcatggtgtttccggaccagttcaagaaccatattctgcccgatcgtgttcaccgcctcaatgtcagctttcttgtaccacgcatgcgtcgtgaatttggaggctgtgccggcaacattgcgtacaatctgcatctgttgggtggtgctccgatcccaatggctacggtgggccaagatttcggtccgtatcgcgagcacttcgaaactctgggcattgacttatcccgcgtcaagatcatcgatgatctgagtacaccgcaggccttcattaccaccgaccatgatcataaccagattacggcgtttcatccaggcgcaatgatgcgttcgtacgaaaatcacgttcgtgatgtgccgggtgttaccttgggcctcgtaggtcctgatggacgcgagggcatgatccaaaatgccgaagaatttgctgctggtggcattccgttcatttttgacccaggtcaggcactgccgctgttcaacggccccgaactgcgcgagtttatcgaacaggcggactatgtggtggtcaacgattacgaaagcaatcttcttcaaacgcgtactggctggaacgagcaggacattgtttcacgcgtgcaggcgtatatcaccacgcaaggttcgaaaggagccctggtacatacaccggagaagacctacgatattcgtccggcacacgaacgtcgtgtcgttgatccaactggttgcggcgacgcgtttcgcgccggcctgatctatggtattcagcataattatgattggttgaccattggccgcatgggaaacttaatgggtgcgctgaaagtggaacaccctggcacgcaaaatcagcgtttcgattttgccgaattcaacgaccagttcaaacaagattttggctacgcgctctaatga

SEQ ID NO: 480 - protein, 321 aa, synthetic construct
  REGION 1..321: note = Variant of adenosine kinase
MHHHHHHGGSGMSALICGSLAYDTIMVFPDQFKNHILPDRVHRLNVSFLVPRMRREFGGCAGNIAYNLHLLGGAPIPMATVGQDFGPYREHFETLGIDLSRVKIIDDLSTPQAFITTDHDHNQITAFHPGAMMRSYENHVRDVPGVTLGLVGPDGREGMIQNAEEFAAGGIPFIFDPGQALPLFNGPELREFIEQADYVVVNDYESNLLQTRTGWNEQDIVSRVQAYITTQGSKGALVHTPEKTYDIRPAHERRVVDPTGCGDAFRAGLIYGIQHNYDWLTIGRMGNLMGALKVEHPGTQNQRFDFAEFNDQFKQDFGYAL

SEQ ID NO: 481 - DNA, 969 bp, synthetic construct
  misc_feature 1..969: note = Variant of adenosine kinase
  source 1..969: mol_type = other DNA
atgcaccatcatcaccatcacgggggctccggcatgagtgcactgatttgcggttctttagcgtatgataccatcatggtgtttccggaccagttcaagaaccatattctgcccgatcgtgttcaccgcctcaatgtcagctttcttgtaccacgcatgcgtcgtgaatttggaggctgtgccggcaacattgcgtacaatctgcatctgttgggtggtgctccgatcccaatggctacggtgggccaagatttcggtccgtatcgcgagcacttcgaaactctgggcattgacttatcccgcgtcaagatcatcgatgatctgagtacaccgcaggccttcattaccaccgaccatgatcataaccagattacggcgtttcatccaggcgcaatgatgcgttcgtacgaaaatcacgttcgtgatgtgccgggtgttaccttgggcctcgtaggtcctgatggacgcgagggcatgatccaaaatgccgaagaatttgctgctggtggcattccgttcatttttgacccaggtcaggcactgccgctgttcaacggccccgaactgcgcgagtttatcgaacaggcggactatgtggtggtcaacgattacgaaagcaatcttcttcaaacgcgtactggctggaacgagcaggacattgtttcacgcgtgcaggcgtatatcaccacgcaaggttcgaaaggagccctggtacatacaccggagaagacctacgatattccgccggcacacgaacgtcgtgtcgttgatccaactggttgcggcgacgcgtttcgcgccggcctgatctatggtattcagcataattatgattggttgaccattggccgcatgggaaacttaatgggtgcgctgaaagtggaacaccctggcacgcaaaatcagcgtttcgattttgccgaattcaacgaccagttcaaacaagattttggctacgcgctctaatga

SEQ ID NO: 482 - protein, 321 aa, synthetic construct
  REGION 1..321: note = Variant of adenosine kinase
MHHHHHHGGSGMSALICGSLAYDTIMVFPDQFKNHILPDRVHRLNVSFLVPRMRREFGGCAGNIAYNLHLLGGAPIPMATVGQDFGPYREHFETLGIDLSRVKIIDDLSTPQAFITTDHDHNQITAFHPGAMMRSYENHVRDVPGVTLGLVGPDGREGMIQNAEEFAAGGIPFIFDPGQALPLFNGPELREFIEQADYVVVNDYESNLLQTRTGWNEQDIVSRVQAYITTQGSKGALVHTPEKTYDIPPAHERRVVDPTGCGDAFRAGLIYGIQHNYDWLTIGRMGNLMGALKVEHPGTQNQRFDFAEFNDQFKQDFGYAL

SEQ ID NO: 483 - DNA, 969 bp, synthetic construct
  misc_feature 1..969: note = Variant of adenosine kinase
  source 1..969: mol_type = other DNA
atgcaccatcatcaccatcacgggggctccggcatgagtgcactgatttgcggttctttagcgtatgataccatcatggtgtttccggaccagttcaagaaccatattctgcccgatcgtgttcaccgcctcaatgtcagctttcttgtaccacgcctgcgtcgtgaatttggaggctgtgccggcaacattgcgtacaatctgcatctgttgggtggtgctccgatcccaatgggtacggtgggccaagatttccagccgtatcgcgagcacttcgaaactctgggcattgacttatcccgcgtcaagatcatcgatgatctgagtacaccgcaggccttcattaccaccgaccatgatcataaccagattacggcgtttcatccaggcgcaatgatgcgttcgtacgaaaatcacgttcgtgatgtgccgggtgttaccttgggcctcgtaggtcctgatggacgcgagggcatgatccaaaatgccgaagaatttgctgctggtggtattccgttcatttttgacccaggtcaggcactgccgctgttcaacggccccgaactgcgcgagtttatcgaacaggcggactatgtggtggtcaacgattacgaaagcaatcttcttcaaacgcgtactggctggaacgagcaggacattgtttcacgcgtgcaggcgtatatcaccacgcaaggttcgcgcggagtcctggtacatacaccggagaagacctacgatattccgccggcacacgaacgtcgtgtcgttgatccaactggttgcggcgacgcgtttcgcgccggcctgatctatggtattcagcataattatgattggttgaccattggccgcatgggaaacttaatgggtgcgctgaaagtggaacaccctggcacgcaaaatcagcgtttcgattttgccgaattcaacgaccagttcaaacaagattttggctacgcgctctaatga

SEQ ID NO: 484 - protein, 321 aa, synthetic construct
  REGION 1..321: note = Variant of adenosine kinase
MHHHHHHGGSGMSALICGSLAYDTIMVFPDQFKNHILPDRVHRLNVSFLVPRLRREFGGCAGNIAYNLHLLGGAPIPMGTVGQDFQPYREHFETLGIDLSRVKIIDDLSTPQAFITTDHDHNQITAFHPGAMMRSYENHVRDVPGVTLGLVGPDGREGMIQNAEEFAAGGIPFIFDPGQALPLFNGPELREFIEQADYVVVNDYESNLLQTRTGWNEQDIVSRVQAYITTQGSRGVLVHTPEKTYDIPPAHERRVVDPTGCGDAFRAGLIYGIQHNYDWLTIGRMGNLMGALKVEHPGTQNQRFDFAEFNDQFKQDFGYAL

SEQ ID NO: 485 - DNA, 969 bp, synthetic construct
  misc_feature 1..969: note = Variant of adenosine kinase
  source 1..969: mol_type = other DNA
atgcaccatcatcaccatcacgggggctccggcatgagtgcactgatttgcggttctttagcgtatgataccatcatggtgtttccggaccagttcaagaaccatattctgcccgatcgtgttcaccgcctcaatgtcagctttcttgtaccacgcatgcgtcgtgaatttggaggctgtgccggcaacattgcgtacaatctgcatctgttgggtggtgctccgatcccaatggctacggtgggccaagatttcgggccgtatcgcgagcacttcgaaactctgggcattgacttatcccgcgtcaagatcatcgatgatctgagtacacctcaggccttcattaccaccgaccatgatcataaccagattacggcgtttcatccaggcgcaatgatgcgttcgtacgaaaatcacgttcgtgatgtgccgggtgttaccttgggcctcgtaggtcctgatggacgcgagggcatgatccaaaatgccgaagaatttgctgctggtgatattccgttcatttttgacccaggtcaggcactgccgctgttcaacggccccgaactgcgcgagtttatcgaacaggcggactatgtggtggtcaacgattacgaaagcaatcttcttcaaacgcgtactggctggaacgagcaggacattgtttcacgcgtgcaggcgtatatcaccacgcaaggttcgaaaggagccctggtacatacaccggagaagacctacgatattccgccggcacacgaacgtcgtgtcgttgatccaactggttgcggcgacgcgtttcgcgccggcctgatctatggtattcagcataattatgattggttgaccattggccgcatgggaaacttaatgggtgcgctgaaagtggaacaccctggcacgcaaaatcagcgtttcgattttgccgaattcaacgaccagttcaaacaagattttggctacgcgctctaatga

SEQ ID NO: 486 - protein, 321 aa, synthetic construct
  REGION 1..321: note = Variant of adenosine kinase
MHHHHHHGGSGMSALICGSLAYDTIMVFPDQFKNHILPDRVHRLNVSFLVPRMRREFGGCAGNIAYNLHLLGGAPIPMATVGQDFGPYREHFETLGIDLSRVKIIDDLSTPQAFITTDHDHNQITAFHPGAMMRSYENHVRDVPGVTLGLVGPDGREGMIQNAEEFAAGDIPFIFDPGQALPLFNGPELREFIEQADYVVVNDYESNLLQTRTGWNEQDIVSRVQAYITTQGSKGALVHTPEKTYDIPPAHERRVVDPTGCGDAFRAGLIYGIQHNYDWLTIGRMGNLMGALKVEHPGTQNQRFDFAEFNDQFKQDFGYAL

SEQ ID NO: 487 - DNA, 969 bp, synthetic construct
  misc_feature 1..969: note = Variant of adenosine kinase
  source 1..969: mol_type = other DNA
atgcaccatcatcaccatcacgggggctccggcatgagtgcactgatttgcggttctttagcgtatgataccatcatggtgtttccggaccagttcaagaaccatattctgcccgatcgtgttcaccgcctcaatgtcagctttcttgtaccacgcatgcgtcgtgaatttggaggctgtgccggcaacattgcgtacaatctgcatctgttgggtggtgctccgatccctatgggaacggtgggccaagatttcgggccgtatcgcgagcacttcgaaactctgggcattgacttatcccgcgtcaagatcatcgatgatctgagtacaccgcaggccttcattaccaccgaccatgatcataaccagattacggcgtttcatccaggcgcaatgatgcgttcgtacgaaaatcacgttcgtgatgtgccgggtgttaccttgggcctcgtaggtcctgatggacgcgagggcatgatccaaaatgccgaagaatttgctgctggtggtattccgttcatttttgacccaggtcaggcactgccgctgttcaacggccccgaactgcgcgagtttatcgaacaggcggactatgtggtggtcaacgattacgaaagcaatcttcttcaagaacgtactggctggaacgagcaggacattgtttcacgcgtgcaggcgtatatcaccacgcaaggttcgaaaggagccctggtacatacaccggagaagacctacgatattccgccggcacacgaacgtcgtgtcgttgatccaactggttgcggcgacgcgtttcgcgccggcctgatctatggtattcagcataattatgattggttgaccattggccgcatgggaaacttaatgggtgcgctgaaagtggaacaccctggcacgcaaaatcagcgtttcgattttgccctgttcaacgaccagttcaaacaagattttggctacgcgctctaatga

SEQ ID NO: 488 - protein, 321 aa, synthetic construct
  REGION 1..321: note = Variant of adenosine kinase
MHHHHHHGGSGMSALICGSLAYDTIMVFPDQFKNHILPDRVHRLNVSFLVPRMRREFGGCAGNIAYNLHLLGGAPIPMGTVGQDFGPYREHFETLGIDLSRVKIIDDLSTPQAFITTDHDHNQITAFHPGAMMRSYENHVRDVPGVTLGLVGPDGREGMIQNAEEFAAGGIPFIFDPGQALPLFNGPELREFIEQADYVVVNDYESNLLQERTGWNEQDIVSRVQAYITTQGSKGALVHTPEKTYDIPPAHERRVVDPTGCGDAFRAGLIYGIQHNYDWLTIGRMGNLMGALKVEHPGTQNQRFDFALFNDQFKQDFGYAL

SEQ ID NO: 489 - DNA, 969 bp, synthetic construct
  misc_feature 1..969: note = Variant of adenosine kinase
  source 1..969: mol_type = other DNA
atgcaccatcatcaccatcacgggggctccggcatgagtgcactgatttgcggttctttagcgtatgataccatcatggtgtttccggaccagttcaagaaccatattctgcccgatcgtgttcaccgcctcaatgtcagctttcttgtaccacgcctgcgtcgtgaatttggaggctgtgccggcaacattgcgtacaatctgcatctgttgggtggtgctccgatccctatgggaacggtgggccaagatttcgggccgtatcgcgagcacttcgaaactctgggcattgacttatcccgcgtcaagatcatcgatgatctgagtacaccgcaggccttcattaccaccgaccatgatcataaccagattacggcgtttcatccaggcgcaatgatgcgttcgtacgaaaatcacgttcgtgatgtgccgggtgttaccttgggcctcgtaggtcctgatggacgcgagggcatgatccaaaatgccgaagaatttgctgctggtggcattccgttcatttttgacccaggtcaggcactgccgctgttcaacggccccgaactgcgcgagtttatcgaacaggcggactatgtggtggtcaacgattacgaaagcaatcttcttcaaacgcgtactggctggaacgagcaggacattgtttcacgcgtgcaggcgtatatcaccacgcaaggttcgaaaggagccctggtacatacaccggagaagacctacgatattccgccggcacacgaacgtcgtgtcgttgatccaactggttgcggcgacgcgtttcgcgccggcctgatctatggtattcagcataattatgattggttgaccattggccgcatgggaaacttaatgggtgcgctgaaagtggaacaccctggcacgcaaaatcagcgtttcgattttgccgaattcaacgaccagttcaaacaagattttggctacgcgctctaatga

SEQ ID NO: 490 - protein, 321 aa, synthetic construct
  REGION 1..321: note = Variant of adenosine kinase
MHHHHHHGGSGMSALICGSLAYDTIMVFPDQFKNHILPDRVHRLNVSFLVPRLRREFGGCAGNIAYNLHLLGGAPIPMGTVGQDFGPYREHFETLGIDLSRVKIIDDLSTPQAFITTDHDHNQITAFHPGAMMRSYENHVRDVPGVTLGLVGPDGREGMIQNAEEFAAGGIPFIFDPGQALPLFNGPELREFIEQADYVVVNDYESNLLQTRTGWNEQDIVSRVQAYITTQGSKGALVHTPEKTYDIPPAHERRVVDPTGCGDAFRAGLIYGIQHNYDWLTIGRMGNLMGALKVEHPGTQNQRFDFAEFNDQFKQDFGYAL

SEQ ID NO: 491 - DNA, 969 bp, synthetic construct
  misc_feature 1..969: note = Variant of adenosine kinase
  source 1..969: mol_type = other DNA
atgcaccatcatcaccatcacgggggctccggcatgagtgcactgatttgcggttctttagcgtatgataccatcatggtgtttccggaccagttcaagaaccatattctgcccgatcgtgttcaccgcctcaatgtcagctttcttgtaccacgcatgcgtcgtgaatttggaggctgtgccggcaacattgcgtacaatctgcatctgttgggtggtgctccgatcccaatgggtacggtgggccaagatttcgggccgtatcgcgagcacttcgaaactctgggcattgacttatcccgcgtcaagatcatcgatgatctgagtacacctcaggccttcattaccaccgaccatgatcataaccagattacggcgtttcatccaggcgcaatgatgcgttcgtacgaaaatcacgttcgtgatgtgccgggtgttaccttgggcctcgtaggtcctgatggacgcgagggcatgatccaaaatgccgaagaatttgctgctgctggtattccgttcatttttgacccaggtcaggcactgccgctgttcaacggccccgaactgcgcgagtttatcgaacaggcggactatgtggtggtcaacgattacgaaagcaatcttcttcaagaacgtactggctggaacgagcaggacattgtttcacgcgtgcaggcgtatatcaccacgcaaggttcgcgcggagtcctggtacatacaccggagaagacctacgatattccgccggcacacgaacgtcgtgtcgttgatccaactggttgcggcgacgcgtttcgcgccggcctgatctatggtattcagcataattatgattggttgaccattggccgcatgggaaacttaatgggtgcgctgaaagtggaacaccctggcacgcaaaatcagcgtttcgattttgccgaattcaacgaccagttcaaacaagattttggctacgcgctctaatga

SEQ ID NO: 492 - protein, 321 aa, synthetic construct
  REGION 1..321: note = Variant of adenosine kinase
MHHHHHHGGSGMSALICGSLAYDTIMVFPDQFKNHILPDRVHRLNVSFLVPRMRREFGGCAGNIAYNLHLLGGAPIPMGTVGQDFGPYREHFETLGIDLSRVKIIDDLSTPQAFITTDHDHNQITAFHPGAMMRSYENHVRDVPGVTLGLVGPDGREGMIQNAEEFAAAGIPFIFDPGQALPLFNGPELREFIEQADYVVVNDYESNLLQERTGWNEQDIVSRVQAYITTQGSRGVLVHTPEKTYDIPPAHERRVVDPTGCGDAFRAGLIYGIQHNYDWLTIGRMGNLMGALKVEHPGTQNQRFDFAEFNDQFKQDFGYAL

SEQ ID NO: 493 - DNA, 969 bp, synthetic construct
  misc_feature 1..969: note = Variant of adenosine kinase
  source 1..969: mol_type = other DNA
atgcaccatcatcaccatcacgggggctccggcatgagtgcactgatttgcggttctttagcgtatgataccatcatggtgtttccggaccagttcaagaaccatattctgcccgatcgtgttcaccgcctcaatgtcagctttcttgtaccacgcatgcgtcgtgaatttggaggctgtgccggcaacattgcgtacaatctgcatctgttgggtggtgctccgatcgtaatggctacggtgggccaagatttcggtccgtatcgcgagcacttcgaaactctgggcattgacttatcccgcgtcaagatcatcgatgatctgagtacaccgcaggccttcattaccaccgaccatgatcataaccagattacggcgtttcatccaggcgcaatgatgcgttcgtacgaaaatcacgttcgtgatgtgccgggtgttaccttgggcctcgtaggtcctgatggacgcgagggcatgatccaaaatgccgaagaatttgctgctgctggtattccgttcatttttgacccaggtcaggcactgccgctgttcaacggccccgaactgcgcgagtttatcgaacaggcggactatgtggtggtcaacgattacgaaagcaatcttcttcaagagcgtactggctggaacgagcaggacattgtttcacgcgtgcaggcgtatatcaccacgcaaggttcgcgcggagtcctggtacatacaccggagaagacctacgatattccgccggcacacgaacgtcgtgtcgttgatccaactggttgcggcgacgcgtttcgcgccggcctgatctatggtattcagcataattatgattggttgaccattggccgcatgggaaacttaatgggtgcgctgaaagtggaacaccctggcacgcaaaatcagcgtttcgattttgccgaattcaacgaccagttcaaacaagattttggctacgcgctctaatga

SEQ ID NO: 494 - protein, 321 aa, synthetic construct
  REGION 1..321: note = Variant of adenosine kinase
MHHHHHHGGSGMSALICGSLAYDTIMVFPDQFKNHILPDRVHRLNVSFLVPRMRREFGGCAGNIAYNLHLLGGAPIVMATVGQDFGPYREHFETLGIDLSRVKIIDDLSTPQAFITTDHDHNQITAFHPGAMMRSYENHVRDVPGVTLGLVGPDGREGMIQNAEEFAAAGIPFIFDPGQALPLFNGPELREFIEQADYVVVNDYESNLLQERTGWNEQDIVSRVQAYITTQGSRGVLVHTPEKTYDIPPAHERRVVDPTGCGDAFRAGLIYGIQHNYDWLTIGRMGNLMGALKVEHPGTQNQRFDFAEFNDQFKQDFGYAL

SEQ ID NO: 495 - DNA, 969 bp, synthetic construct
  misc_feature 1..969: note = Variant of adenosine kinase
  source 1..969: mol_type = other DNA
atgcaccatcatcaccatcacgggggctccggcatgagtgcactgatttgcggttctttagcgtatgataccatcatggtgtttccggaccagttcaagaaccatattctgcccgatcgtgttcaccgcctcaatgtcagctttcttgtaccacgcctgcgtcgtgaatttggaggctgtgccggcaacattgcgtacaatctgcatctgttgggtggtgctccgatcgtaatggctacggtgggccaagatttcggtccgtatcgcgagcacttcgaaactctgggcattgacttatcccgcgtcaagatcatcgatgatctgagtacaccgcaggccttcattaccaccgaccatgatcataaccagattacggcgtttcatccaggcgcaatgatgcgttcgtacgaaaatcacgttcgtgatgtgccgggtgttaccttgggcctcgtaggtcctgatggacgcgagggcatgatccaaaatgccgaagaatttgctgctggtggcattccgttcatttttgacccaggtcaggcactgccgctgttcaacggccccgaactgcgcgagtttatcgaacaggcggactatgtggtggtcaacgattacgaaagcaatcttcttcaagagcgtactggctggaacgagcaggacattgtttcacgcgtgcaggcgtatatcaccacgcaaggttcgaaaggagccctggtacatacaccggagaagacctacgatattccgccggcacacgaacgtcgtgtcgttgatccaactggttgcggcgacgcgtttcgcgccggcctgatctatggtattcagcataattatgattggttgaccattggccgcatgggaaacttaatgggtgcgctgaaagtggaacaccctggcacgcaaaatcagcgtttcgattttgccgaattcaacgaccagttcaaacaagattttggctacgcgctctaatga

SEQ ID NO: 496 - protein, 321 aa, synthetic construct
  REGION 1..321: note = Variant of adenosine kinase
MHHHHHHGGSGMSALICGSLAYDTIMVFPDQFKNHILPDRVHRLNVSFLVPRLRREFGGCAGNIAYNLHLLGGAPIVMATVGQDFGPYREHFETLGIDLSRVKIIDDLSTPQAFITTDHDHNQITAFHPGAMMRSYENHVRDVPGVTLGLVGPDGREGMIQNAEEFAAGGIPFIFDPGQALPLFNGPELREFIEQADYVVVNDYESNLLQERTGWNEQDIVSRVQAYITTQGSKGALVHTPEKTYDIPPAHERRVVDPTGCGDAFRAGLIYGIQHNYDWLTIGRMGNLMGALKVEHPGTQNQRFDFAEFNDQFKQDFGYAL

SEQ ID NO: 497 - DNA, 969 bp, synthetic construct
  misc_feature 1..969: note = Variant of adenosine kinase
  source 1..969: mol_type = other DNA
atgcaccatcatcaccatcacgggggctccggcatgagtgcactgatttgcggttctttagcgtatgataccatcatggtgtttccggaccagttcaagaaccatattctgcccgatcgtgttcaccgcctcaatgtcagctttcttgtaccacgcatgcgtcgtgaatttggaggctgtgccggcaacattgcgtacaatctgcatctgttgggtggtgctccgatcgtaatgggtacggtgggccaagatttcggtccgtatcgcgagcacttcgaaactctgggcattgacttatcccgcgtcaagatcatcgatgatctgagtacagctcaggccttcattaccaccgaccatgatcataaccagattacggcgtttcatccaggcgcaatgatgcgttcgtacgaaaatcacgttcgtgatgtgccgggtgttaccttgggcctcgtaggtcctgatggacgcgagggcatgatccaaaatgccgaagaatttgctgctggtggcattccgttcatttttgacccaggtcaggcactgccgctgttcaacggccccgaactgcgcgagtttatcgaacaggcggactatgtggtggtcaacgattacgaaagcaatcttcttcaagagcgtactggctggaacgagcaggacattgtttcacgcgtgcaggcgtatatcaccacgcaaggttcgaaaggagccctggtacatacaccggagaagacctacgatattccgccggcacacgaacgtcgtgtcgttgatccaactggttgcggcgacgcgtttcgcgccggcctgatctatggtattcagcataattatgattggttgaccattggccgcatgggaaacttaatgggtgcgctgaaagtggaacaccctggcacgcaaaatcagcgtttcgattttgccgaattcaacgaccagttcaaacaagattttggctacgcgctctaatga

SEQ ID NO: 498 - protein, 321 aa, synthetic construct
  REGION 1..321: note = Variant of adenosine kinase
MHHHHHHGGSGMSALICGSLAYDTIMVFPDQFKNHILPDRVHRLNVSFLVPRMRREFGGCAGNIAYNLHLLGGAPIVMGTVGQDFGPYREHFETLGIDLSRVKIIDDLSTAQAFITTDHDHNQITAFHPGAMMRSYENHVRDVPGVTLGLVGPDGREGMIQNAEEFAAGGIPFIFDPGQALPLFNGPELREFIEQADYVVVNDYESNLLQERTGWNEQDIVSRVQAYITTQGSKGALVHTPEKTYDIPPAHERRVVDPTGCGDAFRAGLIYGIQHNYDWLTIGRMGNLMGALKVEHPGTQNQRFDFAEFNDQFKQDFGYAL

SEQ ID NO: 499 - DNA, 969 bp, synthetic construct
  misc_feature 1..969: note = Variant of adenosine kinase
  source 1..969: mol_type = other DNA
atgcaccatcatcaccatcacgggggctccggcatgagtgcactgatttgcggttctttagcgtatgataccatcatggtgtttccggaccagttcaagaaccatattctgcccgatcgtgttcaccgcctcaatgtcagctttcttgtaccacgcctgcgtcgtgaatttggaggctgtgccggcaacattgcgtacaatctgcatctgttgggtggtgctccgatcccaatgggtacggtgggccaagatttcggtccgtatcgcgagcacttcgaaactctgggcattgacttatcccgcgtcaagatcatcgatgatctgagtacaccgcaggccttcattaccaccgaccatgatcataaccagattacggcgtttcatccaggcgcaatgatgcgttcgtacgaaaatcacgttcgtgatgtgccgggtgttaccttgggcctcgtaggtcctgatggacgcgagggcatgatccaaaatgccgaagaatttgctgctggtggcattccgttcatttttgacccaggtcaggcactgccgctgttcaacggccccgaactgcgcgagtttatcgaacaggcggactatgtggtggtcaacgattacgaaagcaatcttcttcaagagcgtactggctggaacgagcaggacattgtttcacgcgtgcaggcgtatatcaccacgcaaggttcgcgcggagtcctggtacatacaccggagaagacctacgatattccgccggcacacgaacgtcgtgtcgttgatccaactggttgcggcgacgcgtttcgcgccggcctgatctatggtattcagcataattatgattggttgaccattggccgcatgggaaacttaatgggtgcgctgaaagtggaacaccctggcacgcaaaatcagcgtttcgattttgccgaattcaacgaccagttcaaacaagattttggctacgcgctctaatga

SEQ ID NO: 500 - protein, 321 aa, synthetic construct
  REGION 1..321: note = Variant of adenosine kinase
MHHHHHHGGSGMSALICGSLAYDTIMVFPDQFKNHILPDRVHRLNVSFLVPRLRREFGGCAGNIAYNLHLLGGAPIPMGTVGQDFGPYREHFETLGIDLSRVKIIDDLSTPQAFITTDHDHNQITAFHPGAMMRSYENHVRDVPGVTLGLVGPDGREGMIQNAEEFAAGGIPFIFDPGQALPLFNGPELREFIEQADYVVVNDYESNLLQERTGWNEQDIVSRVQAYITTQGSRGVLVHTPEKTYDIPPAHERRVVDPTGCGDAFRAGLIYGIQHNYDWLTIGRMGNLMGALKVEHPGTQNQRFDFAEFNDQFKQDFGYAL

SEQ ID NO: 501 - DNA, 969 bp, synthetic construct
  misc_feature 1..969: note = Variant of adenosine kinase
  source 1..969: mol_type = other DNA
atgcaccatcatcaccatcacgggggctccggcatgagtgcactgatttgcggttctttagcgtatgataccatcatggtgtttccggaccagttcaagaaccatattctgcccgatcgtgttcaccgcctcaatgtcagctttcttgtaccacgcatgcgtcgtgaatttggaggctgtgccggcaacattgcgtacaatctgcatctgttgggtggtgctccgatcccaatgggtacggtgggccaagatttcgggccgtatcgcgagcacttcgaaactctgggcattgacttatcccgcgtcaagatcatcgatgatctgagtacacctcaggccttcattaccaccgaccatgatcataaccagattacggcgtttcatccaggcgcaatgatgcgttcgtacgaaaatcacgttcgtgatgtgccgggtgttaccttgggcctcgtaggtcctgatggacgcgagggcatgatccaaaatgccgaagaatttgctgctgctgatattccgttcatttttgacccaggtcaggcactgccgctgttcaacggccccgaactgcgcgagtttatcgaacaggcggactatgtggtggtcaacgattacgaaagcaatcttcttcaagagcgtactggctggaacgagcaggacattgtttcacgcgtgcaggcgtatatcaccacgcaaggttcgaaaggagccctggtacatacaccggagaagacctacgatattcctccggcacacgaacgtcgtgtcgttgatccaactggttgcggcgacgcgtttcgcgccggcctgatctatggtattcagcataattatgattggttgaccattggccgcatgggaaacttaatgggtgcgctgaaagtggaacaccctggcacgcaaaatcagcgtttcgattttgccgaattcaacgaccagttcaaacaagattttggctacgcgctctaatga

SEQ ID NO: 502 - protein, 321 aa, synthetic construct
  REGION 1..321: note = Variant of adenosine kinase
MHHHHHHGGSGMSALICGSLAYDTIMVFPDQFKNHILPDRVHRLNVSFLVPRMRREFGGCAGNIAYNLHLLGGAPIPMGTVGQDFGPYREHFETLGIDLSRVKIIDDLSTPQAFITTDHDHNQITAFHPGAMMRSYENHVRDVPGVTLGLVGPDGREGMIQNAEEFAAADIPFIFDPGQALPLFNGPELREFIEQADYVVVNDYESNLLQERTGWNEQDIVSRVQAYITTQGSKGALVHTPEKTYDIPPAHERRVVDPTGCGDAFRAGLIYGIQHNYDWLTIGRMGNLMGALKVEHPGTQNQRFDFAEFNDQFKQDFGYAL

SEQ ID NO: 503 - DNA, 969 bp, synthetic construct
  misc_feature 1..969: note = Variant of adenosine kinase
  source 1..969: mol_type = other DNA
atgcaccatcatcaccatcacgggggctccggcatgagtgcactgatttgcggttctttagcgtatgataccatcatggtgtttccggaccagttcaagaaccatattctgcccgatcgtgttcaccgcctcaatgtcagctttcttgtaccacgcctgcgtcgtgaatttggaggctgtgccggcaacattgcgtacaatctgcatctgttgggtggtgctccgatcgtaatggctacggtgggccaagatttcggtccgtatcgcgagcacttcgaaactctgggcattgacttatcccgcgtcaagatcatcgatgatctgagtacaccgcaggccttcattaccaccgaccatgatcataaccagattacggcgtttcatccaggcgcaatgatgcgttcgtacgaaaatcacgttcgtgatgtgccgggtgttaccttgggcctcgtaggtcctgatggacgcgagggcatgatccaaaatgccgaagaatttgctgctgctggtattccgttcatttttgacccaggtcaggcactgccgctgttcaacggccccgaactgcgcgagtttatcgaacaggcggactatgtggtggtcaacgattacgaaagcaatcttcttcaagagcgtactggctggaacgagcaggacattgtttcacgcgtgcaggcgtatatcaccacgcaaggttcgaaaggagccctggtacatacaccggagaagacctacgatattccgccggcacacgaacgtcgtgtcgttgatccaactggttgcggcgacgcgtttcgcgccggcctgatctatggtattcagcataattatgattggttgaccattggccgcatgggaaacttaatgggtgcgctgaaagtggaacaccctggcacgcaaaatcagcgtttcgattttgccgaattcaacgaccagttcaaacaagattttggctacgcgctctaatga

SEQ ID NO: 504 - protein, 321 aa, synthetic construct
  REGION 1..321: note = Variant of adenosine kinase
MHHHHHHGGSGMSALICGSLAYDTIMVFPDQFKNHILPDRVHRLNVSFLVPRLRREFGGCAGNIAYNLHLLGGAPIVMATVGQDFGPYREHFETLGIDLSRVKIIDDLSTPQAFITTDHDHNQITAFHPGAMMRSYENHVRDVPGVTLGLVGPDGREGMIQNAEEFAAAGIPFIFDPGQALPLFNGPELREFIEQADYVVVNDYESNLLQERTGWNEQDIVSRVQAYITTQGSKGALVHTPEKTYDIPPAHERRVVDPTGCGDAFRAGLIYGIQHNYDWLTIGRMGNLMGALKVEHPGTQNQRFDFAEFNDQFKQDFGYAL

SEQ ID NO: 505 - DNA, 969 bp, synthetic construct
  misc_feature 1..969: note = Variant of adenosine kinase
  source 1..969: mol_type = other DNA
atgcaccatcatcaccatcacgggggctccggcatgagtgcactgatttgcggttctttagcgtatgataccatcatggtgtttccggaccagttcaagaaccatattctgcccgatcgtgttcaccgcctcaatgtcagctttcttgtaccacgcctgcgtcgtgaatttggaggctgtgccggcaacattgcgtacaatctgcatctgttgggtggtgctccgatcccaatgggtacggtgggccaagatttccagccgtatcgcgagcacttcgaaactctgggcattgacttatcccgcgtcaagatcatcgatgatctgagtacacctcaggccttcattaccaccgaccatgatcataaccagattacggcgtttcatccaggcgcaatgatgcgttcgtacgaaaatcacgttcgtgatgtgccgggtgttaccttgggcctcgtaggtcctgatggacgcgagggcatgatccaaaatgccgaagaatttgctgctggtggcattccgttcatttttgacccaggtcaggcactgccgctgttcaacggccccgaactgcgcgagtttatcgaacaggcggactatgtggtggtcaacgattacgaaagcaatcttcttcaagaacgtactggctggaacgagcaggacattgtttcacgcgtgcaggcgtatatcaccacgcaaggttcgcgcggagtcctggtacatacaccggagaagacctacgatattcctccggcacacgaacgtcgtgtcgttgatccaactggttgcggcgacgcgtttcgcgccggcctgatctatggtattcagcataattatgattggttgaccattggccgcatgggaaacttaatgggtgcgctgaaagtggaacaccctggcacgcaaaatcagcgtttcgattttgccgaattcaacgaccagttcaaacaagattttggctacgcgctctaatga

SEQ ID NO: 506 - protein, 321 aa, synthetic construct
  REGION 1..321: note = Variant of adenosine kinase
MHHHHHHGGSGMSALICGSLAYDTIMVFPDQFKNHILPDRVHRLNVSFLVPRLRREFGGCAGNIAYNLHLLGGAPIPMGTVGQDFQPYREHFETLGIDLSRVKIIDDLSTPQAFITTDHDHNQITAFHPGAMMRSYENHVRDVPGVTLGLVGPDGREGMIQNAEEFAAGGIPFIFDPGQALPLFNGPELREFIEQADYVVVNDYESNLLQERTGWNEQDIVSRVQAYITTQGSRGVLVHTPEKTYDIPPAHERRVVDPTGCGDAFRAGLIYGIQHNYDWLTIGRMGNLMGALKVEHPGTQNQRFDFAEFNDQFKQDFGYAL

SEQ ID NO: 507 - DNA, 969 bp, synthetic construct
  misc_feature 1..969: note = Variant of adenosine kinase
  source 1..969: mol_type = other DNA
atgcaccatcatcaccatcacgggggctccggcatgagtgcactgatttgcggttctttagcgtatgataccatcatggtgtttccggaccagttcaagaaccatattctgcccgatcgtgttcaccgcctcaatgtcagctttcttgtaccacgcctgcgtcgtgaatttggaggctgtgccggcaacattgcgtacaatctgcatctgttgggtggtgctccgatccctatgggaacggtgggccaagatttcgggccgtatcgcgagcacttcgaaactctgggcattgacttatcccgcgtcaagatcatcgatgatctgagtacaccgcaggccttcattaccaccgaccatgatcataaccagattacggcgtttcatccaggcgcaatgatgcgttcgtacgaaaatcacgttcgtgatgtgccgggtgttaccttgggcctcgtaggtcctgatggacgcgagggcatgatccaaaatgccgaagaatttgctgctgctggtattccgttcatttttgacccaggtcaggcactgccgctgttcaacggccccgaactgcgcgagtttatcgaacaggcggactatgtggtggtcaacgattacgaaagcaatcttcttcaagaacgtactggctggaacgagcaggacattgtttcacgcgtgcaggcgtatatcaccacgcaaggttcgcgcggagtcctggtacatacaccggagaagacctacgatattccgccggcacacgaacgtcgtgtcgttgatccaactggttgcggcgacgcgtttcgcgccggcctgatctatggtattcagcataattatgattggttgaccattggccgcatgggaaacttaatgggtgcgctgaaagtggaacaccctggcacgcaaaatcagcgtttcgattttgccgaattcaacgaccagttcaaacaagattttggctacgcgctctaatga

SEQ ID NO: 508 - protein, 321 aa, synthetic construct
  REGION 1..321: note = Variant of adenosine kinase
MHHHHHHGGSGMSALICGSLAYDTIMVFPDQFKNHILPDRVHRLNVSFLVPRLRREFGGCAGNIAYNLHLLGGAPIPMGTVGQDFGPYREHFETLGIDLSRVKIIDDLSTPQAFITTDHDHNQITAFHPGAMMRSYENHVRDVPGVTLGLVGPDGREGMIQNAEEFAAAGIPFIFDPGQALPLFNGPELREFIEQADYVVVNDYESNLLQERTGWNEQDIVSRVQAYITTQGSRGVLVHTPEKTYDIPPAHERRVVDPTGCGDAFRAGLIYGIQHNYDWLTIGRMGNLMGALKVEHPGTQNQRFDFAEFNDQFKQDFGYAL

SEQ ID NO: 509 - DNA, 969 bp, synthetic construct
  misc_feature 1..969: note = Variant of adenosine kinase
  source 1..969: mol_type = other DNA
atgcaccatcatcaccatcacgggggctccggcatgagtgcactgatttgcggttctttagcgtatgataccatcatggtgtttccggaccagttcaagaaccatattctgcccgatcgtgttcaccgcctcaatgtcagctttcttgtaccacgcctgcgtcgtgaatttggaggctgtgccggcaacattgcgtacaatctgcatctgttgggtggtgctccgatccctatgggaacggtgggccaagatttcggtccgtatcgcgagcacttcgaaactctgggcattgacttatcccgcgtcaagatcatcgatgatctgagtacacctcaggccttcattaccaccgaccatgatcataaccagattacggcgtttcatccaggcgcaatgatgcgttcgtacgaaaatcacgttcgtgatgtgccgggtgttaccttgggcctcgtaggtcctgatggacgcgagggcatgatccaaaatgccgaagaatttgctgctggtggcattccgttcatttttgacccaggtcaggcactgccgctgttcaacggccccgaactgcgcgagtttatcgaacaggcggactatgtggtggtcaacgattacgaaagcaatcttcttcaagaacgtactggctggaacgagcaggacattgtttcacgcgtgcaggcgtatatcaccacgcaaggttcgcgcggagccctggtacatacaccggagaagacctacgatattccgccggcacacgaacgtcgtgtcgttgatccaactggttgcggcgacgcgtttcgcgccggcctgatctatggtattcagcataattatgattggttgaccattggccgcatgggaaacttaatgggtgcgctgaaagtggaacaccctggcacgcaaaatcagcgtttcgattttgccgaattcaacgaccagttcaaacaagattttggctacgcgctctaatga

SEQ ID NO: 510 - protein, 321 aa, synthetic construct
  REGION 1..321: note = Variant of adenosine kinase
MHHHHHHGGSGMSALICGSLAYDTIMVFPDQFKNHILPDRVHRLNVSFLVPRLRREFGGCAGNIAYNLHLLGGAPIPMGTVGQDFGPYREHFETLGIDLSRVKIIDDLSTPQAFITTDHDHNQITAFHPGAMMRSYENHVRDVPGVTLGLVGPDGREGMIQNAEEFAAGGIPFIFDPGQALPLFNGPELREFIEQADYVVVNDYESNLLQERTGWNEQDIVSRVQAYITTQGSRGALVHTPEKTYDIPPAHERRVVDPTGCGDAFRAGLIYGIQHNYDWLTIGRMGNLMGALKVEHPGTQNQRFDFAEFNDQFKQDFGYAL

SEQ ID NO: 511 - DNA, 969 bp, synthetic construct
  misc_feature 1..969: note = Variant of adenosine kinase
  source 1..969: mol_type = other DNA
atgcaccatcatcaccatcacgggggctccggcatgagtgcactgatttgcggttctttagcgtatgataccatcatggtgtttccggaccagttcaagaaccatattctgcccgatcgtgttcaccgcctcaatgtcagctttcttgtaccacgcatgcgtcgtgaatttggaggctgtgccggcaacattgcgtacaatctgcatctgttgggtggtgctccgatcgtaatggctacggtgggccaagatttccagccgtatcgcgagcacttcgaaactctgggcattgacttatcccgcgtcaagatcatcgatgatctgagtacacctcaggccttcattaccaccgaccatgatcataaccagattacggcgtttcatccaggcgcaatgatgcgttcgtacgaaaatcacgttcgtgatgtgccgggtgttaccttgggcctcgtaggtcctgatggacgcgagggcatgatccaaaatgccgaagaatttgctgctggtgatattccgttcatttttgacccaggtcaggcactgccgctgttcaacggccccgaactgcgcgagtttatcgaacaggcggactatgtggtggtcaacgattacgaaagcaatcttcttcaaacgcgtactggctggaacgagcaggacattgtttcacgcgtgcaggcgtatatcaccacgcaaggttcgcgcggagtcctggtacatacaccggagaagacctacgatattcctccggcacacgaacgtcgtgtcgttgatccaactggttgcggcgacgcgtttcgcgccggcctgatctatggtattcagcataattatgattggttgaccattggccgcatgggaaacttaatgggtgcgctgaaagtggaacaccctggcacgcaaaatcagcgtttcgattttgccctgttcaacgaccagttcaaacaagattttggctactcgctctaatga

SEQ ID NO: 512 - protein, 321 aa, synthetic construct
  REGION 1..321: note = Variant of adenosine kinase
MHHHHHHGGSGMSALICGSLAYDTIMVFPDQFKNHILPDRVHRLNVSFLVPRMRREFGGCAGNIAYNLHLLGGAPIVMATVGQDFQPYREHFETLGIDLSRVKIIDDLSTPQAFITTDHDHNQITAFHPGAMMRSYENHVRDVPGVTLGLVGPDGREGMIQNAEEFAAGDIPFIFDPGQALPLFNGPELREFIEQADYVVVNDYESNLLQTRTGWNEQDIVSRVQAYITTQGSRGVLVHTPEKTYDIPPAHERRVVDPTGCGDAFRAGLIYGIQHNYDWLTIGRMGNLMGALKVEHPGTQNQRFDFALFNDQFKQDFGYSL

SEQ ID NO: 513 - DNA, 969 bp, synthetic construct
  misc_feature 1..969: note = Variant of adenosine kinase
  source 1..969: mol_type = other DNA
atgcaccatcatcaccatcacgggggctccggcatgagtgcactgatttgcggttctttagcgtatgataccatcatggtgtttccggaccagttcaagaaccatattctgcccgatcgtgttcaccgcctcaatgtcagctttcttgtaccacgcctgcgtcgtgaatttggaggctgtgccggcaacattgcgtacaatctgcatctgttgggtggtgctccgatccctatgggaacggtgggccaagatttcggtccgtatcgcgagcacttcgaaactctgggcattgacttatcccgcgtcaagatcatcgatgatctgagtacaccgcaggccttcattaccaccgaccatgatcataaccagattacggcgtttcatccaggcgcaatgatgcgttcgtacgaaaatcacgttcgtgatgtgccgggtgttaccttgggcctcgtaggtcctgatggacgcgagggcatgatccaaaatgccgaagaatttgctgctggtgatattccgttcatttttgacccaggtcaggcactgccgctgttcaacggccccgaactgcgcgagtttatcgaacaggcggactatgtggtggtcaacgattacgaaagcaatcttcttcaagaacgtactggctggaacgagcaggacattgtttcacgcgtgcaggcgtatatcaccacgcaaggttcgaaaggagccctggtacatacaccggagaagacctacgatattccgccggcacacgaacgtcgtgtcgttgatccaactggttgcggcgacgcgtttcgcgccggcctgatctatggtattcagcataattatgattggttgaccattggccgcatgggaaacttaatgggtgcgctgaaagtggaacaccctggcacgcaaaatcagcgtttcgattttgccgaattcaacgaccagttcaaacaagattttggctacgcgctctaatga

SEQ ID NO: 514 - protein, 321 aa, synthetic construct
  REGION 1..321: note = Variant of adenosine kinase
MHHHHHHGGSGMSALICGSLAYDTIMVFPDQFKNHILPDRVHRLNVSFLVPRLRREFGGCAGNIAYNLHLLGGAPIPMGTVGQDFGPYREHFETLGIDLSRVKIIDDLSTPQAFITTDHDHNQITAFHPGAMMRSYENHVRDVPGVTLGLVGPDGREGMIQNAEEFAAGDIPFIFDPGQALPLFNGPELREFIEQADYVVVNDYESNLLQERTGWNEQDIVSRVQAYITTQGSKGALVHTPEKTYDIPPAHERRVVDPTGCGDAFRAGLIYGIQHNYDWLTIGRMGNLMGALKVEHPGTQNQRFDFAEFNDQFKQDFGYAL

SEQ ID NO: 515 - DNA, 969 bp, synthetic construct
  misc_feature 1..969: note = Variant of adenosine kinase
  source 1..969: mol_type = other DNA
atgcaccatcatcaccatcacgggggctccggcatgagtgcactgatttgcggttctttagcgtatgataccatcatggtgtttccggaccagttcaagaaccatattctgcccgatcgtgttcaccgcctcaatgtcagctttcttgtaccacgcatgcgtcgtgaatttggaggctgtgccggcaacattgcgtacaatctgcatctgttgggtggtgctccgatcgtaatgggtacggtgggccaagatttcggtccgtatcgcgagcacttcgaaactctgggcattgacttatcccgcgtcaagatcatcgatgatctgagtacaccgcaggccttcattaccaccgaccatgatcataaccagattacggcgtttcatccaggcgcaatgatgcgttcgtacgaaaatcacgttcgtgatgtgccgggtgttaccttgggcctcgtaggtcctgatggacgcgagggcatgatccaaaatgccgaagaatttgctgctggtggtattccgttcatttttgacccaggtcaggcactgccgctgttcaacggccccgaactgcgcgagtttatcgaacaggcggactatgtggtggtcaacgattacgaaagcaatcttcttcaagaacgtactggctggaacgagcaggacattgtttcacgcgtgcaggcgtatatcaccacgcaaggttcgaaaggagccctggtacatacaccggagaagacctacgatattcgtccggcacacgaacgtcgtgtcgttgatccaactggttgcggcgacgcgtttcgcgccggcctgatctatggtattcagcataattatgattggttgaccattggccgcatgggaaacttaatgggtgcgctgaaagtggaacaccctggcacgcaaaatcagcgtttcgattttgccgaattcaacgaccagttcaaacaagattttggctacgcgctctaatga

SEQ ID NO: 516 - protein, 321 aa, synthetic construct
  REGION 1..321: note = Variant of adenosine kinase
MHHHHHHGGSGMSALICGSLAYDTIMVFPDQFKNHILPDRVHRLNVSFLVPRMRREFGGCAGNIAYNLHLLGGAPIVMGTVGQDFGPYREHFETLGIDLSRVKIIDDLSTPQAFITTDHDHNQITAFHPGAMMRSYENHVRDVPGVTLGLVGPDGREGMIQNAEEFAAGGIPFIFDPGQALPLFNGPELREFIEQADYVVVNDYESNLLQERTGWNEQDIVSRVQAYITTQGSKGALVHTPEKTYDIRPAHERRVVDPTGCGDAFRAGLIYGIQHNYDWLTIGRMGNLMGALKVEHPGTQNQRFDFAEFNDQFKQDFGYAL

SEQ ID NO: 517 - DNA, 969 bp, synthetic construct
  misc_feature 1..969: note = Variant of adenosine kinase
  source 1..969: mol_type = other DNA
atgcaccatcatcaccatcacgggggctccggcatgagtgcactgatttgcggttctttagcgtatgataccatcatggtgtttccggaccagttcaagaaccatattctgcccgatcgtgttcaccgcctcaatgtcagctttcttgtaccacgcctgcgtcgtgaatttggaggctgtgccggcaacattgcgtacaatctgcatctgttgggtggtgctccgatccctatgggaacggtgggccaagatttccagccgtatcgcgagcacttcgaaactctgggcattgacttatcccgcgtcaagatcatcgatgatctgagtacaccgcaggccttcattaccaccgaccatgatcataaccagattacggcgtttcatccaggcgcaatgatgcgttcgtacgaaaatcacgttcgtgatgtgccgggtgttaccttgggcctcgtaggtcctgatggacgcgagggcatgatccaaaatgccgaagaatttgctgctggtggtattccgttcatttttgacccaggtcaggcactgccgctgttcaacggccccgaactgcgcgagtttatcgaacaggcggactatgtggtggtcaacgattacgaaagcaatcttcttcaagaacgtactggctggaacgagcaggacattgtttcacgcgtgcaggcgtatatcaccacgcaaggttcgaaaggagccctggtacatacaccggagaagacctacgatattccgccggcacacgaacgtcgtgtcgttgatccaactggttgcggcgacgcgtttcgcgccggcctgatctatggtattcagcataattatgattggttgaccattggccgcatgggaaacttaatgggtgcgctgaaagtggaacaccctggcacgcaaaatcagcgtttcgattttgccgaattcaacgaccagttcaaacaagattttggctacgcgctctaatga

SEQ ID NO: 518 - protein, 321 aa, synthetic construct
  REGION 1..321: note = Variant of adenosine kinase
MHHHHHHGGSGMSALICGSLAYDTIMVFPDQFKNHILPDRVHRLNVSFLVPRLRREFGGCAGNIAYNLHLLGGAPIPMGTVGQDFQPYREHFETLGIDLSRVKIIDDLSTPQAFITTDHDHNQITAFHPGAMMRSYENHVRDVPGVTLGLVGPDGREGMIQNAEEFAAGGIPFIFDPGQALPLFNGPELREFIEQADYVVVNDYESNLLQERTGWNEQDIVSRVQAYITTQGSKGALVHTPEKTYDIPPAHERRVVDPTGCGDAFRAGLIYGIQHNYDWLTIGRMGNLMGALKVEHPGTQNQRFDFAEFNDQFKQDFGYAL

SEQ ID NO: 519 - DNA, 969 bp, synthetic construct
  misc_feature 1..969: note = Variant of adenosine kinase
  source 1..969: mol_type = other DNA
atgcaccatcatcaccatcacgggggctccggcatgagtgcactgatttgcggttctttagcgtatgataccatcatggtgtttccggaccagttcaagaaccatattctgcccgatcgtgttcaccgcctcaatgtcagctttcttgtaccacgcatgcgtcgtgaatttggaggctgtgccggcaacattgcgtacaatctgcatctgttgggtggtgctccgatccctatgggaacggtgggccaagatttcggtccgtatcgcgagcacttcgaaactctgggcattgacttatcccgcgtcaagatcatcgatgatctgagtacaccgcaggccttcattaccaccgaccatgatcataaccagattacggcgtttcatccaggcgcaatgatgcgttcgtacgaaaatcacgttcgtgatgtgccgggtgttaccttgggcctcgtaggtcctgatggacgcgagggcatgatccaaaatgccgaagaatttgctgctggtggcattccgttcatttttgacccaggtcaggcactgccgctgttcaacggccccgaactgcgcgagtttatcgaacaggcggactatgtggtggtcaacgattacgaaagcaatcttcttcaagaacgtactggctggaacgagcaggacattgtttcacgcgtgcaggcgtatatcaccacgcaaggttcgaaaggagccctggtacatacaccggagaagacctacgatattccgccggcacacacgcgtcgtgtcgttgatccaactggttgcggcgacgcgtttcgcgccggcctgatctatggtattcagcataattatgattggttgaccattggccgcatgggaaacttaatgggtgcgctgaaagtggaacaccctggcacgcaaaatcagcgtttcgattttgccgaattcaacgaccagttcaaacaagattttggctacgcgctctaatga

SEQ ID NO: 520 - protein, 321 aa, synthetic construct
  REGION 1..321: note = Variant of adenosine kinase
MHHHHHHGGSGMSALICGSLAYDTIMVFPDQFKNHILPDRVHRLNVSFLVPRMRREFGGCAGNIAYNLHLLGGAPIPMGTVGQDFGPYREHFETLGIDLSRVKIIDDLSTPQAFITTDHDHNQITAFHPGAMMRSYENHVRDVPGVTLGLVGPDGREGMIQNAEEFAAGGIPFIFDPGQALPLFNGPELREFIEQADYVVVNDYESNLLQERTGWNEQDIVSRVQAYITTQGSKGALVHTPEKTYDIPPAHTRRVVDPTGCGDAFRAGLIYGIQHNYDWLTIGRMGNLMGALKVEHPGTQNQRFDFAEFNDQFKQDFGYAL

SEQ ID NO: 521 - DNA, 969 bp, synthetic construct
  misc_feature 1..969: note = Variant of adenosine kinase
  source 1..969: mol_type = other DNA
atgcaccatcatcaccatcacgggggctccggcatgagtgcactgatttgcggttctttagcgtatgataccatcatggtgtttccggaccagttcaagaaccatattctgcccgatcgtgttcaccgcctcaatgtcagctttcttgtaccacgcatgcgtcgtgaatttggaggctgtgccggcaacattgcgtacaatctgcatctgttgggtggtgctccgatccctatgggaacggtgggccaagatttcggtccgtatcgcgagcacttcgaaactctgggcattgacttatcccgcgtcaagatcatcgatgatctgagtacaccgcaggccttcattaccaccgaccatgatcataaccagattacggcgtttcatccaggcgcaatgatgcgttcgtacgaaaatcacgttcgtgatgtgccgggtgttaccttgggcctcgtaggtcctgatggacgcgagggcatgatccaaaatgccgaagaatttgctgctggtggcattccgttcatttttgacccaggtcagcagctgccgctgttcaacggccccgaactgcgcgagtttatcgaacaggcggactatgtggtggtcaacgattacgaaagcaatcttcttcaagaacgtactggctggaacgagcaggacattgtttcacgcgtgcaggcgtatatcaccacgcaaggttcgaaaggagccctggtacatacaccggagaagacctacgatattccgccggcacacgaacgtcgtgtcgttgatccaactggttgcggcgacgcgtttcgcgccggcctgatctatggtattcagcataattatgattggttgaccattggccgcatgggaaacttaatgggtgcgctgaaagtggaacaccctggcacgcaaaatcagcgtttcgattttgccgaattcaacgaccagttcaaacaagattttggctacgcgctctaatga

SEQ ID NO: 522 - protein, 321 aa, synthetic construct
  REGION 1..321: note = Variant of adenosine kinase
MHHHHHHGGSGMSALICGSLAYDTIMVFPDQFKNHILPDRVHRLNVSFLVPRMRREFGGCAGNIAYNLHLLGGAPIPMGTVGQDFGPYREHFETLGIDLSRVKIIDDLSTPQAFITTDHDHNQITAFHPGAMMRSYENHVRDVPGVTLGLVGPDGREGMIQNAEEFAAGGIPFIFDPGQQLPLFNGPELREFIEQADYVVVNDYESNLLQERTGWNEQDIVSRVQAYITTQGSKGALVHTPEKTYDIPPAHERRVVDPTGCGDAFRAGLIYGIQHNYDWLTIGRMGNLMGALKVEHPGTQNQRFDFAEFNDQFKQDFGYAL

SEQ ID NO: 523 - DNA, 969 bp, synthetic construct
  misc_feature 1..969: note = Variant of adenosine kinase
  source 1..969: mol_type = other DNA
atgcaccatcatcaccatcacgggggctccggcatgagtgcactgatttgcggttctttagcgtatgataccatcatggtgtttccggaccagttcaagaaccatattctgcccgatcgtgttcaccgcctcaatgtcagctttcttgtaccacgcatgcgtcgtgaatttggaggctgtgccggcaacattgcgtacaatctgcatctgttgggtggtgctccgatccctatgggaacggtgggccaagatttcggtccgtatcgcgagcacttcgaaactctgggcattgacttatcccgcgtcaagatcatcgatgatctgagtacaccgcaggccttcattaccaccgaccatgatcataaccagattacggcgtttcatgggggcgcaatgatgcgttcgtacgaaaatcacgttcgtgatgtgccgggtgttaccttgggcctcgtaggtcctgatggacgcgagggcatgatccaaaatgccgaagaatttgctgctggtggcattccgttcatttttgacccaggtcaggcactgccgctgttcaacggccccgaactgcgcgagtttatcgaacaggcggactatgtggtggtcaacgattacgaaagcaatcttcttcaagaacgtactggctggaacgagcaggacattgtttcacgcgtgcaggcgtatatcaccacgcaaggttcgaaaggagccctggtacatacaccggagaagacctacgatattccgccggcacacgaacgtcgtgtcgttgatccaactggttgcggcgacgcgtttcgcgccggcctgatctatggtattcagcataattatgattggttgaccattggccgcatgggaaacttaatgggtgcgctgaaagtggaacaccctggcacgcaaaatcagcgtttcgattttgccgaattcaacgaccagttcaaacaagattttggctacgcgctctaatga

SEQ ID NO: 524 - protein, 321 aa, synthetic construct
  REGION 1..321: note = Variant of adenosine kinase
MHHHHHHGGSGMSALICGSLAYDTIMVFPDQFKNHILPDRVHRLNVSFLVPRMRREFGGCAGNIAYNLHLLGGAPIPMGTVGQDFGPYREHFETLGIDLSRVKIIDDLSTPQAFITTDHDHNQITAFHGGAMMRSYENHVRDVPGVTLGLVGPDGREGMIQNAEEFAAGGIPFIFDPGQALPLFNGPELREFIEQADYVVVNDYESNLLQERTGWNEQDIVSRVQAYITTQGSKGALVHTPEKTYDIPPAHERRVVDPTGCGDAFRAGLIYGIQHNYDWLTIGRMGNLMGALKVEHPGTQNQRFDFAEFNDQFKQDFGYAL

SEQ ID NO: 525 - DNA, 969 bp, synthetic construct
  misc_feature 1..969: note = Variant of adenosine kinase
  source 1..969: mol_type = other DNA
atgcaccatcatcaccatcacgggggctccggcatgagtgcactgatttgcggttctttagcgtatgataccatcatggtgtttccggaccagttcaagaaccatattctgcccgatcgtgttcaccgcctcaatgtcagctttcttgtaccacgcatgcgtcgtgaatttggaggctgtgccggcaacattgcgtacaatctgcatctgttgggtggtgctccgatccctatgggaacggtgggccaagatttcggtccgtatcgcgagcacttcgaaactctgggcattgacttatcccgcgtcaagatcatcgatgatctgagtacaccgcaggccttcattaccaccgaccatgatatgaaccagattacggcgtttcatccaggcgcaatgatgcgttcgtacgaaaatcacgttcgtgatgtgccgggtgttaccttgggcctcgtaggtcctgatggacgcgagggcatgatccaaaatgccgaagaatttgctgctggtggcattccgttcatttttgacccaggtcaggcactgccgctgttcaacggccccgaactgcgcgagtttatcgaacaggcggactatgtggtggtcaacgattacgaaagcaatcttcttcaagaacgtactggctggaacgagcaggacattgtttcacgcgtgcaggcgtatatcaccacgcaaggttcgaaaggagccctggtacatacaccggagaagacctacgatattccgccggcacacgaacgtcgtgtcgttgatccaactggttgcggcgacgcgtttcgcgccggcctgatctatggtattcagcataattatgattggttgaccattggccgcatgggaaacttaatgggtgcgctgaaagtggaacaccctggcacgcaaaatcagcgtttcgattttgccgaattcaacgaccagttcaaacaagattttggctacgcgctctaatga

SEQ ID NO: 526 - protein, 321 aa, synthetic construct
  REGION 1..321: note = Variant of adenosine kinase
MHHHHHHGGSGMSALICGSLAYDTIMVFPDQFKNHILPDRVHRLNVSFLVPRMRREFGGCAGNIAYNLHLLGGAPIPMGTVGQDFGPYREHFETLGIDLSRVKIIDDLSTPQAFITTDHDMNQITAFHPGAMMRSYENHVRDVPGVTLGLVGPDGREGMIQNAEEFAAGGIPFIFDPGQALPLFNGPELREFIEQADYVVVNDYESNLLQERTGWNEQDIVSRVQAYITTQGSKGALVHTPEKTYDIPPAHERRVVDPTGCGDAFRAGLIYGIQHNYDWLTIGRMGNLMGALKVEHPGTQNQRFDFAEFNDQFKQDFGYAL

SEQ ID NO: 527 - DNA, 969 bp, synthetic construct
  misc_feature 1..969: note = Variant of adenosine kinase
  source 1..969: mol_type = other DNA
atgcaccatcatcaccatcacgggggctccggcatgagtgcactgatttgcggttctttagcgtatgataccatcatggtgtttccggaccagttcaagaaccatattctgcccgatcgtgttcaccgcctcaatgtcagctttcttgtaccacgcatgcgtcgtgaatttggaggctgtgccggcaacattgcgtacaatctgcatctgttgggtggtgctccgatccctatgggaacggtgggccaagatttcggtccgtatcgcgagcacttcgaaactctgggcattgacttatcccgcgtcaagatcatcgatgatctgagtacaccgcaggccttcattaccaccgaccatgatcataaccagattacggcgtttcatccaggcgcaatgatgcgttcgtacgaaaatcacgttcgtgatgtgccgggtgttaccttgggcctcgtaggtcctgatggacgcgagggcatgatccaaaatgccgaagaatttgctgctggtggcattccgttcatttttgacccaggtcaggcactgccgctgttcaacggccccgaactgcgcgagtttatcgaacaggcggactatgtggtggtcaacgattacgaaagcaatcttcttcaagaacgtactggctggaacgagcaggacattgtttcacgcgtgcaggcgtatatcaccacgcaaggttcgaaaggagccctggtacatacaccggagaagacctacgatattccgccggcacacgaacgtcgtgcggttgatccaactggttgcggcgacgcgtttcgcgccggcctgatctatggtattcagcataattatgattggttgaccattggccgcatgggaaacttaatgggtgcgctgaaagtggaacaccctggcacgcaaaatcagcgtttcgattttgccgaattcaacgaccagttcaaacaagattttggctacgcgctctaatga

SEQ ID NO: 528 - protein, 321 aa, synthetic construct
  REGION 1..321: note = Variant of adenosine kinase
MHHHHHHGGSGMSALICGSLAYDTIMVFPDQFKNHILPDRVHRLNVSFLVPRMRREFGGCAGNIAYNLHLLGGAPIPMGTVGQDFGPYREHFETLGIDLSRVKIIDDLSTPQAFITTDHDHNQITAFHPGAMMRSYENHVRDVPGVTLGLVGPDGREGMIQNAEEFAAGGIPFIFDPGQALPLFNGPELREFIEQADYVVVNDYESNLLQERTGWNEQDIVSRVQAYITTQGSKGALVHTPEKTYDIPPAHERRAVDPTGCGDAFRAGLIYGIQHNYDWLTIGRMGNLMGALKVEHPGTQNQRFDFAEFNDQFKQDFGYAL

SEQ ID NO: 529 - DNA, 969 bp, synthetic construct
  misc_feature 1..969: note = Variant of adenosine kinase
  source 1..969: mol_type = other DNA
atgcaccatcatcaccatcacgggggctccggcatgagtgcactgatttgcggttctttagcgtatgataccatcatggtgtttccggaccagttcaagaaccatattctgcccgatcgtgttcaccgcctcaatgtcagctttcttgtaccacgcatgcgtcgtgaatttggaggctgtgccggcaacattgcgtacaatctgcatctgttgggtggtgctccgatccctatgggaacggtgggccaagatttcggtccgtatcgcgagcacttcgaaactctgggcattgacttatcccgcgtcaagatcatcgatgatctgagtacaccgcaggccttcattaccaccgaccatgatcataaccagattacggcgtttcatccaggcgcaatgatgcgttcgtacgaaaatcacgttcgtgatgtgccgggtgttaccttgggcctcgtaggtcctgatggacgcgagggcatgatccaaaatgccgaagaatttgctgctggtggcattccgttcatttttgacccaggtcaggcactgccgctgttcaacggccccgaactgcgcgagtttatcgaacaggcggactatgtggtggtcaacgattacgaaagcaatcttcttcaagaacgtactggctggaacgagcaggacattgtttcacgcgtgcaggcgtatatcaccacgcaaggttcgaaaggagccctggtacatacaccggagaagacctacgatattccgccggcacacgaacgtcgttcggttgatccaactggttgcggcgacgcgtttcgcgccggcctgatctatggtattcagcataattatgattggttgaccattggccgcatgggaaacttaatgggtgcgctgaaagtggaacaccctggcacgcaaaatcagcgtttcgattttgccgaattcaacgaccagttcaaacaagattttggctacgcgctctaatga

SEQ ID NO: 530 - protein, 321 aa, synthetic construct
  REGION 1..321: note = Variant of adenosine kinase
MHHHHHHGGSGMSALICGSLAYDTIMVFPDQFKNHILPDRVHRLNVSFLVPRMRREFGGCAGNIAYNLHLLGGAPIPMGTVGQDFGPYREHFETLGIDLSRVKIIDDLSTPQAFITTDHDHNQITAFHPGAMMRSYENHVRDVPGVTLGLVGPDGREGMIQNAEEFAAGGIPFIFDPGQALPLFNGPELREFIEQADYVVVNDYESNLLQERTGWNEQDIVSRVQAYITTQGSKGALVHTPEKTYDIPPAHERRSVDPTGCGDAFRAGLIYGIQHNYDWLTIGRMGNLMGALKVEHPGTQNQRFDFAEFNDQFKQDFGYAL

SEQ ID NO: 531 - DNA, 969 bp, synthetic construct
  misc_feature 1..969: note = Variant of adenosine kinase
  source 1..969: mol_type = other DNA
atgcaccatcatcaccatcacgggggctccggcatgagtgcactgatttgcggttctttagcgtatgataccatcatggtgtttccggaccagttcaagaaccatattctgcccgatcgtgttcaccgcctcaatgtcagctttcttgtaccacgcatgcgtcgtgaatttggaggctgtgccggcaacattgcgtacaatctgcatctgttgggtggtgctccgatccctatgggaacggtgggccaagatttcggtccgtatcgcgagcacttcgaaactctgggcattgacttatcccgcgtcaagatcatcgatgatctgagtacaccgcaggccttcattaccaccgaccatgatttgaaccagattacggcgtttcatccaggcgcaatgatgcgttcgtacgaaaatcacgttcgtgatgtgccgggtgttaccttgggcctcgtaggtcctgatggacgcgagggcatgatccaaaatgccgaagaatttgctgctggtggcattccgttcatttttgacccaggtcaggcactgccgctgttcaacggccccgaactgcgcgagtttatcgaacaggcggactatgtggtggtcaacgattacgaaagcaatcttcttcaagaacgtactggctggaacgagcaggacattgtttcacgcgtgcaggcgtatatcaccacgcaaggttcgaaaggagccctggtacatacaccggagaagacctacgatattccgccggcacacgaacgtcgtgtcgttgatccaactggttgcggcgacgcgtttcgcgccggcctgatctatggtattcagcataattatgattggttgaccattggccgcatgggaaacttaatgggtgcgctgaaagtggaacaccctggcacgcaaaatcagcgtttcgattttgccgaattcaacgaccagttcaaacaagattttggctacgcgctctaatga

SEQ ID NO: 532 - protein, 321 aa, synthetic construct
  REGION 1..321: note = Variant of adenosine kinase
MHHHHHHGGSGMSALICGSLAYDTIMVFPDQFKNHILPDRVHRLNVSFLVPRMRREFGGCAGNIAYNLHLLGGAPIPMGTVGQDFGPYREHFETLGIDLSRVKIIDDLSTPQAFITTDHDLNQITAFHPGAMMRSYENHVRDVPGVTLGLVGPDGREGMIQNAEEFAAGGIPFIFDPGQALPLFNGPELREFIEQADYVVVNDYESNLLQERTGWNEQDIVSRVQAYITTQGSKGALVHTPEKTYDIPPAHERRVVDPTGCGDAFRAGLIYGIQHNYDWLTIGRMGNLMGALKVEHPGTQNQRFDFAEFNDQFKQDFGYAL

SEQ ID NO: 533 - DNA, 969 bp, synthetic construct
  misc_feature 1..969: note = Variant of adenosine kinase
  source 1..969: mol_type = other DNA
atgcaccatcatcaccatcacgggggctccggcatgagtgcactgatttgcggttctttagcgtatgataccatcatggtgtttccggaccagttcaagaaccatattctgcccgatcgtgttcaccgcctcaatgtcagctttcttgtaccacgcatgcgtcgtgaatttggaggctgtgccggcaacattgcgtacaatctgcatctgttgggtggtgctccgatccctatgggaacggtgggccaagatttcggtccgtatcgcgagcacttcgaaactctgggcattgacttatcccgcgtcaagatcatcgatgatctgagtacaccgcaggccttcattaccaccgaccatgatcataaccagattacggcgtttcatccaggcgcaatgatgcgttcgtacgaaaatcacgttcgtgatgtgccgggtgttaccttgggcctcgtaggtcctgatggacgcgagggcatgatccaaaatgccgaagaatttgctgctggtggcattccgttcatttttgacccaggtcaggcactgccgctgttcaacggccccgaactgcgcgagtttatcgaacaggcggactatgtggtggtcaacgattacgaaagcaatcttcttcaagaacgtactggctggaacgagcaggacattgtttcacgcgtgcaggcgtatatcaccacgcaaggttcgaaaggagccctggtacatacaccggagaagacctacgatattccgccggcacacgaacgtcgtgaggttgatccaactggttgcggcgacgcgtttcgcgccggcctgatctatggtattcagcataattatgattggttgaccattggccgcatgggaaacttaatgggtgcgctgaaagtggaacaccctggcacgcaaaatcagcgtttcgattttgccgaattcaacgaccagttcaaacaagattttggctacgcgctctaatga

SEQ ID NO: 534 - protein, 321 aa, synthetic construct
  REGION 1..321: note = Variant of adenosine kinase
MHHHHHHGGSGMSALICGSLAYDTIMVFPDQFKNHILPDRVHRLNVSFLVPRMRREFGGCAGNIAYNLHLLGGAPIPMGTVGQDFGPYREHFETLGIDLSRVKIIDDLSTPQAFITTDHDHNQITAFHPGAMMRSYENHVRDVPGVTLGLVGPDGREGMIQNAEEFAAGGIPFIFDPGQALPLFNGPELREFIEQADYVVVNDYESNLLQERTGWNEQDIVSRVQAYITTQGSKGALVHTPEKTYDIPPAHERREVDPTGCGDAFRAGLIYGIQHNYDWLTIGRMGNLMGALKVEHPGTQNQRFDFAEFNDQFKQDFGYAL

SEQ ID NO: 535 - DNA, 969 bp, synthetic construct
  misc_feature 1..969: note = Variant of adenosine kinase
  source 1..969: mol_type = other DNA
atgcaccatcatcaccatcacgggggctccggcatgagtgcactgatttgcggttctttagcgtatgataccatcatggtgtttccggaccagttcaagaaccatattctgcccgatcgtgttcaccgcctcaatgtcagctttcttgtaccacgcatgcgtcgtgaatttggaggctgtgccggcaacattgcgtacaatctgcatctgttgggtggtgctccgatccctatgggaacggtgggccaagatttcggtccgtatcgcgagcacttcgaaactctgggcattgacttatcccgcgtcaagatcatcgatgatctgagtacaccgcaggccttcattaccaccgacatggatcataaccagattacggcgtttcatccaggcgcaatgatgcgttcgtacgaaaatcacgttcgtgatgtgccgggtgttaccttgggcctcgtaggtcctgatggacgcgagggcatgatccaaaatgccgaagaatttgctgctggtggcattccgttcatttttgacccaggtcaggcactgccgctgttcaacggccccgaactgcgcgagtttatcgaacaggcggactatgtggtggtcaacgattacgaaagcaatcttcttcaagaacgtactggctggaacgagcaggacattgtttcacgcgtgcaggcgtatatcaccacgcaaggttcgaaaggagccctggtacatacaccggagaagacctacgatattccgccggcacacgaacgtcgtgtcgttgatccaactggttgcggcgacgcgtttcgcgccggcctgatctatggtattcagcataattatgattggttgaccattggccgcatgggaaacttaatgggtgcgctgaaagtggaacaccctggcacgcaaaatcagcgtttcgattttgccgaattcaacgaccagttcaaacaagattttggctacgcgctctaatga

SEQ ID NO: 536 - protein, 321 aa, synthetic construct
  REGION 1..321: note = Variant of adenosine kinase
MHHHHHHGGSGMSALICGSLAYDTIMVFPDQFKNHILPDRVHRLNVSFLVPRMRREFGGCAGNIAYNLHLLGGAPIPMGTVGQDFGPYREHFETLGIDLSRVKIIDDLSTPQAFITTDMDHNQITAFHPGAMMRSYENHVRDVPGVTLGLVGPDGREGMIQNAEEFAAGGIPFIFDPGQALPLFNGPELREFIEQADYVVVNDYESNLLQERTGWNEQDIVSRVQAYITTQGSKGALVHTPEKTYDIPPAHERRVVDPTGCGDAFRAGLIYGIQHNYDWLTIGRMGNLMGALKVEHPGTQNQRFDFAEFNDQFKQDFGYAL

SEQ ID NO: 537 - DNA, 969 bp, synthetic construct
  misc_feature 1..969: note = Variant of adenosine kinase
  source 1..969: mol_type = other DNA
atgcaccatcatcaccatcacgggggctccggcatgagtgcactgatttgcggttctttagcgtatgataccatcatggtgtttccggaccagttcaagaaccatattctgcccgatcgtgttcaccgcctcaatgtcagctttcttgtaccacgcatgcgtcgtgaatttggaggctgtgccggcaacattgcgtacaatctgcatctgttgggtggtgctccgatccctatgggaacggtgggccaagatttcggtccgtatcgcgagcacttcgaaactctgggcattgacttatcccgcgtcaagatcatcgatgatctgagtacaccgcaggccttcattaccaccgaccatgatcataaccagattacggcgtttcatccaggcgcaatgatgcgttcgtacgaaaatcacgttcgtgatgtgccgggtgttaccttgggcctcgtaggtcctgatggacgcgagggcatgatccaaaatgccgaagaatttgctgctggtggcattccgttcatttttgacccaggtcaggcactgccgctgttcaacggccccgaactgcgcgagtttatcgaacaggcggactatgtggtggtcaacgattacgaaagcaatcttcttcaagaacgtactggctggaacgagcaggacattgtttcacgcgtgcaggcgtatatcaccacgcaaggttcgaaaggagccctggtacatacaccggagaagacctacgatattccgccggcacacgaacgtcgtgtctgtgatccaactggttgcggcgacgcgtttcgcgccggcctgatctatggtattcagcataattatgattggttgaccattggccgcatgggaaacttaatgggtgcgctgaaagtggaacaccctggcacgcaaaatcagcgtttcgattttgccgaattcaacgaccagttcaaacaagattttggctacgcgctctaatga

SEQ ID NO: 538 - protein, 321 aa, synthetic construct
  REGION 1..321: note = Variant of adenosine kinase
MHHHHHHGGSGMSALICGSLAYDTIMVFPDQFKNHILPDRVHRLNVSFLVPRMRREFGGCAGNIAYNLHLLGGAPIPMGTVGQDFGPYREHFETLGIDLSRVKIIDDLSTPQAFITTDHDHNQITAFHPGAMMRSYENHVRDVPGVTLGLVGPDGREGMIQNAEEFAAGGIPFIFDPGQALPLFNGPELREFIEQADYVVVNDYESNLLQERTGWNEQDIVSRVQAYITTQGSKGALVHTPEKTYDIPPAHERRVCDPTGCGDAFRAGLIYGIQHNYDWLTIGRMGNLMGALKVEHPGTQNQRFDFAEFNDQFKQDFGYAL

SEQ ID NO: 539 - DNA, 969 bp, synthetic construct
  misc_feature 1..969: note = Variant of adenosine kinase
  source 1..969: mol_type = other DNA
atgcaccatcatcaccatcacgggggctccggcatgagtgcactgatttgcggttctttagcgtatgataccatcatggtgtttccggaccagttcaagaaccatattctgcccgatcgtgttcaccgcctcaatgtcagctttcttgtaccacgcatgcgtcgtgaatttggaggctgtgccggcaacattgcgtacaatctgcatctgttgggtggtgctccgatccctatgggaacggtgggccaagatttcggtccgtatcgcgagcacttcgaaactctgggcattgacttatcccgcgtcaagatcatcgatgatctgagtacaccgcaggccttcattaccaccgaccatgatcataaccagattacggcgtttcatccaggcgcaatgatgcgttcgtacgaaaatcacgttcgtgatgtgccgggtgttaccttgggcctcgtaggtcctgatggacgcgagggcatgatccaaaatgccgaagaatttgctgctggtggcattccgttcatttttgacccaggtcaggcactgccgctgttcaacggccccgaactgcgcgagtttatcgaacaggcggactatgtggtggtcaacgattacgaaagcaatcttcttcaagaacgtactggctggaacgagcaggacattgtttcacgcgtgcaggcgtatatcaccacgcaaggttcgaaaggagccctggtacatacaccggagaagacctacgatattccgccggcacacgaacgtcgtggggttgatccaactggttgcggcgacgcgtttcgcgccggcctgatctatggtattcagcataattatgattggttgaccattggccgcatgggaaacttaatgggtgcgctgaaagtggaacaccctggcacgcaaaatcagcgtttcgattttgccgaattcaacgaccagttcaaacaagattttggctacgcgctctaatga

SEQ ID NO: 540 - protein, 321 aa, synthetic construct
  REGION 1..321: note = Variant of adenosine kinase
MHHHHHHGGSGMSALICGSLAYDTIMVFPDQFKNHILPDRVHRLNVSFLVPRMRREFGGCAGNIAYNLHLLGGAPIPMGTVGQDFGPYREHFETLGIDLSRVKIIDDLSTPQAFITTDHDHNQITAFHPGAMMRSYENHVRDVPGVTLGLVGPDGREGMIQNAEEFAAGGIPFIFDPGQALPLFNGPELREFIEQADYVVVNDYESNLLQERTGWNEQDIVSRVQAYITTQGSKGALVHTPEKTYDIPPAHERRGVDPTGCGDAFRAGLIYGIQHNYDWLTIGRMGNLMGALKVEHPGTQNQRFDFAEFNDQFKQDFGYAL

SEQ ID NO: 541 - DNA, 969 bp, synthetic construct
  misc_feature 1..969: note = Variant of adenosine kinase
  source 1..969: mol_type = other DNA
atgcaccatcatcaccatcacgggggctccggcatgagtgcactgatttgcggttctttagcgtatgataccatcatggtgtttccggaccagttcaagaaccatattctgcccgatcgtgttcaccgcctcaatgtcagctttcttgtaccacgcatgcgtcgtgaatttggaggctgtgccggcaacattgcgtacaatctgcatctgttgggtggtgctccgatccctatgggaacggtgggccaagatttcggtccgtatcgcgagcacttcgaaactctgggcattgacttatcccgcgtcaagatcatcgatgatctgagtacaccgcaggccttcattaccaccgaccatgatcataaccagattacggcgtttcatccaggcgcaatgatgcgttcgtacgaaaatcacgttcgtgatgtgccgggtgttaccttgggcctcgtaggtcctgatggacgcgagggcatgatccaaaatgccgaagaatttgctgctggtggcattccgttcatttttgacccaggtcaggcactgccgctgttcaacggccccgaactgcgcgagtttatcgaacaggcggactatgtggtggtcaacgattacgaaagcaatcttcttcaagaacgtactggctggaacgagcaggacattgtttcacgcgtgcaggcgtatatcaccacgcaaggttcgaaaggagccattgtacatacaccggagaagacctacgatattccgccggcacacgaacgtcgtgtcgttgatccaactggttgcggcgacgcgtttcgcgccggcctgatctatggtattcagcataattatgattggttgaccattggccgcatgggaaacttaatgggtgcgctgaaagtggaacaccctggcacgcaaaatcagcgtttcgattttgccgaattcaacgaccagttcaaacaagattttggctacgcgctctaatga

SEQ ID NO: 542 - protein, 321 aa, synthetic construct
  REGION 1..321: note = Variant of adenosine kinase
MHHHHHHGGSGMSALICGSLAYDTIMVFPDQFKNHILPDRVHRLNVSFLVPRMRREFGGCAGNIAYNLHLLGGAPIPMGTVGQDFGPYREHFETLGIDLSRVKIIDDLSTPQAFITTDHDHNQITAFHPGAMMRSYENHVRDVPGVTLGLVGPDGREGMIQNAEEFAAGGIPFIFDPGQALPLFNGPELREFIEQADYVVVNDYESNLLQERTGWNEQDIVSRVQAYITTQGSKGAIVHTPEKTYDIPPAHERRVVDPTGCGDAFRAGLIYGIQHNYDWLTIGRMGNLMGALKVEHPGTQNQRFDFAEFNDQFKQDFGYAL

SEQ ID NO: 543 - DNA, 969 bp, synthetic construct
  misc_feature 1..969: note = Variant of adenosine kinase
  source 1..969: mol_type = other DNA
atgcaccatcatcaccatcacgggggctccggcatgagtgcactgatttgcggttctttagcgtatgataccatcatggtgtttccggaccagttcaagaaccatattctgcccgatcgtgttcaccgcctcaatgtcagctttcttgtaccacgcatgcgtcgtgaatttggaggctgtgccggcaacattgcgtacaatctgcatctgttgggtggtgctccgatccctatgggaacggtgggccaagatttcggtccgtatcgcgagcacttcgaaactctgggcattgacttatcccgcgtcaagatcatcgatgatctgagtacaccgcaggccttcattaccaccgaccatgatcataaccagattacggcgtttcatccaggcgcaatgatgcgttcgtacgaaaatcacgttcgtgatgtgccgggtgttaccttgggcctcgtaggtcctgatggacgcgagggcatgatccaaaatgccgaagaatttgctgctggtggcattccgttcatttttgacccaggtcaggcactgccgctgttcaacggccccgaactgcgcgagtttatcgaacaggcggactatgtggtggtcaacgattacgaaagcaatcttcttcaagaacgtactggctggaacgagcaggacattgtttcacgcgtgcaggcgtatatcaccacgcaaggttcgaaaggagccctggtacatacaccggagaagacctacgatattccgctggcacacgaacgtcgtgtcgttgatccaactggttgcggcgacgcgtttcgcgccggcctgatctatggtattcagcataattatgattggttgaccattggccgcatgggaaacttaatgggtgcgctgaaagtggaacaccctggcacgcaaaatcagcgtttcgattttgccgaattcaacgaccagttcaaacaagattttggctacgcgctctaatga

SEQ ID NO: 544 - protein, 321 aa, synthetic construct
  REGION 1..321: note = Variant of adenosine kinase
MHHHHHHGGSGMSALICGSLAYDTIMVFPDQFKNHILPDRVHRLNVSFLVPRMRREFGGCAGNIAYNLHLLGGAPIPMGTVGQDFGPYREHFETLGIDLSRVKIIDDLSTPQAFITTDHDHNQITAFHPGAMMRSYENHVRDVPGVTLGLVGPDGREGMIQNAEEFAAGGIPFIFDPGQALPLFNGPELREFIEQADYVVVNDYESNLLQERTGWNEQDIVSRVQAYITTQGSKGALVHTPEKTYDIPLAHERRVVDPTGCGDAFRAGLIYGIQHNYDWLTIGRMGNLMGALKVEHPGTQNQRFDFAEFNDQFKQDFGYAL

SEQ ID NO: 545 - DNA, 969 bp, synthetic construct
  misc_feature 1..969: note = Variant of adenosine kinase
  source 1..969: mol_type = other DNA
atgcaccatcatcaccatcacgggggctccggcatgagtgcactgatttgcggttcttttgcgtatgataccatcatggtgtttccggaccagttcaagaaccatattctgcccgatcgtgttcaccgcctcaatgtcagctttcttgtaccacgcatgcgtcgtgaatttggaggctgtgccggcaacattgcgtacaatctgcatctgttgggtggtgctccgatccctatgggaacggtgggccaagatttcggtccgtatcgcgagcacttcgaaactctgggcattgacttatcccgcgtcaagatcatcgatgatctgagtacaccgcaggccttcattaccaccgaccatgatcataaccagattacggcgtttcatccaggcgcaatgatgcgttcgtacgaaaatcacgttcgtgatgtgccgggtgttaccttgggcctcgtaggtcctgatggacgcgagggcatgatccaaaatgccgaagaatttgctgctggtggcattccgttcatttttgacccaggtcaggcactgccgctgttcaacggccccgaactgcgcgagtttatcgaacaggcggactatgtggtggtcaacgattacgaaagcaatcttcttcaagaacgtactggctggaacgagcaggacattgtttcacgcgtgcaggcgtatatcaccacgcaaggttcgaaaggagccctggtacatacaccggagaagacctacgatattccgccggcacacgaacgtcgtgtcgttgatccaactggttgcggcgacgcgtttcgcgccggcctgatctatggtattcagcataattatgattggttgaccattggccgcatgggaaacttaatgggtgcgctgaaagtggaacaccctggcacgcaaaatcagcgtttcgattttgccgaattcaacgaccagttcaaacaagattttggctacgcgctctaatga

SEQ ID NO: 546 - protein, 321 aa, synthetic construct
  REGION 1..321: note = Variant of adenosine kinase
MHHHHHHGGSGMSALICGSFAYDTIMVFPDQFKNHILPDRVHRLNVSFLVPRMRREFGGCAGNIAYNLHLLGGAPIPMGTVGQDFGPYREHFETLGIDLSRVKIIDDLSTPQAFITTDHDHNQITAFHPGAMMRSYENHVRDVPGVTLGLVGPDGREGMIQNAEEFAAGGIPFIFDPGQALPLFNGPELREFIEQADYVVVNDYESNLLQERTGWNEQDIVSRVQAYITTQGSKGALVHTPEKTYDIPPAHERRVVDPTGCGDAFRAGLIYGIQHNYDWLTIGRMGNLMGALKVEHPGTQNQRFDFAEFNDQFKQDFGYAL

SEQ ID NO: 547 - DNA, 969 bp, synthetic construct
  misc_feature 1..969: note = Variant of adenosine kinase
  source 1..969: mol_type = other DNA
atgcaccatcatcaccatcacgggggctccggcatgagtgcactgatttgcggttctttagcgtatgataccatcatggtgtttccggaccagttcaagaaccatattctgcccgatcgtgttcaccgcctcaatgtcagctttcttgtaccacgcatgcgtcgtgaatttggaggctgtgccggcaacattgcgtacaatctgcatctgttgggtggtgctccgatccctatgggaacggtgggccaagatttcggtccgtatcgcgagcacttcgaaactctgggcattgacttatcccgcgtcaagatcatcgatgatctgagtacaccgcaggccttcattaccaccgaccatgatcataaccagattacggcgtttcatccaggcgcaatgatgcgttcgtacgaaaatcacgttcgtgatgtgccgggtgttaccttgggcctcgtaggtcctgatggacgcgagggcatgatccaaaatgccgaagaatttgctgctggtggcattccgttcatttttgacccaggtcaggcactgccgctgttcaacggccccgaactgcgcgagtttatcgaacaggcggactatgtggtggtcaacgattacgaaagcaatcttcttcaagaacgtactggctggaacgagcaggacattgtttcacgcgtgcaggcgtatatcaccacgcaaggttcgaaaggagccctggtacatacaccggagaagacctacgatattccgccggcacacgaacgtcgtaaggttgatccaactggttgcggcgacgcgtttcgcgccggcctgatctatggtattcagcataattatgattggttgaccattggccgcatgggaaacttaatgggtgcgctgaaagtggaacaccctggcacgcaaaatcagcgtttcgattttgccgaattcaacgaccagttcaaacaagattttggctacgcgctctaatga

SEQ ID NO: 548 - protein, 321 aa, synthetic construct
  REGION 1..321: note = Variant of adenosine kinase
MHHHHHHGGSGMSALICGSLAYDTIMVFPDQFKNHILPDRVHRLNVSFLVPRMRREFGGCAGNIAYNLHLLGGAPIPMGTVGQDFGPYREHFETLGIDLSRVKIIDDLSTPQAFITTDHDHNQITAFHPGAMMRSYENHVRDVPGVTLGLVGPDGREGMIQNAEEFAAGGIPFIFDPGQALPLFNGPELREFIEQADYVVVNDYESNLLQERTGWNEQDIVSRVQAYITTQGSKGALVHTPEKTYDIPPAHERRKVDPTGCGDAFRAGLIYGIQHNYDWLTIGRMGNLMGALKVEHPGTQNQRFDFAEFNDQFKQDFGYAL

SEQ ID NO: 549 - DNA, 969 bp, synthetic construct
  misc_feature 1..969: note = Variant of adenosine kinase
  source 1..969: mol_type = other DNA
atgcaccatcatcaccatcacgggggctccggcatgagtgcactgatttgcggttctttagcgtatgataccatcatggtgtttccggaccagttcaagaaccatattctgcccgatcgtgttcaccgcctcaatgtcagctttcttgtaccacgcatgcgtcgtgaatttggaggctgtgccggcaacattgcgtacaatctgcatctgttgggtggtgctccgatccctatgggaacggtgggccaagatttcggtccgtatcgcgagcacttcgaaactctgggcattgacttatcccgcgtcaagatcatcgatgatctgagtacaccgcaggccttcattaccaccgaccatgatcataaccagattacggcgtttcatccaggcgcaatgatgcgttcgtacgaaaatcacgttcgtgatgtgccgggtgttaccttgggcctcgtaggtcctgatggacgcgagggcatgatccaaaatgccgaagaatttgctgctggtggcattccgttcatttttgacccaggtcaggcactgccgctgttcaacggccccgaactgcgcgagtttatcgaacaggcggactatgtggtggtcaacgattacgaaagcaatcttcttcaagaacgtactggctggaacgagcaggacattgtttcacgcgtgcaggcgtatatcaccacgcaaggttcgaaaggagccgtggtacatacaccggagaagacctacgatattccgccggcacacgaacgtcgtgtcgttgatccaactggttgcggcgacgcgtttcgcgccggcctgatctatggtattcagcataattatgattggttgaccattggccgcatgggaaacttaatgggtgcgctgaaagtggaacaccctggcacgcaaaatcagcgtttcgattttgccgaattcaacgaccagttcaaacaagattttggctacgcgctctaatga

SEQ ID NO: 550 - protein, 321 aa, synthetic construct
  REGION 1..321: note = Variant of adenosine kinase
MHHHHHHGGSGMSALICGSLAYDTIMVFPDQFKNHILPDRVHRLNVSFLVPRMRREFGGCAGNIAYNLHLLGGAPIPMGTVGQDFGPYREHFETLGIDLSRVKIIDDLSTPQAFITTDHDHNQITAFHPGAMMRSYENHVRDVPGVTLGLVGPDGREGMIQNAEEFAAGGIPFIFDPGQALPLFNGPELREFIEQADYVVVNDYESNLLQERTGWNEQDIVSRVQAYITTQGSKGAVVHTPEKTYDIPPAHERRVVDPTGCGDAFRAGLIYGIQHNYDWLTIGRMGNLMGALKVEHPGTQNQRFDFAEFNDQFKQDFGYAL

SEQ ID NO: 551 - DNA, 969 bp, synthetic construct
  misc_feature 1..969: note = Variant of adenosine kinase
  source 1..969: mol_type = other DNA
atgcaccatcatcaccatcacgggggctccggcatgagtgcactgatttgcggttctttagcgtatgataccatcatggtgtttccggaccagttcaagaaccatattctgcccgatcgtgttcaccgcctcaatgtcagctttcttgtaccacgcatgcgtcgtgaatttggaggctgtgccggcaacattgcgtacaatctgcatctgttgggtggtgctccgatccctatgggaacggtgggccaagatttcggtccgtatcgcgagcacttcgaaactctgggcattgacttatcccgcgtcaagatcatcgatgatctgagtacaccgcaggccttcattaccaccgaccatgatcataaccagattacggcgtttcatccaggcgcaatgatgcgttcgtacgaaaatcacgttcgtgatgtgccgggtgttaccttgggcctcgtaggtcctgatggacgcgagggcatgatccaaaatgccgaagaatttgctgctggtggcattccgttcatttttgacccaggtcaggcactgccgctgttcaacggccccgaactgcgcgagtttatcgaacaggcggactatgtggtggtcaacgattacgaaagcaatcttcttcaagaacgtactggctggaacgagcaggacattgtttcacgcgtgcaggcgtatatcaccacgcaaggttcggctggagccctggtacatacaccggagaagacctacgatattccgccggcacacgaacgtcgtgtcgttgatccaactggttgcggcgacgcgtttcgcgccggcctgatctatggtattcagcataattatgattggttgaccattggccgcatgggaaacttaatgggtgcgctgaaagtggaacaccctggcacgcaaaatcagcgtttcgattttgccgaattcaacgaccagttcaaacaagattttggctacgcgctctaatga

SEQ ID NO: 552 - protein, 321 aa, synthetic construct
  REGION 1..321: note = Variant of adenosine kinase
MHHHHHHGGSGMSALICGSLAYDTIMVFPDQFKNHILPDRVHRLNVSFLVPRMRREFGGCAGNIAYNLHLLGGAPIPMGTVGQDFGPYREHFETLGIDLSRVKIIDDLSTPQAFITTDHDHNQITAFHPGAMMRSYENHVRDVPGVTLGLVGPDGREGMIQNAEEFAAGGIPFIFDPGQALPLFNGPELREFIEQADYVVVNDYESNLLQERTGWNEQDIVSRVQAYITTQGSAGALVHTPEKTYDIPPAHERRVVDPTGCGDAFRAGLIYGIQHNYDWLTIGRMGNLMGALKVEHPGTQNQRFDFAEFNDQFKQDFGYAL

SEQ ID NO: 553 - DNA, 969 bp, synthetic construct
  misc_feature 1..969: note = Variant of adenosine kinase
  source 1..969: mol_type = other DNA
atgcaccatcatcaccatcacgggggctccggcatgagtgcactgatttgcggttctttagcgtatgataccatcatggtgtttccggaccagttcaagaaccatattctgcccgatcgtgttcaccgcctcaatgtcagctttcttgtaccacgcatgcgtcgtgaatttggaggctgtgccggcaacattgcgtacaatctgcatctgttgggtggtgctccgatccctatgggaacggtgggccaagatttcggtccgtatcgcgagcacttcgaaactctgggcattgacttatcccgcgtcaagatcatcgatgatctgagtacaccgcaggccttcattaccaccgaccatgatcataaccagattacggcgtttcatccaggcgcaatgatgcgttcgtacgaaaatcacgttcgtgatgtgccgggtgttaccttgggcctcgtaggtcctgatggacgcgagggcatgatccaaaatgccgaagaatttgctgctggtggcattccgttcatttttgacccaggtcaggcactgccgctgttcaacggccccgaactgcgcgagtttatcgaacaggcggactatgtggtggtcaacgattacgaaagcaatcttcttcaagaacgtactggctggaacgagcaggacattgtttcacgcgtgcaggcgtatatcaccacgcaaggttcgaaaggagccctggtacatacaccggagaagacctacgatattccgccggcacacgaacgtcaggtcgttgatccaactggttgcggcgacgcgtttcgcgccggcctgatctatggtattcagcataattatgattggttgaccattggccgcatgggaaacttaatgggtgcgctgaaagtggaacaccctggcacgcaaaatcagcgtttcgattttgccgaattcaacgaccagttcaaacaagattttggctacgcgctctaatga

SEQ ID NO: 554 - protein, 321 aa, synthetic construct
  REGION 1..321: note = Variant of adenosine kinase
MHHHHHHGGSGMSALICGSLAYDTIMVFPDQFKNHILPDRVHRLNVSFLVPRMRREFGGCAGNIAYNLHLLGGAPIPMGTVGQDFGPYREHFETLGIDLSRVKIIDDLSTPQAFITTDHDHNQITAFHPGAMMRSYENHVRDVPGVTLGLVGPDGREGMIQNAEEFAAGGIPFIFDPGQALPLFNGPELREFIEQADYVVVNDYESNLLQERTGWNEQDIVSRVQAYITTQGSKGALVHTPEKTYDIPPAHERQVVDPTGCGDAFRAGLIYGIQHNYDWLTIGRMGNLMGALKVEHPGTQNQRFDFAEFNDQFKQDFGYAL

SEQ ID NO: 555 - DNA, 969 bp, synthetic construct
  misc_feature 1..969: note = Variant of adenosine kinase
  source 1..969: mol_type = other DNA
atgcaccatcatcaccatcacgggggctccggcatgagtgcactgatttgcggttctttagcgtatgataccatcatggtgtttccggaccagttcaagaaccatattctgcccgatcgtgttcaccgcctcaatgtcagctttcttgtaccacgcatgcgtcgtgaatttggaggctgtgccggcaacattgcgtacaatctgcatctgttgggtggtgctccgatccctatgggaacggtgggccaagatttcggtccgtatcgcgagcacttcgaaactctgggcattgacttatcccgcgtcaagatcatcgatgatctgagtacaccgcaggccttcattaccaccgaccatgatcataaccagattacggcgtttcatccaggcgcaatgatgcgttcgtacgaaaatcacgttcgtgatgtgccgggtgttaccttgggcctcgtaggtcctgatggacgcgagggcatgatccaaaatgccgaagaatttgctgctggtggcattccgttcatttttgacccaggtcaggcactgccgctgttcaacggccccgaactgcgcgagtttatcgaacaggcggactatgtggtggtcaacgattacgaaagcaatcttcttcaagaacgtactggctggaacgagcaggacattgtttcacgcgtgcaggcgtatatcaccacgcaaggttcgaaaggagccctggtacatacaccggagaagacctacgatattccgccggcacacgaacgtcgtgtcatggatccaactggttgcggcgacgcgtttcgcgccggcctgatctatggtattcagcataattatgattggttgaccattggccgcatgggaaacttaatgggtgcgctgaaagtggaacaccctggcacgcaaaatcagcgtttcgattttgccgaattcaacgaccagttcaaacaagattttggctacgcgctctaatga

SEQ ID NO: 556 - protein, 321 aa, synthetic construct
  REGION 1..321: note = Variant of adenosine kinase
MHHHHHHGGSGMSALICGSLAYDTIMVFPDQFKNHILPDRVHRLNVSFLVPRMRREFGGCAGNIAYNLHLLGGAPIPMGTVGQDFGPYREHFETLGIDLSRVKIIDDLSTPQAFITTDHDHNQITAFHPGAMMRSYENHVRDVPGVTLGLVGPDGREGMIQNAEEFAAGGIPFIFDPGQALPLFNGPELREFIEQADYVVVNDYESNLLQERTGWNEQDIVSRVQAYITTQGSKGALVHTPEKTYDIPPAHERRVMDPTGCGDAFRAGLIYGIQHNYDWLTIGRMGNLMGALKVEHPGTQNQRFDFAEFNDQFKQDFGYAL

SEQ ID NO: 557 - DNA, 969 bp, synthetic construct
  misc_feature 1..969: note = Variant of adenosine kinase
  source 1..969: mol_type = other DNA
atgcaccatcatcaccatcacgggggctccggcatgagtgcactgatttgcggttctttagcgtatgataccatcatggtgtttccggaccagttcaagaaccatattctgcccgatcgtgttcaccgcctcaatgtcagctttcttgtaccacgcatgcgtcgttattttggaggctgtgccggcaacattgcgtacaatctgcatctgttgggtggtgctccgatccctatgggaacggtgggccaagatttcggtccgtatcgcgagcacttcgaaactctgggcattgacttatcccgcgtcaagatcatcgatgatctgagtacaccgcaggccttcattaccaccgaccatgatcataaccagattacggcgtttcatccaggcgcaatgatgcgttcgtacgaaaatcacgttcgtgatgtgccgggtgttaccttgggcctcgtaggtcctgatggacgcgagggcatgatccaaaatgccgaagaatttgctgctggtggcattccgttcatttttgacccaggtcaggcactgccgctgttcaacggccccgaactgcgcgagtttatcgaacaggcggactatgtggtggtcaacgattacgaaagcaatcttcttcaagaacgtactggctggaacgagcaggacattgtttcacgcgtgcaggcgtatatcaccacgcaaggttcgaaaggagccctggtacatacaccggagaagacctacgatattccgccggcacacgaacgtcgtgtcgttgatccaactggttgcggcgacgcgtttcgcgccggcctgatctatggtattcagcataattatgattggttgaccattggccgcatgggaaacttaatgggtgcgctgaaagtggaacaccctggcacgcaaaatcagcgtttcgattttgccgaattcaacgaccagttcaaacaagattttggctacgcgctctaatga

SEQ ID NO: 558 - protein, 321 aa, synthetic construct
  REGION 1..321: note = Variant of adenosine kinase
MHHHHHHGGSGMSALICGSLAYDTIMVFPDQFKNHILPDRVHRLNVSFLVPRMRRYFGGCAGNIAYNLHLLGGAPIPMGTVGQDFGPYREHFETLGIDLSRVKIIDDLSTPQAFITTDHDHNQITAFHPGAMMRSYENHVRDVPGVTLGLVGPDGREGMIQNAEEFAAGGIPFIFDPGQALPLFNGPELREFIEQADYVVVNDYESNLLQERTGWNEQDIVSRVQAYITTQGSKGALVHTPEKTYDIPPAHERRVVDPTGCGDAFRAGLIYGIQHNYDWLTIGRMGNLMGALKVEHPGTQNQRFDFAEFNDQFKQDFGYAL

SEQ ID NO: 559 - DNA, 969 bp, synthetic construct
  misc_feature 1..969: note = Variant of adenosine kinase
  source 1..969: mol_type = other DNA
atgcaccatcatcaccatcacgggggctccggcatgagtgcactgatttgcggttctttagcgtatgataccatcatggtgtttccggaccagttcaagaaccatattctgcccgatcgtgttcaccgcctcaatgtcagctttcttgtaccacgcatgcgtcgtttttttggaggctgtgccggcaacattgcgtacaatctgcatctgttgggtggtgctccgatccctatgggaacggtgggccaagatttcggtccgtatcgcgagcacttcgaaactctgggcattgacttatcccgcgtcaagatcatcgatgatctgagtacaccgcaggccttcattaccaccgaccatgatcataaccagattacggcgtttcatccaggcgcaatgatgcgttcgtacgaaaatcacgttcgtgatgtgccgggtgttaccttgggcctcgtaggtcctgatggacgcgagggcatgatccaaaatgccgaagaatttgctgctggtggcattccgttcatttttgacccaggtcaggcactgccgctgttcaacggccccgaactgcgcgagtttatcgaacaggcggactatgtggtggtcaacgattacgaaagcaatcttcttcaagaacgtactggctggaacgagcaggacattgtttcacgcgtgcaggcgtatatcaccacgcaaggttcgaaaggagccctggtacatacaccggagaagacctacgatattccgccggcacacgaacgtcgtgtcgttgatccaactggttgcggcgacgcgtttcgcgccggcctgatctatggtattcagcataattatgattggttgaccattggccgcatgggaaacttaatgggtgcgctgaaagtggaacaccctggcacgcaaaatcagcgtttcgattttgccgaattcaacgaccagttcaaacaagattttggctacgcgctctaatga

SEQ ID NO: 560 - protein, 321 aa, synthetic construct
  REGION 1..321: note = Variant of adenosine kinase
MHHHHHHGGSGMSALICGSLAYDTIMVFPDQFKNHILPDRVHRLNVSFLVPRMRRFFGGCAGNIAYNLHLLGGAPIPMGTVGQDFGPYREHFETLGIDLSRVKIIDDLSTPQAFITTDHDHNQITAFHPGAMMRSYENHVRDVPGVTLGLVGPDGREGMIQNAEEFAAGGIPFIFDPGQALPLFNGPELREFIEQADYVVVNDYESNLLQERTGWNEQDIVSRVQAYITTQGSKGALVHTPEKTYDIPPAHERRVVDPTGCGDAFRAGLIYGIQHNYDWLTIGRMGNLMGALKVEHPGTQNQRFDFAEFNDQFKQDFGYAL

SEQ ID NO: 561 - DNA, 969 bp, synthetic construct
  misc_feature 1..969: note = Variant of adenosine kinase
  source 1..969: mol_type = other DNA
atgcaccatcatcaccatcacgggggctccggcatgagtgcactgatttgcggttctttagcgtatgataccatcatggtgtttccggaccagttcaagaaccatattctgcccgatcgtgttcaccgcctcaatgtcagctttcttgtaccacgcatgcgtcgtgaatttggaggctgtgccggcaacattgcgtacaatctgcatctgttgggtggtgctccgatccctatgggaacggtgggccaagatttcggtccgtatcgcgagcacttcgaaactctgggcattgacttatcccgcgtcaagatcatcgatgatctgagtacaccgcaggccttcattaccaccgaccatgatcataaccagattacggcgtttcatccaggcgcaatgatgcgttcgtacgaaaatcacgttcgtgatgtgccgggtgttaccttgggcctcgtaggtcctgatggacgcgagggcatgatccaaaatgccgaagaatttgctgctggtggcattccgttcatttttgacccaggtcaggcactgccgctgttcaacggccccgaactgcgcgagtttatcgaacaggcggactatgtggtggtcaacgattacgaaagcaatcttcttcaagaacgtactggctggaacgagcaggacattgtttcacgcgtgcaggcgtatatcaccacgcaaggttcgaaaggagccctggtacatacaccggagaagacctacgatattccgatggcacacgaacgtcgtgtcgttgatccaactggttgcggcgacgcgtttcgcgccggcctgatctatggtattcagcataattatgattggttgaccattggccgcatgggaaacttaatgggtgcgctgaaagtggaacaccctggcacgcaaaatcagcgtttcgattttgccgaattcaacgaccagttcaaacaagattttggctacgcgctctaatga

SEQ ID NO: 562 - protein, 321 aa, synthetic construct
  REGION 1..321: note = Variant of adenosine kinase
MHHHHHHGGSGMSALICGSLAYDTIMVFPDQFKNHILPDRVHRLNVSFLVPRMRREFGGCAGNIAYNLHLLGGAPIPMGTVGQDFGPYREHFETLGIDLSRVKIIDDLSTPQAFITTDHDHNQITAFHPGAMMRSYENHVRDVPGVTLGLVGPDGREGMIQNAEEFAAGGIPFIFDPGQALPLFNGPELREFIEQADYVVVNDYESNLLQERTGWNEQDIVSRVQAYITTQGSKGALVHTPEKTYDIPMAHERRVVDPTGCGDAFRAGLIYGIQHNYDWLTIGRMGNLMGALKVEHPGTQNQRFDFAEFNDQFKQDFGYAL

SEQ ID NO: 563 - DNA, 969 bp, synthetic construct
  misc_feature 1..969: note = Variant of adenosine kinase
  source 1..969: mol_type = other DNA
atgcaccatcatcaccatcacgggggctccggcatgagtgcactgatttgcggttctttagcgtatgataccatcatggtgtttccggaccagttcaagaaccatattctgcccgatcgtgttcaccgcctcaatgtcagctttcttgtaccacgcatgcgtcgtgaatttggaggctgtgccggcaacattgcgtacaatctgcatctgttgggtggtgctccgatccctatgggaacggtgggccaagatttcggtccgtatcgcgagcacttcgaaactctgggcattgacttatcccgcgtcaagatcatcgatgatctgagtacaccgcaggccttcattaccaccgacactgatcataaccagattacggcgtttcatccaggcgcaatgatgcgttcgtacgaaaatcacgttcgtgatgtgccgggtgttaccttgggcctcgtaggtcctgatggacgcgagggcatgatccaaaatgccgaagaatttgctgctggtggcattccgttcatttttgacccaggtcaggcactgccgctgttcaacggccccgaactgcgcgagtttatcgaacaggcggactatgtggtggtcaacgattacgaaagcaatcttcttcaagaacgtactggctggaacgagcaggacattgtttcacgcgtgcaggcgtatatcaccacgcaaggttcgaaaggagccctggtacatacaccggagaagacctacgatattccgccggcacacgaacgtcgtgtcgttgatccaactggttgcggcgacgcgtttcgcgccggcctgatctatggtattcagcataattatgattggttgaccattggccgcatgggaaacttaatgggtgcgctgaaagtggaacaccctggcacgcaaaatcagcgtttcgattttgccgaattcaacgaccagttcaaacaagattttggctacgcgctctaatga

SEQ ID NO: 564 - protein, 321 aa, synthetic construct
  REGION 1..321: note = Variant of adenosine kinase
MHHHHHHGGSGMSALICGSLAYDTIMVFPDQFKNHILPDRVHRLNVSFLVPRMRREFGGCAGNIAYNLHLLGGAPIPMGTVGQDFGPYREHFETLGIDLSRVKIIDDLSTPQAFITTDTDHNQITAFHPGAMMRSYENHVRDVPGVTLGLVGPDGREGMIQNAEEFAAGGIPFIFDPGQALPLFNGPELREFIEQADYVVVNDYESNLLQERTGWNEQDIVSRVQAYITTQGSKGALVHTPEKTYDIPPAHERRVVDPTGCGDAFRAGLIYGIQHNYDWLTIGRMGNLMGALKVEHPGTQNQRFDFAEFNDQFKQDFGYAL

SEQ ID NO: 565 - DNA, 969 bp, synthetic construct
  misc_feature 1..969: note = Variant of adenosine kinase
  source 1..969: mol_type = other DNA
atgcaccatcatcaccatcacgggggctccggcatgagtgcactgatttgcggttctttagcgtatgataccatcatggtgtttccggaccagttcaagaaccatattctgcccgatcgtgttcaccgcctcaatgtcagctttcttgtaccacgcatgcgtcgtgaatttggaggctgtgccggcaacattgcgtacaatctgcatctgttgggtggtgctccgatccctatgggaacggtgggccaagatttcggtccgtatcgcgagcacttcgaaactctgggcattgacttatcccgcgtcaagatcatcgatgatctgagtacaccgcaggccttcattaccaccgaccatgatcataaccagattacggcgtttcatccaggcgcaatgatgcgttcgtacgaaaatcacgttcgtgatgtgccgggtgttaccttgggcctcgtaggtcctgatggacgcgagggcatgatccaaaatgccgaagaatttgctgctggtggcattccgttcatttttgacccaggtcaggcactgccgctgttcaacggccccgaactgcgcgagtttatcgaacaggcggactatgtggtggtcaacgattacgaaagcaatcttcttcaagaacgtactggctggaacgagcaggacattgtttcacgcgtgcaggcgtatatcaccacgcaaggttcgaaaggagccctggtacatacaccggagaagacctacgatattccgccggcacacgaacgtcgtgtcgttgatccaactggttgcggcgacgcgtttcgcgccggcctgatctatggtattcagcataattatgattggttgaccattggccgcatgggagtgttaatgggtgcgctgaaagtggaacaccctggcacgcaaaatcagcgtttcgattttgccgaattcaacgaccagttcaaacaagattttggctacgcgctctaatga

SEQ ID NO: 566 - protein, 321 aa, synthetic construct
  REGION 1..321: note = Variant of adenosine kinase
MHHHHHHGGSGMSALICGSLAYDTIMVFPDQFKNHILPDRVHRLNVSFLVPRMRREFGGCAGNIAYNLHLLGGAPIPMGTVGQDFGPYREHFETLGIDLSRVKIIDDLSTPQAFITTDHDHNQITAFHPGAMMRSYENHVRDVPGVTLGLVGPDGREGMIQNAEEFAAGGIPFIFDPGQALPLFNGPELREFIEQADYVVVNDYESNLLQERTGWNEQDIVSRVQAYITTQGSKGALVHTPEKTYDIPPAHERRVVDPTGCGDAFRAGLIYGIQHNYDWLTIGRMGVLMGALKVEHPGTQNQRFDFAEFNDQFKQDFGYAL

SEQ ID NO: 567 - DNA, 969 bp, synthetic construct
  misc_feature 1..969: note = Variant of adenosine kinase
  source 1..969: mol_type = other DNA
atgcaccatcatcaccatcacgggggctccggcatgagtgcactgatttgcggttctttagcgtatgataccatcatggtgtttccggaccagttcaagaaccatattctgcccgatcgtgttcaccgcctcaatgtcagctttcttgtaccacgcatgcgtcgtgaatttggaggctgtgccggcaacattgcgtacaatctgcatctgttgggtggtgctccgatccctatgggaacggtgggccaagatttcggtccgtatcgcgagcacttcgaaactctgggcattgacttatcccgcgtcaagatcatcgatgatctgagtacaccgcaggccttcattaccaccgaccatgattttaaccagattacggcgtttcatccaggcgcaatgatgcgttcgtacgaaaatcacgttcgtgatgtgccgggtgttaccttgggcctcgtaggtcctgatggacgcgagggcatgatccaaaatgccgaagaatttgctgctggtggcattccgttcatttttgacccaggtcaggcactgccgctgttcaacggccccgaactgcgcgagtttatcgaacaggcggactatgtggtggtcaacgattacgaaagcaatcttcttcaagaacgtactggctggaacgagcaggacattgtttcacgcgtgcaggcgtatatcaccacgcaaggttcgaaaggagccctggtacatacaccggagaagacctacgatattccgccggcacacgaacgtcgtgtcgttgatccaactggttgcggcgacgcgtttcgcgccggcctgatctatggtattcagcataattatgattggttgaccattggccgcatgggaaacttaatgggtgcgctgaaagtggaacaccctggcacgcaaaatcagcgtttcgattttgccgaattcaacgaccagttcaaacaagattttggctacgcgctctaatga

SEQ ID NO: 568 - protein, 321 aa, synthetic construct
  REGION 1..321: note = Variant of adenosine kinase
MHHHHHHGGSGMSALICGSLAYDTIMVFPDQFKNHILPDRVHRLNVSFLVPRMRREFGGCAGNIAYNLHLLGGAPIPMGTVGQDFGPYREHFETLGIDLSRVKIIDDLSTPQAFITTDHDFNQITAFHPGAMMRSYENHVRDVPGVTLGLVGPDGREGMIQNAEEFAAGGIPFIFDPGQALPLFNGPELREFIEQADYVVVNDYESNLLQERTGWNEQDIVSRVQAYITTQGSKGALVHTPEKTYDIPPAHERRVVDPTGCGDAFRAGLIYGIQHNYDWLTIGRMGNLMGALKVEHPGTQNQRFDFAEFNDQFKQDFGYAL

SEQ ID NO: 569 - DNA, 969 bp, synthetic construct
  misc_feature 1..969: note = Variant of adenosine kinase
  source 1..969: mol_type = other DNA
atgcaccatcatcaccatcacgggggctccggcatgagtgcactgatttgcggttctttagcgtatgataccatcatggtgtttccggaccagttcaagaaccatattctgcccgatcgtgttcaccgcctcaatgtcagctttcttgtaccacgcatgcgtcgtgaatttggaggctgtgccggcaacattgcgtacaatctgcatctgttgggtggtgctccgatccctatgggaacggtgggccaagatttcggtccgtatcgcgagcacttcgaaactctgggcattgacttatcccgcgtcaagatcatcgatgatctgagtacaccgcaggccttcattaccaccgacagtgatcataaccagattacggcgtttcatccaggcgcaatgatgcgttcgtacgaaaatcacgttcgtgatgtgccgggtgttaccttgggcctcgtaggtcctgatggacgcgagggcatgatccaaaatgccgaagaatttgctgctggtggcattccgttcatttttgacccaggtcaggcactgccgctgttcaacggccccgaactgcgcgagtttatcgaacaggcggactatgtggtggtcaacgattacgaaagcaatcttcttcaagaacgtactggctggaacgagcaggacattgtttcacgcgtgcaggcgtatatcaccacgcaaggttcgaaaggagccctggtacatacaccggagaagacctacgatattccgccggcacacgaacgtcgtgtcgttgatccaactggttgcggcgacgcgtttcgcgccggcctgatctatggtattcagcataattatgattggttgaccattggccgcatgggaaacttaatgggtgcgctgaaagtggaacaccctggcacgcaaaatcagcgtttcgattttgccgaattcaacgaccagttcaaacaagattttggctacgcgctctaatga

SEQ ID NO: 570 - protein, 321 aa, synthetic construct
  REGION 1..321: note = Variant of adenosine kinase
MHHHHHHGGSGMSALICGSLAYDTIMVFPDQFKNHILPDRVHRLNVSFLVPRMRREFGGCAGNIAYNLHLLGGAPIPMGTVGQDFGPYREHFETLGIDLSRVKIIDDLSTPQAFITTDSDHNQITAFHPGAMMRSYENHVRDVPGVTLGLVGPDGREGMIQNAEEFAAGGIPFIFDPGQALPLFNGPELREFIEQADYVVVNDYESNLLQERTGWNEQDIVSRVQAYITTQGSKGALVHTPEKTYDIPPAHERRVVDPTGCGDAFRAGLIYGIQHNYDWLTIGRMGNLMGALKVEHPGTQNQRFDFAEFNDQFKQDFGYAL

SEQ ID NO: 571 - DNA, 969 bp, synthetic construct
  misc_feature 1..969: note = Variant of adenosine kinase
  source 1..969: mol_type = other DNA
atgcaccatcatcaccatcacgggggctccggcatgagtgcactgatttgcggttctttagcgtatgataccatcatggtgtttccggaccagttcaagaaccatattctgcccgatcgtgttcaccgcctcaatgtcagctttcttgtaccacgcatgcgtcgtgaatttggaggctgtgccggcaacattgcgtacaatctgcatctgttgggtggtgctccgatccctatgggaacggtgggccaagatttcggtccgtatcgcgagcacttcgaaactctgggcattgacttatcccgcgtcaagatcatcgatgatctgagtacaccgcaggccttcattaccaccgaccatgatcataaccagattacggcgtttcatccaggcgcaatgatgcgttcgtacgaaaatcacgttcgtgatgtgccgggtgttaccttgggcctcgtaggtcctgatggacgcgagggcatgatccaaaatgccgaagaatttgctgctggtggcattccgttcatttttgacccaggtcaggcactgccgctgttcaacggccccgaactgcgcgagtttatcgaacaggcggactatgtggtggtcaacgattacgaaagcaatcttcttcaagaacgtactggctggaacgagcaggacattgtttcacgcgtgcaggcgtatatcaccacgcaaggttcgaaaggagccctggtacatacaccggagaagacctacgatattccgccggcacacaagcgtcgtgtcgttgatccaactggttgcggcgacgcgtttcgcgccggcctgatctatggtattcagcataattatgattggttgaccattggccgcatgggaaacttaatgggtgcgctgaaagtggaacaccctggcacgcaaaatcagcgtttcgattttgccgaattcaacgaccagttcaaacaagattttggctacgcgctctaatga

SEQ ID NO: 572 - protein, 321 aa, synthetic construct
  REGION 1..321: note = Variant of adenosine kinase
MHHHHHHGGSGMSALICGSLAYDTIMVFPDQFKNHILPDRVHRLNVSFLVPRMRREFGGCAGNIAYNLHLLGGAPIPMGTVGQDFGPYREHFETLGIDLSRVKIIDDLSTPQAFITTDHDHNQITAFHPGAMMRSYENHVRDVPGVTLGLVGPDGREGMIQNAEEFAAGGIPFIFDPGQALPLFNGPELREFIEQADYVVVNDYESNLLQERTGWNEQDIVSRVQAYITTQGSKGALVHTPEKTYDIPPAHKRRVVDPTGCGDAFRAGLIYGIQHNYDWLTIGRMGNLMGALKVEHPGTQNQRFDFAEFNDQFKQDFGYAL

SEQ ID NO: 573 - DNA, 969 bp, synthetic construct
  misc_feature 1..969: note = Variant of adenosine kinase
  source 1..969: mol_type = other DNA
atgcaccatcatcaccatcacgggggctccggcatgagtgcactgatttgcggttctttagcgtatgataccatcatggtgtttccggaccagttcaagaaccatattctgcccgatcgtgttcaccgcctcaatgtcagctttcttgtaccacgcatgcgtcgtggttttggaggctgtgccggcaacattgcgtacaatctgcatctgttgggtggtgctccgatccctatgggaacggtgggccaagatttcggtccgtatcgcgagcacttcgaaactctgggcattgacttatcccgcgtcaagatcatcgatgatctgagtacaccgcaggccttcattaccaccgaccatgatcataaccagattacggcgtttcatccaggcgcaatgatgcgttcgtacgaaaatcacgttcgtgatgtgccgggtgttaccttgggcctcgtaggtcctgatggacgcgagggcatgatccaaaatgccgaagaatttgctgctggtggcattccgttcatttttgacccaggtcaggcactgccgctgttcaacggccccgaactgcgcgagtttatcgaacaggcggactatgtggtggtcaacgattacgaaagcaatcttcttcaagaacgtactggctggaacgagcaggacattgtttcacgcgtgcaggcgtatatcaccacgcaaggttcgaaaggagccctggtacatacaccggagaagacctacgatattccgccggcacacgaacgtcgtgtcgttgatccaactggttgcggcgacgcgtttcgcgccggcctgatctatggtattcagcataattatgattggttgaccattggccgcatgggaaacttaatgggtgcgctgaaagtggaacaccctggcacgcaaaatcagcgtttcgattttgccgaattcaacgaccagttcaaacaagattttggctacgcgctctaatga

SEQ ID NO: 574 - protein, 321 aa, synthetic construct
  REGION 1..321: note = Variant of adenosine kinase
MHHHHHHGGSGMSALICGSLAYDTIMVFPDQFKNHILPDRVHRLNVSFLVPRMRRGFGGCAGNIAYNLHLLGGAPIPMGTVGQDFGPYREHFETLGIDLSRVKIIDDLSTPQAFITTDHDHNQITAFHPGAMMRSYENHVRDVPGVTLGLVGPDGREGMIQNAEEFAAGGIPFIFDPGQALPLFNGPELREFIEQADYVVVNDYESNLLQERTGWNEQDIVSRVQAYITTQGSKGALVHTPEKTYDIPPAHERRVVDPTGCGDAFRAGLIYGIQHNYDWLTIGRMGNLMGALKVEHPGTQNQRFDFAEFNDQFKQDFGYAL

SEQ ID NO: 575 - DNA, 969 bp, synthetic construct
  misc_feature 1..969: note = Variant of adenosine kinase
  source 1..969: mol_type = other DNA
atgcaccatcatcaccatcacgggggctccggcatgagtgcactgatttgcggttctttagcgtatgataccatcatggtgtttccggaccagttcaagaaccatattctgcccgatcgtgttcaccgcctcaatgtcagctttcttgtaccacgcatgcgtcgtgaatttggaggctgtgccggcaacattgcgtacaatctgcatctgttgggtggtgctccgatccctatgggaacggtgggccaagatttcggtccgtatcgcgagcacttcgaaactctgggcattgacttatcccgcgtcaagatcatcgatgatctgagtacaccgcaggccttcattaccaccgaccatgatcataaccagattacggcgtttcatccaggcgcaatgatgcgttcgtacgaaaatcacgttcgtgatgtgccgggtgttaccttgggcctcgtaggtcctgatggacgcgagggcatgatccaaaatgccgaagaatttgctgctggtggcattccgttcatttttgacccaggtcaggcactgccgctgttcaacggccccgaactgcgcgagtttatcgaacaggcggactatgtggtggtcaacgattacgaaagcaatcttcttcaagaacgtactggctggaacgagcaggacattgtttcacgcgtgcaggcgtatatcaccacgcaaggttcgaaaggagccctggtacatacaccggagaagacctacgatattccgccggcacacgaacgtcgtgtcgttgatccaactggttgcggcgacgcgtttcgcgccggcctgatctatggtattcagcataattatgattggttgaccattggccgcatgggaaacttaatgggtgcgctgaaagtggaacaccctggcacgcaaaatcagcgtttcgattttgccgaattcaacgaccagttcaaacaagattggggctacgcgctctaatga

SEQ ID NO: 576 - protein, 321 aa, synthetic construct
  REGION 1..321: note = Variant of adenosine kinase
MHHHHHHGGSGMSALICGSLAYDTIMVFPDQFKNHILPDRVHRLNVSFLVPRMRREFGGCAGNIAYNLHLLGGAPIPMGTVGQDFGPYREHFETLGIDLSRVKIIDDLSTPQAFITTDHDHNQITAFHPGAMMRSYENHVRDVPGVTLGLVGPDGREGMIQNAEEFAAGGIPFIFDPGQALPLFNGPELREFIEQADYVVVNDYESNLLQERTGWNEQDIVSRVQAYITTQGSKGALVHTPEKTYDIPPAHERRVVDPTGCGDAFRAGLIYGIQHNYDWLTIGRMGNLMGALKVEHPGTQNQRFDFAEFNDQFKQDWGYAL

SEQ ID NO: 577 - DNA, 969 bp, synthetic construct
  misc_feature 1..969: note = Variant of adenosine kinase
  source 1..969: mol_type = other DNA
atgcaccatcatcaccatcacgggggctccggcatgagtgcactgatttgcggttctttagcgtatgataccatcatggtgtttccggaccagttcaagaaccatattctgcccgatcgtgttcaccgcctcaatgtcagctttcttgtaccacgcatgcgtcgtgaatttggaggctgtgccggcaacattgcgtacaatctgcatctgttgggtggtgctccgatccctatgggaacggtgggccaagatttcggtccgtatcgcgagcacttcgaaactctgggcattgacttatcccgcgtcaagatcatcgatgatctgagtacaccgcaggccttcattaccaccgacgttgatcataaccagattacggcgtttcatccaggcgcaatgatgcgttcgtacgaaaatcacgttcgtgatgtgccgggtgttaccttgggcctcgtaggtcctgatggacgcgagggcatgatccaaaatgccgaagaatttgctgctggtggcattccgttcatttttgacccaggtcaggcactgccgctgttcaacggccccgaactgcgcgagtttatcgaacaggcggactatgtggtggtcaacgattacgaaagcaatcttcttcaagaacgtactggctggaacgagcaggacattgtttcacgcgtgcaggcgtatatcaccacgcaaggttcgaaaggagccctggtacatacaccggagaagacctacgatattccgccggcacacgaacgtcgtgtcgttgatccaactggttgcggcgacgcgtttcgcgccggcctgatctatggtattcagcataattatgattggttgaccattggccgcatgggaaacttaatgggtgcgctgaaagtggaacaccctggcacgcaaaatcagcgtttcgattttgccgaattcaacgaccagttcaaacaagattttggctacgcgctctaatga

SEQ ID NO: 578 - protein, 321 aa, synthetic construct
  REGION 1..321: note = Variant of adenosine kinase
MHHHHHHGGSGMSALICGSLAYDTIMVFPDQFKNHILPDRVHRLNVSFLVPRMRREFGGCAGNIAYNLHLLGGAPIPMGTVGQDFGPYREHFETLGIDLSRVKIIDDLSTPQAFITTDVDHNQITAFHPGAMMRSYENHVRDVPGVTLGLVGPDGREGMIQNAEEFAAGGIPFIFDPGQALPLFNGPELREFIEQADYVVVNDYESNLLQERTGWNEQDIVSRVQAYITTQGSKGALVHTPEKTYDIPPAHERRVVDPTGCGDAFRAGLIYGIQHNYDWLTIGRMGNLMGALKVEHPGTQNQRFDFAEFNDQFKQDFGYAL

SEQ ID NO: 579 - DNA, 969 bp, synthetic construct
  misc_feature 1..969: note = Variant of adenosine kinase
  source 1..969: mol_type = other DNA
atgcaccatcatcaccatcacgggggctccggcatgagtgcactgatttgcggttctttagcgtatgataccatcatggtgtttccggaccagttcaagaaccatattctgcccgatcgtgttcaccgcctcaatgtcagctttcttgtaccacgcatgcgtcgtgaatttggaggctgtgccggcaacattgcgtacaatctgcatctgttgggtggtgctccgatccctatgggaacggtgggccaagatttcggtccgtatcgcgagcacttcgaaactctgggcattgacttatcccgcgtcaagatcatcgatgatctgagtacaccgcaggccttcattaccaccgaccatgatcataaccagattacggcgtttcatccaggcgcaatgatgcgttcgtacgaaaatcacgttcgtgatgtgccgggtgttaccttgggcctcgtaggtcctgatggacgcgagggcatgatccaaaatgccgaagaatttgctgctggtggcattccgttcatttttgacccaggtcaggcactgccgctgttcaacggccccgaactgcgcgagtttatcgaacaggcggactatgtggtggtcaacgattacgaaagcaatcttcttcaagaacgtactggctggaacgagcaggacattgtttcacgcgtgcaggcgtatatcaccacgcaaggttcgaaaggagccctggtacatacaccggagaagacctacgatattccgccggcacacgaacgtcgtgtcgttgatccaactggttgcggcgacgcgtttcgcgccggcctgatctatggtattcagcataattatgattggttgaccattggccgcatgggaaacttaatgggtgcgctgaaagtggaacaccctggcagtcaaaatcagcgtttcgattttgccgaattcaacgaccagttcaaacaagattttggctacgcgctctaatga

SEQ ID NO: 580 - protein, 321 aa, synthetic construct
  REGION 1..321: note = Variant of adenosine kinase
MHHHHHHGGSGMSALICGSLAYDTIMVFPDQFKNHILPDRVHRLNVSFLVPRMRREFGGCAGNIAYNLHLLGGAPIPMGTVGQDFGPYREHFETLGIDLSRVKIIDDLSTPQAFITTDHDHNQITAFHPGAMMRSYENHVRDVPGVTLGLVGPDGREGMIQNAEEFAAGGIPFIFDPGQALPLFNGPELREFIEQADYVVVNDYESNLLQERTGWNEQDIVSRVQAYITTQGSKGALVHTPEKTYDIPPAHERRVVDPTGCGDAFRAGLIYGIQHNYDWLTIGRMGNLMGALKVEHPGSQNQRFDFAEFNDQFKQDFGYAL

SEQ ID NO: 581 - DNA, 969 bp, synthetic construct
  misc_feature 1..969: note = Variant of adenosine kinase
  source 1..969: mol_type = other DNA
atgcaccatcatcaccatcacgggggctccggcatgagtgcactgatttgcggttctttagcgtatgataccatcatggtgtttccggaccagttcaagaaccatattctgcccgatcgtgttcaccgcctcaatgtcagctttcttgtaccacgcatgcgtcgtgaatttggaggctgtgccggcaacattgcgtacaatctgcatctgttgggtggtgctccgatccctatgggaacggtgggccaagatttcggtccgtatcgcgagcacttcgaaactctgggcattgacttatcccgcgtcaagatcatcgatgatctgagtacaccgcaggccttcattaccaccgaccatgatcataaccagattacggcgtttcatccaggcgcaatgatgcgttcgtacgaaaatcacgttcgtgatgtgccgggtgttaccttgggcctcgtaggtcctgatggacgcgagggcatgatccaaaatgccgaagaatttgctgctggtggcattccgttcatttttgacccaggtcaggcactgccgctgttcaacggccccgaactgcgcgagtttatcgaacaggcggactatgtggtggtcaacgattacgaaagcaatcttcttcaagaacgtactggctggaacgagcaggacattgtttcacgcgtgcaggcgtatatctgtacgcaaggttcgaaaggagccctggtacatacaccggagaagacctacgatattccgccggcacacgaacgtcgtgtcgttgatccaactggttgcggcgacgcgtttcgcgccggcctgatctatggtattcagcataattatgattggttgaccattggccgcatgggaaacttaatgggtgcgctgaaagtggaacaccctggcacgcaaaatcagcgtttcgattttgccgaattcaacgaccagttcaaacaagattttggctacgcgctctaatga

SEQ ID NO: 582 - protein, 321 aa, synthetic construct
  REGION 1..321: note = Variant of adenosine kinase
MHHHHHHGGSGMSALICGSLAYDTIMVFPDQFKNHILPDRVHRLNVSFLVPRMRREFGGCAGNIAYNLHLLGGAPIPMGTVGQDFGPYREHFETLGIDLSRVKIIDDLSTPQAFITTDHDHNQITAFHPGAMMRSYENHVRDVPGVTLGLVGPDGREGMIQNAEEFAAGGIPFIFDPGQALPLFNGPELREFIEQADYVVVNDYESNLLQERTGWNEQDIVSRVQAYICTQGSKGALVHTPEKTYDIPPAHERRVVDPTGCGDAFRAGLIYGIQHNYDWLTIGRMGNLMGALKVEHPGTQNQRFDFAEFNDQFKQDFGYAL

SEQ ID NO: 583 - DNA, 969 bp, synthetic construct
  misc_feature 1..969: note = Variant of adenosine kinase
  source 1..969: mol_type = other DNA
atgcaccatcatcaccatcacgggggctccggcatgagtgcactgatttgcggttctttagcgtatgataccatcatggtgtttccggaccagttcaagaaccatattctgcccgatcgtgttcaccgcctcaatgtcagctttcttgtaccacgcatgcgtcgtgaatttggaggctgtgccggcaacattgcgtacaatctgcatctgttgggtggtgctccgatccctatgggaacggtgggccaagatttcggtccgtatcgcgagcacttcgaaactctgggcattgacttatcccgcgtcaagatcatcgatgatctgagtacaccgcaggccttcattaccaccgactgtgatcataaccagattacggcgtttcatccaggcgcaatgatgcgttcgtacgaaaatcacgttcgtgatgtgccgggtgttaccttgggcctcgtaggtcctgatggacgcgagggcatgatccaaaatgccgaagaatttgctgctggtggcattccgttcatttttgacccaggtcaggcactgccgctgttcaacggccccgaactgcgcgagtttatcgaacaggcggactatgtggtggtcaacgattacgaaagcaatcttcttcaagaacgtactggctggaacgagcaggacattgtttcacgcgtgcaggcgtatatcaccacgcaaggttcgaaaggagccctggtacatacaccggagaagacctacgatattccgccggcacacgaacgtcgtgtcgttgatccaactggttgcggcgacgcgtttcgcgccggcctgatctatggtattcagcataattatgattggttgaccattggccgcatgggaaacttaatgggtgcgctgaaagtggaacaccctggcacgcaaaatcagcgtttcgattttgccgaattcaacgaccagttcaaacaagattttggctacgcgctctaatga

SEQ ID NO: 584 - protein, 321 aa, synthetic construct
  REGION 1..321: note = Variant of adenosine kinase
MHHHHHHGGSGMSALICGSLAYDTIMVFPDQFKNHILPDRVHRLNVSFLVPRMRREFGGCAGNIAYNLHLLGGAPIPMGTVGQDFGPYREHFETLGIDLSRVKIIDDLSTPQAFITTDCDHNQITAFHPGAMMRSYENHVRDVPGVTLGLVGPDGREGMIQNAEEFAAGGIPFIFDPGQALPLFNGPELREFIEQADYVVVNDYESNLLQERTGWNEQDIVSRVQAYITTQGSKGALVHTPEKTYDIPPAHERRVVDPTGCGDAFRAGLIYGIQHNYDWLTIGRMGNLMGALKVEHPGTQNQRFDFAEFNDQFKQDFGYAL

SEQ ID NO: 585 - DNA, 969 bp, synthetic construct
  misc_feature 1..969: note = Variant of adenosine kinase
  source 1..969: mol_type = other DNA
atgcaccatcatcaccatcacgggggctccggcatgagtgcactgatttgcggttctttagcgtatgataccatcatggtgtttccggaccagttcaagaaccatattctgcccgatcgtgttcaccgcctcaatgtcagctttcttgtaccacgcatgcgtcgtgaatttggaggctgtgccggcaacattgcgtacaatctgcatctgttgggtggtgctccgatccctatgggaacggtgggccaagatttcggtccgtatcgcgagcacttcgaaactctgggcattgacttatcccgcgtcaagatcatcgatgatctgagtacaccgcaggccttcattaccaccgaccatgatcataaccagattacggcgtttcatccaggcgcaatgatgcgttcgtacgaaaatcacgttcgtgatgtgccgggtgttaccttgggcctcgtaggtcctgatggacgcgagggcatgatccaaaatgccgaagaatttgctgctggtggcattccgttcatttttgacccaggtcaggcactgccgctgttcaacggccccgaactgcgcgagtttatcgaacaggcggactatgtggtggtcaacgattacgaaagcaatcttcttcaagaacgtactggctggaacgagcaggacattgtttcacgcgtgcaggcgtatatcaccacgcaaggttcgaaaggagccctggtacatacaccggagaagacctacgatattccgccgattcacgaacgtcgtgtcgttgatccaactggttgcggcgacgcgtttcgcgccggcctgatctatggtattcagcataattatgattggttgaccattggccgcatgggaaacttaatgggtgcgctgaaagtggaacaccctggcacgcaaaatcagcgtttcgattttgccgaattcaacgaccagttcaaacaagattttggctacgcgctctaatga

SEQ ID NO: 586 - protein, 321 aa, synthetic construct
  REGION 1..321: note = Variant of adenosine kinase
MHHHHHHGGSGMSALICGSLAYDTIMVFPDQFKNHILPDRVHRLNVSFLVPRMRREFGGCAGNIAYNLHLLGGAPIPMGTVGQDFGPYREHFETLGIDLSRVKIIDDLSTPQAFITTDHDHNQITAFHPGAMMRSYENHVRDVPGVTLGLVGPDGREGMIQNAEEFAAGGIPFIFDPGQALPLFNGPELREFIEQADYVVVNDYESNLLQERTGWNEQDIVSRVQAYITTQGSKGALVHTPEKTYDIPPIHERRVVDPTGCGDAFRAGLIYGIQHNYDWLTIGRMGNLMGALKVEHPGTQNQRFDFAEFNDQFKQDFGYAL

SEQ ID NO: 587 - DNA, 969 bp, synthetic construct
  misc_feature 1..969: note = Variant of adenosine kinase
  source 1..969: mol_type = other DNA
atgcaccatcatcaccatcacgggggctccggcatgagtgcactgatttgcggttctttagcgtatgataccatcatggtgtttccggaccagttcaagaaccatattctgcccgatcgtgttcaccgcctcaatgtcagctttcttgtaccacgcatgcgtcgtgaatttggaggctgtgccggcaacattgcgtacaatctgcatctgttgggtggtgctccgatccctatgggaacggtgggccaagatttcggtccgtatcgcgagcacttcgaaactctgggcattgacttatcccgcgtcaagatcatcgatgatctgagtacaccgcaggccttcattaccaccgaccatgatcataaccagattacggcgtttcatccaggcgcaatgatgcgttcgtacgaaaatcacgttcgtgatgtgccgggtgttaccttgggcctcgtaggtcctgatggacgcgagggcatgatccaaaatgccgaagaatttgctgctggtggcattccgttcatttttgacccaggtcaggcactgccgctgttcaacggccccgaactgcgcgagtttatcgaacaggcggactatgtggtggtcaacgattacgaaagcaatcttcttcaagaacgtactggctggaacgagcaggacattgtttcacgcgtgcaggcgtatatcaccacgcaaggttcgaaaggagccctggtacatacaccggagaagacctacgatattccgccggcacacgaacgtcttgtcgttgatccaactggttgcggcgacgcgtttcgcgccggcctgatctatggtattcagcataattatgattggttgaccattggccgcatgggaaacttaatgggtgcgctgaaagtggaacaccctggcacgcaaaatcagcgtttcgattttgccgaattcaacgaccagttcaaacaagattttggctacgcgctctaatga

SEQ ID NO: 588 - protein, 321 aa, synthetic construct
  REGION 1..321: note = Variant of adenosine kinase
MHHHHHHGGSGMSALICGSLAYDTIMVFPDQFKNHILPDRVHRLNVSFLVPRMRREFGGCAGNIAYNLHLLGGAPIPMGTVGQDFGPYREHFETLGIDLSRVKIIDDLSTPQAFITTDHDHNQITAFHPGAMMRSYENHVRDVPGVTLGLVGPDGREGMIQNAEEFAAGGIPFIFDPGQALPLFNGPELREFIEQADYVVVNDYESNLLQERTGWNEQDIVSRVQAYITTQGSKGALVHTPEKTYDIPPAHERLVVDPTGCGDAFRAGLIYGIQHNYDWLTIGRMGNLMGALKVEHPGTQNQRFDFAEFNDQFKQDFGYAL

SEQ ID NO: 589 - DNA, 969 bp, synthetic construct
  misc_feature 1..969: note = Variant of adenosine kinase
  source 1..969: mol_type = other DNA
atgcaccatcatcaccatcacgggggctccggcatgagtgcactgatttgcggttctttagcgtatgataccatcatggtgtttccggaccagttcaagaaccatattctgcccgatcgtgttcaccgcctcaatgtcagctttcttgtaccacgcatgcgtcgtgaatttggaggctgtgccggcaacattgcgtacaatctgcatctgttgggtggtgctccgatccctatgggaacggtgggccaagatttcggtccgtatcgcgagcacttcgaaactctgggcattgacttatcccgcgtcaagatcatcgatgatctgagtacaccgcaggccttcattaccaccgaccatgatcataaccagattacggcgtttcatccaggcgcaatgatgcgttcgtacgaaaatcacgttcgtgatgtgccgggtgttaccttgggcctcgtaggtcctgatggacgcgagggcatgatccaaaatgccgaagaatttgctgctggtggcattccgttcatttttgacccaggtcaggcactgccgctgttcaacggccccgaactgcgcgagtttatcgaacaggcggactatgtggtggtcaacgattacgaaagcaatcttcttcaagaacgtactggctggaacgagcaggacattgtttcacgcgtgcaggcgtatatcaccacgcaaggttcgatgggagccctggtacatacaccggagaagacctacgatattccgccggcacacgaacgtcgtgtcgttgatccaactggttgcggcgacgcgtttcgcgccggcctgatctatggtattcagcataattatgattggttgaccattggccgcatgggaaacttaatgggtgcgctgaaagtggaacaccctggcacgcaaaatcagcgtttcgattttgccgaattcaacgaccagttcaaacaagattttggctacgcgctctaatga

SEQ ID NO: 590 - protein, 321 aa, synthetic construct
  REGION 1..321: note = Variant of adenosine kinase
MHHHHHHGGSGMSALICGSLAYDTIMVFPDQFKNHILPDRVHRLNVSFLVPRMRREFGGCAGNIAYNLHLLGGAPIPMGTVGQDFGPYREHFETLGIDLSRVKIIDDLSTPQAFITTDHDHNQITAFHPGAMMRSYENHVRDVPGVTLGLVGPDGREGMIQNAEEFAAGGIPFIFDPGQALPLFNGPELREFIEQADYVVVNDYESNLLQERTGWNEQDIVSRVQAYITTQGSMGALVHTPEKTYDIPPAHERRVVDPTGCGDAFRAGLIYGIQHNYDWLTIGRMGNLMGALKVEHPGTQNQRFDFAEFNDQFKQDFGYAL

SEQ ID NO: 591 - DNA, 969 bp, synthetic construct
  misc_feature 1..969: note = Variant of adenosine kinase
  source 1..969: mol_type = other DNA
atgcaccatcatcaccatcacgggggctccggcatgagtgcactgatttgcggttctttagcgtatgataccatcatggtgtttccggaccagttcaagaaccatattctgcccgatcgtgttcaccgcctcaatgtcagctttcttgtaccacgcatgcgtcgtgaatttggaggctgtgccggcaacattgcgtacaatctgcatctgttgggtggtgctccgatccctatgggaacggtgggccaagatttcggtccgtatcgcgagcacttcgaaactctgggcattgacttatcccgcgtcaagatcatcgatgatctgagtacaccgcaggccttcattaccaccgaccatgatcataaccagattacggcgtttcatccaggcgcaatgatgcgttcgtacgaaaatcacgttcgtgatgtgccgggtgttaccttgggcctcgtaggtcctgatggacgcgagggcatgatccaaaatgccgaagaatttgctgctggtggcattccgttcatttttgacccaggtcaggcactgccgctgttcaacggccccgaactgcgcgagtttatcgaacaggcggactatgtggtggtcaacgattacgaaagcaatcttcttcaagaacgtactggctggaacgagcaggacattgtttcacgcgtgcaggcgtatatcgtgacgcaaggttcgaaaggagccctggtacatacaccggagaagacctacgatattccgccggcacacgaacgtcgtgtcgttgatccaactggttgcggcgacgcgtttcgcgccggcctgatctatggtattcagcataattatgattggttgaccattggccgcatgggaaacttaatgggtgcgctgaaagtggaacaccctggcacgcaaaatcagcgtttcgattttgccgaattcaacgaccagttcaaacaagattttggctacgcgctctaatga

SEQ ID NO: 592 - protein, 321 aa, synthetic construct
  REGION 1..321: note = Variant of adenosine kinase
MHHHHHHGGSGMSALICGSLAYDTIMVFPDQFKNHILPDRVHRLNVSFLVPRMRREFGGCAGNIAYNLHLLGGAPIPMGTVGQDFGPYREHFETLGIDLSRVKIIDDLSTPQAFITTDHDHNQITAFHPGAMMRSYENHVRDVPGVTLGLVGPDGREGMIQNAEEFAAGGIPFIFDPGQALPLFNGPELREFIEQADYVVVNDYESNLLQERTGWNEQDIVSRVQAYIVTQGSKGALVHTPEKTYDIPPAHERRVVDPTGCGDAFRAGLIYGIQHNYDWLTIGRMGNLMGALKVEHPGTQNQRFDFAEFNDQFKQDFGYAL

SEQ ID NO: 593 - DNA, 969 bp, synthetic construct
  misc_feature 1..969: note = Variant of adenosine kinase
  source 1..969: mol_type = other DNA
atgcaccatcatcaccatcacgggggctccggcatgagtgcactgatttgcggttctttagcgtatgataccatcatggtgtttccggaccagttcaagaaccatattctgcccgatcgtgttcaccgcctcaatgtcagctttcttgtaccacgcatgcgtcgtgaatttggaggctgtgccggcaacattgcgtacaatctgcatctgttgggtggtgctccgatccctatgggaacggtgggccaagatttcggtccgtatcgcgagcacttcgaaactctgggcattgacttatcccgcgtcaagatcatcgatgatctgagtacaccgcaggccttcattaccaccgaccatgatcataaccagattacggcgtttcatccaggcgcaatgatgcgttcgtacgaaaatcacgttcgtgatgtgccgggtgttaccttgggcctcgtaggtcctgatggacgcgagggcatgatccaaaatgccgaagaatttgctgctggtggcattccgttcatttttgacccaggtcaggcactgccgctgttcaacggccccgaactgcgcgagtttatcgaacaggcggactatgtggtggtcaacgattacgaaagcaatcttcttcaagaacgtactggctggaacgagcaggacattgtttcacgcgtgcaggcgtatatcaccacgcaaggttcgtatggagccctggtacatacaccggagaagacctacgatattccgccggcacacgaacgtcgtgtcgttgatccaactggttgcggcgacgcgtttcgcgccggcctgatctatggtattcagcataattatgattggttgaccattggccgcatgggaaacttaatgggtgcgctgaaagtggaacaccctggcacgcaaaatcagcgtttcgattttgccgaattcaacgaccagttcaaacaagattttggctacgcgctctaatga

SEQ ID NO: 594 - protein, 321 aa, synthetic construct
  REGION 1..321: note = Variant of adenosine kinase
MHHHHHHGGSGMSALICGSLAYDTIMVFPDQFKNHILPDRVHRLNVSFLVPRMRREFGGCAGNIAYNLHLLGGAPIPMGTVGQDFGPYREHFETLGIDLSRVKIIDDLSTPQAFITTDHDHNQITAFHPGAMMRSYENHVRDVPGVTLGLVGPDGREGMIQNAEEFAAGGIPFIFDPGQALPLFNGPELREFIEQADYVVVNDYESNLLQERTGWNEQDIVSRVQAYITTQGSYGALVHTPEKTYDIPPAHERRVVDPTGCGDAFRAGLIYGIQHNYDWLTIGRMGNLMGALKVEHPGTQNQRFDFAEFNDQFKQDFGYAL

SEQ ID NO: 595 - DNA, 969 bp, synthetic construct
  misc_feature 1..969: note = Variant of adenosine kinase
  source 1..969: mol_type = other DNA
atgcaccatcatcaccatcacgggggctccggcatgagtgcactgatttgcggttctttagcgtatgataccatcatggtgtttccggaccagttcaagaaccatattctgcccgatcgtgttcaccgcctcaatgtcagctttcttgtaccacgcatgcgtcgtgaatttggaggctgtgccggcaacattgcgtacaatctgcatctgttgggtggtgctccgatccctatgggaacggtgggccaagatttcggtccgtatcgcgagcacttcgaaactctgggcattgacttatcccgcgtcaagatcatcgatgatctgagtacaccgcaggccttcattaccaccgaccatgatcataaccagattacggcgtttcatccaggcgcaatgatgcgttcgtacgaaaatcacgttcgtgatgtgccgggtgttaccttgggcctcgtaggtcctgatggacgcgagggcatgatccaaaatgccgaagaatttgctgctggtggcattccgttcatttttgacccaggtcaggcactgccgctgttcaacggccccgaactgcgcgagtttatcgaacaggcggactatgtggtggtcaacgattacgaaagcaatcttcttcaagaacgtactggctggaacgagcaggacattgtttcacgcgtgcaggcgtatatcaccacgcaaggttcgaaaggagccctggtacatacaccggagaagacctacgatattccgccggcacacgaacgtcgtgtcgttgatccaactggttgcggcgacgcgtttcgcgccggcctgatctatggtattcagcataattatgattggttgaccattggccgcatgggatatttaatgggtgcgctgaaagtggaacaccctggcacgcaaaatcagcgtttcgattttgccgaattcaacgaccagttcaaacaagattttggctacgcgctctaatga

SEQ ID NO: 596 - protein, 321 aa, synthetic construct
  REGION 1..321: note = Variant of adenosine kinase
MHHHHHHGGSGMSALICGSLAYDTIMVFPDQFKNHILPDRVHRLNVSFLVPRMRREFGGCAGNIAYNLHLLGGAPIPMGTVGQDFGPYREHFETLGIDLSRVKIIDDLSTPQAFITTDHDHNQITAFHPGAMMRSYENHVRDVPGVTLGLVGPDGREGMIQNAEEFAAGGIPFIFDPGQALPLFNGPELREFIEQADYVVVNDYESNLLQERTGWNEQDIVSRVQAYITTQGSKGALVHTPEKTYDIPPAHERRVVDPTGCGDAFRAGLIYGIQHNYDWLTIGRMGYLMGALKVEHPGTQNQRFDFAEFNDQFKQDFGYAL

SEQ ID NO: 597 - DNA, 969 bp, synthetic construct
  misc_feature 1..969: note = Variant of adenosine kinase
  source 1..969: mol_type = other DNA
atgcaccatcatcaccatcacgggggctccggcatgagtgcactgatttgcggttctttagcgtatgataccatcatggtgtttccggaccagttcaagaaccatattctgcccgatcgtgttcaccgcctcaatgtcagctttcttgtaccacgcatgcgtcgtgaatttggaggctgtgccggcaacattgcgtacaatctgcatctgttgggtggtgctccgatccctatgggaacggtgggccaagatttcggtccgtatcgcgagcacttcgaaactctgggcattgacttatcccgcgtcaagatcatcgatgatctgagtacaccgcaggccttcattaccaccgaccatgatcataaccagattacggcgtttcatccaggcgcaatgatgcgttcgtacgaaaatcacgttcgtgatgtgccgggtgttaccttgggcctcgtaggtcctgatggacgcgagggcatgatccaaaatgccgaagaatttgctgctggtggcattccgttcatttttgacccaggtcaggcactgccgctgttcaacggccccgaactgcgcgagtttatcgaacaggcggactatgtggtggtcaacgattacgaaagcaatcttcttcaagaacgtactggctggaacgagcaggacattgtttcacgcgtgcaggcgtatatcaccacgcaaggttcgaaaggagccctggtacatacaccggagaagacctacgatattccgccggcacacgaacgtcgtgtcgttgatccaactggttgcggcgacgcgtttcgcgccggcctgatctatggtattcagcataattatgattggttgaccattggccgcatgggaaacttaatgggtgcgctgaaagtggcgcaccctggcacgcaaaatcagcgtttcgattttgccgaattcaacgaccagttcaaacaagattttggctacgcgctctaatga

SEQ ID NO: 598 - protein, 321 aa, synthetic construct
  REGION 1..321: note = Variant of adenosine kinase
MHHHHHHGGSGMSALICGSLAYDTIMVFPDQFKNHILPDRVHRLNVSFLVPRMRREFGGCAGNIAYNLHLLGGAPIPMGTVGQDFGPYREHFETLGIDLSRVKIIDDLSTPQAFITTDHDHNQITAFHPGAMMRSYENHVRDVPGVTLGLVGPDGREGMIQNAEEFAAGGIPFIFDPGQALPLFNGPELREFIEQADYVVVNDYESNLLQERTGWNEQDIVSRVQAYITTQGSKGALVHTPEKTYDIPPAHERRVVDPTGCGDAFRAGLIYGIQHNYDWLTIGRMGNLMGALKVAHPGTQNQRFDFAEFNDQFKQDFGYAL

SEQ ID NO: 599 - DNA, 969 bp, synthetic construct
  misc_feature 1..969: note = Variant of adenosine kinase
  source 1..969: mol_type = other DNA
atgcaccatcatcaccatcacgggggctccggcatgagtgcactgatttgcggttctttagcgtatgataccatcatggtgtttccggaccagttcaagaaccatattctgcccgatcgtgttcaccgcctcaatgtcagctttcttgtaccacgcatgcgtcgtgaatttggaggctgtgccggcaacattgcgtacaatctgcatctgttgggtggtgctccgatccctatgggaacggtgggccaagatttcggtccgtatcgcgagcacttcgaaactctgggcattgacttatcccgcgtcaagatcatcgatgatctgagtacaccgcaggccttcattaccaccgaccatgatcataaccagattacggcgtttcatccaggcgcaatgatgcgttcgtacgaaaatcacgttcgtgatgtgcagggtgttaccttgggcctcgtaggtcctgatggacgcgagggcatgatccaaaatgccgaagaatttgctgctggtggcattccgttcatttttgacccaggtcaggcactgccgctgttcaacggccccgaactgcgcgagtttatcgaacaggcggactatgtggtggtcaacgattacgaaagcaatcttcttcaagaacgtactggctggaacgagcaggacattgtttcacgcgtgcaggcgtatatcaccacgcaaggttcgaaaggagccctggtacatacaccggagaagacctacgatattccgccggcacacgaacgtcgttgggttgatccaactggttgcggcgacgcgtttcgcgccggcctgatctatggtattcagcataattatgattggttgaccattggccgcatgggaaacttaatgggtgcgctgaaagtggaacaccctggcacgcaaaatcagcgtttcgattttgccgaattcaacgaccagttcaaacaagattttggctacgcgctctaatga

SEQ ID NO: 600 - protein, 321 aa, synthetic construct
  REGION 1..321: note = Variant of adenosine kinase
MHHHHHHGGSGMSALICGSLAYDTIMVFPDQFKNHILPDRVHRLNVSFLVPRMRREFGGCAGNIAYNLHLLGGAPIPMGTVGQDFGPYREHFETLGIDLSRVKIIDDLSTPQAFITTDHDHNQITAFHPGAMMRSYENHVRDVQGVTLGLVGPDGREGMIQNAEEFAAGGIPFIFDPGQALPLFNGPELREFIEQADYVVVNDYESNLLQERTGWNEQDIVSRVQAYITTQGSKGALVHTPEKTYDIPPAHERRWVDPTGCGDAFRAGLIYGIQHNYDWLTIGRMGNLMGALKVEHPGTQNQRFDFAEFNDQFKQDFGYAL

SEQ ID NO: 601 - DNA, 969 bp, synthetic construct
  misc_feature 1..969: note = Variant of adenosine kinase
  source 1..969: mol_type = other DNA
atgcaccatcatcaccatcacgggggctccggcatgagtgcactgatttgcggttctttagcgtatgataccatcatggtgtttccggaccagttcaagaaccatattctgcccgatcgtgttcaccgcctcaatgtcagctttcttgtaccacgcatgcgtcgtgaatttggaggctgtgccggcaacattgcgtacaatctgcatctgttgggtggtgctccgatccctatgggaacggtgggccaagatttcggtccgtatcgcgagcacttcgaaactctgggcattgacttatcccgcgtcaagatcatcgatgatctgagtacaccgcaggccttcattaccaccgaccaggatcataaccagattacggcgtttcatccaggcgcaatgatgcgttcgtacgaaaatcacgttcgtgatgtgccgggtgttaccttgggcctcgtaggtcctgatggacgcgagggcatgatccaaaatgccgaagaatttgctgctggtggcattccgttcatttttgacccaggtcaggcactgccgctgttcaacggccccgaactgcgcgagtttatcgaacaggcggactatgtggtggtcaacgattacgaaagcaatcttcttcaagaacgtactggctggaacgagcaggacattgtttcacgcgtgcaggcgtatatcaccacgcaaggttcgaaaggagccctggtacatacaccggagaagacctacgatattccgccggcacacgaacgtcgtgtcgttgatccaactggttgcggcgacgcgtttcgcgccggcctgatctatggtattcagcataattatgattggttgaccattggccgcatgggaaacttaatgggtgcgctgaaagtggaacaccctggcacgcaaaatcagcgtttcgattttgccgaattcaacgaccagttcaaacaagattttggctacgcgctctaatga

SEQ ID NO: 602 - protein, 321 aa, synthetic construct
  REGION 1..321: note = Variant of adenosine kinase
MHHHHHHGGSGMSALICGSLAYDTIMVFPDQFKNHILPDRVHRLNVSFLVPRMRREFGGCAGNIAYNLHLLGGAPIPMGTVGQDFGPYREHFETLGIDLSRVKIIDDLSTPQAFITTDQDHNQITAFHPGAMMRSYENHVRDVPGVTLGLVGPDGREGMIQNAEEFAAGGIPFIFDPGQALPLFNGPELREFIEQADYVVVNDYESNLLQERTGWNEQDIVSRVQAYITTQGSKGALVHTPEKTYDIPPAHERRVVDPTGCGDAFRAGLIYGIQHNYDWLTIGRMGNLMGALKVEHPGTQNQRFDFAEFNDQFKQDFGYAL

SEQ ID NO: 603 - DNA, 969 bp, synthetic construct
  misc_feature 1..969: note = Variant of adenosine kinase
  source 1..969: mol_type = other DNA
atgcaccatcatcaccatcacgggggctccggcatgagtgcactgatttgcggttctttagcgtatgataccatcatggtgtttccggaccagttcaagaaccatattctgcccgatcgtgttcaccgcctcaatgtcagctttcttgtaccacgcatgcgtcgtgaatttggaggctgtgccggcaacattgcgtacaatctgcatctgttgggtggtgctccgatccctatgggaacggtgggccaagatttcggtccgtatcgcgagcacttcgaaactctgggcattgacttatcccgcgtcaagatcatcgatgatctgagtacaccgcaggccttcattaccaccgaccatgatcataaccagattacggcgtttcatccaggcgcaatgatgcgttcgtacgaaaatcacgttcgtgatgtgccgggtgttaccttgggcctcgtaggtcctgatggacgcgagggcatgatccaaaatgccgaagaatttgctgctggtggcattccgttcatttttgacccaggtcaggcactgccgctgttcaacggccccgaactgcgcgagtttatcgaacaggcggactatgtggtggtcaacgattacgaaagcaatcttcttcaagaacgtactggctggaacgagcaggacattgtttcacgcgtgcaggcgtatatcaccacgcaaggttcgaaaggagccctggtacatacaccggagaagacctacgatattccgccggcacacgaacgtcgtgtcgttgatccaactggttgcggcgacgcgtttcgcgccggcctgatctatggtattcagcataattatgattggttgaccattggccgcatgggaaacttaatgggtggtctgaaagtggaacaccctggcacgcaaaatcagcgtttcgattttgccgaattcaacgaccagttcaaacaagattttggctacgcgctctaatga

SEQ ID NO: 604 - protein, 321 aa, synthetic construct
  REGION 1..321: note = Variant of adenosine kinase
MHHHHHHGGSGMSALICGSLAYDTIMVFPDQFKNHILPDRVHRLNVSFLVPRMRREFGGCAGNIAYNLHLLGGAPIPMGTVGQDFGPYREHFETLGIDLSRVKIIDDLSTPQAFITTDHDHNQITAFHPGAMMRSYENHVRDVPGVTLGLVGPDGREGMIQNAEEFAAGGIPFIFDPGQALPLFNGPELREFIEQADYVVVNDYESNLLQERTGWNEQDIVSRVQAYITTQGSKGALVHTPEKTYDIPPAHERRVVDPTGCGDAFRAGLIYGIQHNYDWLTIGRMGNLMGGLKVEHPGTQNQRFDFAEFNDQFKQDFGYAL

SEQ ID NO: 605 - DNA, 969 bp, synthetic construct
  misc_feature 1..969: note = Variant of adenosine kinase
  source 1..969: mol_type = other DNA
atgcaccatcatcaccatcacgggggctccggcatgagtgcactgatttgcggttctttagcgtatgataccatcatggtgtttccggaccagttcaagaaccatattctgcccgatcgtgttcaccgcctcaatgtcagctttcttgtaccacgcatgcgtcgtgaatttggaggctgtgccggcaacattgcgtacaatctgcatctgttgggtggtgctccgatccctatgggaacggtgggccaagatttcggtccgtatcgcgagcacttcgaaactctgggcattgacttatcccgcgtcaagatcatcgatgatctgagtacaccgcaggccttcattaccaccgaccatgatcataaccagattacggcgtttcatccaggcgcaatgatgcgttcgtacgaaaatcacgttcgtgatgtgccgggtgttaccttgggcctcgtaggtcctgatggacgcgagggcatgatccaaaatgccgaagaatttgctgctggtggcattccgttcatttttgacccaggtcaggcactgccgctgttcaacggccccgaactgcgcgagtttatcgaacaggcggactatgtggtggtcaacgattacgaaagcaatcttcttcaagaacgtactggctggaacgagcaggacattgtttcacgcgtgcaggcgtatatcaccacgcaaggttcgaaaggagccctggtacatacaccggagaagacctacgatattccgccgacgcacgaacgtcgtgtcgttgatccaactggttgcggcgacgcgtttcgcgccggcctgatctatggtattcagcataattatgattggttgaccattggccgcatgggaaacttaatgggtgcgctgaaagtggaacaccctggcacgcaaaatcagcgtttcgattttgccgaattcaacgaccagttcaaacaagattttggctacgcgctctaatga

SEQ ID NO: 606 - protein, 321 aa, synthetic construct
  REGION 1..321: note = Variant of adenosine kinase
MHHHHHHGGSGMSALICGSLAYDTIMVFPDQFKNHILPDRVHRLNVSFLVPRMRREFGGCAGNIAYNLHLLGGAPIPMGTVGQDFGPYREHFETLGIDLSRVKIIDDLSTPQAFITTDHDHNQITAFHPGAMMRSYENHVRDVPGVTLGLVGPDGREGMIQNAEEFAAGGIPFIFDPGQALPLFNGPELREFIEQADYVVVNDYESNLLQERTGWNEQDIVSRVQAYITTQGSKGALVHTPEKTYDIPPTHERRVVDPTGCGDAFRAGLIYGIQHNYDWLTIGRMGNLMGALKVEHPGTQNQRFDFAEFNDQFKQDFGYAL

SEQ ID NO: 607 - DNA, 969 bp, synthetic construct
  misc_feature 1..969: note = Variant of adenosine kinase
  source 1..969: mol_type = other DNA
atgcaccatcatcaccatcacgggggctccggcatgagtgcactgatttgcggttctttagcgtatgataccatcatggtgtttccggaccagttcaagaaccatattctgcccgatcgtgttcaccgcctcaatgtcagctttcttgtaccacgcatgcgtcgtgaatttggaggctgtgccggcaacattgcgtacaatctgcatctgttgggtggtgctccgatccctatgggaacggtgggccaagatttcggtccgtatcgcgagcacttcgaaactctgggcattgacttatcccgcgtcaagatcatcgatgatctgagtacaccgcaggccttcattaccaccgaccatgatcataaccagattacggcgtttcatccaggcgcaatgatgcgttcgtacgaaaatcacgttcgtgatgtgccgggtgttaccttgggcctcgtaggtcctgatggacgcgagggcatgatccaaaatgccgaagaatttgctgctggtggcattccgttcatttttgacccaggtcaggcaatgccgctgttcaacggccccgaactgcgcgagtttatcgaacaggcggactatgtggtggtcaacgattacgaaagcaatcttcttcaagaacgtactggctggaacgagcaggacattgtttcacgcgtgcaggcgtatatcaccacgcaaggttcgaaaggagccctggtacatacaccggagaagacctacgatattccgccggcacacgaacgtcgtgtcgttgatccaactggttgcggcgacgcgtttcgcgccggcctgatctatggtattcagcataattatgattggttgaccattggccgcatgggaaacttaatgggtgcgctgaaagtggaacaccctggcacgcaaaatcagcgtttcgattttgccgaattcaacgaccagttcaaacaagattttggctacgcgctctaatga

SEQ ID NO: 608 - protein, 321 aa, synthetic construct
  REGION 1..321: note = Variant of adenosine kinase
MHHHHHHGGSGMSALICGSLAYDTIMVFPDQFKNHILPDRVHRLNVSFLVPRMRREFGGCAGNIAYNLHLLGGAPIPMGTVGQDFGPYREHFETLGIDLSRVKIIDDLSTPQAFITTDHDHNQITAFHPGAMMRSYENHVRDVPGVTLGLVGPDGREGMIQNAEEFAAGGIPFIFDPGQAMPLFNGPELREFIEQADYVVVNDYESNLLQERTGWNEQDIVSRVQAYITTQGSKGALVHTPEKTYDIPPAHERRVVDPTGCGDAFRAGLIYGIQHNYDWLTIGRMGNLMGALKVEHPGTQNQRFDFAEFNDQFKQDFGYAL

SEQ ID NO: 609 - DNA, 969 bp, synthetic construct
  misc_feature 1..969: note = Variant of adenosine kinase
  source 1..969: mol_type = other DNA
atgcaccatcatcaccatcacgggggctccggcatgagtgcactgatttgcggttctttagcgtatgataccatcatggtgtttccggaccagttcaagaaccatattctgcccgatcgtgttcaccgcctcaatgtcagctttcttgtaccacgcatgcgtcgtgaatttggaggctgtgccggcaacattgcgtacaatctgcatctgttgggtggtgctccgatccctatgggaacggtgggccaagatttcggtccgtatcgcgagcacttcgaaactctgggcattgacttatcccgcgtcaagatcatcgatgatctgagtacaccgcaggccttcattaccaccgaccatgatcataaccagattacggcgtttcatccaggcgcaatgatgcgttcgtacgaaaatcacgttcgtgatgtgccgggtgttaccttgggcctcgtaggtcctgatggacgcgagggcatgatccaaaatgccgaagaatttgctgctggtggcattccgttcatttttgacccaggtcaggcactgccgctgttcaacggccccgaactgcgcgagtttatcgaacaggcggactatgtggtggtcaacgattacgaaagcaatcttcttcaagaacgtactggctggaacgagcaggacattgtttcacgcgtgcaggcgtatatcaccacgcaaggttcgaaaggagccctggtacatacaccggagaagacctacgatattccgccggcacacgaacgtcgtgtcgttgatccaactggttgcggcgacgcgtttcgcgccggcctgatctatggtattcagcataattatgattggttgaccattggccgcatgggaagtttaatgggtgcgctgaaagtggaacaccctggcacgcaaaatcagcgtttcgattttgccgaattcaacgaccagttcaaacaagattttggctacgcgctctaatga

SEQ ID NO: 610 - protein, 321 aa, synthetic construct
  REGION 1..321: note = Variant of adenosine kinase
MHHHHHHGGSGMSALICGSLAYDTIMVFPDQFKNHILPDRVHRLNVSFLVPRMRREFGGCAGNIAYNLHLLGGAPIPMGTVGQDFGPYREHFETLGIDLSRVKIIDDLSTPQAFITTDHDHNQITAFHPGAMMRSYENHVRDVPGVTLGLVGPDGREGMIQNAEEFAAGGIPFIFDPGQALPLFNGPELREFIEQADYVVVNDYESNLLQERTGWNEQDIVSRVQAYITTQGSKGALVHTPEKTYDIPPAHERRVVDPTGCGDAFRAGLIYGIQHNYDWLTIGRMGSLMGALKVEHPGTQNQRFDFAEFNDQFKQDFGYAL

SEQ ID NO: 611 - DNA, 969 bp, synthetic construct
  misc_feature 1..969: note = Variant of adenosine kinase
  source 1..969: mol_type = other DNA
atgcaccatcatcaccatcacgggggctccggcatgagtgcactgatttgcggttctttagcgtatgataccatcatggtgtttccggaccagttcaagaaccatattctgcccgatcgtgttcaccgcctcaatgtcagctttcttgtaccacgcatgcgtcgtgaatttggaggctgtgccggcaacattgcgtacaatctgcatctgttgggtggtgctccgatccctatgggaacggtgggccaagatttcggtccgtatcgcgagcacttcgaaactctgggcattgacttatcccgcgtcaagatcatcgatgatctgagtacaccgcaggccttcattaccaccgaccgtgatcataaccagattacggcgtttcatccaggcgcaatgatgcgttcgtacgaaaatcacgttcgtgatgtgccgggtgttaccttgggcctcgtaggtcctgatggacgcgagggcatgatccaaaatgccgaagaatttgctgctggtggcattccgttcatttttgacccaggtcaggcactgccgctgttcaacggccccgaactgcgcgagtttatcgaacaggcggactatgtggtggtcaacgattacgaaagcaatcttcttcaagaacgtactggctggaacgagcaggacattgtttcacgcgtgcaggcgtatatcaccacgcaaggttcgaaaggagccctggtacatacaccggagaagacctacgatattccgccggcacacgaacgtcgtgtcgttgatccaactggttgcggcgacgcgtttcgcgccggcctgatctatggtattcagcataattatgattggttgaccattggccgcatgggaaacttaatgggtgcgctgaaagtggaacaccctggcacgcaaaatcagcgtttcgattttgccgaattcaacgaccagttcaaacaagattttggctacgcgctctaatga

SEQ ID NO: 612 - protein, 321 aa, synthetic construct
  REGION 1..321: note = Variant of adenosine kinase
MHHHHHHGGSGMSALICGSLAYDTIMVFPDQFKNHILPDRVHRLNVSFLVPRMRREFGGCAGNIAYNLHLLGGAPIPMGTVGQDFGPYREHFETLGIDLSRVKIIDDLSTPQAFITTDRDHNQITAFHPGAMMRSYENHVRDVPGVTLGLVGPDGREGMIQNAEEFAAGGIPFIFDPGQALPLFNGPELREFIEQADYVVVNDYESNLLQERTGWNEQDIVSRVQAYITTQGSKGALVHTPEKTYDIPPAHERRVVDPTGCGDAFRAGLIYGIQHNYDWLTIGRMGNLMGALKVEHPGTQNQRFDFAEFNDQFKQDFGYAL

SEQ ID NO: 613 - DNA, 969 bp, synthetic construct
  misc_feature 1..969: note = Variant of adenosine kinase
  source 1..969: mol_type = other DNA
atgcaccatcatcaccatcacgggggctccggcatgagtgcactgatttgcggttctttagcgtatgataccatcatggtgtttccggaccagttcaagaaccatattctgcccgatcgtgttcaccgcctcaatgtcagctttcttgtaccacgcatgcgtcgtgaatttggaggctgtgccggcaacattgcgtacaatctgcatctgttgggtggtgctccgatccctatgggaacggtgggccaagatttcggtccgtatcgcgagcacttcgaaactctgggcattgacttatcccgcgtcaagatcatcgatgatctgagtacaccgcaggccttcattaccaccgaccatgatcataaccagattacggcgtttcatccaggcgcaatgatgcgttcgtacgaaaatcacgttcgtgatgtgccgggtgttaccttgggcctcgtaggtcctgatggacgcgagggcatgatccaaaatgccgaagaatttgctgctggtggcattccgttcatttttgacccaggtcaggcactgccgctgttcaacggccccgaactgcgcgagtttatcgaacaggcggactatgtggtggtcaacgattacgaaagcaatcttcttcaagaacgtactggctggaacgagcaggacattgtttcacgcgtgcaggcgtatatcaccacgcaaggttcgaaaggagccctggtacatacaccggagaagacctacgatattccgccggcacacgaacgtcgtgtcgttgatccaactggttgcggcgacgcgtttcgcgccggcctgatctatggtattcagcataattatgattggttgaccattggccgcatgggaaacttaatgggtgcgctgaaagtggaacaccctggcacgcaaaatcagcgtttcgattttgccgaattcaacgaccagttcaaacaagattatggctacgcgctctaatga

SEQ ID NO: 614 - protein, 321 aa, synthetic construct
  REGION 1..321: note = Variant of adenosine kinase
MHHHHHHGGSGMSALICGSLAYDTIMVFPDQFKNHILPDRVHRLNVSFLVPRMRREFGGCAGNIAYNLHLLGGAPIPMGTVGQDFGPYREHFETLGIDLSRVKIIDDLSTPQAFITTDHDHNQITAFHPGAMMRSYENHVRDVPGVTLGLVGPDGREGMIQNAEEFAAGGIPFIFDPGQALPLFNGPELREFIEQADYVVVNDYESNLLQERTGWNEQDIVSRVQAYITTQGSKGALVHTPEKTYDIPPAHERRVVDPTGCGDAFRAGLIYGIQHNYDWLTIGRMGNLMGALKVEHPGTQNQRFDFAEFNDQFKQDYGYAL

SEQ ID NO: 615 - DNA, 969 bp, synthetic construct
  misc_feature 1..969: note = Variant of adenosine kinase
  source 1..969: mol_type = other DNA
atgcaccatcatcaccatcacgggggctccggcatgagtgcactgatttgcggttctttagcgtatgataccatcatggtgtttccggaccagttcaagaaccatattctgcccgatcgtgttcaccgcctcaatgtcagctttcttgtaccacgcatgcgtcgtgaatttggaggctgtgccggcaacattgcgtacaatctgcatctgttgggtggtgctccgatccctatgggaacggtgggccaagatttcggtccgtatcgcgagcacttcgaaactctgggcattgacttatcccgcgtcaagatcatcgatgatctgagtacaccgcaggccttcattaccaccgacggggatcataaccagattacggcgtttcatccaggcgcaatgatgcgttcgtacgaaaatcacgttcgtgatgtgccgggtgttaccttgggcctcgtaggtcctgatggacgcgagggcatgatccaaaatgccgaagaatttgctgctggtggcattccgttcatttttgacccaggtcaggcactgccgctgttcaacggccccgaactgcgcgagtttatcgaacaggcggactatgtggtggtcaacgattacgaaagcaatcttcttcaagaacgtactggctggaacgagcaggacattgtttcacgcgtgcaggcgtatatcaccacgcaaggttcgaaaggagccctggtacatacaccggagaagacctacgatattccgccggcacacgaacgtcgtgtcgttgatccaactggttgcggcgacgcgtttcgcgccggcctgatctatggtattcagcataattatgattggttgaccattggccgcatgggaaacttaatgggtgcgctgaaagtggaacaccctggcacgcaaaatcagcgtttcgattttgccgaattcaacgaccagttcaaacaagattttggctacgcgctctaatga

SEQ ID NO: 616 - protein, 321 aa, synthetic construct
  REGION 1..321: note = Variant of adenosine kinase
MHHHHHHGGSGMSALICGSLAYDTIMVFPDQFKNHILPDRVHRLNVSFLVPRMRREFGGCAGNIAYNLHLLGGAPIPMGTVGQDFGPYREHFETLGIDLSRVKIIDDLSTPQAFITTDGDHNQITAFHPGAMMRSYENHVRDVPGVTLGLVGPDGREGMIQNAEEFAAGGIPFIFDPGQALPLFNGPELREFIEQADYVVVNDYESNLLQERTGWNEQDIVSRVQAYITTQGSKGALVHTPEKTYDIPPAHERRVVDPTGCGDAFRAGLIYGIQHNYDWLTIGRMGNLMGALKVEHPGTQNQRFDFAEFNDQFKQDFGYAL

SEQ ID NO: 617 - DNA, 969 bp, synthetic construct
  misc_feature 1..969: note = Variant of adenosine kinase
  source 1..969: mol_type = other DNA
atgcaccatcatcaccatcacgggggctccggcatgagtgcactgatttgcggttctttagcgtatgataccatcatggtgtttccggaccagttcaagaaccatattctgcccgatcgtgttcaccgcctcaatgtcagctttcttgtaccacgcatgcgtcgtgaatttggaggctgtgccggcaacattgcgtacaatctgcatctgttgggtggtgctccgatccctatgggaacggtgggccaagatttcggtccgtatcgcgagcacttcgaaactctgggcattgacttatcccgcgtcaagatcatcgatgatctgagtacaccgcaggccttcattaccaccgaccatgatcataaccagattacggcgtttcatccaggcgcaatgatgcgttcgtacgaaaatcacgttcgtgatgtgccgggtgttaccttgggcctcgtaggtcctgatggacgcgagggcatgatccaaaatgccgaagaatttgctgctggtggcattccgttcatttttgacccaggtcaggcactgccgctgttcaacggccccgaactgcgcgagtttatcgaacaggcggactatgtggtggtcaacgattacgaaagcaatcttcttcaagaacgtactggctggaacgagcaggacattgtttcacgcgtgcaggcgtatatcaccacgcaaggttcgaaaggagccctggtacatacaccggagaagacctacgatattccgccgatgcacgaacgtcgtgtcgttgatccaactggttgcggcgacgcgtttcgcgccggcctgatctatggtattcagcataattatgattggttgaccattggccgcatgggaaacttaatgggtgcgctgaaagtggaacaccctggcacgcaaaatcagcgtttcgattttgccgaattcaacgaccagttcaaacaagattttggctacgcgctctaatga

SEQ ID NO: 618 - protein, 321 aa, synthetic construct
  REGION 1..321: note = Variant of adenosine kinase
MHHHHHHGGSGMSALICGSLAYDTIMVFPDQFKNHILPDRVHRLNVSFLVPRMRREFGGCAGNIAYNLHLLGGAPIPMGTVGQDFGPYREHFETLGIDLSRVKIIDDLSTPQAFITTDHDHNQITAFHPGAMMRSYENHVRDVPGVTLGLVGPDGREGMIQNAEEFAAGGIPFIFDPGQALPLFNGPELREFIEQADYVVVNDYESNLLQERTGWNEQDIVSRVQAYITTQGSKGALVHTPEKTYDIPPMHERRVVDPTGCGDAFRAGLIYGIQHNYDWLTIGRMGNLMGALKVEHPGTQNQRFDFAEFNDQFKQDFGYAL

SEQ ID NO: 619 - DNA, 969 bp, synthetic construct
  misc_feature 1..969: note = Variant of adenosine kinase
  source 1..969: mol_type = other DNA
atgcaccatcatcaccatcacgggggctccggcatgagtgcactgatttgcggttctttagcgtatgataccatcatggtgtttccggaccagttcaagaaccatattctgcccgatcgtgttcaccgcctcaatgtcagctttcttgtaccacgcatgcgtcgtgaatttggaggctgtgccggcaacattgcgtacaatctgcatctgttgggtggtgctccgatccctatgggaacggtgggccaagatttcggtccgtatcgcgagcacttcgaaactctgggcattgacttatcccgcgtcaagatcatcgatgatctgagtacaccgcaggccttcattaccaccgaccatgatcataaccagattacggcgtttcatccaggcgcaatgatgcgttcgtacgaaaatcacgttcgtgatgtgccgggtgttaccttgggcctcgtaggtcctgatggacgcgagggcatgatccaaaatgccgaagaatttgctgctggtggcattccgttcatttttgacccaggtcaggcactgccgctgttcaacggccccgaactgcgcgagtttatcgaacaggcggactatgtggtggtcaacgattacgaaagcaatcttcttcaagaacgtactggctggaacgagcaggacattgtttcacgcgtgcaggcgtatatcaccacgcaaggttcgaaaggagccctggtacatacaccggagaagacctacgatattccgggggcacacgaacgtcgtgtcgttgatccaactggttgcggcgacgcgtttcgcgccggcctgatctatggtattcagcataattatgattggttgaccattggccgcatgggaaacttaatgggtgcgctgaaagtggaacaccctggcacgcaaaatcagcgtttcgattttgccgaattcaacgaccagttcaaacaagattttggctacgcgctctaatga

SEQ ID NO: 620 - protein, 321 aa, synthetic construct
  REGION 1..321: note = Variant of adenosine kinase
MHHHHHHGGSGMSALICGSLAYDTIMVFPDQFKNHILPDRVHRLNVSFLVPRMRREFGGCAGNIAYNLHLLGGAPIPMGTVGQDFGPYREHFETLGIDLSRVKIIDDLSTPQAFITTDHDHNQITAFHPGAMMRSYENHVRDVPGVTLGLVGPDGREGMIQNAEEFAAGGIPFIFDPGQALPLFNGPELREFIEQADYVVVNDYESNLLQERTGWNEQDIVSRVQAYITTQGSKGALVHTPEKTYDIPGAHERRVVDPTGCGDAFRAGLIYGIQHNYDWLTIGRMGNLMGALKVEHPGTQNQRFDFAEFNDQFKQDFGYAL

SEQ ID NO: 621 - DNA, 969 bp, synthetic construct
  misc_feature 1..969: note = Variant of adenosine kinase
  source 1..969: mol_type = other DNA
atgcaccatcatcaccatcacgggggctccggcatgagtgcactgatttgcggttctttagcgtatgataccatcatggtgtttccggaccagttcaagaaccatattctgcccgatcgtgttcaccgcctcaatgtcagctttcttgtaccacgcatgcgtcgtgaatttggaggctgtgccggcaacattgcgtacaatctgcatctgttgggtggtgctccgatccctatgggaacggtgggccaagatttcggtccgtatcgcgagcacttcgaaactctgggcattgacttatcccgcgtcaagatcatcgatgatctgagtacaccgcaggccttcattaccaccgaccatgatcataaccagattacggcgtttcatccaggcgcaatgatgcgttcgtacgaaaatcacgttcgtgatgtgccgggtgttaccttgggcctcgtaggtcctgatggacgcgagggcatgatccaaaatgccgaagaatttgctgctggtggcattccgttcatttttgacccaggtcaggcactgccgctgttcaacggccccgaactgcgcgagtttatcgaacaggcggactatgtggtggtcaacgattacgaaagcaatcttcttcaagaacgtactggctggaacgagcaggacattgtttcacgcgtgcaggcgtatatcaccacgcaaggttcgaaaggagccctggtacatacaccggagaagacctacgatattccgattgcacacgaacgtcgtgtcgttgatccaactggttgcggcgacgcgtttcgcgccggcctgatctatggtattcagcataattatgattggttgaccattggccgcatgggaaacttaatgggtgcgctgaaagtggaacaccctggcacgcaaaatcagcgtttcgattttgccgaattcaacgaccagttcaaacaagattttggctacgcgctctaatga

SEQ ID NO: 622 - protein, 321 aa, synthetic construct
  REGION 1..321: note = Variant of adenosine kinase
MHHHHHHGGSGMSALICGSLAYDTIMVFPDQFKNHILPDRVHRLNVSFLVPRMRREFGGCAGNIAYNLHLLGGAPIPMGTVGQDFGPYREHFETLGIDLSRVKIIDDLSTPQAFITTDHDHNQITAFHPGAMMRSYENHVRDVPGVTLGLVGPDGREGMIQNAEEFAAGGIPFIFDPGQALPLFNGPELREFIEQADYVVVNDYESNLLQERTGWNEQDIVSRVQAYITTQGSKGALVHTPEKTYDIPIAHERRVVDPTGCGDAFRAGLIYGIQHNYDWLTIGRMGNLMGALKVEHPGTQNQRFDFAEFNDQFKQDFGYAL

SEQ ID NO: 623 - DNA, 969 bp, synthetic construct
  misc_feature 1..969: note = Variant of adenosine kinase
  source 1..969: mol_type = other DNA
atgcaccatcatcaccatcacgggggctccggcatgagtgcactgatttgcggttctgttgcgtatgataccatcatggtgtttccggaccagttcaagaaccatattctgcccgatcgtgttcaccgcctcaatgtcagctttcttgtaccacgcatgcgtcgtgaatttggaggctgtgccggcaacattgcgtacaatctgcatctgttgggtggtgctccgatccctatgggaacggtgggccaagatttcggtccgtatcgcgagcacttcgaaactctgggcattgacttatcccgcgtcaagatcatcgatgatctgagtacaccgcaggccttcattaccaccgaccatgatcataaccagattacggcgtttcatccaggcgcaatgatgcgttcgtacgaaaatcacgttcgtgatgtgccgggtgttaccttgggcctcgtaggtcctgatggacgcgagggcatgatccaaaatgccgaagaatttgctgctggtggcattccgttcatttttgacccaggtcaggcactgccgctgttcaacggccccgaactgcgcgagtttatcgaacaggcggactatgtggtggtcaacgattacgaaagcaatcttcttcaagaacgtactggctggaacgagcaggacattgtttcacgcgtgcaggcgtatatcaccacgcaaggttcgaaaggagccctggtacatacaccggagaagacctacgatattccgccggcacacgaacgtcgtgtcgttgatccaactggttgcggcgacgcgtttcgcgccggcctgatctatggtattcagcataattatgattggttgaccattggccgcatgggaaacttaatgggtgcgctgaaagtggaacaccctggcacgcaaaatcagcgtttcgattttgccgaattcaacgaccagttcaaacaagattttggctacgcgctctaatga

SEQ ID NO: 624 - protein, 321 aa, synthetic construct
  REGION 1..321: note = Variant of adenosine kinase
MHHHHHHGGSGMSALICGSVAYDTIMVFPDQFKNHILPDRVHRLNVSFLVPRMRREFGGCAGNIAYNLHLLGGAPIPMGTVGQDFGPYREHFETLGIDLSRVKIIDDLSTPQAFITTDHDHNQITAFHPGAMMRSYENHVRDVPGVTLGLVGPDGREGMIQNAEEFAAGGIPFIFDPGQALPLFNGPELREFIEQADYVVVNDYESNLLQERTGWNEQDIVSRVQAYITTQGSKGALVHTPEKTYDIPPAHERRVVDPTGCGDAFRAGLIYGIQHNYDWLTIGRMGNLMGALKVEHPGTQNQRFDFAEFNDQFKQDFGYAL

SEQ ID NO: 625 - DNA, 969 bp, synthetic construct
  misc_feature 1..969: note = Variant of adenosine kinase
  source 1..969: mol_type = other DNA
atgcaccatcatcaccatcacgggggctccggcatgagtgcactgatttgcggttctttagcgtatgataccatcatggtgtttccggaccagttcaagaaccatattctgcccgatcgtgttcaccgcctcaatgtcagctttcttgtaccacgcatgcgtcgtgaatttggaggctgtgccggcaacattgcgtacaatctgcatctgttgggtggtgctccgatccctatgggaacggtgggccaagatttcggtccgtatcgcgagcacttcgaaactctgggcattgacttatcccgcgtcaagatcatcgatgatctgagtacaccgcaggccttcattaccaccgaccatgatcataaccagattacggcgtttcatccaggcgcaatgatgcgttcgtacgaaaatcacgttcgtgatgtgccgggtgttaccttgggcctcgtaggtcctgatggacgcgagggcatgatccaaaatgccgaagaatttgctgctggtggcattccgttcatttttgacccaggtcaggcactgccgctgttcaacggccccgaactgcgcgagtttatcgaacaggcggactatgtggtggtcaacgattacgaaagcaatcttcttcaagaacgtactggctggaacgagcaggacattgtttcacgcgtgcaggcgtatatcaccacgcaaggttcgaaaggagccatggtacatacaccggagaagacctacgatattccgccggcacacgaacgtcgtgtcgttgatccaactggttgcggcgacgcgtttcgcgccggcctgatctatggtattcagcataattatgattggttgaccattggccgcatgggaaacttaatgggtgcgctgaaagtggaacaccctggcacgcaaaatcagcgtttcgattttgccgaattcaacgaccagttcaaacaagattttggctacgcgctctaatga

SEQ ID NO: 626 - protein, 321 aa, synthetic construct
  REGION 1..321: note = Variant of adenosine kinase
MHHHHHHGGSGMSALICGSLAYDTIMVFPDQFKNHILPDRVHRLNVSFLVPRMRREFGGCAGNIAYNLHLLGGAPIPMGTVGQDFGPYREHFETLGIDLSRVKIIDDLSTPQAFITTDHDHNQITAFHPGAMMRSYENHVRDVPGVTLGLVGPDGREGMIQNAEEFAAGGIPFIFDPGQALPLFNGPELREFIEQADYVVVNDYESNLLQERTGWNEQDIVSRVQAYITTQGSKGAMVHTPEKTYDIPPAHERRVVDPTGCGDAFRAGLIYGIQHNYDWLTIGRMGNLMGALKVEHPGTQNQRFDFAEFNDQFKQDFGYAL

SEQ ID NO: 627 - DNA, 969 bp, synthetic construct
  misc_feature 1..969: note = Variant of adenosine kinase
  source 1..969: mol_type = other DNA
atgcaccatcatcaccatcacgggggctccggcatgagtgcactgatttgcggttctttagcgtatgataccatcatggtgtttccggaccagttcaagaaccatattctgcccgatcgtgttcaccgcctcaatgtcagctttcttgtaccacgcatgcgtcgtgaatttggaggctgtgccggcaacattgcgtacaatctgcatctgttgggtggtgctccgatccctatgggaacggtgggccaagatttcggtccgtatcgcgagcacttcgaaactctgggcattgacttatcccgcgtcaagatcatcgatgatctgagtacaccgcaggccttcattaccaccgaccatgatcataaccagattacggcgtttcatccaggcgcaatgatgcgttcgtacgaaaatcacgttcgtgatgtgccgggtgttaccttgggcctcgtaggtcctgatggacgcgagggcatgatccaaaatgccgaagaatttgctgctggtggcattccgttcatttttgacccaggtcaggcactgccgctgttcaacggccccgaactgcgcgagtttatcgaacaggcggactatgtggtggtcaacgattacgaaagcaatcttcttcaagaacgtactggctggaacgagcaggacattgtttcacgcgtgcaggcgtatatcaccacgcaaggtgcgaaaggagccctggtacatacaccggagaagacctacgatattccgccggcacacgaacgtcgtgtcgttgatccaactggttgcggcgacgcgtttcgcgccggcctgatctatggtattcagcataattatgattggttgaccattggccgcatgggaaacttaatgggtgcgctgaaagtggaacaccctggcacgcaaaatcagcgtttcgattttgccgaattcaacgaccagttcaaacaagattttggctacgcgctctaatga

SEQ ID NO: 628 - protein, 321 aa, synthetic construct
  REGION 1..321: note = Variant of adenosine kinase
MHHHHHHGGSGMSALICGSLAYDTIMVFPDQFKNHILPDRVHRLNVSFLVPRMRREFGGCAGNIAYNLHLLGGAPIPMGTVGQDFGPYREHFETLGIDLSRVKIIDDLSTPQAFITTDHDHNQITAFHPGAMMRSYENHVRDVPGVTLGLVGPDGREGMIQNAEEFAAGGIPFIFDPGQALPLFNGPELREFIEQADYVVVNDYESNLLQERTGWNEQDIVSRVQAYITTQGAKGALVHTPEKTYDIPPAHERRVVDPTGCGDAFRAGLIYGIQHNYDWLTIGRMGNLMGALKVEHPGTQNQRFDFAEFNDQFKQDFGYAL

SEQ ID NO: 629 - DNA, 969 bp, synthetic construct
  misc_feature 1..969: note = Variant of adenosine kinase
  source 1..969: mol_type = other DNA
atgcaccatcatcaccatcacgggggctccggcatgagtgcactgatttgcggttctttagcgtatgataccatcatggtgtttccggaccagttcaagaaccatattctgcccgatcgtgttcaccgcctcaatgtcagctttcttgtaccacgcatgcgtcgtgaatttggaggctgtgccggcaacattgcgtacaatctgcatctgttgggtggtgctccgatccctatgggaacggtgggccaagatttcggtccgtatcgcgagcacttcgaaactctgggcattgacttatcccgcgtcaagatcatcgatgatctgagtacaccgcaggccttcattaccaccgaccatgatcataaccagattacggcgtttcatccaggcgcaatgatgcgttcgtacgaaaatcacgttcgtgatgtgccgggtgttaccttgggcctcgtaggtcctgatggacgcgagggcatgatccaaaatgccgaagaatttgctgctggtggcattccgttcatttttgacccaggtcaggcactgccgctgttcaacggccccgaactgcgcgagtttatcgaacaggcggactatgtggtggtcaacgattacgaaagcaatcttcttcaagaacgtactggctggaacgagcaggacattgtttcacgcgtgcaggcgtatatcaccacgcaaggttcgaaaggagccctggtacatacaccggagaagacctacgatattggtccggcacacgaacgtcgtgtcgttgatccaactggttgcggcgacgcgtttcgcgccggcctgatctatggtattcagcataattatgattggttgaccattggccgcatgggaaacttaatgggtgcgctgaaagtggaacaccctggcacgcaaaatcagcgtttcgattttgccgaattcaacgaccagttcaaacaagattttggctacgcgctctaatga

SEQ ID NO: 630 - protein, 321 aa, synthetic construct
  REGION 1..321: note = Variant of adenosine kinase
MHHHHHHGGSGMSALICGSLAYDTIMVFPDQFKNHILPDRVHRLNVSFLVPRMRREFGGCAGNIAYNLHLLGGAPIPMGTVGQDFGPYREHFETLGIDLSRVKIIDDLSTPQAFITTDHDHNQITAFHPGAMMRSYENHVRDVPGVTLGLVGPDGREGMIQNAEEFAAGGIPFIFDPGQALPLFNGPELREFIEQADYVVVNDYESNLLQERTGWNEQDIVSRVQAYITTQGSKGALVHTPEKTYDIGPAHERRVVDPTGCGDAFRAGLIYGIQHNYDWLTIGRMGNLMGALKVEHPGTQNQRFDFAEFNDQFKQDFGYAL

SEQ ID NO: 631 - DNA, 969 bp, synthetic construct
  misc_feature 1..969: note = Variant of adenosine kinase
  source 1..969: mol_type = other DNA
atgcaccatcatcaccatcacgggggctccggcatgagtgcactgatttgcggttctttagcgtatgataccatcatggtgtttccggaccagttcaagaaccatattctgcccgatcgtgttcaccgcctcaatgtcagctttcttgtaccacgcatgcgtcgtgaatttggaggctgtgccggcaacattgcgtacaatctgcatctgttgggtggtgctccgatccctatgggaacggtgggccaagatttcggtccgtatcgcgagcacttcgaaactctgggcattgacttatcccgcgtcaagatcatcgatgatctgagtacaccgcaggccttcattaccaccgaccatgatcataaccagattacggcgtttcatccaggcgcaatgatgcgttcgtacgaaaatcacgttcgtgatgtgccgggtgttaccttgggcctcgtaggtcctgatggacgcgagggcatgatccaaaatgccgaagaatttgctgctggtggcattccgttcatttttgacccaggtcaggcactgccgctgttcaacggccccgaactgcgcgagtttatcgaacaggcggactatgtggtggtcaacgattacgaaagcaatcttcttcaagaacgtactggctggaacgagcaggacattgtttcacgcgtgcaggcgtatatcaccacggtgggttcgaaaggagccctggtacatacaccggagaagacctacgatattccgccggcacacgaacgtcgtgtcgttgatccaactggttgcggcgacgcgtttcgcgccggcctgatctatggtattcagcataattatgattggttgaccattggccgcatgggaaacttaatgggtgcgctgaaagtggaacaccctggcacgcaaaatcagcgtttcgattttgccgaattcaacgaccagttcaaacaagattttggctacgcgctctaatga

SEQ ID NO: 632 - protein, 321 aa, synthetic construct
  REGION 1..321: note = Variant of adenosine kinase
MHHHHHHGGSGMSALICGSLAYDTIMVFPDQFKNHILPDRVHRLNVSFLVPRMRREFGGCAGNIAYNLHLLGGAPIPMGTVGQDFGPYREHFETLGIDLSRVKIIDDLSTPQAFITTDHDHNQITAFHPGAMMRSYENHVRDVPGVTLGLVGPDGREGMIQNAEEFAAGGIPFIFDPGQALPLFNGPELREFIEQADYVVVNDYESNLLQERTGWNEQDIVSRVQAYITTVGSKGALVHTPEKTYDIPPAHERRVVDPTGCGDAFRAGLIYGIQHNYDWLTIGRMGNLMGALKVEHPGTQNQRFDFAEFNDQFKQDFGYAL

SEQ ID NO: 633 - DNA, 969 bp, synthetic construct
  misc_feature 1..969: note = Variant of adenosine kinase
  source 1..969: mol_type = other DNA
atgcaccatcatcaccatcacgggggctccggcatgagtgcactgatttgcggttctttagcgtatgataccatcatggtgtttccggaccagttcaagaaccatattctgcccgatcgtgttcaccgcctcaatgtcagctttcttgtaccacgcatgcgtcgtgaatttggaggctgtgccggcaacattgcgtacaatctgcatctgttgggtggtgctccgatccctatgggaacggtgggccaagatttcggtccgtatcgcgagcacttcgaaactctgggcattgacttatcccgcgtcaagatcatcgatgatctgagtacaccgcaggccttcattaccaccgaccatgatcataaccagattacggcgtttcatccaggcgcaatgatgcgttcgtacgaaaatcacgttcgtgatgtgccgggtgttaccttgggcctcgtaggtcctgatggacgcgagggcatgatccaaaatgccgaagaatttgctgctggtggcattccgttcatttttgacccaggtcaggcactgccgctgttcaacggccccgaactgcgcgagtttatcgaacaggcggactatgtggtggtcaacgattacgaaagcaatcttcttcaagaacgtactggctggaacgagcaggacattgtttcacgcgtgcaggcgtatatcaccacgcaaggttcgaaaggagccctggtacatacaccggagaagacctacgatattccgccggcactggaacgtcgtgtcgttgatccaactggttgcggcgacgcgtttcgcgccggcctgatctatggtattcagcataattatgattggttgaccattggccgcatgggaaacttaatgggtgcgctgaaagtggaacaccctggcacgcaaaatcagcgtttcgattttgccgaattcaacgaccagttcaaacaagattttggctacgcgctctaatga

SEQ ID NO: 634 - protein, 321 aa, synthetic construct
  REGION 1..321: note = Variant of adenosine kinase
MHHHHHHGGSGMSALICGSLAYDTIMVFPDQFKNHILPDRVHRLNVSFLVPRMRREFGGCAGNIAYNLHLLGGAPIPMGTVGQDFGPYREHFETLGIDLSRVKIIDDLSTPQAFITTDHDHNQITAFHPGAMMRSYENHVRDVPGVTLGLVGPDGREGMIQNAEEFAAGGIPFIFDPGQALPLFNGPELREFIEQADYVVVNDYESNLLQERTGWNEQDIVSRVQAYITTQGSKGALVHTPEKTYDIPPALERRVVDPTGCGDAFRAGLIYGIQHNYDWLTIGRMGNLMGALKVEHPGTQNQRFDFAEFNDQFKQDFGYAL

SEQ ID NO: 635 - DNA, 969 bp, synthetic construct
  misc_feature 1..969: note = Variant of adenosine kinase
  source 1..969: mol_type = other DNA
atgcaccatcatcaccatcacgggggctccggcatgagtgcactgatttgcggttctttagcgtatgataccatcatggtgtttccggaccagttcaagaaccatattctgcccgatcgtgttcaccgcctcaatgtcagctttcttgtaccacgcatgcgtcgtgaatttggaggctgtgccggcaacattgcgtacaatctgcatctgttgggtggtgctccgatccctatgggaacggtgggccaagatttcggtccgtatcgcgagcacttcgaaactctgggcattgacttatcccgcgtcaagatcatcgatgatctgagtacaccgcaggccttcattaccaccgaccatgatcataaccagattacggcgttttttccaggcgcaatgatgcgttcgtacgaaaatcacgttcgtgatgtgccgggtgttaccttgggcctcgtaggtcctgatggacgcgagggcatgatccaaaatgccgaagaatttgctgctggtggcattccgttcatttttgacccaggtcaggcactgccgctgttcaacggccccgaactgcgcgagtttatcgaacaggcggactatgtggtggtcaacgattacgaaagcaatcttcttcaagaacgtactggctggaacgagcaggacattgtttcacgcgtgcaggcgtatatcaccacgcaaggttcgaaaggagccctggtacatacaccggagaagacctacgatattccgccggcacacgaacgtcgtgtcgttgatccaactggttgcggcgacgcgtttcgcgccggcctgatctatggtattcagcataattatgattggttgaccattggccgcatgggaaacttaatgggtgcgctgaaagtggaacaccctggcacgcaaaatcagcgtttcgattttgccgaattcaacgaccagttcaaacaagattttggctacgcgctctaatga

SEQ ID NO: 636 - protein, 321 aa, synthetic construct
  REGION 1..321: note = Variant of adenosine kinase
MHHHHHHGGSGMSALICGSLAYDTIMVFPDQFKNHILPDRVHRLNVSFLVPRMRREFGGCAGNIAYNLHLLGGAPIPMGTVGQDFGPYREHFETLGIDLSRVKIIDDLSTPQAFITTDHDHNQITAFFPGAMMRSYENHVRDVPGVTLGLVGPDGREGMIQNAEEFAAGGIPFIFDPGQALPLFNGPELREFIEQADYVVVNDYESNLLQERTGWNEQDIVSRVQAYITTQGSKGALVHTPEKTYDIPPAHERRVVDPTGCGDAFRAGLIYGIQHNYDWLTIGRMGNLMGALKVEHPGTQNQRFDFAEFNDQFKQDFGYAL

SEQ ID NO: 637 - DNA, 969 bp, synthetic construct
  misc_feature 1..969: note = Variant of adenosine kinase
  source 1..969: mol_type = other DNA
atgcaccatcatcaccatcacgggggctccggcatgagtgcactgatttgcggttctttagcgtatgataccatcatggtgtttccggaccagttcaagaaccatattctgcccgatcgtgttcaccgcctcaatgtcagctttcttgtaccacgcatgcgtcgtgaatttggaggctgtgccggcaacattgcgtacaatctgcatctgttgggtggtgctccgatccctatgggaacggtgggccaagatttcggtccgtatcgcgagcacttcgaaactctgggcattgacttatcccgcgtcaagatcatcgatgatctgagtacaccgcaggccttcattaccaccgaccatgatcataaccagattacggcgtttcatccaggcgcaatgatgcgttcgtacgaaaatcacgttcgtgatgtgccgggtgttaccttgggcctcgtaggtcctgatggacgcgagggcatgatccaaaatgccgaagaatttgctgctggtggcattccgttcatttttgacccaggtcaggcactgccgctgttcaacggccccgaactgcgcgagtttatcgaacaggcggactatgtggtggtcaacgattacgaaagcaatcttcttcaagaacgtactggctggaacgagcaggacattgtttcacgcgtgcaggcgtatatcaccacgcaaggttcgaaaggagccctggtacatacaccggagaagacctacgatattccgccggcacacgaacgtcgtgtcgttgatccaactggttgcggcgacgcgtttcgcgccggcctgatctatggtattcagcataattatgattggttgaccattggccgcatgggagcgttaatgggtgcgctgaaagtggaacaccctggcacgcaaaatcagcgtttcgattttgccgaattcaacgaccagttcaaacaagattttggctacgcgctctaatga

SEQ ID NO: 638 - protein, 321 aa, synthetic construct
  REGION 1..321: note = Variant of adenosine kinase
MHHHHHHGGSGMSALICGSLAYDTIMVFPDQFKNHILPDRVHRLNVSFLVPRMRREFGGCAGNIAYNLHLLGGAPIPMGTVGQDFGPYREHFETLGIDLSRVKIIDDLSTPQAFITTDHDHNQITAFHPGAMMRSYENHVRDVPGVTLGLVGPDGREGMIQNAEEFAAGGIPFIFDPGQALPLFNGPELREFIEQADYVVVNDYESNLLQERTGWNEQDIVSRVQAYITTQGSKGALVHTPEKTYDIPPAHERRVVDPTGCGDAFRAGLIYGIQHNYDWLTIGRMGALMGALKVEHPGTQNQRFDFAEFNDQFKQDFGYAL

SEQ ID NO: 639 - DNA, 969 bp, synthetic construct
  misc_feature 1..969: note = Variant of adenosine kinase
  source 1..969: mol_type = other DNA
atgcaccatcatcaccatcacgggggctccggcatgagtgcactgatttgcggttctttagcgtatgataccatcatggtgtttccggaccagttcaagaaccatattctgcccgatcgtgttcaccgcctcaatgtcagctttcttgtaccacgcatgcgtcgtgaatttggaggctgtgccggcaacattgcgtacaatctgcatctgttgggtggtgctccgatccctatgggaacggtgggccaagatttcggtccgtatcgcgagcacttcgaaactctgggcattgacttatcccgcgtcaagatcatcgatgatctgagtacaccgcaggccttcattaccaccgaccatgatcataaccagattacggcgtttcatccaggcgcaatgatgcgttcgtacgaaaatcacgttcgtgatgtgccgggtgttaccttgggcctcgtaggtcctgatggacgcgagggcatgatccaaaatgccgaagaatttgctgctggtggcattccgttcatttttgacccaggtcaggcagttccgctgttcaacggccccgaactgcgcgagtttatcgaacaggcggactatgtggtggtcaacgattacgaaagcaatcttcttcaagaacgtactggctggaacgagcaggacattgtttcacgcgtgcaggcgtatatcaccacgcaaggttcgaaaggagccctggtacatacaccggagaagacctacgatattccgccggcacacgaacgtcgtgtcgttgatccaactggttgcggcgacgcgtttcgcgccggcctgatctatggtattcagcataattatgattggttgaccattggccgcatgggaaacttaatgggtgcgctgaaagtggaacaccctggcacgcaaaatcagcgtttcgattttgccgaattcaacgaccagttcaaacaagattttggctacgcgctctaatga

SEQ ID NO: 640 - protein, 321 aa, synthetic construct
  REGION 1..321: note = Variant of adenosine kinase
MHHHHHHGGSGMSALICGSLAYDTIMVFPDQFKNHILPDRVHRLNVSFLVPRMRREFGGCAGNIAYNLHLLGGAPIPMGTVGQDFGPYREHFETLGIDLSRVKIIDDLSTPQAFITTDHDHNQITAFHPGAMMRSYENHVRDVPGVTLGLVGPDGREGMIQNAEEFAAGGIPFIFDPGQAVPLFNGPELREFIEQADYVVVNDYESNLLQERTGWNEQDIVSRVQAYITTQGSKGALVHTPEKTYDIPPAHERRVVDPTGCGDAFRAGLIYGIQHNYDWLTIGRMGNLMGALKVEHPGTQNQRFDFAEFNDQFKQDFGYAL

SEQ ID NO: 641 - DNA, 969 bp, synthetic construct
  misc_feature 1..969: note = Variant of adenosine kinase
  source 1..969: mol_type = other DNA
atgcaccatcatcaccatcacgggggctccggcatgagtgcactgatttgcggttctttagcgtatgataccatcatggtgtttccggaccagttcaagaaccatattctgcccgatcgtgttcaccgcctcaatgtcagctttcttgtaccacgcatgcgtcgtgaatttggaggctgtgccggcaacattgcgtacaatctgcatctgttgggtggtgctccgatccctatgggaacggtgggccaagatttcggtccgtatcgcgagcacttcgaaactctgggcattgacttatcccgcgtcaagatcatcgatgatctgagtacaccgcaggccttcattaccaccgaccatgatcataaccagattacggcgtttcatccaggcgcaatgatgcgttcgtacgaaaatcacgttcgtgatgtgccgggtgttaccttgggcctcgtaggtcctgatggatatgagggcatgatccaaaatgccgaagaatttgctgctggtggcattccgttcatttttgacccaggtcaggcactgccgctgttcaacggccccgaactgcgcgagtttatcgaacaggcggactatgtggtggtcaacgattacgaaagcaatcttcttcaagaacgtactggctggaacgagcaggacattgtttcacgcgtgcaggcgtatatcaccacgcaaggttcgaaaggagccctggtacatacaccggagaagacctacgatattccgccggcacacgaacgtcgtgtcgttgatccaactggttgcggcgacgcgtttcgcgccggcctgatctatggtattcagcataattatgattggttgaccattggccgcatgggaaacttaatgggtgcgctgaaagtggaacaccctggcacgcaaaatcagcgtttcgattttgccgaattcaacgaccagttcaaacaagattttggctacgcgctctaatga

SEQ ID NO: 642 - protein, 321 aa, synthetic construct
  REGION 1..321: note = Variant of adenosine kinase
MHHHHHHGGSGMSALICGSLAYDTIMVFPDQFKNHILPDRVHRLNVSFLVPRMRREFGGCAGNIAYNLHLLGGAPIPMGTVGQDFGPYREHFETLGIDLSRVKIIDDLSTPQAFITTDHDHNQITAFHPGAMMRSYENHVRDVPGVTLGLVGPDGYEGMIQNAEEFAAGGIPFIFDPGQALPLFNGPELREFIEQADYVVVNDYESNLLQERTGWNEQDIVSRVQAYITTQGSKGALVHTPEKTYDIPPAHERRVVDPTGCGDAFRAGLIYGIQHNYDWLTIGRMGNLMGALKVEHPGTQNQRFDFAEFNDQFKQDFGYAL

SEQ ID NO: 643 - DNA, 969 bp, synthetic construct
  misc_feature 1..969: note = Variant of adenosine kinase
  source 1..969: mol_type = other DNA
atgcaccatcatcaccatcacgggggctccggcatgagtgcactgatttgcggttctttagcgtatgataccatcatggtgtttccggaccagttcaagaaccatattctgcccgatcgtgttcaccgcctcaatgtcagctttcttgtaccacgcatgcgtcgtgaatttggaggctgtgccggcaacattgcgtacaatctgcatctgttgggtggtgctccgatccctatgggaacggtgggccaagatttcggtccgtatcgcgagcacttcgaaactctgggcattgacttatcccgcgtcaagatcatcgatgatctgagtacaccgcaggccttcattaccaccgaccatgatcataaccagattacggcgtttcatccaggcgcaatgatgcgttcgtacgaaaatcacgttcgtgatgtgccgggtgttaccttgggcctcgtaggtcctgatggacgcgagggcatgatccaaaatgccgaagaatttgctgctggtggcattccgttcatttttgacccaggtcaggcactgccgctgttcaacggccccgaactgcgcgagtttatcgaacaggcggactatgtggtggtcaacgattacgaaagcaatcttcttcaagaacgtactggctggaacgagcaggacattgtttcacgcgtgcaggcgtatatcaccacgcaaggttcgaaaggagccctggtacatacaccggagaagacctacgatcttccgccggcacacgaacgtcgtgtcgttgatccaactggttgcggcgacgcgtttcgcgccggcctgatctatggtattcagcataattatgattggttgaccattggccgcatgggaaacttaatgggtgcgctgaaagtggaacaccctggcacgcaaaatcagcgtttcgattttgccgaattcaacgaccagttcaaacaagattttggctacgcgctctaatga

SEQ ID NO: 644 - protein, 321 aa, synthetic construct
  REGION 1..321: note = Variant of adenosine kinase
MHHHHHHGGSGMSALICGSLAYDTIMVFPDQFKNHILPDRVHRLNVSFLVPRMRREFGGCAGNIAYNLHLLGGAPIPMGTVGQDFGPYREHFETLGIDLSRVKIIDDLSTPQAFITTDHDHNQITAFHPGAMMRSYENHVRDVPGVTLGLVGPDGREGMIQNAEEFAAGGIPFIFDPGQALPLFNGPELREFIEQADYVVVNDYESNLLQERTGWNEQDIVSRVQAYITTQGSKGALVHTPEKTYDLPPAHERRVVDPTGCGDAFRAGLIYGIQHNYDWLTIGRMGNLMGALKVEHPGTQNQRFDFAEFNDQFKQDFGYAL

SEQ ID NO: 645 - DNA, 969 bp, synthetic construct
  misc_feature 1..969: note = Variant of adenosine kinase
  source 1..969: mol_type = other DNA
atgcaccatcatcaccatcacgggggctccggcatgagtgcactgatttgcggttctttagcgtatgataccatcatggtgtttccggaccagttcaagaaccatattctgcccgatcgtgttcaccgcctcaatgtcagctttcttgtaccacgcatgcgtcgtgaatttggaggctgtgccggcaacattgcgtacaatctgcatctgttgggtggtgctccgatccctatgggaacggtgggccaagatttcggtccgtatcgcgagcacttcgaaactctgggcattgacttatcccgcgtcaagatcatcgatgatctgagtacaccgcaggccttcattaccaccgaccatgatcataaccagattacggcgtttcatccaggcgcaatgatgcgttcgtacgaaaatcacgttcgtgatgtgccgggtgttaccttgggcctcgtaggtcctgatggacgcgagggcatgatccaaaatgccgaagaatttgctgctggtggcattccgttcatttttgacccaggtcaggcactgccgctgttcaacggccccgaactgcgcgagtttatcgaacaggcggactatgtggtggtcaacgattacgaaagcaatcttcttcaagaacgtactggctggaacgagcaggacattgtttcacgcgtgcaggcgtatatcaccacgcaaggttcgaaaggagccctggtacatacaccggagaagacctacgatattccgccggcacacgaacgtcgtgtcgttgatccaactggttgcggcgacgcgtttcgcgccggcctgatctatggtattcagcataattatgattggttgaccattggccgcatgggaaacgtgatgggtgcgctgaaagtggaacaccctggcacgcaaaatcagcgtttcgattttgccgaattcaacgaccagttcaaacaagattttggctacgcgctctaatga

SEQ ID NO: 646 - protein, 321 aa, synthetic construct
  REGION 1..321: note = Variant of adenosine kinase
MHHHHHHGGSGMSALICGSLAYDTIMVFPDQFKNHILPDRVHRLNVSFLVPRMRREFGGCAGNIAYNLHLLGGAPIPMGTVGQDFGPYREHFETLGIDLSRVKIIDDLSTPQAFITTDHDHNQITAFHPGAMMRSYENHVRDVPGVTLGLVGPDGREGMIQNAEEFAAGGIPFIFDPGQALPLFNGPELREFIEQADYVVVNDYESNLLQERTGWNEQDIVSRVQAYITTQGSKGALVHTPEKTYDIPPAHERRVVDPTGCGDAFRAGLIYGIQHNYDWLTIGRMGNVMGALKVEHPGTQNQRFDFAEFNDQFKQDFGYAL

SEQ ID NO: 647 - DNA, 969 bp, synthetic construct
  misc_feature 1..969: note = Variant of adenosine kinase
  source 1..969: mol_type = other DNA
atgcaccatcatcaccatcacgggggctccggcatgagtgcactgatttgcggttctttagcgtatgataccatcatggtgtttccggaccagttcaagaaccatattctgcccgatcgtgttcaccgcctcaatgtcagctttcttgtaccacgcatgcgtcgtgaatttggaggctgtgccggcaacattgcgtacaatctgcatctgttgggtggtgctccgatccctatgggaacggtgggccaagatttcggtccgtatcgcgagcacttcgaaactctgggcattgacttatcccgcgtcaagatcatcgatgatctgagtacaccgcaggccttcattaccaccgaccatgatcataaccagattacggcgtttcatccaggcgcaatgatgcgttcgtacgaaaatcacgttcgtgatgtgccgggtgttaccttgggcctcgtaggtcctgatggacgcgagggcatgatccaaaatgccgaagaatttgctgctggtggcattccgttcatttttgacccaggtcaggcactgccgctgttcaacggccccgaactgcgcgagtttatcgaacaggcggactatgtggtggtcaacgattacgaaagcaatcttcttcaagaacgtactggctggaacgagcaggacattgtttcacgcgtgcaggcgtatatcaccacgcaaggttcgaaaggagccctggtacatacaccggagaagacctacgatattccgccggcacacgaacgtcgtgtcgttgatccaactggttgcggcgacgcgtttcgcgccggcctgatctatggtattcagcataattatgattggttgaccattggccgcatgggaaacttaatgggtgcgaagaaagtggaacaccctggcacgcaaaatcagcgtttcgattttgccgaattcaacgaccagttcaaacaagattttggctacgcgctctaatga

SEQ ID NO: 648 - protein, 321 aa, synthetic construct
  REGION 1..321: note = Variant of adenosine kinase
MHHHHHHGGSGMSALICGSLAYDTIMVFPDQFKNHILPDRVHRLNVSFLVPRMRREFGGCAGNIAYNLHLLGGAPIPMGTVGQDFGPYREHFETLGIDLSRVKIIDDLSTPQAFITTDHDHNQITAFHPGAMMRSYENHVRDVPGVTLGLVGPDGREGMIQNAEEFAAGGIPFIFDPGQALPLFNGPELREFIEQADYVVVNDYESNLLQERTGWNEQDIVSRVQAYITTQGSKGALVHTPEKTYDIPPAHERRVVDPTGCGDAFRAGLIYGIQHNYDWLTIGRMGNLMGAKKVEHPGTQNQRFDFAEFNDQFKQDFGYAL

SEQ ID NO: 649 - DNA, 969 bp, synthetic construct
  misc_feature 1..969: note = Variant of adenosine kinase
  source 1..969: mol_type = other DNA
atgcaccatcatcaccatcacgggggctccggcatgagtgcactgatttgcggttctttagcgtatgataccatcatggtgtttccggaccagttcaagaaccatattctgcccgatcgtgttcaccgcctcaatgtcagctttcttgtaccacgcatgcgtcgtgaatttggaggctgtgccggcaacattgcgtacaatctgcatctgttgggtggtgctccgatccctatgggaacggtgggccaagatttcggtccgtatcgcgagcacttcgaaactctgggcattgacttatcccgcgtcaagatcatcgatgatctgagtacaccgcaggccttcattaccaccgaccatgatcataaccagattacggcgtttcatccaggcgcaatgatgcgttcgtacgaaaatcacgttcgtgatgtgccgggtgttaccttgggcctcgtaggtcctgatggacgcgagggcatgatccaaaatgccgaagaatttgctgctggtggcattccgttcatttttgacccaggtcaggcagctccgctgttcaacggccccgaactgcgcgagtttatcgaacaggcggactatgtggtggtcaacgattacgaaagcaatcttcttcaagaacgtactggctggaacgagcaggacattgtttcacgcgtgcaggcgtatatcaccacgcaaggttcgaaaggagccctggtacatacaccggagaagacctacgatattccgccggcacacgaacgtcgtgtcgttgatccaactggttgcggcgacgcgtttcgcgccggcctgatctatggtattcagcataattatgattggttgaccattggccgcatgggaaacttaatgggtgcgctgaaagtggaacaccctggcacgcaaaatcagcgtttcgattttgccgaattcaacgaccagttcaaacaagattttggctacgcgctctaatga

SEQ ID NO: 650 - protein, 321 aa, synthetic construct
  REGION 1..321: note = Variant of adenosine kinase
MHHHHHHGGSGMSALICGSLAYDTIMVFPDQFKNHILPDRVHRLNVSFLVPRMRREFGGCAGNIAYNLHLLGGAPIPMGTVGQDFGPYREHFETLGIDLSRVKIIDDLSTPQAFITTDHDHNQITAFHPGAMMRSYENHVRDVPGVTLGLVGPDGREGMIQNAEEFAAGGIPFIFDPGQAAPLFNGPELREFIEQADYVVVNDYESNLLQERTGWNEQDIVSRVQAYITTQGSKGALVHTPEKTYDIPPAHERRVVDPTGCGDAFRAGLIYGIQHNYDWLTIGRMGNLMGALKVEHPGTQNQRFDFAEFNDQFKQDFGYAL

SEQ ID NO: 651 - DNA, 969 bp, synthetic construct
  misc_feature 1..969: note = Variant of adenosine kinase
  source 1..969: mol_type = other DNA
atgcaccatcatcaccatcacgggggctccggcatgagtgcactgatttgcggttctttagcgtatgataccatcatggtgtttccggaccagttcaagaaccatattctgcccgatcgtgttcaccgcctcaatgtcagctttcttgtaccacgcatgcgtcgtgaatttggaggctgtgccggcaacattgcgtacaatctgcatctgttgggtggtgctccgatccctatgggaacggtgggccaagatttcggtccgtatcgcgagcacttcgaaactctgggcattgacttatcccgcgtcaagatcatcgatgatctgagtacaccgcaggccttcattaccaccgaccatgatcataaccagattacggcgtttcatccaggcgcaatgatgcgttcgtacgaaaatcacgttcgtgatgtgccgggtgttaccttgggcctcgtaggtcctgatggacgcgagggcatgatccaaaatgccgaagaatttgctgctggtggcattccgttcatttttgacccaggtcaggcactgccgctgttcaacggccccgaactgcgcgagtttatcgaacaggcggactatgtggtggtcaacgattacgaaagcaatcttcttcaagaacgtactggctggaacgagcaggacattgtttcacgcgtgcaggcgtatatcaccacgcaaggttcgaaaggagccctggtacatacaccggagaagacctacgatattccgcgggcacacgaacgtcgtgtcgttgatccaactggttgcggcgacgcgtttcgcgccggcctgatctatggtattcagcataattatgattggttgaccattggccgcatgggaaacttaatgggtgcgctgaaagtggaacaccctggcacgcaaaatcagcgtttcgattttgccgaattcaacgaccagttcaaacaagattttggctacgcgctctaatga

SEQ ID NO: 652 - protein, 321 aa, synthetic construct
  REGION 1..321: note = Variant of adenosine kinase
MHHHHHHGGSGMSALICGSLAYDTIMVFPDQFKNHILPDRVHRLNVSFLVPRMRREFGGCAGNIAYNLHLLGGAPIPMGTVGQDFGPYREHFETLGIDLSRVKIIDDLSTPQAFITTDHDHNQITAFHPGAMMRSYENHVRDVPGVTLGLVGPDGREGMIQNAEEFAAGGIPFIFDPGQALPLFNGPELREFIEQADYVVVNDYESNLLQERTGWNEQDIVSRVQAYITTQGSKGALVHTPEKTYDIPRAHERRVVDPTGCGDAFRAGLIYGIQHNYDWLTIGRMGNLMGALKVEHPGTQNQRFDFAEFNDQFKQDFGYAL

SEQ ID NO: 653 - DNA, 969 bp, synthetic construct
  misc_feature 1..969: note = Variant of adenosine kinase
  source 1..969: mol_type = other DNA
atgcaccatcatcaccatcacgggggctccggcatgagtgcactgatttgcggttctttagcgtatgataccatcatggtgtttccggaccagttcaagaaccatattctgcccgatcgtgttcaccgcctcaatgtcagctttcttgtaccacgcatgcgtcgtgaatttggaggctgtgccggcaacattgcgtacaatctgcatctgttgggtggtgctccgatccctatgggaacggtgggccaagatttcggtccgtatcgcgagcacttcgaaactctgggcattgacttatcccgcgtcaagatcatcgatgatctgagtacaccgcaggccttcattaccaccgaccatgatcataaccagattacggcgtttcatccaggcgcaatgatgcgttcgtacgaaaatcacgttcgtgatgtgccgggtgttaccttgggcctcgtaggtcctgatggacgcgagggcatgatccagaatgccgaagaatttgctgctggtggcattccgttcatttttgacccaggtcaggcactgccgctgttcaacggccccgaactgcgcgagtttatcgaacaggcggactatgtggtggtcaacgattacgaaagcaatcttcttcaagaacgtactggctggaacgagcaggacattgtttcacgcgtgcaggcgtatatcaccacgcaaggttcgaaaggagccctggtacatacaccggagaagacctacgatattccgccgcatcacgaacgtcgtgtcgttgatccaactggttgcggcgacgcgtttcgcgccggcctgatctatggtattcagcataattatgattggttgaccattggccgcatgggaaacttaatgggtgcgctgaaagtggaacaccctggcacgcaaaatcagcgtttcgattttgccgaattcaacgaccagttcaaacaagattttggctacgcgctctaatga

SEQ ID NO: 654 - protein, 321 aa, synthetic construct
  REGION 1..321: note = Variant of adenosine kinase
MHHHHHHGGSGMSALICGSLAYDTIMVFPDQFKNHILPDRVHRLNVSFLVPRMRREFGGCAGNIAYNLHLLGGAPIPMGTVGQDFGPYREHFETLGIDLSRVKIIDDLSTPQAFITTDHDHNQITAFHPGAMMRSYENHVRDVPGVTLGLVGPDGREGMIQNAEEFAAGGIPFIFDPGQALPLFNGPELREFIEQADYVVVNDYESNLLQERTGWNEQDIVSRVQAYITTQGSKGALVHTPEKTYDIPPHHERRVVDPTGCGDAFRAGLIYGIQHNYDWLTIGRMGNLMGALKVEHPGTQNQRFDFAEFNDQFKQDFGYAL

SEQ ID NO: 655 - DNA, 969 bp, synthetic construct
  misc_feature 1..969: note = Variant of adenosine kinase
  source 1..969: mol_type = other DNA
atgcaccatcatcaccatcacgggggctccggcatgagtgcactgatttgcggttctttagcgtatgataccatcatggtgtttccggaccagttcaagaaccatattctgcccgatcgtgttcaccgcctcaatgtcagctttcttgtaccacgcatgcgtcgtgaatttggaggctgtgccggcaacattgcgtacaatctgcatctgttgggtggtgctccgatcgtaatggctacggtgggccaagatttcggtccgtatcgcgagcacttcgaaactctgggcattgacttatcccgcgtcaagatcatcgatgatctgagtacaccgcaggccttcattaccaccgaccatgatcataaccagattacggcgtttcatccaggcgcaatgatgcgttcgtacgaaaatcacgttcgtgatgtgccgggtgttaccttgggcctcgtaggtcctgatggacgcgagggcatgatccaaaatgccgaagaatttgctgctggtggcattccgttcatttttgacccaggtcaggcactgccgctgttcaacggccccgaactgcgcgagtttatcgaacaggcggactatgtggtggtcaacgattacgaaagcaatcttcttcaaacgcgtactggctggaacgagcaggacattgtttcacgcgtgcaggcgtatatcaccacgcaaggttcgaaaggagccctggtacatacaccggagaagacctacgatattccgccggcacacgaacgtcgtgtcgttgatccaactggttgcggcgacgcgtttcgcgccggcctgatctatggtattcagcataattatgattggttgaccattggccgcatgggaaacttaatgggtgcgctgaaagtggaacaccctggcgggcaaaatcagcgtttcgattttgccgaattcaacgaccagttcaaacaatattttggctacgcgctctaatga

SEQ ID NO: 656 - protein, 321 aa, synthetic construct
  REGION 1..321: note = Variant of adenosine kinase
MHHHHHHGGSGMSALICGSLAYDTIMVFPDQFKNHILPDRVHRLNVSFLVPRMRREFGGCAGNIAYNLHLLGGAPIVMATVGQDFGPYREHFETLGIDLSRVKIIDDLSTPQAFITTDHDHNQITAFHPGAMMRSYENHVRDVPGVTLGLVGPDGREGMIQNAEEFAAGGIPFIFDPGQALPLFNGPELREFIEQADYVVVNDYESNLLQTRTGWNEQDIVSRVQAYITTQGSKGALVHTPEKTYDIPPAHERRVVDPTGCGDAFRAGLIYGIQHNYDWLTIGRMGNLMGALKVEHPGGQNQRFDFAEFNDQFKQYFGYAL

SEQ ID NO: 657 - DNA, 969 bp, synthetic construct
  misc_feature 1..969: note = Variant of adenosine kinase
  source 1..969: mol_type = other DNA
atgcaccatcatcaccatcacgggggctccggcatgagtgcactgatttgcggttctttaggttatgataccatcatggtgtttccggaccagttcaagaaccatattctgcccgatcgtgttcaccgcctcaatgtcagctttcttgtaccacgcatgcgtcgtgaatttggaggctgtgccggcaacattgcgtacaatctgcatctgttgggtggtgctccgatcgtaatggctacggtgggccaagatttcggtccgtatcgcgagcacttcgaaactctgggcattgacttatcccgcgtcaagatcatcgatgatctgagtacaccgcaggccttcattaccaccgaccatgatcataaccagattacggcgtttcatccaggcgcaatgatgcgttcgtacgaaaatcacgttcgtgatgtgccgggtgttaccttgggcctcgtaggtcctgatggacgcgagggcatgatccaaaatgccgaagaatttgctgctggtggcattccgttcatttttgacccaggtcaggcactgccgctgttcaacggccccgaactgcgcgagtttatcgaacaggcggactatgtggtggtcaacgattacgaaagcaatcttcttcaaacgcgtactggctggaacgagcaggacattgtttcacgcgtgcaggcgtatatcaccacgcaaggttcgaaaggagccctggtacatacaccggagaagacctacgatattccgccggcacacgaacgtcgtgtcgttgatccaactggttgcggcgacgcgtttcgcgccggcctgatctatggtattcagcataattatgattggttgaccattggccgcatgggaaacttaatgggtgcgctgaaagtggaacaccctggcacgcaaaatcagcgtttcgattttgccgaattcaacgaccagttcaaacaatattttggctacgcgctctaatga

SEQ ID NO: 658 - protein, 321 aa, synthetic construct
  REGION 1..321: note = Variant of adenosine kinase
MHHHHHHGGSGMSALICGSLGYDTIMVFPDQFKNHILPDRVHRLNVSFLVPRMRREFGGCAGNIAYNLHLLGGAPIVMATVGQDFGPYREHFETLGIDLSRVKIIDDLSTPQAFITTDHDHNQITAFHPGAMMRSYENHVRDVPGVTLGLVGPDGREGMIQNAEEFAAGGIPFIFDPGQALPLFNGPELREFIEQADYVVVNDYESNLLQTRTGWNEQDIVSRVQAYITTQGSKGALVHTPEKTYDIPPAHERRVVDPTGCGDAFRAGLIYGIQHNYDWLTIGRMGNLMGALKVEHPGTQNQRFDFAEFNDQFKQYFGYAL

SEQ ID NO: 659 - DNA, 969 bp, synthetic construct
  misc_feature 1..969: note = Variant of adenosine kinase
  source 1..969: mol_type = other DNA
atgcaccatcatcaccatcacgggggctccggcatgagtgcactgatttgcggttctttagcgtatgataccatcatggtgtttccggaccagttcaagaaccatattctgcccgatcgtgttcaccgcctcaatgtcagctttcttgtaccacgcatgcgtcgtgaatttggaggctgtgccggcaacattgcgtacaatctgcatctgttgggtggtgctccgatcgtaatggctacggtgggccaagatttcggtccgtatcgcgagcacttcgaaactctgggcattgacttatcccgcgtcaagatcatcgatgatctgagtacaccgcaggccttcattaccaccgaccatgatcataaccagattacggcgtttcatccaggcgcaatgatgcgttcgtacgaaaatcacgttcgtgatgtgccgggtgttaccttgggcctcgtaggtcctgatggacgcgagggcatgatccaaaatgccgaagaatttgctgctggtggcattccgttcatttttgacccaggtcaggcactgccgctgttcaacggccccgaactgcgcgagtttatcgaacaggcggactatgtggtggtcaacgattacgaaagcaatcttcttcaaacgcgtactggctggaacgagcaggacattgtttcacgcgtgcaggcgtatatcaccacgcaaggttcgaaaggagccctggtacatacaccggagaagacctacgatattccgccggcacacgaacgtcgtgtcgttgatccaactggttgcggcgacgcgtttcgcgccggcctgatctatggtattcagcataattatgattggttgaccattggccgcatgggaaacttaatgggtgcgctgaaagtggaacaccctggctctcaaaatcagcgtttcgattttgccgaattcaacgaccagttcaaacaatattttggctacgcgctctaatga

SEQ ID NO: 660 - protein, 321 aa, synthetic construct
  REGION 1..321: note = Variant of adenosine kinase
MHHHHHHGGSGMSALICGSLAYDTIMVFPDQFKNHILPDRVHRLNVSFLVPRMRREFGGCAGNIAYNLHLLGGAPIVMATVGQDFGPYREHFETLGIDLSRVKIIDDLSTPQAFITTDHDHNQITAFHPGAMMRSYENHVRDVPGVTLGLVGPDGREGMIQNAEEFAAGGIPFIFDPGQALPLFNGPELREFIEQADYVVVNDYESNLLQTRTGWNEQDIVSRVQAYITTQGSKGALVHTPEKTYDIPPAHERRVVDPTGCGDAFRAGLIYGIQHNYDWLTIGRMGNLMGALKVEHPGSQNQRFDFAEFNDQFKQYFGYAL

SEQ ID NO: 661 - DNA, 969 bp, synthetic construct
  misc_feature 1..969: note = Variant of adenosine kinase
  source 1..969: mol_type = other DNA
atgcaccatcatcaccatcacgggggctccggcatgagtgcactgatttgcggttctttagcgtatgataccatcatggtgtttccggaccagttcaagaaccatattctgcccgatcgtgttcaccgcctcaatgtcagctttcttgtaccacgcatgcgtcgtgaatttggaggctgtgccggcaacattgcgtacaatctgcatctgttgggtggtgctccgatcgtaatggctacggtgggccaagatttcggtccgtatcgcgagcacttcgaaactctgggcattgacttatcccgcgtcaagatcatcgatgatctgagtacaccgcagagtttcattaccaccgaccatgatcataaccagattacggcgtttcatccaggcgcaatgatgcgttcgtacgaaaatcacgttcgtgatgtgccgggtgttaccttgggcctcgtaggtcctgatggacgcgagggcatgatccaaaatgccgaagaatttgctgctggtggcattccgttcatttttgacccaggtcaggcactgccgctgttcaacggccccgaactgcgcgagtttatcgaacaggcggactatgtggtggtcaacgattacgaaagcaatcttcttcaaacgcgtactggctggaacgagcaggacattgtttcacgcgtgcaggcgtatatcaccacgcaaggttcgaaaggagccctggtacatacaccggagaagacctacgatattccgccggcacacgaacgtcgtgtcgttgatccaactggttgcggcgacgcgtttcgcgccggcctgatctatggtattcagcataattatgattggttgaccattggccgcatgggaaacttaatgggtgcgctgaaagtggaacaccctggcacgcaaaatcagcgtttcgattttgccgaattcaacgaccagttcaaacaatattttggctacgcgctctaatga

SEQ ID NO: 662 - protein, 321 aa, synthetic construct
  REGION 1..321: note = Variant of adenosine kinase
MHHHHHHGGSGMSALICGSLAYDTIMVFPDQFKNHILPDRVHRLNVSFLVPRMRREFGGCAGNIAYNLHLLGGAPIVMATVGQDFGPYREHFETLGIDLSRVKIIDDLSTPQSFITTDHDHNQITAFHPGAMMRSYENHVRDVPGVTLGLVGPDGREGMIQNAEEFAAGGIPFIFDPGQALPLFNGPELREFIEQADYVVVNDYESNLLQTRTGWNEQDIVSRVQAYITTQGSKGALVHTPEKTYDIPPAHERRVVDPTGCGDAFRAGLIYGIQHNYDWLTIGRMGNLMGALKVEHPGTQNQRFDFAEFNDQFKQYFGYAL

SEQ ID NO: 663 - DNA, 969 bp, synthetic construct
  misc_feature 1..969: note = Variant of adenosine kinase
  source 1..969: mol_type = other DNA
atgcaccatcatcaccatcacgggggctccggcatgagtgcactgatttgcggttctttagcgtatgataccatcatggtgtttccggaccagttcaagaaccatattctgcccgatcgtgttcaccgcctcaatgtcagctttcttgtaccacgcatgcgtcgtgaatttggaggctgtgccggcaacattgcgtacaatctgcatctgttgggtggtgctccgatcgtaatggctacggtgggccaagatttcggtccgtatcgcgagcacttcgaaactctgggcattgacttatcccgcgtcaagatcatcgatgatctgagtacaccgcaggccttcattaccaccgaccatgatcataaccagattacggcgtttcatccaggcgcaatgatgcgttcgtacgaaaatcacgttcgtgatgtgccgggtgttaccttgggcctcgtatgtcctgatggacgcgagggcatgatccaaaatgccgaagaatttgctgctggtggcattccgttcatttttgacccaggtcaggcactgccgctgttcaacggccccgaactgcgcgagtttatcgaacaggcggactatgtggtggtcaacgattacgaaagcaatcttcttcaaacgcgtactggctggaacgagcaggacattgtttcacgcgtgcaggcgtatatcaccacgcaaggttcgaaaggagccctggtacatacaccggagaagacctacgatattccgccggcacacgaacgtcgtgtcgttgatccaactggttgcggcgacgcgtttcgcgccggcctgatctatggtattcagcataattatgattggttgaccattggccgcatgggaaacttaatgggtgcgctgaaagtggaacaccctggcacgcaaaatcagcgtttcgattttgccgaattcaacgaccagttcaaacaatattttggctacgcgctctaatga

SEQ ID NO: 664 - protein, 321 aa, synthetic construct
  REGION 1..321: note = Variant of adenosine kinase
MHHHHHHGGSGMSALICGSLAYDTIMVFPDQFKNHILPDRVHRLNVSFLVPRMRREFGGCAGNIAYNLHLLGGAPIVMATVGQDFGPYREHFETLGIDLSRVKIIDDLSTPQAFITTDHDHNQITAFHPGAMMRSYENHVRDVPGVTLGLVCPDGREGMIQNAEEFAAGGIPFIFDPGQALPLFNGPELREFIEQADYVVVNDYESNLLQTRTGWNEQDIVSRVQAYITTQGSKGALVHTPEKTYDIPPAHERRVVDPTGCGDAFRAGLIYGIQHNYDWLTIGRMGNLMGALKVEHPGTQNQRFDFAEFNDQFKQYFGYAL

SEQ ID NO: 665 - DNA, 969 bp, synthetic construct
  misc_feature 1..969: note = Variant of adenosine kinase
  source 1..969: mol_type = other DNA
atgcaccatcatcaccatcacgggggctccggcatgagtgcactgatttgcggttctttagcgtatgataccatcatggtgtttccggaccagttcaagaaccatattctgcccgatcgtgttcaccgcctcaatgtcagctttcttgtaccacgcatgcgtcgtgaatttggaggctgtgccggcaacattgcgtacaatctgcatctgttgggtggtgctccgatcgtaatggctacggtgggccaagatttcggtccgtatcgcgagcacttcgaaactctgggcattgacttatcccgcgtcaagatcatcgatgatctgagtacaccgcaggccttcattaccaccgaccatgatcataaccagattacggcgtttcatccaggcgcaatgatgcgttcgtacgaaaatcacgttcgtgatgtgccgggtgttaccttgggcctcgtaggtcctgatggacgcgagggcatgatccaaaatgccgaagaatttgctgctgatggcattccgttcatttttgacccaggtcaggcactgccgctgttcaacggccccgaactgcgcgagtttatcgaacaggcggactatgtggtggtcaacgattacgaaagcaatcttcttcaaacgcgtactggctggaacgagcaggacattgtttcacgcgtgcaggcgtatatcaccacgcaaggttcgaaaggagccctggtacatacaccggagaagacctacgatattccgccggcacacgaacgtcgttgtgttgatccaactggttgcggcgacgcgtttcgcgccggcctgatctatggtattcagcataattatgattggttgaccattggccgcatgggaaacttaatgggtgcgctgaaagtggaacaccctggcacgcaaaatcagcgtttcgattttgccgaattcaacgaccagttcaaacaatattttggctacgcgctctaatga

SEQ ID NO: 666 - protein, 321 aa, synthetic construct
  REGION 1..321: note = Variant of adenosine kinase
MHHHHHHGGSGMSALICGSLAYDTIMVFPDQFKNHILPDRVHRLNVSFLVPRMRREFGGCAGNIAYNLHLLGGAPIVMATVGQDFGPYREHFETLGIDLSRVKIIDDLSTPQAFITTDHDHNQITAFHPGAMMRSYENHVRDVPGVTLGLVGPDGREGMIQNAEEFAADGIPFIFDPGQALPLFNGPELREFIEQADYVVVNDYESNLLQTRTGWNEQDIVSRVQAYITTQGSKGALVHTPEKTYDIPPAHERRCVDPTGCGDAFRAGLIYGIQHNYDWLTIGRMGNLMGALKVEHPGTQNQRFDFAEFNDQFKQYFGYAL

SEQ ID NO: 667 - DNA, 969 bp, synthetic construct
  misc_feature 1..969: note = Variant of adenosine kinase
  source 1..969: mol_type = other DNA
atgcaccatcatcaccatcacgggggctccggcatgagtgcactgatttgcggttctttagcgtatgataccatcatggtgtttccggaccagttcaagaaccatattctgcccgatcgtgttcaccgcctcaatgtcagctttcttgtaccacgcatgcgtcgtgaatttggaggctgtgccggcaacattgcgtacaatctgcatctgttgggtggtgctccgatcgtaatggctacggtgggccaagatttcggtccgtatcgcgagcacttcgaaactctgggcattgacttatcccgcgtcaagatcatcgatgatctgagtacaccgcaggccttcattaccaccgaccatgatcataaccagattacggcgtttcatccaggcgcaatgatgcgttcgtacgaaaatcacgttcgtgatgtgccgggtgttaccttgggcctcgtaggtcctgatggacgcgagggcatgatccaaaatgccgaagaatttgctgctggtggcattccgttcatttttgacccaggtcaggcactgccgctgttcaacggccccgaactgcgcgagtttatcgaacaggcggactatgtggtggtcaacgattacgaaagcaatcttcttcaaacgcgtactggctggaacgagcaggacattgtttcacgcgtgcaggcgtatatcaccacgcaaggttcgaaaggagccctggtacatacaccggagaagacctacgatattccgccggcaaaggaacgtcgtgtcgttgatccaactggttgcggcgacgcgtttcgcgccggcctgatctatggtattcagcataattatgattggttgaccattggccgcatgggaaacttaatgggtgcgctgaaagtggaacaccctggcacgcaaaatcagcgtttcgattttgccgaattcaacgaccagttcaaacaatattttggctacgcgctctaatga

SEQ ID NO: 668 - protein, 321 aa, synthetic construct
  REGION 1..321: note = Variant of adenosine kinase
MHHHHHHGGSGMSALICGSLAYDTIMVFPDQFKNHILPDRVHRLNVSFLVPRMRREFGGCAGNIAYNLHLLGGAPIVMATVGQDFGPYREHFETLGIDLSRVKIIDDLSTPQAFITTDHDHNQITAFHPGAMMRSYENHVRDVPGVTLGLVGPDGREGMIQNAEEFAAGGIPFIFDPGQALPLFNGPELREFIEQADYVVVNDYESNLLQTRTGWNEQDIVSRVQAYITTQGSKGALVHTPEKTYDIPPAKERRVVDPTGCGDAFRAGLIYGIQHNYDWLTIGRMGNLMGALKVEHPGTQNQRFDFAEFNDQFKQYFGYAL

SEQ ID NO: 669 - DNA, 969 bp, synthetic construct
  misc_feature 1..969: note = Variant of adenosine kinase
  source 1..969: mol_type = other DNA
atgcaccatcatcaccatcacgggggctccggcatgagtgcactgatttgcggttctttagcgtatgataccatcatggtgtttccggaccagttcaagaaccatattctgcccgatcgtgttcaccgcctcaatgtcagctttcttgtaccacgcatgcgtcgtgaatttggaggctgtgccggcaacattgcgtacaatctgcatctgttgggtggtgctccgatcgtaatggctacggtgggccaagatttcggtccgtatcgcgagcacttcgaaactctgggcattgacttatcccgcgtcaagatcatcgatgatctgagtacaccgcaggccttcattaccaccgaccatgatcataaccagattacggcgtttcatccaggcgcaatgatgcgttcgtacgaaaatcacgttcgtgatgtgccgggtgttaccttgggcctcgtaggtcctgatggacgcgagggcatgatccaaaatgccgaagaatttgctgctggtggcattccgttcatttttgacccaggtcaggcactgccgctgttcaacggccccgaactgcgcgagtttatcgaacaggcggactatgtggtggtcaacgattacgaaagcaatcttcttcaaacgcgtactggctggaacgagcaggacattgtttcacgcgtgcaggcgtatatcaccacgcaaggttcgaaaggagccctggtacatacaccggagaagacctacgatattccgccggcacacgaacgtcgtgtcgttgatccaactggttgcggcgacgcgtttcgcgccggcctgatctatggtattcagcataattatgattggttgaccattggccgcatgggaaacttaatgggtgcgctgaaactggaacaccctggcacgcaaaatcagcgtttcgattttgccgaattcaacgaccagttcaaacaatattttggctacgcgctctaatga

SEQ ID NO: 670 - protein, 321 aa, synthetic construct
  REGION 1..321: note = Variant of adenosine kinase
MHHHHHHGGSGMSALICGSLAYDTIMVFPDQFKNHILPDRVHRLNVSFLVPRMRREFGGCAGNIAYNLHLLGGAPIVMATVGQDFGPYREHFETLGIDLSRVKIIDDLSTPQAFITTDHDHNQITAFHPGAMMRSYENHVRDVPGVTLGLVGPDGREGMIQNAEEFAAGGIPFIFDPGQALPLFNGPELREFIEQADYVVVNDYESNLLQTRTGWNEQDIVSRVQAYITTQGSKGALVHTPEKTYDIPPAHERRVVDPTGCGDAFRAGLIYGIQHNYDWLTIGRMGNLMGALKLEHPGTQNQRFDFAEFNDQFKQYFGYAL

SEQ ID NO: 671 - DNA, 969 bp, synthetic construct
  misc_feature 1..969: note = Variant of adenosine kinase
  source 1..969: mol_type = other DNA
atgcaccatcatcaccatcacgggggctccggcatgagtgcactgatttgcggttctttagcgtatgataccatcatggtgtttccggaccagttcaagaaccatattctgcccgatcgtgttcaccgcctcaatgtcagctttcttgtaccacgcatgcgtcgtgaatttggaggctgtgccggcaacattgcgtacaatctgcatctgttgggtggtgctccgatcgtaatggctacggtgggccaagatttcggtccgtatcgcgagcacttcgaaactctgggcattgacttatcccgcgtcaagatcatcgatgatctgagtacaccgcaggccttcattaccaccgaccatgatcataaccagattacggcgtttcatccaggcgcaatgatgcgttcgtacgaaaatcacgttcgtgatgtgccgggtgttaccttgggcctcgtaggtcctgatggacgcgagggcatgatccaaaatgccgaagaatttgctgctggtggcattccgttcatttttgacccaggtcaggcactgccgctgttcaacggccccgaactgcgcgagtttatcgaacaggcggactatgtggtggtcaacgattacgaaagcaatcttcttcaaacgcgtactggctggaacgagcaggacattgtttcacgcgtgcaggcgtatatcaccacgcaaggttcgaaaggagccctggtacatacaccggagaagacctacgatattccgccggcacacgaacgtcgtagtgttgatccaactggttgcggcgacgcgtttcgcgccggcctgatctatggtattcagcataattatgattggttgaccattggccgcatgggaaacttaatgggtgcgctgaaagtggaacaccctggcacgcaaaatcagcgtttcgattttgccgaattcaacgaccagttcaaacaatattttggctacgcgctctaatga

SEQ ID NO: 672 - protein, 321 aa, synthetic construct
  REGION 1..321: note = Variant of adenosine kinase
MHHHHHHGGSGMSALICGSLAYDTIMVFPDQFKNHILPDRVHRLNVSFLVPRMRREFGGCAGNIAYNLHLLGGAPIVMATVGQDFGPYREHFETLGIDLSRVKIIDDLSTPQAFITTDHDHNQITAFHPGAMMRSYENHVRDVPGVTLGLVGPDGREGMIQNAEEFAAGGIPFIFDPGQALPLFNGPELREFIEQADYVVVNDYESNLLQTRTGWNEQDIVSRVQAYITTQGSKGALVHTPEKTYDIPPAHERRSVDPTGCGDAFRAGLIYGIQHNYDWLTIGRMGNLMGALKVEHPGTQNQRFDFAEFNDQFKQYFGYAL

SEQ ID NO: 673 - DNA, 969 bp, synthetic construct
  misc_feature 1..969: note = Variant of adenosine kinase
  source 1..969: mol_type = other DNA
atgcaccatcatcaccatcacgggggctccggcatgagtgcactgatttgcggttctttagcgtatgataccatcatggtgtttccggaccagttcaagaaccatattctgcccgatcgtgttcaccgcctcaatgtcagctttcttgtaccacgcatgcgtcgtgaatttggaggctgtgccggcaacattgcgtacaatctgcatctgttgggtggtgctccgatcgtaatggctacggtgggccaagatttcggtccgtatcgcgagcacttcgaaactctgggcattgacttatcccgcgtcaagatcatcgatgatctgagtacaccgcaggccttcattaccaccgaccatgatcataaccagattacggcgtttcatccaggcgcaatgatgcgttcgtacgaaaatcacgttcgtgatgtgccgggtgttaccttgggcctcgtaggtcctgatggacgcgagggcatgatccaaaatgccgaagaatttgctgctggtggcattccgttcatttttgacccaggtcaggcactgccgctgttcaacggccccgaactgcgcgagtttatcgaacaggcggactatgtggtggtctttgattacgaaagcaatcttcttcaagcgcgtactggctggaacgagcaggacattgtttcacgcgtgcaggcgtatatcaccacgcaaggttcgaaaggagccctggtacatacaccggagaagacctacgatattccgccggcacacgaacgtcgtgtcgttgatccaactggttgcggcgacgcgtttcgcgccggcctgatctatggtattcagcataattatgattggttgaccattggccgcatgggaaacttaatgggtgcgctgaaagtggaacaccctggcacgcaaaatcagcgtttcgattttgccgaattcaacgaccagttcaaacaatattttggctacgcgctctaatga

SEQ ID NO: 674 - protein, 321 aa, synthetic construct
  REGION 1..321: note = Variant of adenosine kinase
MHHHHHHGGSGMSALICGSLAYDTIMVFPDQFKNHILPDRVHRLNVSFLVPRMRREFGGCAGNIAYNLHLLGGAPIVMATVGQDFGPYREHFETLGIDLSRVKIIDDLSTPQAFITTDHDHNQITAFHPGAMMRSYENHVRDVPGVTLGLVGPDGREGMIQNAEEFAAGGIPFIFDPGQALPLFNGPELREFIEQADYVVVFDYESNLLQARTGWNEQDIVSRVQAYITTQGSKGALVHTPEKTYDIPPAHERRVVDPTGCGDAFRAGLIYGIQHNYDWLTIGRMGNLMGALKVEHPGTQNQRFDFAEFNDQFKQYFGYAL

SEQ ID NO: 675 - DNA, 969 bp, synthetic construct
  misc_feature 1..969: note = Variant of adenosine kinase
  source 1..969: mol_type = other DNA
atgcaccatcatcaccatcacgggggctccggcatgagtgcactgatttgcggttctttagcgtatgataccatcatggtgtttccggacttgttcaagaaccatattctgcccgatcgtgttcaccgcctcaatgtcagctttcttgtaccacgcatgcgtcgtgaatttggaggctgtgccggcaacattgcgtacaatctgcatctgttgggtggtgctccgatcgtaatggctacggtgggccaagatttcggtccgtatcgcgagcacttcgaaactctgggcattgacttatcccgcgtcaagatcatcgatgatctgagtacaccgcaggccttcattaccaccgaccatgatcataaccagattacggcgtttcatccaggcgcaatgatgcgttcgtacgaaaatcacgttcgtgatgtgccgggtgttaccttgggcctcgtaggtcctgatggacgcgagggcatgatccaaaatgccgaagaatttgctgctggtggcattccgttcatttttgacccaggtcaggcactgccgctgttcaacggccccgaactgcgcgagtttatcgaacaggcggactatgtggtggtcaacgattacgaaagcaatcttcttcaaacgcgtactggctggaacgagcaggacattgtttcacgcgtgcaggcgtatatcaccacgcaaggttcgaaaggagccctggtacatacaccggagaagacctacgatattccgccggcacacgaacgtcgtgtcgttgatccaactggttgcggcgacgcgtttcgcgccggcctgatctatggtattcagcataattatgattggttgaccattggccgcatgggaaacttaatgggtgcgctgaaagtggaacaccctggcacgcaaaatcagcgtttcgattttgccgaattcaacgaccagttcaaacaatattttggctacgcgctctaatga

SEQ ID NO: 676 - protein, 321 aa, synthetic construct
  REGION 1..321: note = Variant of adenosine kinase
MHHHHHHGGSGMSALICGSLAYDTIMVFPDLFKNHILPDRVHRLNVSFLVPRMRREFGGCAGNIAYNLHLLGGAPIVMATVGQDFGPYREHFETLGIDLSRVKIIDDLSTPQAFITTDHDHNQITAFHPGAMMRSYENHVRDVPGVTLGLVGPDGREGMIQNAEEFAAGGIPFIFDPGQALPLFNGPELREFIEQADYVVVNDYESNLLQTRTGWNEQDIVSRVQAYITTQGSKGALVHTPEKTYDIPPAHERRVVDPTGCGDAFRAGLIYGIQHNYDWLTIGRMGNLMGALKVEHPGTQNQRFDFAEFNDQFKQYFGYAL

SEQ ID NO: 677 - DNA, 969 bp, synthetic construct
  misc_feature 1..969: note = Variant of adenosine kinase
  source 1..969: mol_type = other DNA
atgcaccatcatcaccatcacgggggctccggcatgagtgcactgatttgcggttctttagcgtatgataccatcatggtgtttccggaccagttcaagaaccatattctgcccgatcgtgttcaccgcctcaatgtcagctttcttgtaccacgcatgcgtcgtgaatttggaggctgtgccggcaacattgcgtacaatctgcatctgttgggtggtgctccgatcgtaatggctacggtgggccaagatttcggtccgtatcgcgagcacttcgaaactctgggcattgacttatcccgcgtcaagatcatcgatgatctgagtacaccgcaggccttcattaccaccgaccatgatcataaccagattacggcgtttcatgcgggcgcaatgatgcgttcgtacgaaaatcacgttcgtgatgtgccgggtgttaccttgggcctcgtaggtcctgatggacgcgagggcatgatccaaaatgccgaagaatttgctgctggtggcattccgttcatttttgacccaggtcaggcactgccgctgttcaacggccccgaactgcgcgagtttatcgaacaggcggactatgtggtggtcaacgattacgaaagcaatcttcttcaaacgcgtactggctggaacgagcaggacattgtttcacgcgtgcaggcgtatatcaccacgcaaggttcgaaaggagccctggtacatacaccggagaagacctacgatattccgccggcacacgaacgtcgtgtcgttgatccaactggttgcggcgacgcgtttcgcgccggcctgatctatggtattcagcataattatgattggttgaccattggccgcatgggaaacttaatgggtgcgctgaaagtggaacaccctggcacgcaaaatcagcgtttcgattttgccgaattcaacgaccagttcaaacaatattttggctacgcgctctaatga

SEQ ID NO: 678 - protein, 321 aa, synthetic construct
  REGION 1..321: note = Variant of adenosine kinase
MHHHHHHGGSGMSALICGSLAYDTIMVFPDQFKNHILPDRVHRLNVSFLVPRMRREFGGCAGNIAYNLHLLGGAPIVMATVGQDFGPYREHFETLGIDLSRVKIIDDLSTPQAFITTDHDHNQITAFHAGAMMRSYENHVRDVPGVTLGLVGPDGREGMIQNAEEFAAGGIPFIFDPGQALPLFNGPELREFIEQADYVVVNDYESNLLQTRTGWNEQDIVSRVQAYITTQGSKGALVHTPEKTYDIPPAHERRVVDPTGCGDAFRAGLIYGIQHNYDWLTIGRMGNLMGALKVEHPGTQNQRFDFAEFNDQFKQYFGYAL

SEQ ID NO: 679 - DNA, 969 bp, synthetic construct
  misc_feature 1..969: note = Variant of adenosine kinase
  source 1..969: mol_type = other DNA
atgcaccatcatcaccatcacgggggctccggcatgagtgcactgatttgcggttctttagcgtatgataccatcatggtgtttccggaccagttcaagaaccatattctgcccgatcgtgttcaccgcctcaatgtcagctttcttgtaccacgcatgcgtcgtgaatttggaggctgtgccggcaacattgcgtacaatctgcatctgttgggtggtgctccgatcgtaatggctacggtgggccaagatttcggtccgtatcgcgagcacttcgaaactctgggcattgacttatcccgcgtcaagatcatcgatgatctgagtacaccgcaggccttcattaccaccgaccatgatcataaccagattacggcgtttcatccaggcgcaatgatgcgttcgtacgaaaatcacgttcgtgatgtgccgggtgttaccttgggcctcgtaggtcctgatggacgcgagggcatgatccaaaatgccgaagaatttgctgctggtggcattccgttcatttttgacccaggtcaggcactgccgctgttcaacggccccgaactgcgcgagtttatcgaacaggcggactatgtggtggtcaacgattacgaaagcaatcttcttcaaacgcgtactggctggaacgagcaggacattgtttcacgcgtgcaggcgtatatcaccacgcaaggttcgaaaggagccctggtacatacaccggagaagacctacgatattccgccggcacacgttcgtcgtgtcgttgatccaactggttgcggcgacgcgtttcgcgccggcctgatctatggtattcagcataattatgattggttgaccattggccgcatgggaaacttaatgggtgcgctgaaagtggaacaccctggcacgcaaaatcagcgtttcgattttgccgaattcaacgaccagttcaaacaatattttggctacgcgctctaatga

SEQ ID NO: 680 - protein, 321 aa, synthetic construct
  REGION 1..321: note = Variant of adenosine kinase
MHHHHHHGGSGMSALICGSLAYDTIMVFPDQFKNHILPDRVHRLNVSFLVPRMRREFGGCAGNIAYNLHLLGGAPIVMATVGQDFGPYREHFETLGIDLSRVKIIDDLSTPQAFITTDHDHNQITAFHPGAMMRSYENHVRDVPGVTLGLVGPDGREGMIQNAEEFAAGGIPFIFDPGQALPLFNGPELREFIEQADYVVVNDYESNLLQTRTGWNEQDIVSRVQAYITTQGSKGALVHTPEKTYDIPPAHVRRVVDPTGCGDAFRAGLIYGIQHNYDWLTIGRMGNLMGALKVEHPGTQNQRFDFAEFNDQFKQYFGYAL

SEQ ID NO: 681 - DNA, 969 bp, synthetic construct
  misc_feature 1..969: note = Variant of adenosine kinase
  source 1..969: mol_type = other DNA
atgcaccatcatcaccatcacgggggctccggcatgagtgcactgatttgcggttctttagcgtatgataccatcatggcgtttccggaccagttcaagaaccatattctgcccgatcgtgttcaccgcctcaatgtcagctttcttgtaccacgcatgcgtcgtgaatttggaggctgtgccggcaacatggcgtacaatctgcatctgttgggtggtgctccgatcgtaatggctacggtgggccaagatttcggtccgtatcgcgagcacttcgaaactctgggcattgacttatcccgcgtcaagatcatcgatgatctgagtacaccgcaggccttcattaccaccgaccatgatcataaccagattacggcgtttcatccaggcgcaatgatgcgttcgtacgaaaatcacgttcgtgatgtgccgggtgttaccttgggcctcgtaggtcctgatggacgcgagggcatgatccaaaatgccgaagaatttgctgctggtggcattccgttcatttttgacccaggtcaggcactgccgctgttcaacggccccgaactgcgcgagtttatcgaacaggcggactatgtggtggtcaacgattacgaaagcaatcttcttcaaacgcgtactggctggaacgagcaggacattgtttcacgcgtgcaggcgtatatcaccacgcaaggttcgaaaggagccctggtacatacaccggagaagacctacgatattccgccggcacacgaacgtcgtgtcgttgatccaactggttgcggcgacgcgtttcgcgccggcctgatctatggtattcagcataattatgattggttgaccattggccgcatgggaaacttaatgggtgcgctgaaagtggaacaccctggcacgcaaaatcagcgtttcgattttgccgaattcaacgaccagttcaaacaatattttggctacgcgctctaatga

SEQ ID NO: 682 - protein, 321 aa, synthetic construct
  REGION 1..321: note = Variant of adenosine kinase
MHHHHHHGGSGMSALICGSLAYDTIMAFPDQFKNHILPDRVHRLNVSFLVPRMRREFGGCAGNMAYNLHLLGGAPIVMATVGQDFGPYREHFETLGIDLSRVKIIDDLSTPQAFITTDHDHNQITAFHPGAMMRSYENHVRDVPGVTLGLVGPDGREGMIQNAEEFAAGGIPFIFDPGQALPLFNGPELREFIEQADYVVVNDYESNLLQTRTGWNEQDIVSRVQAYITTQGSKGALVHTPEKTYDIPPAHERRVVDPTGCGDAFRAGLIYGIQHNYDWLTIGRMGNLMGALKVEHPGTQNQRFDFAEFNDQFKQYFGYAL

SEQ ID NO: 683 - DNA, 969 bp, synthetic construct
  misc_feature 1..969: note = Variant of adenosine kinase
  source 1..969: mol_type = other DNA
atgcaccatcatcaccatcacgggggctccggcatgagtgcactgatttgcggttctttagcgtatgataccatcatggtgtttccggaccagttcaagaaccatattctgcccgatcgtgttcaccgcctcaatgtcagctttcttgtaccacgcatgcgtcgtgaatttggaggctgtgccggcaacattgcgtacaatctgcatctgttgggtggtgctccgatcgtaatggctacggtgggccaagatttcggtccgtatcgcgagcacttcgaaactctgggcattgacttatcccgcgtcaagatcatcgatgatctgagtacaccgcaggccttcattaccaccgaccatgatcataaccagattacggcgttttggccaggcgcaatgatgcgttcgtacgaaaatcacgttcgtgatgtgccgggtgttaccttgggcctcgtaggtcctgatggacgcgagggcatgatccaaaatgccgaagaatttgctgctggtggcattccgttcatttttgacccaggtcaggcactgccgctgttcaacggccccgaactgcgcgagtttatcgaacaggcggactatgtggtggtcaacgattacgaaagcaatcttcttcaaacgcgtactggctggaacgagcaggacattgtttcacgcgtgcaggcgtatatcaccacgcaaggttcgaaaggagccctggtacatacaccggagaagacctacgatattccgccggcacacgaacgtcgtgtcgttgatccaactggttgcggcgacgcgtttcgcgccggcctgatctatggtattcagcataattatgattggttgaccattggccgcatgggaaacttaatgggtgcgctgaaagtggaacaccctggcacgcaaaatcagcgtttcgattttgccgaattcaacgaccagttcaaacaatattttggctacgcgctctaatga

SEQ ID NO: 684 - protein, 321 aa, synthetic construct
  REGION 1..321: note = Variant of adenosine kinase
MHHHHHHGGSGMSALICGSLAYDTIMVFPDQFKNHILPDRVHRLNVSFLVPRMRREFGGCAGNIAYNLHLLGGAPIVMATVGQDFGPYREHFETLGIDLSRVKIIDDLSTPQAFITTDHDHNQITAFWPGAMMRSYENHVRDVPGVTLGLVGPDGREGMIQNAEEFAAGGIPFIFDPGQALPLFNGPELREFIEQADYVVVNDYESNLLQTRTGWNEQDIVSRVQAYITTQGSKGALVHTPEKTYDIPPAHERRVVDPTGCGDAFRAGLIYGIQHNYDWLTIGRMGNLMGALKVEHPGTQNQRFDFAEFNDQFKQYFGYAL

SEQ ID NO: 685 - DNA, 969 bp, synthetic construct
  misc_feature 1..969: note = Variant of adenosine kinase
  source 1..969: mol_type = other DNA
atgcaccatcatcaccatcacgggggctccggcatgagtgcactgatttgcggttctttagcgtatgataccatcatggtgtttccggaccagttcaagaaccatattctgcccgatcgtgttcaccgcctcaatgtcagctttcttgtaccacgcatgcgtcgtgaatttggaggctgtgccggcaacattgcgtacaatctgcatctgttgggtggtgctccgatcgtaatggctacggtgggccaagatttcggtccgtatcgcgagcacttcgaaactctgggcattgacttatcccgcgtcaagatcatcgatgatctgagtacaccgcaggccttcattaccaccgaccatgatcataaccagattacggcgtttcatccaggcgcaatgatgcgttcgtacgaaaatcacgttcgtgatgtgccgggtgttaccttgggcctcgtaggtcctgatggacgcgagggcatgatccaaaatgccgaagaatttgctgctggtggcattccgttcatttttgacccaggtcaggcactgccgctgttcaacggccccgaactgcgcgagtttatcgaacaggcggactatgtggtggtcaacgattacgaaagcaatcttcttcaaacgcgtactggctggaacgagcaggacattgtttcacgcgtgcaggcgtatatcaccacgcaaggttcgaaaggagccctggtacatacaccggagaagacctacgatattttgccggcacacgaacgtcgtgtcgttgatccaactggttgcggcgacgcgtttcgcgccggcctgatctatggtattcagcataattatgattggttgaccattggccgcatgggaaacttaatgggtgcgctgaaagtggaacaccctggcacgcaaaatcagcgtttcgattttgccgaattcaacgaccagttcaaacaatattttggctacgcgctctaatga

SEQ ID NO: 686 - protein, 321 aa, synthetic construct
  REGION 1..321: note = Variant of adenosine kinase
MHHHHHHGGSGMSALICGSLAYDTIMVFPDQFKNHILPDRVHRLNVSFLVPRMRREFGGCAGNIAYNLHLLGGAPIVMATVGQDFGPYREHFETLGIDLSRVKIIDDLSTPQAFITTDHDHNQITAFHPGAMMRSYENHVRDVPGVTLGLVGPDGREGMIQNAEEFAAGGIPFIFDPGQALPLFNGPELREFIEQADYVVVNDYESNLLQTRTGWNEQDIVSRVQAYITTQGSKGALVHTPEKTYDILPAHERRVVDPTGCGDAFRAGLIYGIQHNYDWLTIGRMGNLMGALKVEHPGTQNQRFDFAEFNDQFKQYFGYAL

SEQ ID NO: 687 - DNA, 969 bp, synthetic construct
  misc_feature 1..969: note = Variant of adenosine kinase
  source 1..969: mol_type = other DNA
atgcaccatcatcaccatcacgggggctccggcatgagtgcactgatttgcggttctttagcgtatgataccatcatggtgtttccggaccagttcaagaaccatattctgcccgatcgtgttcaccgcctcaatgtcagctttcttgtaccacgcatgcgtcgtgaatttggaggctgtgccggcaacattgcgtacaatctgcatctgttgggtggtgctccgatcgtaatggctacggtgggccaagatttcggtccgtatcgcgagcacttcgaaactctgggcattgacttatcccgcgtcaagatcatcgatgatctgagtacaccgcaggccttcattaccaccgaccatgatcataaccagattacggcgtttcatccaggcgcaatgatgcgttcgtacgaaaatcacgttcgtgatgtgccgggtgttaccttgggcctcgtaggtcctgatggacgcgagggcatgatccaaaatgccgaagaatttgctgctggtggcattccgttcatttttgacccaggtcaggcactgccgctgttcaacggccccgaactgcgcgagtttatcgaacaggcggactatgtggtggtcaacgattacgaaagcaatcttcttcaaacgcgtactggctggaacgagcaggacattgtttcacgcgtgcaggcgtatatcaccacgcaaggttcgaaaggagccctggtacatacaccggagaagacctacgatattccgccggcagtggaacgtcgtgtcgttgatccaactggttgcggcgacgcgtttcgcgccggcctgatctatggtattcagcataattatgattggttgaccattggccgcatgggaaacttaatgggtgcgctgaaagtggaacaccctggcacgcaaaatcagcgtttcgattttgccgaattcaacgaccagttcaaacaatattttggctacgcgctctaatga

SEQ ID NO: 688 - protein, 321 aa, synthetic construct
  REGION 1..321: note = Variant of adenosine kinase
MHHHHHHGGSGMSALICGSLAYDTIMVFPDQFKNHILPDRVHRLNVSFLVPRMRREFGGCAGNIAYNLHLLGGAPIVMATVGQDFGPYREHFETLGIDLSRVKIIDDLSTPQAFITTDHDHNQITAFHPGAMMRSYENHVRDVPGVTLGLVGPDGREGMIQNAEEFAAGGIPFIFDPGQALPLFNGPELREFIEQADYVVVNDYESNLLQTRTGWNEQDIVSRVQAYITTQGSKGALVHTPEKTYDIPPAVERRVVDPTGCGDAFRAGLIYGIQHNYDWLTIGRMGNLMGALKVEHPGTQNQRFDFAEFNDQFKQYFGYAL

SEQ ID NO: 689 - DNA, 969 bp, synthetic construct
  misc_feature 1..969: note = Variant of adenosine kinase
  source 1..969: mol_type = other DNA
atgcaccatcatcaccatcacgggggctccggcatgagtgcactgatttgcggttctttagcgtatgataccatcatggtgtttccggaccagttcaagaaccatattctgcccgatcgtgttcaccgcctcaatgtcagctttcttgtaccacgcatgcgtcgtgaatttggaggctgtgccggcaacattgcgtacaatctgcatctgttgggtggtgctccgatcgtaatggctacggtgggccaagatttcggtccgtatcgcgagcacttcgaaactctgggcattgacttatcccgcgtcaagatcatcgatgatctgagtacaccgcaggccttcattaccaccgaccatgatcataaccagattacggcgtttcatccaggcgcaatgatgcgttcgtacgaaaatcacgttcgtgatgtgccgggtgttaccttgggcctcgtaggtcctgatggacgcgagggcatgatccaaaatgccgaagaatttgctgctggtggcattccgttcatttttgacccaggtcaggcactgccgctgttcaacggccccgaactgcgcgagtttatcgaacaggcggactatgtggtggtcaacgattacgaaagcaatcttcttcaaacgcgtactggctggaacgagcaggacattgtttcacgcgtgcaggcgtatatcaccacgcaaggttcggtgggagccctggtacatacaccggagaagacctacgatattccgccggcacacgaacgtcgtgtcgttgatccaactggttgcggcgacgcgtttcgcgccggcctgatctatggtattcagcataattatgattggttgaccattggccgcatgggaaacttaatgggtgcgctgaaagtggaacaccctggcacgcaaaatcagcgtttcgattttgccgaattcaacgaccagttcaaacaatattttggctacgcgctctaatga

SEQ ID NO: 690 - protein, 321 aa, synthetic construct
  REGION 1..321: note = Variant of adenosine kinase
MHHHHHHGGSGMSALICGSLAYDTIMVFPDQFKNHILPDRVHRLNVSFLVPRMRREFGGCAGNIAYNLHLLGGAPIVMATVGQDFGPYREHFETLGIDLSRVKIIDDLSTPQAFITTDHDHNQITAFHPGAMMRSYENHVRDVPGVTLGLVGPDGREGMIQNAEEFAAGGIPFIFDPGQALPLFNGPELREFIEQADYVVVNDYESNLLQTRTGWNEQDIVSRVQAYITTQGSVGALVHTPEKTYDIPPAHERRVVDPTGCGDAFRAGLIYGIQHNYDWLTIGRMGNLMGALKVEHPGTQNQRFDFAEFNDQFKQYFGYAL

SEQ ID NO: 691 - DNA, 969 bp, synthetic construct
  misc_feature 1..969: note = Variant of adenosine kinase
  source 1..969: mol_type = other DNA
atgcaccatcatcaccatcacgggggctccggcatgagtgcactgatttgcggttctttagcgtatgataccatcatggtgtttccggaccagttcaagaaccatattctgcccgatcgtgttcaccgcctcaatgtcagctttcttgtaccacgcatgcgtcgtgaatttggaggctgtgccggcaacattgcgtacaatctgcatctgttgggtggtgctccgatcgtaatggctacggtgggccaagatttcggtccgtatcgcgagcacttcgaaactctgggcattgacttatcccgcgtcaagatcatcgatgatctgagtacaccgcaggccttcattaccaccgaccatgatcataaccagattacggcgtttcatccaggcgcaatgatgcgttcgtacgaaaatcacgttcgtgatgtgccgggtgttaccttgggcctcgtaggtcctgatggacgcgagggcatgatccaaaatgccgaagaatttgctgctggtggcattccgttcatttttgacccaggtcaggcactgccgctgttcaacggccccgaactgcgcgagtttatcgaacaggcggactatgtggtggtcaacgattacgaaagcaatcttcttcaaacgcgtactggctggaacgagcaggacattgtttcacgcgtgcaggcgtatatcaccacgcaaggttcgaaaggagccctggtacatacaccggagaagacctacgatattccgccggcacacgaacgtcgtgtcgttgatccaactggttgcggcgacgcgtttcgcgccggcctgatctatggtattcagcataattatgattggttgaccattggccgcatgggaaacgttatgggtgcgctgaaagtggaacaccctggcacgcaaaatcagcgtttcgattttgccgaattcaacgaccagttcaaacaatattttggctacgcgctctaatga

SEQ ID NO: 692 - protein, 321 aa, synthetic construct
  REGION 1..321: note = Variant of adenosine kinase
MHHHHHHGGSGMSALICGSLAYDTIMVFPDQFKNHILPDRVHRLNVSFLVPRMRREFGGCAGNIAYNLHLLGGAPIVMATVGQDFGPYREHFETLGIDLSRVKIIDDLSTPQAFITTDHDHNQITAFHPGAMMRSYENHVRDVPGVTLGLVGPDGREGMIQNAEEFAAGGIPFIFDPGQALPLFNGPELREFIEQADYVVVNDYESNLLQTRTGWNEQDIVSRVQAYITTQGSKGALVHTPEKTYDIPPAHERRVVDPTGCGDAFRAGLIYGIQHNYDWLTIGRMGNVMGALKVEHPGTQNQRFDFAEFNDQFKQYFGYAL

SEQ ID NO: 693 - DNA, 969 bp, synthetic construct
  misc_feature 1..969: note = Variant of adenosine kinase
  source 1..969: mol_type = other DNA
atgcaccatcatcaccatcacgggggctccggcatgagtgcactgatttgcggttctgttgcgtatgataccatcatggtgtttccggaccagttcaagaaccatattctgcccgatcgtgttcaccgcctcaatgtcagctttcttgtaccacgcatgcgtcgtgaatttggaggctgtgccggcaacattgcgtacaatctgcatctgttgggtggtgctccgatcgtaatggctacggtgggccaagatttcggtccgtatcgcgagcacttcgaaactctgggcattgacttatcccgcgtcaagatcatcgatgatctgagtacaccgcaggccttcattaccaccgaccatgatcataaccagattacggcgtttcatccaggcgcaatgatgcgttcgtacgaaaatcacgttcgtgatgtgccgggtgttaccttgggcctcgtaggtcctgatggacgcgagggcatgatccaaaatgccgaagaatttgctgctggtggcattccgttcatttttgacccaggtcaggcactgccgctgttcaacggccccgaactgcgcgagtttatcgaacaggcggactatgtggtggtcaacgattacgaaagcaatcttcttcaaacgcgtactggctggaacgagcaggacattgtttcacgcgtgcaggcgtatatcaccacgcaaggttcgaaaggagccctggtacatacaccggagaagacctacgatattccgccggcacacgaacgtcgtgtcgttgatccaactggttgcggcgacgcgtttcgcgccggcctgatctatggtattcagcataattatgattggttgaccattggccgcatgggaaacttaatgggtgcgctgaaagtggaacaccctggcacgcaaaatcagcgtttcgattttgccgaattcaacgaccagttcaaacaatattttggctacgcgctctaatga

SEQ ID NO: 694 - protein, 321 aa, synthetic construct
  REGION 1..321: note = Variant of adenosine kinase
MHHHHHHGGSGMSALICGSVAYDTIMVFPDQFKNHILPDRVHRLNVSFLVPRMRREFGGCAGNIAYNLHLLGGAPIVMATVGQDFGPYREHFETLGIDLSRVKIIDDLSTPQAFITTDHDHNQITAFHPGAMMRSYENHVRDVPGVTLGLVGPDGREGMIQNAEEFAAGGIPFIFDPGQALPLFNGPELREFIEQADYVVVNDYESNLLQTRTGWNEQDIVSRVQAYITTQGSKGALVHTPEKTYDIPPAHERRVVDPTGCGDAFRAGLIYGIQHNYDWLTIGRMGNLMGALKVEHPGTQNQRFDFAEFNDQFKQYFGYAL

SEQ ID NO: 695 - DNA, 969 bp, synthetic construct
  misc_feature 1..969: note = Variant of adenosine kinase
  source 1..969: mol_type = other DNA
atgcaccatcatcaccatcacgggggctccggcatgagtgcactgatttgcggttctttagcgtatgataccatcatggtgtttccggaccagttcaagaaccatattctgcccgatcgtgttcaccgcctcaatgtcagctttcttgtaccacgcatgcgtcgtgaatttggaggctgtgccggcaacattgcgtacaatctgcatctgttgggtggtgctccgatcgtaatggctacggtgggccaagatttcggtccgtatcgcgagcacttcgaaactctgggcattgacttatcccgcgtcaagatcatcgatgatctgagtacactgcaggccttcattaccaccgaccatgatcataaccagattacggcgtttcatccaggcgcaatgatgcgttcgtacgaaaatcacgttcgtgatgtgccgggtgttaccttgggcctcgtaggtcctgatggacgcgagggcatgatccaaaatgccgaagaatttgctgctggtggcattccgttcatttttgacccaggtcaggcactgccgctgttcaacggccccgaactgcgcgagtttatcgaacaggcggactatgtggtggtcaacgattacgaaagcaatcttcttcaaacgcgtactggctggaacgagcaggacattgtttcacgcgtgcaggcgtatatcaccacgcaaggttcgaaaggagccctggtacatacaccggagaagacctacgatattccgccggcacacgaacgtcgtgtcgttgatccaactggttgcggcgacgcgtttcgcgccggcctgatctatggtattcagcataattatgattggttgaccattggccgcatgggaaacttaatgggtgcgctgaaagtggaacaccctggcacgcaaaatcagcgtttcgattttgccgaattcaacgaccagttcaaacaatattttggctacgcgctctaatga

SEQ ID NO: 696 - protein, 321 aa, synthetic construct
  REGION 1..321: note = Variant of adenosine kinase
MHHHHHHGGSGMSALICGSLAYDTIMVFPDQFKNHILPDRVHRLNVSFLVPRMRREFGGCAGNIAYNLHLLGGAPIVMATVGQDFGPYREHFETLGIDLSRVKIIDDLSTLQAFITTDHDHNQITAFHPGAMMRSYENHVRDVPGVTLGLVGPDGREGMIQNAEEFAAGGIPFIFDPGQALPLFNGPELREFIEQADYVVVNDYESNLLQTRTGWNEQDIVSRVQAYITTQGSKGALVHTPEKTYDIPPAHERRVVDPTGCGDAFRAGLIYGIQHNYDWLTIGRMGNLMGALKVEHPGTQNQRFDFAEFNDQFKQYFGYAL

SEQ ID NO: 697 - DNA, 969 bp, synthetic construct
  misc_feature 1..969: note = Variant of adenosine kinase
  source 1..969: mol_type = other DNA
atgcaccatcatcaccatcacgggggctccggcatgagtgcactgatttgcggttctttagcgtatgataccatcatggtgtttccggaccagttcaagaaccatattctgcccgatcgtgttcaccgcctcaatgtcagctttcttgtaccacgcatgcgtcgtgaatttggaggctgtgccggcaacattgcgtacaatctgcatctgttgggtggtgctccgatcgtaatggctacggtgggccaagatttcggtccgtatcgcgagcacttcgaaactctgggcattgacttatcccgcgtcaagatcatcgatgatctgagtacaccgcttgccttcattaccaccgaccatgatcataaccagattacggcgtttcatccaggcgcaatgatgcgttcgtacgaaaatcacgttcgtgatgtgccgggtgttaccttgggcctcgtaggtcctgatggacgcgagggcatgatccaaaatgccgaagaatttgctgctggtggcattccgttcatttttgacccaggtcaggcactgccgctgttcaacggccccgaactgcgcgagtttatcgaacaggcggactatgtggtggtcaacgattacgaaagcaatcttcttcaaacgcgtactggctggaacgagcaggacattgtttcacgcgtgcaggcgtatatcaccacgcaaggttcgaaaggagccctggtacatacaccggagaagacctacgatattccgccggcacacgaacgtcgtgtcgttgatccaactggttgcggcgacgcgtttcgcgccggcctgatctatggtattcagcataattatgattggttgaccattggccgcatgggaaacttaatgggtgcgctgaaagtggaacaccctggcacgcaaaatcagcgtttcgattttgccgaattcaacgaccagttcaaacaatattttggctacgcgctctaatga

SEQ ID NO: 698 - protein, 321 aa, synthetic construct
  REGION 1..321: note = Variant of adenosine kinase
MHHHHHHGGSGMSALICGSLAYDTIMVFPDQFKNHILPDRVHRLNVSFLVPRMRREFGGCAGNIAYNLHLLGGAPIVMATVGQDFGPYREHFETLGIDLSRVKIIDDLSTPLAFITTDHDHNQITAFHPGAMMRSYENHVRDVPGVTLGLVGPDGREGMIQNAEEFAAGGIPFIFDPGQALPLFNGPELREFIEQADYVVVNDYESNLLQTRTGWNEQDIVSRVQAYITTQGSKGALVHTPEKTYDIPPAHERRVVDPTGCGDAFRAGLIYGIQHNYDWLTIGRMGNLMGALKVEHPGTQNQRFDFAEFNDQFKQYFGYAL

SEQ ID NO: 699 - DNA, 969 bp, synthetic construct
  misc_feature 1..969: note = Variant of adenosine kinase
  source 1..969: mol_type = other DNA
atgcaccatcatcaccatcacgggggctccggcatgagtgcactgatttgcggttctttagcgtatgataccatcatggtgtttccggaccagttcaagaaccatattctgcccgatcgtgttcaccgcctcaatgtcagctttcttgtaccacgcatgcgtcgtgaatttggaggctgtgccggcaacattgcgtacaatctgcatctgttgggtggtgctccgatcgtaatggctacggtgggccaagatttcggtccgtatcgcgagcacttcgaaactctgggcattgacttatcccgcgtcaagatcatcgatgatctgagtacaccgcaggccttcattaccaccgaccatgatcataaccagattacggcgtttcatccaggcgcaatgatgcgttcgtacgaaaatcacgttcgtgatgtgccgggtgttaccttgggcctcgtaggtcctgatggacgcgagggcatgatccaaaatgccgaagaatttgctgctggtggcattccgttcatttttgacccaggtcaggcatgtccgctgttcaacggccccgaactgcgcgagtttatcgaacaggcggactatgtggtggtcaacgattacgaaagcaatcttcttcaaacgcgtactggctggaacgagcaggacattgtttcacgcgtgcaggcgtatatcaccacgcaaggttcgaaaggagccctggtacatacaccggagaagacctacgatattccgccggcacacgaacgtcgtgtcgttgatccaactggttgcggcgacgcgtttcgcgccggcctgatctatggtattcagcataattatgattggttgaccattggccgcatgggaaacttaatgggtgcgctgaaagtggaacaccctggcacgcaaaatcagcgtttcgattttgccgaattcaacgaccagttcaaacaatattttggctacgcgctctaatga

SEQ ID NO: 700 - protein, 321 aa, synthetic construct
  REGION 1..321: note = Variant of adenosine kinase
MHHHHHHGGSGMSALICGSLAYDTIMVFPDQFKNHILPDRVHRLNVSFLVPRMRREFGGCAGNIAYNLHLLGGAPIVMATVGQDFGPYREHFETLGIDLSRVKIIDDLSTPQAFITTDHDHNQITAFHPGAMMRSYENHVRDVPGVTLGLVGPDGREGMIQNAEEFAAGGIPFIFDPGQACPLFNGPELREFIEQADYVVVNDYESNLLQTRTGWNEQDIVSRVQAYITTQGSKGALVHTPEKTYDIPPAHERRVVDPTGCGDAFRAGLIYGIQHNYDWLTIGRMGNLMGALKVEHPGTQNQRFDFAEFNDQFKQYFGYAL

SEQ ID NO: 701 - DNA, 969 bp, synthetic construct
  misc_feature 1..969: note = Variant of adenosine kinase
  source 1..969: mol_type = other DNA
atgcaccatcatcaccatcacgggggctccggcatgagtgcactgatttgcggttctttagcgtatgataccatcatggtgtttccggaccagttcaagaaccatattctgcccgatcgtgttcaccgcctcaatgtcagctttcttgtaccacgcatgcgtcgtgaatttggaggctgtgccggcaacattgcgtacaatctgcatctgttgggtggtgctccgatcgtaatggctacggtgggccaagatttcggtccgtatcgcgagcacttcgaaactctgggcattgacttatcccgcgtcaagatcatcgatgatctgagtacaccgcaggccttcattaccaccgactgtgatcataaccagattacggcgtttcatccaggcgcaatgatgcgttcgtacgaaaatcacgttcgtgatgtgccgggtgttaccttgggcctcgtaggtcctgatggacgcgagggcatgatccaaaatgccgaagaatttgctgctggtggcattccgttcatttttgacccaggtcaggcactgccgctgttcaacggccccgaactgcgcgagtttatcgaacaggcggactatgtggtggtcaacgattacgaaagcaatcttcttcaaacgcgtactggctggaacgagcaggacattgtttcacgcgtgcaggcgtatatcaccacgcaaggttcgaaaggagccctggtacatacaccggagaagacctacgatattccgccggcacacgaacgtcgtgtcgttgatccaactggttgcggcgacgcgtttcgcgccggcctgatctatggtattcagcataattatgattggttgaccattggccgcatgggaaacttaatgggtgcgctgaaagtggaacaccctggcacgcaaaatcagcgtttcgattttgccgaattcaacgaccagttcaaacaatattttggctacgcgctctaatga

SEQ ID NO: 702 - protein, 321 aa, synthetic construct
  REGION 1..321: note = Variant of adenosine kinase
MHHHHHHGGSGMSALICGSLAYDTIMVFPDQFKNHILPDRVHRLNVSFLVPRMRREFGGCAGNIAYNLHLLGGAPIVMATVGQDFGPYREHFETLGIDLSRVKIIDDLSTPQAFITTDCDHNQITAFHPGAMMRSYENHVRDVPGVTLGLVGPDGREGMIQNAEEFAAGGIPFIFDPGQALPLFNGPELREFIEQADYVVVNDYESNLLQTRTGWNEQDIVSRVQAYITTQGSKGALVHTPEKTYDIPPAHERRVVDPTGCGDAFRAGLIYGIQHNYDWLTIGRMGNLMGALKVEHPGTQNQRFDFAEFNDQFKQYFGYAL

SEQ ID NO: 703 - DNA, 969 bp, synthetic construct
  misc_feature 1..969: note = Variant of adenosine kinase
  source 1..969: mol_type = other DNA
atgcaccatcatcaccatcacgggggctccggcatgagtgcactgatttgcggttctttagcgtatgataccatcatggtgtttccggaccagttcaagaaccatattctgcccgatcgtgttcaccgcctcaatgtcagctttcttgtaccacgcatgcgtcgtgaatttggaggctgtgccggcaacactgcgtacaatctgcatctgttgggtggtgctccgatcgtaatggctacggtgggccaagatttcggtccgtatcgcgagcacttcgaaactctgggcattgacttatcccgcgtcaagatcatcgatgatctgagtacaccgcaggccttcattaccaccgaccatgatcataaccagattacggcgtttcatccaggcgcaatgatgcgttcgtacgaaaatcacgttcgtgatgtgccgggtgttaccttgggcctcgtaggtcctgatggacgcgagggcatgatccaaaatgccgaagaatttgctgctggtggcattccgttcatttttgacccaggtcaggcactgccgctgttcaacggccccgaactgcgcgagtttatcgaacaggcggactatgtggtggtcaacgattacgaaagcaatcttcttcaaacgcgtactggctggaacgagcaggacattgtttcacgcgtgcaggcgtatatcaccacgcaaggttcgaaaggagccctggtacatacaccggagaagacctacgatattccgccggcacacgaacgtcgtgtcgttgatccaactggttgcggcgacgcgtttcgcgccggcctgatctatggtattcagcataattatgattggttgaccattggccgcatgggaaacttaatgggtgcgctgaaagtggaacaccctggcacgcaaaatcagcgtttcgattttgccgaattcaacgaccagttcaaacaatattttggctacgcgctctaatga

SEQ ID NO: 704 - protein, 321 aa, synthetic construct
  REGION 1..321: note = Variant of adenosine kinase
MHHHHHHGGSGMSALICGSLAYDTIMVFPDQFKNHILPDRVHRLNVSFLVPRMRREFGGCAGNTAYNLHLLGGAPIVMATVGQDFGPYREHFETLGIDLSRVKIIDDLSTPQAFITTDHDHNQITAFHPGAMMRSYENHVRDVPGVTLGLVGPDGREGMIQNAEEFAAGGIPFIFDPGQALPLFNGPELREFIEQADYVVVNDYESNLLQTRTGWNEQDIVSRVQAYITTQGSKGALVHTPEKTYDIPPAHERRVVDPTGCGDAFRAGLIYGIQHNYDWLTIGRMGNLMGALKVEHPGTQNQRFDFAEFNDQFKQYFGYAL

SEQ ID NO: 705 - DNA, 969 bp, synthetic construct
  misc_feature 1..969: note = Variant of adenosine kinase
  source 1..969: mol_type = other DNA
atgcaccatcatcaccatcacgggggctccggcatgagtgcactgatttgcggttctttagcgtatgataccatcatggtgtttccggaccagttcaagaaccatattctgcccgatcgtgttcaccgcctcaatgtcagctttcttgtaccacgcatgcgtcgtgaatttggaggctgtgccggcaacattgcgtacaatctgcatctgttgggtggtgctccgatcgtaatggctacggtgggccaagatttcggtccgtatcgcgagcacttcgaaactctgggcattgacttatcccgcgtcaagatcatcgatgatctgagtacaccgcaggccttcattaccaccgaccatgatcataaccagattacggcgtttcatccaggcgcaatgatgcgttcgtacgaaaatcacgttcgtgatgtgccgggtgttaccttgggcctcgtaggtcctgatggacgcgagggcatgatccaaaatgccgaagaatttgctgctggtggcattccgttcatttttgacccaggtcaggcactgccgctgttcaacggccccgaactgcgcgagtttatcgaacaggcggactatgtggtggtcaacgattacgaaagcaatcttcttcaaacgcgtactggctggaacgagcaggacattgtttcacgcgtgcaggcgtatatcaccacgcaaggttcgaaaggagccctggtacatacaccggagaagacctacgatattccgccggcaactgaacgtcgtgtcgttgatccaactggttgcggcgacgcgtttcgcgccggcctgatctatggtattcagcataattatgattggttgaccattggccgcatgggaaacttaatgggtgcgctgaaagtggaacaccctggcacgcaaaatcagcgtttcgattttgccgaattcaacgaccagttcaaacaatattttggctacgcgctctaatga

SEQ ID NO: 706 - protein, 321 aa, synthetic construct
  REGION 1..321: note = Variant of adenosine kinase
MHHHHHHGGSGMSALICGSLAYDTIMVFPDQFKNHILPDRVHRLNVSFLVPRMRREFGGCAGNIAYNLHLLGGAPIVMATVGQDFGPYREHFETLGIDLSRVKIIDDLSTPQAFITTDHDHNQITAFHPGAMMRSYENHVRDVPGVTLGLVGPDGREGMIQNAEEFAAGGIPFIFDPGQALPLFNGPELREFIEQADYVVVNDYESNLLQTRTGWNEQDIVSRVQAYITTQGSKGALVHTPEKTYDIPPATERRVVDPTGCGDAFRAGLIYGIQHNYDWLTIGRMGNLMGALKVEHPGTQNQRFDFAEFNDQFKQYFGYAL

SEQ ID NO: 707 - DNA, 969 bp, synthetic construct
  misc_feature 1..969: note = Variant of adenosine kinase
  source 1..969: mol_type = other DNA
atgcaccatcatcaccatcacgggggctccggcatgagtgcactgatttgcggttctttagcgtatgataccatcatggtgtttccggaccagttcaagaaccatattctgcccgatcgtgttcaccgcctcaatgtcagctttcttgtaccacgcatgcgtcgtgaatttggaggctgtgccggcaacattgcgtacaatctgcatctgttgggtggtgctccgatcgtaatggctacggtgggccaagatttcggtccgtatcgcgagcacttcgaaactctgggcattgacttatcccgcgtcaagatcatcgatgatctgagtacaccgcaggccttcattaccaccgaccatgatcataaccagattacggcgtttcatccaggcgcaatgatgcgttcgtacgaaaatcacgttcgtgatgtgccgggtgttaccttgggcctcgtaggtcctgattggcgcgagggcatgatccaaaatgccgaagaatttgctgctggtggcattccgttcatttttgacccaggtcaggcactgccgctgttcaacggccccgaactgcgcgagtttatcgaacaggcggactatgtggtggtcaacgattacgaaagcaatcttcttcaaacgcgtactggctggaacgagcaggacattgtttcacgcgtgcaggcgtatatcaccacgcaaggttcgaaaggagccctggtacatacaccggagaagacctacgatattccgccggcacacgaacgtcgtgtcgttgatccaactggttgcggcgacgcgtttcgcgccggcctgatctatggtattcagcataattatgattggttgaccattggccgcatgggaaacttaatgggtgcgctgaaagtggaacaccctggcacgcaaaatcagcgtttcgattttgccgaattcaacgaccagttcaaacaatattttggctacgcgctctaatga

SEQ ID NO: 708 - protein, 321 aa, synthetic construct
  REGION 1..321: note = Variant of adenosine kinase
MHHHHHHGGSGMSALICGSLAYDTIMVFPDQFKNHILPDRVHRLNVSFLVPRMRREFGGCAGNIAYNLHLLGGAPIVMATVGQDFGPYREHFETLGIDLSRVKIIDDLSTPQAFITTDHDHNQITAFHPGAMMRSYENHVRDVPGVTLGLVGPDWREGMIQNAEEFAAGGIPFIFDPGQALPLFNGPELREFIEQADYVVVNDYESNLLQTRTGWNEQDIVSRVQAYITTQGSKGALVHTPEKTYDIPPAHERRVVDPTGCGDAFRAGLIYGIQHNYDWLTIGRMGNLMGALKVEHPGTQNQRFDFAEFNDQFKQYFGYAL

SEQ ID NO: 709 - DNA, 969 bp, synthetic construct
  misc_feature 1..969: note = Variant of adenosine kinase
  source 1..969: mol_type = other DNA
atgcaccatcatcaccatcacgggggctccggcatgagtgcactgatttgcggttctttagcgtatgataccatcatggtgtttccggaccagttcaagaaccatattctgcccgatcgtgttcaccgcctcaatgtcagctttcttgtaccacgcatgcgtcgtgaatttggaggctgtgccggcaacattgcgtacaatctgcatctgttgggtggtgctccgatcgtaatggctacggtgggccaagatttcggtccgtatcgcgagcacttcgaaactctgggcattgacttatcccgcgtcaagatcatcgatgatctgagtacaccgcaggccttcattaccaccgaccatgatcataaccagattacggcgtttcatccaggcgcaatgatgcgttcgtacgaaaatcacgttcgtgatgtgccgggtgttaccttgggcctcgtaggtcctgatggacgcgagggcatgatccaaaatgccgaagaatttgctgctggtggcattccgttcatttttgacccaggtcaggcactgccgctgttcaacggccccgaactgcgcgagtttatcgaacaggcggactatgtggtggtcaacgattacgaaagcaatcttcttcaaacgcgtactggctggaacgagcaggacattgtttcacgcgtgcaggcgtatatcaccacgcaaggttcgaaaggagccctggtacatacaccggagaagacctacgatattccgccggcacacgaacgtcgtgtccatgatccaactggttgcggcgacgcgtttcgcgccggcctgatctatggtattcagcataattatgattggttgaccattggccgcatgggaaacttaatgggtgcgctgaaagtggaacaccctggcacgcaaaatcagcgtttcgattttgccgaattcaacgaccagttcaaacaatattttggctacgcgctctaatga

SEQ ID NO: 710 - protein, 321 aa, synthetic construct
  REGION 1..321: note = Variant of adenosine kinase
MHHHHHHGGSGMSALICGSLAYDTIMVFPDQFKNHILPDRVHRLNVSFLVPRMRREFGGCAGNIAYNLHLLGGAPIVMATVGQDFGPYREHFETLGIDLSRVKIIDDLSTPQAFITTDHDHNQITAFHPGAMMRSYENHVRDVPGVTLGLVGPDGREGMIQNAEEFAAGGIPFIFDPGQALPLFNGPELREFIEQADYVVVNDYESNLLQTRTGWNEQDIVSRVQAYITTQGSKGALVHTPEKTYDIPPAHERRVHDPTGCGDAFRAGLIYGIQHNYDWLTIGRMGNLMGALKVEHPGTQNQRFDFAEFNDQFKQYFGYAL

SEQ ID NO: 711 - DNA, 969 bp, synthetic construct
  misc_feature 1..969: note = Variant of adenosine kinase
  source 1..969: mol_type = other DNA
atgcaccatcatcaccatcacgggggctccggcatgagtgcactgatttgcggttctttagcgtatgataccatcatggtgtttccggaccagttcaagaaccatattctgcccgatcgtgttcaccgcctcaatgtcagctttcttgtaccacgcatgcgtcgtgaatttggaggctgtgccggcaacattgcgtacaatctgcatctgttgggtggtgctccgatcgtaatggctacggtgggccaagatttcggtccgtatcgcgagcacttcgaaactctgggcattgacttatcccgcgtcaagatcatcgatgatctgagtacaccgcaggccttcattaccaccgaccatgatcataaccagattacggcgttttttccaggcgcaatgatgcgttcgtacgaaaatcacgttcgtgatgtgccgggtgttaccttgggcctcgtaggtcctgatggacgcgagggcatgatccaaaatgccgaagaatttgctgctggtggcattccgttcatttttgacccaggtcaggcactgccgctgttcaacggccccgaactgcgcgagtttatcgaacaggcggactatgtggtggtcaacgattacgaaagcaatcttcttcaaacgcgtactggctggaacgagcaggacattgtttcacgcgtgcaggcgtatatcaccacgcaaggttcgaaaggagccctggtacatacaccggagaagacctacgatattccgccggcacacgaacgtcgtgtcgttgatccaactggttgcggcgacgcgtttcgcgccggcctgatctatggtattcagcataattatgattggttgaccattggccgcatgggaaacttaatgggtgcgctgaaagtggaacaccctggcacgcaaaatcagcgtttcgattttgccgaattcaacgaccagttcaaacaatattttggctacgcgctctaatga

SEQ ID NO: 712 - protein, 321 aa, synthetic construct
  REGION 1..321: note = Variant of adenosine kinase
MHHHHHHGGSGMSALICGSLAYDTIMVFPDQFKNHILPDRVHRLNVSFLVPRMRREFGGCAGNIAYNLHLLGGAPIVMATVGQDFGPYREHFETLGIDLSRVKIIDDLSTPQAFITTDHDHNQITAFFPGAMMRSYENHVRDVPGVTLGLVGPDGREGMIQNAEEFAAGGIPFIFDPGQALPLFNGPELREFIEQADYVVVNDYESNLLQTRTGWNEQDIVSRVQAYITTQGSKGALVHTPEKTYDIPPAHERRVVDPTGCGDAFRAGLIYGIQHNYDWLTIGRMGNLMGALKVEHPGTQNQRFDFAEFNDQFKQYFGYAL

SEQ ID NO: 713 - DNA, 969 bp, synthetic construct
  misc_feature 1..969: note = Variant of adenosine kinase
  source 1..969: mol_type = other DNA
atgcaccatcatcaccatcacgggggctccggcatgagtgcactgatttgcggttctttagcgtatgataccatcatggtgtttccggaccagttcaagaaccatattctgcccgatcgtgttcaccgcctcaatgtcagctttcttgtaccacgcatgcgtcgtgaatttggaggctgtgccggcaacattgcgtacaatctgcatctgttgggtggtgctccgatcgtaatggctacggtgggccaagatttcggtccgtatcgcgagcacttcgaaactctgggcattgacttatcccgcgtcaagatcatcgatgatctgagtacaccgcaggccttcattaccaccgaccatgatcataaccagattacggcgtttcatccaggcgcaatgatgcgttcgtacgaaaatcacgttcgtgatgtgccgggtgttaccttgggcctcgtaggtcctgatggacgcgagggcatgatccaaaatgccgaagaatttgctgctggtggcattccgttcatttttgacccaggtcaggcactgccgctgttcaacggccccgaactgcgcgagtttatcgaacaggcggactatgtggtggtcaacgattacgaaagcaatcttcttcaaacgcgtactggctggaacgagcaggacattgtttcacgcgtgcaggcgtatatcaccacgcaaggttcgaaaggagccctggtacatacaccggagaagacctacgatattccgccggcacacgaacgtattgtcgttgatccaactggttgcggcgacgcgtttcgcgccggcctgatctatggtattcagcataattatgattggttgaccattggccgcatgggaaacttaatgggtgcgctgaaagtggaacaccctggcacgcaaaatcagcgtttcgattttgccgaattcaacgaccagttcaaacaatattttggctacgcgctctaatga

SEQ ID NO: 714 - protein, 321 aa, synthetic construct
  REGION 1..321: note = Variant of adenosine kinase
MHHHHHHGGSGMSALICGSLAYDTIMVFPDQFKNHILPDRVHRLNVSFLVPRMRREFGGCAGNIAYNLHLLGGAPIVMATVGQDFGPYREHFETLGIDLSRVKIIDDLSTPQAFITTDHDHNQITAFHPGAMMRSYENHVRDVPGVTLGLVGPDGREGMIQNAEEFAAGGIPFIFDPGQALPLFNGPELREFIEQADYVVVNDYESNLLQTRTGWNEQDIVSRVQAYITTQGSKGALVHTPEKTYDIPPAHERIVVDPTGCGDAFRAGLIYGIQHNYDWLTIGRMGNLMGALKVEHPGTQNQRFDFAEFNDQFKQYFGYAL

SEQ ID NO: 715 - DNA, 969 bp, synthetic construct
  misc_feature 1..969: note = Variant of adenosine kinase
  source 1..969: mol_type = other DNA
atgcaccatcatcaccatcacgggggctccggcatgagtgcactgatttgcggttctttagcgtatgataccatcatggtgtttccggaccagttcaagaaccatattctgcccgatcgtgttcaccgcctcaatgtcagctttcttgtaccacgcatgcgtcgtgaatttggaggctgtgccggcaacattgcgtacaatctgcatctgttgggtggtgctccgatcgtaatggctacggtgggccaagatttcggtccgtatcgcgagcacttcgaaactctgggcattgacttatcccgcgtcaagatcatcgatgatctgagtacaccgcaggccttcattaccaccgaccatgatcataaccagattacggcgtttcatccaggcgcaatgatgcgttcgtacgaaaatcacgttcgtgatgtgccgggtgttaccttgggcctcgtaggtcctgatggacgcgagggcatgatccaaaatgccgaagaatttgctgctggtggcattccgttcatttttgacccaggtcaggcactgccgctgttcaacggccccgaactgcgcgagtttatcgaacaggcggactatgtggtggtcaacgattacgaaagcaatcttcttcaaacgcgtactggctggaacgagcaggacattgtttcacgcgtgcaggcgtatatcaccacgcaaggttcgaaaggagccctggtacatacaccggagaagacctacgatattggtccggcacacgaacgtcgtgtcgttgatccaactggttgcggcgacgcgtttcgcgccggcctgatctatggtattcagcataattatgattggttgaccattggccgcatgggaaacttaatgggtgcgctgaaagtggaacaccctggcacgcaaaatcagcgtttcgattttgccgaattcaacgaccagttcaaacaatattttggctacgcgctctaatga

SEQ ID NO: 716 - protein, 321 aa, synthetic construct
  REGION 1..321: note = Variant of adenosine kinase
MHHHHHHGGSGMSALICGSLAYDTIMVFPDQFKNHILPDRVHRLNVSFLVPRMRREFGGCAGNIAYNLHLLGGAPIVMATVGQDFGPYREHFETLGIDLSRVKIIDDLSTPQAFITTDHDHNQITAFHPGAMMRSYENHVRDVPGVTLGLVGPDGREGMIQNAEEFAAGGIPFIFDPGQALPLFNGPELREFIEQADYVVVNDYESNLLQTRTGWNEQDIVSRVQAYITTQGSKGALVHTPEKTYDIGPAHERRVVDPTGCGDAFRAGLIYGIQHNYDWLTIGRMGNLMGALKVEHPGTQNQRFDFAEFNDQFKQYFGYAL

SEQ ID NO: 717 - DNA, 969 bp, synthetic construct
  misc_feature 1..969: note = Variant of adenosine kinase
  source 1..969: mol_type = other DNA
atgcaccatcatcaccatcacgggggctccggcatgagtgcactgatttgcggttctttagcgtatgataccatcatggtgtttccggaccagttcaagaaccatattctgcccgatcgtgttcaccgcctcaatgtcagctttcttgtaccacgcatgcgtcgtgaatttggaggctgtgccggcaacattgcgtacaatctgcatctgttgggtggtgctccgatcgtaatggctacggtgggccaagatttcggtccgtatcgcgagcacttcgaaactctgggcattgacttatcccgcgtcaagatcatcgatgatctgagtacaccgcaggccttcattaccaccgaccatgatcataaccagattacggcgtttcatccaggcgcaatgatgcgttcgtacgaaaatcacgttcgtgatgtgccgggtgttaccttgggcctcgtaggtcctgatggacgcgagggcatgatccaaaatgccgaagaatttgctgctggtggcattccgttcatttttgacccaggtcaggcactgccgctgttcaacggccccgaactgcgcgagtttatcgaacaggcggactatgtggtggtcaacgattacgaaagcaatcttcttcaaacgcgtactggctggaacgagcaggacattgtttcacgcgtgcaggcgtatatcaccacgcaaggttcgaaaggagccctggtacatacaccggagaagacctacgatattccgccggcacacgaacgtcgtgtcgttgatccaactggttgcggcgacgcgtttcgcgccggcctgatctatggtattcagcataattatgattggttgaccattggccgcatgggaaacttaatgggtgcgtttaaagtggaacaccctggcacgcaaaatcagcgtttcgattttgccgaattcaacgaccagttcaaacaatattttggctacgcgctctaatga

SEQ ID NO: 718 - protein, 321 aa, synthetic construct
  REGION 1..321: note = Variant of adenosine kinase
MHHHHHHGGSGMSALICGSLAYDTIMVFPDQFKNHILPDRVHRLNVSFLVPRMRREFGGCAGNIAYNLHLLGGAPIVMATVGQDFGPYREHFETLGIDLSRVKIIDDLSTPQAFITTDHDHNQITAFHPGAMMRSYENHVRDVPGVTLGLVGPDGREGMIQNAEEFAAGGIPFIFDPGQALPLFNGPELREFIEQADYVVVNDYESNLLQTRTGWNEQDIVSRVQAYITTQGSKGALVHTPEKTYDIPPAHERRVVDPTGCGDAFRAGLIYGIQHNYDWLTIGRMGNLMGAFKVEHPGTQNQRFDFAEFNDQFKQYFGYAL

SEQ ID NO: 719 - DNA, 969 bp, synthetic construct
  misc_feature 1..969: note = Variant of adenosine kinase
  source 1..969: mol_type = other DNA
atgcaccatcatcaccatcacgggggctccggcatgagtgcactgatttgcggttctttagcgtatgataccatcatggtgtttccggaccagttcaagaaccatattctgcccgatcgtgttcaccgcctcaatgtcagctttcttgtaccacgcatgcgtcgtgaatttggaggctgtgccggcaacattgcgtacaatctgcatctgttgggtggtgctccgatcgtaatggctacggtgggccaagatttcggtccgtatcgcgagcacttcgaaactctgggcattgacttatcccgcgtcaagatcatcgatgatctgagtacaccgcaggccttcattaccaccgaccatgatcataaccagattacggcgtttcatccaggcgcaatgatgcgttcgtacgaaaatcacgttcgtgatgtgccgggtgttaccttgggcctcgtaggtcctgatggacgcgagggcatgatccaaaatgccgaagaatttgctgctggtggcattccgttcatttttgacccaggtcaggcactgccgctgttcaacggccccgaactgcgcgagtttatcgaacaggcggactatgtggtggtcaacgattacgaaagcaatcttcttcaaacgcgtactggctggaacgagcaggacattgtttcacgcgtgcaggcgtatatcaccacgcaaggttcgaaaggagccctggtacatacaccggagaagacctacgatattccgccggcacactgtcgtcgtgtcgttgatccaactggttgcggcgacgcgtttcgcgccggcctgatctatggtattcagcataattatgattggttgaccattggccgcatgggaaacttaatgggtgcgctgaaagtggaacaccctggcacgcaaaatcagcgtttcgattttgccgaattcaacgaccagttcaaacaatattttggctacgcgctctaatga

SEQ ID NO: 720 - protein, 321 aa, synthetic construct
  REGION 1..321: note = Variant of adenosine kinase
MHHHHHHGGSGMSALICGSLAYDTIMVFPDQFKNHILPDRVHRLNVSFLVPRMRREFGGCAGNIAYNLHLLGGAPIVMATVGQDFGPYREHFETLGIDLSRVKIIDDLSTPQAFITTDHDHNQITAFHPGAMMRSYENHVRDVPGVTLGLVGPDGREGMIQNAEEFAAGGIPFIFDPGQALPLFNGPELREFIEQADYVVVNDYESNLLQTRTGWNEQDIVSRVQAYITTQGSKGALVHTPEKTYDIPPAHCRRVVDPTGCGDAFRAGLIYGIQHNYDWLTIGRMGNLMGALKVEHPGTQNQRFDFAEFNDQFKQYFGYAL

SEQ ID NO: 721 - DNA, 969 bp, synthetic construct
  misc_feature 1..969: note = Variant of adenosine kinase
  source 1..969: mol_type = other DNA
atgcaccatcatcaccatcacgggggctccggcatgagtgcactgatttgcggttctttagcgtatgataccatcatggtgtttccggaccagttcaagaaccatattctgcccgatcgtgttcaccgcctcaatgtcagctttcttgtaccacgcatgcgtcgtgaatttggaggctgtgccggcaacattgcgtacaatctgcatctgttgggtggtgctccgatcgtaatggctacggtgggccaagatttcggtccgtatcgcgagcacttcgaaactctgggcattgacttatcccgcgtcaagatcatcgatgatctgagtacaccgcaggccttcattaccaccgaccatgatcataaccagattacggcgtttcatccaggcgcaatgatgcgttcgtacgaaaatcacgttcgtgatgtgccgggtgttaccttgggcctcgtaggtcctgatggacgcgagggcatgatccaaaatgccgaagaatttgctgctggtggcattccgttcatttttgacccaggtcaggcactgccgctgttcaacggccccgaactgcgcgagtttatcgaacaggcggactatgtggtggtcaacgattacgaaagcaatcttcttcaaacgcgtactggctggaacgagcaggacattgtttcacgcgtgcaggcgtatatcaccacgcaaggttcgaatggagccctggtacatacaccggagaagacctacgatattccgccggcacacgaacgtcgtgtcgttgatccaactggttgcggcgacgcgtttcgcgccggcctgatctatggtattcagcataattatgattggttgaccattggccgcatgggaaacttaatgggtgcgctgaaagtggaacaccctggcacgcaaaatcagcgtttcgattttgccgaattcaacgaccagttcaaacaatattttggctacgcgctctaatga

SEQ ID NO: 722 - protein, 321 aa, synthetic construct
  REGION 1..321: note = Variant of adenosine kinase
MHHHHHHGGSGMSALICGSLAYDTIMVFPDQFKNHILPDRVHRLNVSFLVPRMRREFGGCAGNIAYNLHLLGGAPIVMATVGQDFGPYREHFETLGIDLSRVKIIDDLSTPQAFITTDHDHNQITAFHPGAMMRSYENHVRDVPGVTLGLVGPDGREGMIQNAEEFAAGGIPFIFDPGQALPLFNGPELREFIEQADYVVVNDYESNLLQTRTGWNEQDIVSRVQAYITTQGSNGALVHTPEKTYDIPPAHERRVVDPTGCGDAFRAGLIYGIQHNYDWLTIGRMGNLMGALKVEHPGTQNQRFDFAEFNDQFKQYFGYAL

SEQ ID NO: 723 - DNA, 969 bp, synthetic construct
  misc_feature 1..969: note = Variant of adenosine kinase
  source 1..969: mol_type = other DNA
atgcaccatcatcaccatcacgggggctccggcatgagtgcactgatttgcggttctttagcgtatgataccatcatggtgtttccggaccagttcaagaaccatattctgcccgatcgtgttcaccgcctcaatgtcagctttcttgtaccacgcatgcgtcgtgaatttggaggctgtgccggcaacattgcgtacaatctgcatctgttgggtggtgctccgatcgtaatggctacggtgggccaagatttcggtccgtatcgcgagcacttcgaaactctgggcattgacttatcccgcgtcaagatcatcgatgatctgagtacaccgcaggccttcattaccaccgaccatgatcataaccagattacggcgtttcatccaggcgcaatgatgcgttcgtacgaaaatcacgttcgtgatgtgccgggtgttaccttgggcctcgtaggtcctgatggacgcgagggcatgatccaaaatgccgaagaatttgctgctggtggcattccgttcatttttgacccaggtcaggcagctccgctgttcaacggccccgaactgcgcgagtttatcgaacaggcggactatgtggtggtcaacgattacgaaagcaatcttcttcaaacgcgtactggctggaacgagcaggacattgtttcacgcgtgcaggcgtatatcaccacgcaaggttcgaaaggagccctggtacatacaccggagaagacctacgatattccgccggcacacgaacgtcgtgtcgttgatccaactggttgcggcgacgcgtttcgcgccggcctgatctatggtattcagcataattatgattggttgaccattggccgcatgggaaacttaatgggtgcgctgaaagtggaacaccctggcacgcaaaatcagcgtttcgattttgccgaattcaacgaccagttcaaacaatattttggctacgcgctctaatga

SEQ ID NO: 724 - protein, 321 aa, synthetic construct
  REGION 1..321: note = Variant of adenosine kinase
MHHHHHHGGSGMSALICGSLAYDTIMVFPDQFKNHILPDRVHRLNVSFLVPRMRREFGGCAGNIAYNLHLLGGAPIVMATVGQDFGPYREHFETLGIDLSRVKIIDDLSTPQAFITTDHDHNQITAFHPGAMMRSYENHVRDVPGVTLGLVGPDGREGMIQNAEEFAAGGIPFIFDPGQAAPLFNGPELREFIEQADYVVVNDYESNLLQTRTGWNEQDIVSRVQAYITTQGSKGALVHTPEKTYDIPPAHERRVVDPTGCGDAFRAGLIYGIQHNYDWLTIGRMGNLMGALKVEHPGTQNQRFDFAEFNDQFKQYFGYAL

SEQ ID NO: 725 - DNA, 969 bp, synthetic construct
  misc_feature 1..969: note = Variant of adenosine kinase
  source 1..969: mol_type = other DNA
atgcaccatcatcaccatcacgggggctccggcatgagtgcactgatttgcggttctttagcgtatgataccatcatggtgtttccggactggttcaagaaccatattctgcccgatcgtgttcaccgcctcaatgtcagctttcttgtaccacgcatgcgtcgtgaatttggaggctgtgccggcaacattgcgtacaatctgcatctgttgggtggtgctccgatcgtaatggctacggtgggccaagatttcggtccgtatcgcgagcacttcgaaactctgggcattgacttatcccgcgtcaagatcatcgatgatctgagtacaccgcaggccttcattaccaccgaccatgatcataaccagattacggcgtttcatccaggcgcaatgatgcgttcgtacgaaaatcacgttcgtgatgtgccgggtgttaccttgggcctcgtaggtcctgatggacgcgagggcatgatccaaaatgccgaagaatttgctgctggtggcattccgttcatttttgacccaggtcaggcactgccgctgttcaacggccccgaactgcgcgagtttatcgaacaggcggactatgtggtggtcaacgattacgaaagcaatcttcttcaaacgcgtactggctggaacgagcaggacattgtttcacgcgtgcaggcgtatatcaccacgcaaggttcgaaaggagccctggtacatacaccggagaagacctacgatattccgccggcacacgaacgtcgtgtcgttgatccaactggttgcggcgacgcgtttcgcgccggcctgatctatggtattcagcataattatgattggttgaccattggccgcatgggaaacttaatgggtgcgctgaaagtggaacaccctggcacgcaaaatcagcgtttcgattttgccgaattcaacgaccagttcaaacaatattttggctacgcgctctaatga

SEQ ID NO: 726 - protein, 321 aa, synthetic construct
  REGION 1..321: note = Variant of adenosine kinase
MHHHHHHGGSGMSALICGSLAYDTIMVFPDWFKNHILPDRVHRLNVSFLVPRMRREFGGCAGNIAYNLHLLGGAPIVMATVGQDFGPYREHFETLGIDLSRVKIIDDLSTPQAFITTDHDHNQITAFHPGAMMRSYENHVRDVPGVTLGLVGPDGREGMIQNAEEFAAGGIPFIFDPGQALPLFNGPELREFIEQADYVVVNDYESNLLQTRTGWNEQDIVSRVQAYITTQGSKGALVHTPEKTYDIPPAHERRVVDPTGCGDAFRAGLIYGIQHNYDWLTIGRMGNLMGALKVEHPGTQNQRFDFAEFNDQFKQYFGYAL

SEQ ID NO: 727 - DNA, 969 bp, synthetic construct
  misc_feature 1..969: note = Variant of adenosine kinase
  source 1..969: mol_type = other DNA
atgcaccatcatcaccatcacgggggctccggcatgagtgcactgatttgcggttctttagcgtatgataccatcatggtgtttccggaccagttcaagaaccatattctgcccgatcgtgttcaccgcctcaatgtcagctttcttgtaccacgcatgcgtcgtgaatttggaggctgtgccggcaacattgcgtacaatctgcatctgttgggtggtgctccgatcgtaatggctacggtgggccaagatttcggtccgtatcgcgagcacttcgaaactctgggcattgacttatcccgcgtcaagatcatcgatgatctgagtacaccgcaggccttcattaccaccgaccatgatcataaccagattacggcgtttcatccaggcgcaatgatgcgttcgtacgaaaatcacgttcgtgatgtgccgggtgttaccttgggcctcgtaggtcctgatggacgcgagggcatgatccaaaatgccgaagaatttgctgctggtggcattccgttcatttttgacccaggtcaggcactgccgctgttcaacggccccgaactgcgcgagtttatcgaacaggcggactatgtggtggtcaacgattacgaaagcaatcttcttcaaacgcgtactggctggaacgagcaggacattgtttcacgcgtgcaggcgtatatcaccacgcaaggttcgaaaggagccctggtacatacaccggagaagacctacgatattccgccggcacacgaacgtcgtgtcgttgatccaactggttgcggcgacgcgtatcgcgccggcctgatctatggtattcagcataattatgattggttgaccattggccgcatgggaaacttaatgggtgcgctgaaagtggaacaccctggcacgcaaaatcagcgtttcgattttgccgaattcaacgaccagttcaaacaatattttggctacgcgctctaatga

SEQ ID NO: 728 - protein, 321 aa, synthetic construct
  REGION 1..321: note = Variant of adenosine kinase
MHHHHHHGGSGMSALICGSLAYDTIMVFPDQFKNHILPDRVHRLNVSFLVPRMRREFGGCAGNIAYNLHLLGGAPIVMATVGQDFGPYREHFETLGIDLSRVKIIDDLSTPQAFITTDHDHNQITAFHPGAMMRSYENHVRDVPGVTLGLVGPDGREGMIQNAEEFAAGGIPFIFDPGQALPLFNGPELREFIEQADYVVVNDYESNLLQTRTGWNEQDIVSRVQAYITTQGSKGALVHTPEKTYDIPPAHERRVVDPTGCGDAYRAGLIYGIQHNYDWLTIGRMGNLMGALKVEHPGTQNQRFDFAEFNDQFKQYFGYAL

SEQ ID NO: 729 - DNA, 969 bp, synthetic construct
  misc_feature 1..969: note = Variant of adenosine kinase
  source 1..969: mol_type = other DNA
atgcaccatcatcaccatcacgggggctccggcatgagtgcactgatttgcggttctttagcgtatgataccatcatggtgtttccggaccagttcaagaaccatattctgcccgatcgtgttcaccgcctcaatgtcagctttcttgtaccacgcatgcgtcgtgaatttggaggctgtgccggcaacattgcgtacaatctgcatctgttgggtggtgctccgatcgtaatggctacggtgggccaagatttcggtccgtatcgcgagcacttcgaaactctgggcattgacttatcccgcgtcaagatcatcgatgatctgagtacaccgcaggccttcattaccaccgaccatgatcataaccagattacggcgtttcatccaggcgcaatgatgcgttcgtacgaaaatcacgttcgtgatgtgccgggtgttaccttgggcctcgtaggtcctgatggacgcgagggcatgatccaaaatgccgaagaatttgctgctggtggcattccgttcatttttgacccaggtcaggcactgccgctgttcaacggccccgaactgcgcgagtttatcgaacaggcggactatgtggtggtcaacgattacgaaagcaatcttcttcaaacgcgtactggctggaacgagcaggacattgtttcacgcgtgcaggcgtatatcaccacgcaaggttcgaaaggagccctggtacatacaccggagaagacctacgatattccgccggcattggaacgtcgtgtcgttgatccaactggttgcggcgacgcgtttcgcgccggcctgatctatggtattcagcataattatgattggttgaccattggccgcatgggaaacttaatgggtgcgctgaaagtggaacaccctggcacgcaaaatcagcgtttcgattttgccgaattcaacgaccagttcaaacaatattttggctacgcgctctaatga

SEQ ID NO: 730 - protein, 321 aa, synthetic construct
  REGION 1..321: note = Variant of adenosine kinase
MHHHHHHGGSGMSALICGSLAYDTIMVFPDQFKNHILPDRVHRLNVSFLVPRMRREFGGCAGNIAYNLHLLGGAPIVMATVGQDFGPYREHFETLGIDLSRVKIIDDLSTPQAFITTDHDHNQITAFHPGAMMRSYENHVRDVPGVTLGLVGPDGREGMIQNAEEFAAGGIPFIFDPGQALPLFNGPELREFIEQADYVVVNDYESNLLQTRTGWNEQDIVSRVQAYITTQGSKGALVHTPEKTYDIPPALERRVVDPTGCGDAFRAGLIYGIQHNYDWLTIGRMGNLMGALKVEHPGTQNQRFDFAEFNDQFKQYFGYAL

SEQ ID NO: 731 - DNA, 969 bp, synthetic construct
  misc_feature 1..969: note = Variant of adenosine kinase
  source 1..969: mol_type = other DNA
atgcaccatcatcaccatcacgggggctccggcatgagtgcactgatttgcggttctttagcgtatgataccatcatggtgtttccggaccagttcaagaaccatattctgcccgatcgtgttcaccgcctcaatgtcagctttcttgtaccacgcatgcgtcgtgaatttggaggctgtgccggcaacattgcgtacaatctgcatctgttgggtggtgctccgatcgtaatggctacggtgggccaagatttcggtccgtatcgcgagcacttcgaaactctgggcattgacttatcccgcgtcaagatcatcgatgatctgagtacaccgcaggccttcattaccaccgaccatgatcataaccagattacggcgtttcatccaggcgcaatgatgcgttcgtacgaaaatcacgttcgtgatgtgccgggtgttaccttgggcctcgtagctcctgatggacgcgagggcatgatccaaaatgccgaagaatttgctgctggtggcattccgttcatttttgacccaggtcaggcactgccgctgttcaacggccccgaactgcgcgagtttatcgaacaggcggactatgtggtggtcaacgattacgaaagcaatcttcttcaaacgcgtactggctggaacgagcaggacattgtttcacgcgtgcaggcgtatatcaccacgcaaggttcgaaaggagccctggtacatacaccggagaagacctacgatattccgccggcacacgaacgtcgtgtcgttgatccaactggttgcggcgacgcgtttcgcgccggcctgatctatggtattcagcataattatgattggttgaccattggccgcatgggaaacttaatgggtgcgctgaaagtggaacaccctggcacgcaaaatcagcgtttcgattttgccgaattcaacgaccagttcaaacaatattttggctacgcgctctaatga

SEQ ID NO: 732 - protein, 321 aa, synthetic construct
  REGION 1..321: note = Variant of adenosine kinase
MHHHHHHGGSGMSALICGSLAYDTIMVFPDQFKNHILPDRVHRLNVSFLVPRMRREFGGCAGNIAYNLHLLGGAPIVMATVGQDFGPYREHFETLGIDLSRVKIIDDLSTPQAFITTDHDHNQITAFHPGAMMRSYENHVRDVPGVTLGLVAPDGREGMIQNAEEFAAGGIPFIFDPGQALPLFNGPELREFIEQADYVVVNDYESNLLQTRTGWNEQDIVSRVQAYITTQGSKGALVHTPEKTYDIPPAHERRVVDPTGCGDAFRAGLIYGIQHNYDWLTIGRMGNLMGALKVEHPGTQNQRFDFAEFNDQFKQYFGYAL

SEQ ID NO: 733 - DNA, 969 bp, synthetic construct
  misc_feature 1..969: note = Variant of adenosine kinase
  source 1..969: mol_type = other DNA
atgcaccatcatcaccatcacgggggctccggcatgagtgcactgatttgcggttctttagcgtatgataccatcatggtgtttccggaccagttcaagaaccatattctgcccgatcgtgttcaccgcctcaatgtcagctttcttgtaccacgcatgcgtcgtgaatttggaggctgtgccggcaacattgcgtacaatctgcatctgttgggtggtgctccgatcgtaatggctacggtgggccaagatttcggtccgtatcgcgagcacttcgaaactctgggcattgacttatcccgcgtcaagatcatcgatgatctgagtacaccgcaggccttcattaccaccgaccatgatcataaccagattacggcgtttcatccaggcgcaatgatgcgttcgtacgaaaatcacgttcgtgatgtgccgggtgttaccttgggcctcgtaggtcctgatggacgcgagggcatgatccaaaatgccgaagaatttgctgctggtggcattccgttcatttttgacccaggtcaggcactgccgctgttcaacggccccgaactgcgcgagtttatcgaacaggcggactatgtggtggtcaacgattacgaaagcaatcttcttcaaacgcgtactggctggaacgagcaggacattgtttcacgcgtgcaggcgtatatcaccacgcaaggttcgatgggagccctggtacatacaccggagaagacctacgatattccgccggcacacgaacgtcgtgtcgttgatccaactggttgcggcgacgcgtttcgcgccggcctgatctatggtattcagcataattatgattggttgaccattggccgcatgggaaacttaatgggtgcgctgaaagtggaacaccctggcacgcaaaatcagcgtttcgattttgccgaattcaacgaccagttcaaacaatattttggctacgcgctctaatga

SEQ ID NO: 734 - protein, 321 aa, synthetic construct
  REGION 1..321: note = Variant of adenosine kinase
MHHHHHHGGSGMSALICGSLAYDTIMVFPDQFKNHILPDRVHRLNVSFLVPRMRREFGGCAGNIAYNLHLLGGAPIVMATVGQDFGPYREHFETLGIDLSRVKIIDDLSTPQAFITTDHDHNQITAFHPGAMMRSYENHVRDVPGVTLGLVGPDGREGMIQNAEEFAAGGIPFIFDPGQALPLFNGPELREFIEQADYVVVNDYESNLLQTRTGWNEQDIVSRVQAYITTQGSMGALVHTPEKTYDIPPAHERRVVDPTGCGDAFRAGLIYGIQHNYDWLTIGRMGNLMGALKVEHPGTQNQRFDFAEFNDQFKQYFGYAL

SEQ ID NO: 735 - DNA, 969 bp, synthetic construct
  misc_feature 1..969: note = Variant of adenosine kinase
  source 1..969: mol_type = other DNA
atgcaccatcatcaccatcacgggggctccggcatgagtgcactgatttgcggttctttagcgtatgataccatcatggtgtttccggaccagttcaagaaccatattctgcccgatcgtgttcaccgcctcaatgtcagctttcttgtaccacgcatgcgtcgtgaatttggaggctgtgccggcaacattgcgtacaatctgcatctgttgggtggtgctccgatcgtaatggctacggtgggccaagatttcggtccgtatcgcgagcacttcgaaactctgggcattgacttatcccgcgtcaagatcatcgatgatctgagtacaccgcaggccttcattaccaccgaccatgatcataaccagattacggcgtttcatccaggcgcaatgatgcgttcgtacgaaaatcacgttcgtgatgtgccgggtgttaccttgggcctcgtaggtcctgatggacgcgagggcatgatccaaaatgccgaagaatttgctgctggtggcattccgttcatttttgacgtgggtcaggcactgccgctgttcaacggccccgaactgcgcgagtttatcgaacaggcggactatgtggtggtcaacgattacgaaagcaatcttcttcaaacgcgtactggctggaacgagcaggacattgtttcacgcgtgcaggcgtatatcaccacgcaaggttcgaaaggagccctggtacatacaccggagaagacctacgatattccgccggcacacgaacgtcgtgtcgttgatccaactggttgcggcgacgcgtttcgcgccggcctgatctatggtattcagcataattatgattggttgaccattggccgcatgggaaacttaatgggtgcgctgaaagtggaacaccctggcacgcaaaatcagcgtttcgattttgccgaattcaacgaccagttcaaacaatattttggctacgcgctctaatga

SEQ ID NO: 736 - protein, 321 aa, synthetic construct
  REGION 1..321: note = Variant of adenosine kinase
MHHHHHHGGSGMSALICGSLAYDTIMVFPDQFKNHILPDRVHRLNVSFLVPRMRREFGGCAGNIAYNLHLLGGAPIVMATVGQDFGPYREHFETLGIDLSRVKIIDDLSTPQAFITTDHDHNQITAFHPGAMMRSYENHVRDVPGVTLGLVGPDGREGMIQNAEEFAAGGIPFIFDVGQALPLFNGPELREFIEQADYVVVNDYESNLLQTRTGWNEQDIVSRVQAYITTQGSKGALVHTPEKTYDIPPAHERRVVDPTGCGDAFRAGLIYGIQHNYDWLTIGRMGNLMGALKVEHPGTQNQRFDFAEFNDQFKQYFGYAL

SEQ ID NO: 737 - DNA, 969 bp, synthetic construct
  misc_feature 1..969: note = Variant of adenosine kinase
  source 1..969: mol_type = other DNA
atgcaccatcatcaccatcacgggggctccggcatgagtgcactgatttgcggttctttagcgtatgataccatcatggtgtttccggaccagttcaagaaccatattctgcccgatcgtgttcaccgcctcaatgtcagctttcttgtaccacgcatgcgtcgtgaatttggaggctgtgccggcaacattgcgtacaatctgcatctgttgggtggtgctccgatcgtaatggctacggtgggccaagatttcggtccgtatcgcgagcacttcgaaactctgggcattgacttatcccgcgtcaagatcatcgatgatctgagtacaccgcaggccttcattaccaccgaccatgatcataaccagattacggcgtttcatccaggcgcaatgatgcgttcgtacgaaaatcacgttcgtgatgtgccgggtgttaccttgggcctcgtaggtcctgatggacgcgagggcatgatccaaaatgccgaagaatttgctgctggtggcattccgttcatttttgacccaggtcaggcactgccgctgttcaacggccccgaactgcgcgagtttatcgaacaggcggactatgtggtggtcaacgattacgaaagcaatcttcttcaaacgcgtactggctggaacgagcaggacattgtttcacgcgtgcaggcgtatatcaccacgcaatcttcgaaaggagccctggtacatacaccggagaagacctacgatattccgccggcacacgaacgtcgtgtcgttgatccaactggttgcggcgacgcgtttcgcgccggcctgatctatggtattcagcataattatgattggttgaccattggccgcatgggaaacttaatgggtgcgctgaaagtggaacaccctggcacgcaaaatcagcgtttcgattttgccgaattcaacgaccagttcaaacaatattttggctacgcgctctaatga

SEQ ID NO: 738 - protein, 321 aa, synthetic construct
  REGION 1..321: note = Variant of adenosine kinase
MHHHHHHGGSGMSALICGSLAYDTIMVFPDQFKNHILPDRVHRLNVSFLVPRMRREFGGCAGNIAYNLHLLGGAPIVMATVGQDFGPYREHFETLGIDLSRVKIIDDLSTPQAFITTDHDHNQITAFHPGAMMRSYENHVRDVPGVTLGLVGPDGREGMIQNAEEFAAGGIPFIFDPGQALPLFNGPELREFIEQADYVVVNDYESNLLQTRTGWNEQDIVSRVQAYITTQSSKGALVHTPEKTYDIPPAHERRVVDPTGCGDAFRAGLIYGIQHNYDWLTIGRMGNLMGALKVEHPGTQNQRFDFAEFNDQFKQYFGYAL

SEQ ID NO: 739 - DNA, 969 bp, synthetic construct
  misc_feature 1..969: note = Variant of adenosine kinase
  source 1..969: mol_type = other DNA
atgcaccatcatcaccatcacgggggctccggcatgagtgcactgatttgcggttctttagcgtatgataccatcatggtgtttccggaccagttcaagaaccatattctgcccgatcgtgttcaccgcctcaatgtcagctttcttgtaccacgcatgcgtcgtgaatttggaggctgtgccggcaacattgcgtacaatctgcatctgttgggtggtgctccgatcgtaatggctacggtgggccaagatttcggtccgtatcgcgagcacttcgaaactctgggcattgacttatcccgcgtcaagatcatcgatgatctgagtacaccgcaggccttcattaccaccgaccattgtcataaccagattacggcgtttcatccaggcgcaatgatgcgttcgtacgaaaatcacgttcgtgatgtgccgggtgttaccttgggcctcgtaggtcctgatggacgcgagggcatgatccaaaatgccgaagaatttgctgctggtggcattccgttcatttttgacccaggtcaggcactgccgctgttcaacggccccgaactgcgcgagtttatcgaacaggcggactatgtggtggtcaacgattacgaaagcaatcttcttcaaacgcgtactggctggaacgagcaggacattgtttcacgcgtgcaggcgtatatcaccacgcaaggttcgaaaggagccctggtacatacaccggagaagacctacgatattccgccggcacacgaacgtcgtgtcgttgatccaactggttgcggcgacgcgtttcgcgccggcctgatctatggtattcagcataattatgattggttgaccattggccgcatgggaaacttaatgggtgcgctgaaagtggaacaccctggcacgcaaaatcagcgtttcgattttgccgaattcaacgaccagttcaaacaatattttggctacgcgctctaatga

SEQ ID NO: 740 - protein, 321 aa, synthetic construct
  REGION 1..321: note = Variant of adenosine kinase
MHHHHHHGGSGMSALICGSLAYDTIMVFPDQFKNHILPDRVHRLNVSFLVPRMRREFGGCAGNIAYNLHLLGGAPIVMATVGQDFGPYREHFETLGIDLSRVKIIDDLSTPQAFITTDHCHNQITAFHPGAMMRSYENHVRDVPGVTLGLVGPDGREGMIQNAEEFAAGGIPFIFDPGQALPLFNGPELREFIEQADYVVVNDYESNLLQTRTGWNEQDIVSRVQAYITTQGSKGALVHTPEKTYDIPPAHERRVVDPTGCGDAFRAGLIYGIQHNYDWLTIGRMGNLMGALKVEHPGTQNQRFDFAEFNDQFKQYFGYAL

SEQ ID NO: 741 - DNA, 969 bp, synthetic construct
  misc_feature 1..969: note = Variant of adenosine kinase
  source 1..969: mol_type = other DNA
atgcaccatcatcaccatcacgggggctccggcatgagtgcactgatttgcggttctttagcgtatgataccatcatggtgtttccggactttttcaagaaccatattctgcccgatcgtgttcaccgcctcaatgtcagctttcttgtaccacgcatgcgtcgtgaatttggaggctgtgccggcaacattgcgtacaatctgcatctgttgggtggtgctccgatcgtaatggctacggtgggccaagatttcggtccgtatcgcgagcacttcgaaactctgggcattgacttatcccgcgtcaagatcatcgatgatctgagtacaccgcaggccttcattaccaccgaccatgatcataaccagattacggcgtttcatccaggcgcaatgatgcgttcgtacgaaaatcacgttcgtgatgtgccgggtgttaccttgggcctcgtaggtcctgatggacgcgagggcatgatccaaaatgccgaagaatttgctgctggtggcattccgttcatttttgacccaggtcaggcactgccgctgttcaacggccccgaactgcgcgagtttatcgaacaggcggactatgtggtggtcaacgattacgaaagcaatcttcttcaaacgcgtactggctggaacgagcaggacattgtttcacgcgtgcaggcgtatatcaccacgcaaggttcgaaaggagccctggtacatacaccggagaagacctacgatattccgccggcacacgaacgtcgtgtcgttgatccaactggttgcggcgacgcgtttcgcgccggcctgatctatggtattcagcataattatgattggttgaccattggccgcatgggaaacttaatgggtgcgctgaaagtggaacaccctggcacgcaaaatcagcgtttcgattttgccgaattcaacgaccagttcaaacaatattttggctacgcgctctaatga

SEQ ID NO: 742 - protein, 321 aa, synthetic construct
  REGION 1..321: note = Variant of adenosine kinase
MHHHHHHGGSGMSALICGSLAYDTIMVFPDFFKNHILPDRVHRLNVSFLVPRMRREFGGCAGNIAYNLHLLGGAPIVMATVGQDFGPYREHFETLGIDLSRVKIIDDLSTPQAFITTDHDHNQITAFHPGAMMRSYENHVRDVPGVTLGLVGPDGREGMIQNAEEFAAGGIPFIFDPGQALPLFNGPELREFIEQADYVVVNDYESNLLQTRTGWNEQDIVSRVQAYITTQGSKGALVHTPEKTYDIPPAHERRVVDPTGCGDAFRAGLIYGIQHNYDWLTIGRMGNLMGALKVEHPGTQNQRFDFAEFNDQFKQYFGYAL

SEQ ID NO: 743 - DNA, 969 bp, synthetic construct
  misc_feature 1..969: note = Variant of adenosine kinase
  source 1..969: mol_type = other DNA
atgcaccatcatcaccatcacgggggctccggcatgagtgcactgatttgcggttctttagcgtatgataccatcatggtgtttccggaccagttcaagaaccatattctgcccgatcgtgttcaccgcctcaatgtcagctttcttgtaccacgcatgcgtcgtgaatttggaggctgtgccggcaacattgcgtacaatctgcatctgttgggtggtgctccgatcgtaatggctacggtgggccaagatttcggtccgtatcgcgagcacttcgaaactctgggcattgacttatcccgcgtcaagatcatcgatgatctgagtacaccgcaggccttcattaccaccgaccatgatcataaccagattacggcgtttcatccaggcgcaatgatgcgttcgtacgaaaatcacgttcgtgatgtgccgggtgttaccttgggcctcgtaggtcctgatggacgcgagggcatgatccaaaatgccgaagaatttgctgctggtggcattccgttcatttttgacccaggtcaggcactgccgatgttcaacggccccgaactgcgcgagtttatcgaacaggcggactatgtggtggtcaacgattacgaaagcaatcttcttcaaacgcgtactggctggaacgagcaggacattgtttcacgcgtgcaggcgtatatcaccacgcaaggttcgaaaggagccctggtacatacaccggagaagacctacgatattccgccggcacacgaacgtcgtgtcgttgatccaactggttgcggcgacgcgtttcgcgccggcctgatctatggtattcagcataattatgattggttgaccattggccgcatgggaaacttaatgggtgcgctgaaagtggaacaccctggcacgcaaaatcagcgtttcgattttgccgaattcaacgaccagttcaaacaatattttggctacgcgctctaatga

SEQ ID NO: 744 - protein, 321 aa, synthetic construct
  REGION 1..321: note = Variant of adenosine kinase
MHHHHHHGGSGMSALICGSLAYDTIMVFPDQFKNHILPDRVHRLNVSFLVPRMRREFGGCAGNIAYNLHLLGGAPIVMATVGQDFGPYREHFETLGIDLSRVKIIDDLSTPQAFITTDHDHNQITAFHPGAMMRSYENHVRDVPGVTLGLVGPDGREGMIQNAEEFAAGGIPFIFDPGQALPMFNGPELREFIEQADYVVVNDYESNLLQTRTGWNEQDIVSRVQAYITTQGSKGALVHTPEKTYDIPPAHERRVVDPTGCGDAFRAGLIYGIQHNYDWLTIGRMGNLMGALKVEHPGTQNQRFDFAEFNDQFKQYFGYAL

SEQ ID NO: 745 - DNA, 969 bp, synthetic construct
  misc_feature 1..969: note = Variant of adenosine kinase
  source 1..969: mol_type = other DNA
atgcaccatcatcaccatcacgggggctccggcatgagtgcactgatttgcggttctttagcgtatgataccatcatggtgtttccggaccagttcaagaaccatattctgcccgatcgtgttcaccgcctcaatgtcagctttcttgtaccacgcatgcgtcgtgaatttggaggctgtgccggcaacattgcgtacaatctgcatctgttgggtggtgctccgatcgtaatggctacggtgggccaagatttcggtccgtatcgcgagcacttcgaaactctgggcattgacttatcccgcgtcaagatcatcgatgatctgagtacaccgcaggccttcattaccaccgaccacgatcataaccagattacggcgtttcatccaggcgcaatgatgcgttcgtacgaaaatcacgttcgtgatgtgccgggtgttaccttgggcctcgtaggtcctgatggacgcgagggcatgatccaaaatgccgaagaatttgctgctggtggcattccgttcatttttgacccaggtcaggcactgccgctgttcaacggccccgaactgcgcgagtttatcgaacaggcggactatgtggtggtcaacgattacgaaagcaatcttcttcaaacgcgtactggctggaacgagcaggacattgtttcacgcgtgcaggcgtatatcaccacgcaaggttcggctggagccctggtacatacaccggagaagacctacgatattccgccggctcacacccgtcgtgtcgttgatccaactggttgcggcgacgcgtttcgcgccggcctgatctatggtattcagcataattatgattggttgaccattggccgcatgggaaacttaatgggtgcgctgaaagtggaacaccctggcacgcaaaatcagcgtttcgattttgccgaattcaacgaccagttcaaacaatattttggctacgcgctctaatga

SEQ ID NO: 746 - protein, 321 aa, synthetic construct
  REGION 1..321: note = Variant of adenosine kinase
MHHHHHHGGSGMSALICGSLAYDTIMVFPDQFKNHILPDRVHRLNVSFLVPRMRREFGGCAGNIAYNLHLLGGAPIVMATVGQDFGPYREHFETLGIDLSRVKIIDDLSTPQAFITTDHDHNQITAFHPGAMMRSYENHVRDVPGVTLGLVGPDGREGMIQNAEEFAAGGIPFIFDPGQALPLFNGPELREFIEQADYVVVNDYESNLLQTRTGWNEQDIVSRVQAYITTQGSAGALVHTPEKTYDIPPAHTRRVVDPTGCGDAFRAGLIYGIQHNYDWLTIGRMGNLMGALKVEHPGTQNQRFDFAEFNDQFKQYFGYAL

SEQ ID NO: 747 - DNA, 969 bp, synthetic construct
  misc_feature 1..969: note = Variant of adenosine kinase
  source 1..969: mol_type = other DNA
atgcaccatcatcaccatcacgggggctccggcatgagtgcactgatttgcggttctttagcgtatgataccatcatggtgtttccggaccagttcaagaaccatattctgcccgatcgtgttcaccgcctcaatgtcagctttcttgtaccacgcatgcgtcgtgaatttggaggctgtgccggcaacattgcgtacaatctgcatctgttgggtggtgctccgatcgtaatggctacggtgggccaagatttcggtccgtatcgcgagcacttcgaaactctgggcattgacttatcccgcgtcaagatcatcgatgatctgagtacaccgcaggccttcattaccaccgaccacgatcataaccagattacggcgtttcatccaggcgcaatgatgcgttcgtacgaaaatcacgttcgtgatgtgccgggtgttaccttgggcctcgtaggtcctgatggacgcgagggcatgatccaaaatgccgaagaatttgctgctggtggcattccgttcatttttgacccaggtcaggcagtgccgctgttcaacggccccgaactgcgcgagtttatcgaacaggcggactatgtggtggtcaacgattacgaaagcaatcttcttcaaacgcgtactggctggaacgagcaggacattgtttcacgcgtgcaggcgtatatcaccacgcaaggttcgaaaggagccctggtacatacaccggagaagacctacgatattccgccgattcacacccgtcgtgtcgttgatccaactggttgcggagacgcgtttcgcgccggcctgatctatggtattcagcataattatgattggttgaccattggccgcatgggaaacttaatgggtgcgctgaaagtggaacaccctggcagccaaaatcagcgtttcgattttgccgaattcaacgaccagttcaaacaatattttggctacgcgctctaatga

SEQ ID NO: 748 - protein, 321 aa, synthetic construct
  REGION 1..321: note = Variant of adenosine kinase
MHHHHHHGGSGMSALICGSLAYDTIMVFPDQFKNHILPDRVHRLNVSFLVPRMRREFGGCAGNIAYNLHLLGGAPIVMATVGQDFGPYREHFETLGIDLSRVKIIDDLSTPQAFITTDHDHNQITAFHPGAMMRSYENHVRDVPGVTLGLVGPDGREGMIQNAEEFAAGGIPFIFDPGQAVPLFNGPELREFIEQADYVVVNDYESNLLQTRTGWNEQDIVSRVQAYITTQGSKGALVHTPEKTYDIPPIHTRRVVDPTGCGDAFRAGLIYGIQHNYDWLTIGRMGNLMGALKVEHPGSQNQRFDFAEFNDQFKQYFGYAL

SEQ ID NO: 749 - DNA, 969 bp, synthetic construct
  misc_feature 1..969: note = Variant of adenosine kinase
  source 1..969: mol_type = other DNA
atgcaccatcatcaccatcacgggggctccggcatgagtgcactgatttgcggttctttagcgtatgataccatcatggtgtttccggaccagttcaagaaccatattctgcccgatcgtgttcaccgcctcaatgtcagctttcttgtaccacgcatgcgtcgtgaatttggaggctgtgccggcaacattgcgtacaatctgcatctgttgggtggtgctccgatcgtaatggctacggtgggccaagatttcggtccgtatcgcgagcacttcgaaactctgggcattgacttatcccgcgtcaagatcatcgatgatctgagtacaccgcaggccttcattaccaccgaccgcgatcataaccagattacggcgtttcatccaggcgcaatgatgcgttcgtacgaaaatcacgttcgtgatgtgccgggtgttaccttgggcctcgtaggtcctgatggacgcgagggcatgatccaaaatgccgaagaatttgctgctggtggcattccgttcatttttgacccaggtcaggcagtgccgctgttcaacggccccgaactgcgcgagtttatcgaacaggcggactatgtggtggtcaacgattacgaaagcaatcttcttcaaacgcgtactggctggaacgagcaggacattgtttcacgcgtgcaggcgtatatcaccacgcaaggttcggctggagccctggtacatacaccggagaagacctacgatattccgccgattcacgaacgtcgtgtcgttgatccaactggttgcggcgacgcgtttcgcgccggcctgatctatggtattcagcataattatgattggttgaccattggccgcatgggaaacttaatgggtgcgctgaaagtggaacaccctggcagccaaaatcagcgtttcgattttgccgaattcaacgaccagttcaaacaatattttggctacgcgctctaatga

SEQ ID NO: 750 - protein, 321 aa, synthetic construct
  REGION 1..321: note = Variant of adenosine kinase
MHHHHHHGGSGMSALICGSLAYDTIMVFPDQFKNHILPDRVHRLNVSFLVPRMRREFGGCAGNIAYNLHLLGGAPIVMATVGQDFGPYREHFETLGIDLSRVKIIDDLSTPQAFITTDRDHNQITAFHPGAMMRSYENHVRDVPGVTLGLVGPDGREGMIQNAEEFAAGGIPFIFDPGQAVPLFNGPELREFIEQADYVVVNDYESNLLQTRTGWNEQDIVSRVQAYITTQGSAGALVHTPEKTYDIPPIHERRVVDPTGCGDAFRAGLIYGIQHNYDWLTIGRMGNLMGALKVEHPGSQNQRFDFAEFNDQFKQYFGYAL

SEQ ID NO: 751 - DNA, 969 bp, synthetic construct
  misc_feature 1..969: note = Variant of adenosine kinase
  source 1..969: mol_type = other DNA
atgcaccatcatcaccatcacgggggctccggcatgagtgcactgatttgcggttctttagcgtatgataccatcatggtgtttccggaccagttcaagaaccatattctgcccgatcgtgttcaccgcctcaatgtcagctttcttgtaccacgcatgcgtcgtgaatttggaggctgtgccggcaacattgcgtacaatctgcatctgttgggtggtgctccgatcgtaatggctacggtgggccaagatttcggtccgtatcgcgagcacttcgaaactctgggcattgacttatcccgcgtcaagatcatcgatgatctgagtacaccgcaggccttcattaccaccgaccacgatcataaccagattacggcgtttcatggcggcgcaatgatgcgttcgtacgaaaatcacgttcgtgatgtgccgggtgttaccttgggcctcgtaggtcctgatggacgcgagggcatgatccaaaatgccgaagaatttgctgctggtggcattccgttcatttttgacccaggtcaggcactgccgctgttcaacggccccgaactgcgcgagtttatcgaacaggcggactatgtggtggtcaacgattacgaaagcaatcttcttcaaacgcgtactggctggaacgagcaggacattgtttcacgcgtgcaggcgtatatcaccacgcaaggttcggctggagccctggtacatacaccggagaagacctacgatattccgccggctcacacccgtcgtgtcgttgatccaactggttgcggcgacgcgtttcgcgccggcctgatctatggtattcagcataattatgattggttgaccattggccgcatgggaaacttaatgggtgcgctgaaagtggaacaccctggcacgcaaaatcagcgtttcgattttgccgaattcaacgaccagttcaaacaatattttggctacgcgctctaatga

SEQ ID NO: 752 - protein, 321 aa, synthetic construct
  REGION 1..321: note = Variant of adenosine kinase
MHHHHHHGGSGMSALICGSLAYDTIMVFPDQFKNHILPDRVHRLNVSFLVPRMRREFGGCAGNIAYNLHLLGGAPIVMATVGQDFGPYREHFETLGIDLSRVKIIDDLSTPQAFITTDHDHNQITAFHGGAMMRSYENHVRDVPGVTLGLVGPDGREGMIQNAEEFAAGGIPFIFDPGQALPLFNGPELREFIEQADYVVVNDYESNLLQTRTGWNEQDIVSRVQAYITTQGSAGALVHTPEKTYDIPPAHTRRVVDPTGCGDAFRAGLIYGIQHNYDWLTIGRMGNLMGALKVEHPGTQNQRFDFAEFNDQFKQYFGYAL

SEQ ID NO: 753 - DNA, 969 bp, synthetic construct
  misc_feature 1..969: note = Variant of adenosine kinase
  source 1..969: mol_type = other DNA
atgcaccatcatcaccatcacgggggctccggcatgagtgcactgatttgcggttctttagcgtatgataccatcatggtgtttccggaccagttcaagaaccatattctgcccgatcgtgttcaccgcctcaatgtcagctttcttgtaccacgcatgcgtcgtgaatttggaggctgtgccggcaacattgcgtacaatctgcatctgttgggtggtgctccgatcgtaatggctacggtgggccaagatttcggtccgtatcgcgagcacttcgaaactctgggcattgacttatcccgcgtcaagatcatcgatgatctgagtacaccgcaggccttcattaccaccgacatggatcataaccagattacggcgtttcatggcggcgcaatgatgcgttcgtacgaaaatcacgttcgtgatgtgccgggtgttaccttgggcctcgtaggtcctgatggacgcgagggcatgatccaaaatgccgaagaatttgctgctggtggcattccgttcatttttgacccaggtcaggcactgccgctgttcaacggccccgaactgcgcgagtttatcgaacaggcggactatgtggtggtcaacgattacgaaagcaatcttcttcaaacgcgtactggctggaacgagcaggacattgtttcacgcgtgcaggcgtatatcaccacgcaaggttcggctggagccctggtacatacaccggagaagacctacgatattccgccggcacacgaacgtcgtgtcgttgatccaactggttgcggcgacgcgtttcgcgccggcctgatctatggtattcagcataattatgattggttgaccattggccgcatgggaaacttaatgggtgcgctgaaagtggaacaccctggcacccaaaatcagcgtttcgattttgccgaattcaacgaccagttcaaacaatattttggctacgcgctctaatga

SEQ ID NO: 754 - protein, 321 aa, synthetic construct
  REGION 1..321: note = Variant of adenosine kinase
MHHHHHHGGSGMSALICGSLAYDTIMVFPDQFKNHILPDRVHRLNVSFLVPRMRREFGGCAGNIAYNLHLLGGAPIVMATVGQDFGPYREHFETLGIDLSRVKIIDDLSTPQAFITTDMDHNQITAFHGGAMMRSYENHVRDVPGVTLGLVGPDGREGMIQNAEEFAAGGIPFIFDPGQALPLFNGPELREFIEQADYVVVNDYESNLLQTRTGWNEQDIVSRVQAYITTQGSAGALVHTPEKTYDIPPAHERRVVDPTGCGDAFRAGLIYGIQHNYDWLTIGRMGNLMGALKVEHPGTQNQRFDFAEFNDQFKQYFGYAL

SEQ ID NO: 755 - DNA, 969 bp, synthetic construct
  misc_feature 1..969: note = Variant of adenosine kinase
  source 1..969: mol_type = other DNA
atgcaccatcatcaccatcacgggggctccggcatgagtgcactgatttgcggttctttagcgtatgataccatcatggtgtttccggaccagttcaagaaccatattctgcccgatcgtgttcaccgcctcaatgtcagctttcttgtaccacgcatgcgtcgtgaatttggaggctgtgccggcaacattgcgtacaatctgcatctgttgggtggtgctccgatcgtaatggctacggtgggccaagatttcggtccgtatcgcgagcacttcgaaactctgggcattgacttatcccgcgtcaagatcatcgatgatctgagtacaccgcaggccttcattaccaccgacatggatcataaccagattacggcgtttcatccaggcgcaatgatgcgttcgtacgaaaatcacgttcgtgatgtgccgggtgttaccttgggcctcgtaggtcctgatggacgcgagggcatgatccaaaatgccgaagaatttgctgctggtggcattccgttcatttttgacccaggtcaggcagtgccgctgttcaacggccccgaactgcgcgagtttatcgaacaggcggactatgtggtggtcaacgattacgaaagcaatcttcttcaaacgcgtactggctggaacgagcaggacattgtttcacgcgtgcaggcgtatatcaccacgcaaggttcggctggagccctggtacatacaccggagaagacctacgatattccgccgattcacgaacgtcgtgtgatggatccaactggttgcggcgacgcgtttcgcgccggcctgatctatggtattcagcataattatgattggttgaccattggccgcatgggaaacttaatgggtgcgctgaaagtggaacaccctggcagccaaaatcagcgtttcgattttgccgaattcaacgaccagttcaaacaatattttggctacgcgctctaatga

SEQ ID NO: 756 - protein, 321 aa, synthetic construct
  REGION 1..321: note = Variant of adenosine kinase
MHHHHHHGGSGMSALICGSLAYDTIMVFPDQFKNHILPDRVHRLNVSFLVPRMRREFGGCAGNIAYNLHLLGGAPIVMATVGQDFGPYREHFETLGIDLSRVKIIDDLSTPQAFITTDMDHNQITAFHPGAMMRSYENHVRDVPGVTLGLVGPDGREGMIQNAEEFAAGGIPFIFDPGQAVPLFNGPELREFIEQADYVVVNDYESNLLQTRTGWNEQDIVSRVQAYITTQGSAGALVHTPEKTYDIPPIHERRVMDPTGCGDAFRAGLIYGIQHNYDWLTIGRMGNLMGALKVEHPGSQNQRFDFAEFNDQFKQYFGYAL

SEQ ID NO: 757 - DNA, 969 bp, synthetic construct
  misc_feature 1..969: note = Variant of adenosine kinase
  source 1..969: mol_type = other DNA
atgcaccatcatcaccatcacgggggctccggcatgagtgcactgatttgcggttctttagcgtatgataccatcatggtgtttccggaccagttcaagaaccatattctgcccgatcgtgttcaccgcctcaatgtcagctttcttgtaccacgcatgcgtcgtgaatttggaggctgtgccggcaacattgcgtacaatctgcatctgttgggtggtgctccgatcgtaatggctacggtgggccaagatttcggtccgtatcgcgagcacttcgaaactctgggcattgacttatcccgcgtcaagatcatcgatgatctgagtacaccgcaggccttcattaccaccgaccgcgatcataaccagattacggcgtttcatccaggcgcaatgatgcgttcgtacgaaaatcacgttcgtgatgtgccgggtgttaccttgggcctcgtaggtcctgatggacgcgagggcatgatccaaaatgccgaagaatttgctgctggtggcattccgttcatttttgacccaggtcaggcagtgccgctgttcaacggccccgaactgcgcgagtttatcgaacaggcggactatgtggtggtcaacgattacgaaagcaatcttcttcaaacgcgtactggctggaacgagcaggacattgtttcacgcgtgcaggcgtatatcaccacgcaaggttcgaaaggagccctggtacatacaccggagaagacctacgatattccgccgattcacacccgtcgtgtcgttgatccaactggttgcggcgacgcgtttcgcgccggcctgatctatggtattcagcataattatgattggttgaccattggccgcatgggaaacttaatgggtgcgctgaaagtggaacaccctggcacccaaaatcagcgtttcgattttgccgaattcaacgaccagttcaaacaatattttggctacgcgctctaatga

SEQ ID NO: 758 - protein, 321 aa, synthetic construct
  REGION 1..321: note = Variant of adenosine kinase
MHHHHHHGGSGMSALICGSLAYDTIMVFPDQFKNHILPDRVHRLNVSFLVPRMRREFGGCAGNIAYNLHLLGGAPIVMATVGQDFGPYREHFETLGIDLSRVKIIDDLSTPQAFITTDRDHNQITAFHPGAMMRSYENHVRDVPGVTLGLVGPDGREGMIQNAEEFAAGGIPFIFDPGQAVPLFNGPELREFIEQADYVVVNDYESNLLQTRTGWNEQDIVSRVQAYITTQGSKGALVHTPEKTYDIPPIHTRRVVDPTGCGDAFRAGLIYGIQHNYDWLTIGRMGNLMGALKVEHPGTQNQRFDFAEFNDQFKQYFGYAL

SEQ ID NO: 759 - DNA, 969 bp, synthetic construct
  misc_feature 1..969: note = Variant of adenosine kinase
  source 1..969: mol_type = other DNA
atgcaccatcatcaccatcacgggggctccggcatgagtgcactgatttgcggttctttagcgtatgataccatcatggtgtttccggaccagttcaagaaccatattctgcccgatcgtgttcaccgcctcaatgtcagctttcttgtaccacgcatgcgtcgtgaatttggaggctgtgccggcaacattgcgtacaatctgcatctgttgggtggtgctccgatcgtaatggctacggtgggccaagatttcggtccgtatcgcgagcacttcgaaactctgggcattgacttatcccgcgtcaagatcatcgatgatctgagtacaccgcaggccttcattaccaccgacatggatcataaccagattacggcgtttcatccaggcgcaatgatgcgttcgtacgaaaatcacgttcgtgatgtgccgggtgttaccttgggcctcgtaggtcctgatggacgcgagggcatgatccaaaatgccgaagaatttgctgctggtggcattccgttcatttttgacccaggtcaggcagtgccgctgttcaacggccccgaactgcgcgagtttatcgaacaggcggactatgtggtggtcaacgattacgaaagcaatcttcttcaaacgcgtactggctggaacgagcaggacattgtttcacgcgtgcaggcgtatatcaccacgcaaggttcggctggagccctggtacatacaccggagaagacctacgatattccgccggcacacgaacgtcgtgtcgttgatccaactggttgcggcgacgcgtttcgcgccggcctgatctatggtattcagcataattatgattggttgaccattggccgcatgggaaacttaatgggtgcgctgaaagtggaacaccctggcagccaaaatcagcgtttcgattttgccgaattcaacgaccagttcaaacaatattttggctacgcgctctaatga

SEQ ID NO: 760 - protein, 321 aa, synthetic construct
  REGION 1..321: note = Variant of adenosine kinase
MHHHHHHGGSGMSALICGSLAYDTIMVFPDQFKNHILPDRVHRLNVSFLVPRMRREFGGCAGNIAYNLHLLGGAPIVMATVGQDFGPYREHFETLGIDLSRVKIIDDLSTPQAFITTDMDHNQITAFHPGAMMRSYENHVRDVPGVTLGLVGPDGREGMIQNAEEFAAGGIPFIFDPGQAVPLFNGPELREFIEQADYVVVNDYESNLLQTRTGWNEQDIVSRVQAYITTQGSAGALVHTPEKTYDIPPAHERRVVDPTGCGDAFRAGLIYGIQHNYDWLTIGRMGNLMGALKVEHPGSQNQRFDFAEFNDQFKQYFGYAL

SEQ ID NO: 761 - DNA, 969 bp, synthetic construct
  misc_feature 1..969: note = Variant of adenosine kinase
  source 1..969: mol_type = other DNA
atgcaccatcatcaccatcacgggggctccggcatgagtgcactgatttgcggttctttagcgtatgataccatcatggtgtttccggaccagttcaagaaccatattctgcccgatcgtgttcaccgcctcaatgtcagctttcttgtaccacgcatgcgtcgtgaatttggaggctgtgccggcaacattgcgtacaatctgcatctgttgggtggtgctccgatcgtaatggctacggtgggccaagatttcggtccgtatcgcgagcacttcgaaactctgggcattgacttatcccgcgtcaagatcatcgatgatctgagtacaccgcaggccttcattaccaccgaccacgatcataaccagattacggcgtttcatccaggcgcaatgatgcgttcgtacgaaaatcacgttcgtgatgtgccgggtgttaccttgggcctcgtaggtcctgatggacgcgagggcatgatccaaaatgccgaagaatttgctgctggtggcattccgttcatttttgacccaggtcaggcactgccgctgttcaacggccccgaactgcgcgagtttatcgaacaggcggactatgtggtggtcaacgattacgaaagcaatcttcttcaaacgcgtactggctggaacgagcaggacattgtttcacgcgtgcaggcgtatatcaccacgcaaggttcggctggagccctggtacatacaccggagaagacctacgatattccgccgattcacacccgtcgtgtcgttgatccaactggttgcggcgacgcgtttcgcgccggcctgatctatggtattcagcataattatgattggttgaccattggccgcatgggaaacttaatgggtgcgctgaaagtggaacaccctggcacgcaaaatcagcgtttcgattttgccgaattcaacgaccagttcaaacaatattttggctacgcgctctaatga

SEQ ID NO: 762 - protein, 321 aa, synthetic construct
  REGION 1..321: note = Variant of adenosine kinase
MHHHHHHGGSGMSALICGSLAYDTIMVFPDQFKNHILPDRVHRLNVSFLVPRMRREFGGCAGNIAYNLHLLGGAPIVMATVGQDFGPYREHFETLGIDLSRVKIIDDLSTPQAFITTDHDHNQITAFHPGAMMRSYENHVRDVPGVTLGLVGPDGREGMIQNAEEFAAGGIPFIFDPGQALPLFNGPELREFIEQADYVVVNDYESNLLQTRTGWNEQDIVSRVQAYITTQGSAGALVHTPEKTYDIPPIHTRRVVDPTGCGDAFRAGLIYGIQHNYDWLTIGRMGNLMGALKVEHPGTQNQRFDFAEFNDQFKQYFGYAL

SEQ ID NO: 763 - DNA, 969 bp, synthetic construct
  misc_feature 1..969: note = Variant of adenosine kinase
  source 1..969: mol_type = other DNA
atgcaccatcatcaccatcacgggggctccggcatgagtgcactgatttgcggttctttagcgtatgataccatcatggtgtttccggaccagttcaagaaccatattctgcccgatcgtgttcaccgcctcaatgtcagctttcttgtaccacgcatgcgtcgtgaatttggaggctgtgccggcaacattgcgtacaatctgcatctgttgggtggtgctccgatcgtaatggctacggtgggccaagatttcggtccgtatcgcgagcacttcgaaactctgggcattgacttatcccgcgtcaagatcatcgatgatctgagtacaccgcaggccttcattaccaccgaccgcgatcataaccagattacggcgtttcatccaggcgcaatgatgcgttcgtacgaaaatcacgttcgtgatgtgccgggtgttaccttgggcctcgtaggtcctgatggacgcgagggcatgatccaaaatgccgaagaatttgctgctggtggcattccgttcatttttgacccaggtcaggcagtgccgctgttcaacggccccgaactgcgcgagtttatcgaacaggcggactatgtggtggtcaacgattacgaaagcaatcttcttcaaacgcgtactggctggaacgagcaggacattgtttcacgcgtgcaggcgtatatcaccacgcaaggttcgaaaggagccctggtacatacaccggagaagacctacgatattccgccggctcacacccgtcgtgtcgttgatccaactggttgcggcgacgcgtttcgcgccggcctgatctatggtattcagcataattatgattggttgaccattggccgcatgggaaacttaatgggtgcgctgaaagtggaacaccctggcagccaaaatcagcgtttcgattttgccgaattcaacgaccagttcaaacaatattttggctacgcgctctaatga

SEQ ID NO: 764 - protein, 321 aa, synthetic construct
  REGION 1..321: note = Variant of adenosine kinase
MHHHHHHGGSGMSALICGSLAYDTIMVFPDQFKNHILPDRVHRLNVSFLVPRMRREFGGCAGNIAYNLHLLGGAPIVMATVGQDFGPYREHFETLGIDLSRVKIIDDLSTPQAFITTDRDHNQITAFHPGAMMRSYENHVRDVPGVTLGLVGPDGREGMIQNAEEFAAGGIPFIFDPGQAVPLFNGPELREFIEQADYVVVNDYESNLLQTRTGWNEQDIVSRVQAYITTQGSKGALVHTPEKTYDIPPAHTRRVVDPTGCGDAFRAGLIYGIQHNYDWLTIGRMGNLMGALKVEHPGSQNQRFDFAEFNDQFKQYFGYAL

SEQ ID NO: 765 - DNA, 969 bp, synthetic construct
  misc_feature 1..969: note = Variant of adenosine kinase
  source 1..969: mol_type = other DNA
atgcaccatcatcaccatcacgggggctccggcatgagtgcactgatttgcggttctttagcgtatgataccatcatggtgtttccggaccagttcaagaaccatattctgcccgatcgtgttcaccgcctcaatgtcagctttcttgtaccacgcatgcgtcgtgaatttggaggctgtgccggcaacattgcgtacaatctgcatctgttgggtggtgctccgatcgtaatggctacggtgggccaagatttcggtccgtatcgcgagcacttcgaaactctgggcattgacttatcccgcgtcaagatcatcgatgatctgagtacaccgcaggccttcattaccaccgaccacgatcataaccagattacggcgtttcatggcggcgcaatgatgcgttcgtacgaaaatcacgttcgtgatgtgccgggtgttaccttgggcctcgtaggtcctgatggacgcgagggcatgatccaaaatgccgaagaatttgctgctggtggcattccgttcatttttgacccaggtcaggcagtgccgctgttcaacggccccgaactgcgcgagtttatcgaacaggcggactatgtggtggtcaacgattacgaaagcaatcttcttcaaacgcgtactggctggaacgagcaggacattgtttcacgcgtgcaggcgtatatcaccacgcaaggttcggctggagccctggtacatacaccggagaagacctacgatattccgccggctcacgaacgtcgtgtcgttgatccaactggttgcggcgacgcgtttcgcgccggcctgatctatggtattcagcataattatgattggttgaccattggccgcatgggaaacttaatgggtgcgctgaaagtggaacaccctggcagccaaaatcagcgtttcgattttgccgaattcaacgaccagttcaaacaatattttggctacgcgctctaatga

SEQ ID NO: 766 - protein, 321 aa, synthetic construct
  REGION 1..321: note = Variant of adenosine kinase
MHHHHHHGGSGMSALICGSLAYDTIMVFPDQFKNHILPDRVHRLNVSFLVPRMRREFGGCAGNIAYNLHLLGGAPIVMATVGQDFGPYREHFETLGIDLSRVKIIDDLSTPQAFITTDHDHNQITAFHGGAMMRSYENHVRDVPGVTLGLVGPDGREGMIQNAEEFAAGGIPFIFDPGQAVPLFNGPELREFIEQADYVVVNDYESNLLQTRTGWNEQDIVSRVQAYITTQGSAGALVHTPEKTYDIPPAHERRVVDPTGCGDAFRAGLIYGIQHNYDWLTIGRMGNLMGALKVEHPGSQNQRFDFAEFNDQFKQYFGYAL

SEQ ID NO: 767 - DNA, 969 bp, synthetic construct
  misc_feature 1..969: note = Variant of adenosine kinase
  source 1..969: mol_type = other DNA
atgcaccatcatcaccatcacgggggctccggcatgagtgcactgatttgcggttctctggcgtatgataccatcatggtgtttccggaccagttcaagaaccatattctgcccgatcgtgttcaccgcctcaatgtcagctttcttgtaccacgcatgcgtcgtgggtttggaggctgtgccggcaacattgcgtacaatctgcatctgttgggtggtgctccgatcgtaatggctacggtgggccaagatttcggtccgtatcgcgagcacttcgaaactctgggcattgacttatcccgcgtcaagatcatcgatgatctgagtacaccgcaggccttcattaccaccgaccatgatctgaaccagattacggcgtttcatccaggcgcaatgatgcgttcgtacgaaaatcacgttcgtgatgtgccgggtgttaccttgggcctcgtaggtcctgatggacgcgagggcatgatccaaaatgccgaagaatttgctgctggtggcattccgttcatttttgacccaggtcaggcactgccgctgttcaacggccccgaactgcgcgagtttatcgaacaggcggactatgtggtggtcaacgattacgaaagcaatcttcttcaaacgcgtactggctggaacgagcaggacattgtttcacgcgtgcaggcgtatatcgttacgcaaggttcgaaaggagccctggtacatacaccggagaagacctacgatattccgccggcacacgaacgtcgtgtcgttgatccaactggttgcggcgacgcgtttcgcgccggcctgatctatggtattcagcataattatgattggttgaccattggccgcatgggaaacttaatgggtgcgctgaaagtggaacaccctggcacgcaaaatcagcgtttcgattttgccgaattcaacgaccagttcaaacaatattttggctacgcgctctaatga

SEQ ID NO: 768 - protein, 321 aa, synthetic construct
  REGION 1..321: note = Variant of adenosine kinase
MHHHHHHGGSGMSALICGSLAYDTIMVFPDQFKNHILPDRVHRLNVSFLVPRMRRGFGGCAGNIAYNLHLLGGAPIVMATVGQDFGPYREHFETLGIDLSRVKIIDDLSTPQAFITTDHDLNQITAFHPGAMMRSYENHVRDVPGVTLGLVGPDGREGMIQNAEEFAAGGIPFIFDPGQALPLFNGPELREFIEQADYVVVNDYESNLLQTRTGWNEQDIVSRVQAYIVTQGSKGALVHTPEKTYDIPPAHERRVVDPTGCGDAFRAGLIYGIQHNYDWLTIGRMGNLMGALKVEHPGTQNQRFDFAEFNDQFKQYFGYAL

SEQ ID NO: 769 - DNA, 969 bp, synthetic construct
  misc_feature 1..969: note = Variant of adenosine kinase
  source 1..969: mol_type = other DNA
atgcaccatcatcaccatcacgggggctccggcatgagtgcactgatttgcggttctttagcgtatgataccatcatggtgtttccggaccagttcaagaaccatattctgcccgatcgtgttcaccgcctcaatgtcagctttcttgtaccacgcatgcgtcgtgaatttggaggctgtgccggcaacattgcgtacaatctgcatctgttgggtggtgctccgatcgtaatggctacggtgggccaagatttcggtccgtatcgcgagcacttcgaaactctgggcattgacttatcccgcgtcaagatcatcgatgatctgagtacaccgcaggccttcattaccaccgaccatgatcataaccagattacggcgtttcatccaggcgcaatgatgcgttcgtacgaaaatcacgttcgtgatgtgccgggtgttaccttgggcctcgtaggtcctgatggacgcgagggcatgatccaaaatgccgaagaatttgctgctggtggcattccgttcatttttgacccaggtcaggcagtgccgctgttcaacggccccgaactgcgcgagtttatcgaacaggcggactatgtggtggtcaacgattacgaaagcaatcttcttcaaacgcgtactggctggaacgagcaggacattgtttcacgcgtgcaggcgtatatcaccacgcaaggttcgaaaggagccctggtacatacaccggagaagacctacgatattccgccggcacacgaacgtcgtgcggtggatccaactggttgcggcgacgcgtttcgcgccggcctgatctatggtattcagcataattatgattggttgaccattggccgcatgggaaacttaatgggtgcgctgaaagtggaacaccctggcagccaaaatcagcgtttcgattttgccgaattcaacgaccagttcaaacaatattttggctacgcgctctaatga

SEQ ID NO: 770 - protein, 321 aa, synthetic construct
  REGION 1..321: note = Variant of adenosine kinase
MHHHHHHGGSGMSALICGSLAYDTIMVFPDQFKNHILPDRVHRLNVSFLVPRMRREFGGCAGNIAYNLHLLGGAPIVMATVGQDFGPYREHFETLGIDLSRVKIIDDLSTPQAFITTDHDHNQITAFHPGAMMRSYENHVRDVPGVTLGLVGPDGREGMIQNAEEFAAGGIPFIFDPGQAVPLFNGPELREFIEQADYVVVNDYESNLLQTRTGWNEQDIVSRVQAYITTQGSKGALVHTPEKTYDIPPAHERRAVDPTGCGDAFRAGLIYGIQHNYDWLTIGRMGNLMGALKVEHPGSQNQRFDFAEFNDQFKQYFGYAL

SEQ ID NO: 771 - DNA, 969 bp, synthetic construct
  misc_feature 1..969: note = Variant of adenosine kinase
  source 1..969: mol_type = other DNA
atgcaccatcatcaccatcacgggggctccggcatgagtgcactgatttgcggttctttagcgtatgataccatcatggtgtttccggaccagttcaagaaccatattctgcccgatcgtgttcaccgcctcaatgtcagctttcttgtaccacgcatgcgtcgtgaatttggaggctgtgccggcaacattgcgtacaatctgcatctgttgggtggtgctccgatcgtaatggctacggtgggccaagatttcggtccgtatcgcgagcacttcgaaactctgggcattgacttatcccgcgtcaagatcatcgatgatctgagtacaccgcaggccttcattaccaccgacatggatcataaccagattacggcgtttcatccaggcgcaatgatgcgttcgtacgaaaatcacgttcgtgatgtgccgggtgttaccttgggcctcgtaggtcctgatggacgcgagggcatgatccaaaatgccgaagaatttgctgctggtggcattccgttcatttttgacccaggtcaggcactgccgctgttcaacggccccgaactgcgcgagtttatcgaacaggcggactatgtggtggtcaacgattacgaaagcaatcttcttcaaacgcgtactggctggaacgagcaggacattgtttcacgcgtgcaggcgtatatcaccacgcaaggttcgaaaggagccctggtacatacaccggagaagacctacgatattccgccggcacacgaacgtcgtgtcgttgatccaactggttgcggcgacgcgtttcgcgccggcctgatctatggtattcagcataattatgattggttgaccattggccgcatgggaaacttaatgggtgcgctgaaagtggaacaccctggcagccaaaatcagcgtttcgattttgccgaattcaacgaccagttcaaacaatattttggctacgcgctctaatga

SEQ ID NO: 772 - protein, 321 aa, synthetic construct
  REGION 1..321: note = Variant of adenosine kinase
MHHHHHHGGSGMSALICGSLAYDTIMVFPDQFKNHILPDRVHRLNVSFLVPRMRREFGGCAGNIAYNLHLLGGAPIVMATVGQDFGPYREHFETLGIDLSRVKIIDDLSTPQAFITTDMDHNQITAFHPGAMMRSYENHVRDVPGVTLGLVGPDGREGMIQNAEEFAAGGIPFIFDPGQALPLFNGPELREFIEQADYVVVNDYESNLLQTRTGWNEQDIVSRVQAYITTQGSKGALVHTPEKTYDIPPAHERRVVDPTGCGDAFRAGLIYGIQHNYDWLTIGRMGNLMGALKVEHPGSQNQRFDFAEFNDQFKQYFGYAL

SEQ ID NO: 773 - DNA, 969 bp, synthetic construct
  misc_feature 1..969: note = Variant of adenosine kinase
  source 1..969: mol_type = other DNA
atgcaccatcatcaccatcacgggggctccggcatgagtgcactgatttgcggttctttagcgtatgataccatcatggtgtttccggaccagttcaagaaccatattctgcccgatcgtgttcaccgcctcaatgtcagctttcttgtaccacgcatgcgtcgtgaatttggaggctgtgccggcaacattgcgtacaatctgcatctgttgggtggtgctccgatcgtaatggctacggtgggccaagatttcggtccgtatcgcgagcacttcgaaactctgggcattgacttatcccgcgtcaagatcatcgatgatctgagtacaccgcaggccttcattaccaccgaccgcgatcataaccagattacggcgtttcatccaggcgcaatgatgcgttcgtacgaaaatcacgttcgtgatgtgccgggtgttaccttgggcctcgtaggtcctgatggacgcgagggcatgatccaaaatgccgaagaatttgctgctggtggcattccgttcatttttgacccaggtcaggcactgccgctgttcaacggccccgaactgcgcgagtttatcgaacaggcggactatgtggtggtcaacgattacgaaagcaatcttcttcaaacgcgtactggctggaacgagcaggacattgtttcacgcgtgcaggcgtatatcaccacgcaaggttcgaaaggagccctggtacatacaccggagaagacctacgatattccgccgattcacgaacgtcgtaaggtggatccaactggttgcggcgacgcgtttcgcgccggcctgatctatggtattcagcataattatgattggttgaccattggccgcatgggaaacttaatgggtgcgctgaaagtggaacaccctggcagccaaaatcagcgtttcgattttgccgaattcaacgaccagttcaaacaatattttggctacgcgctctaatga

SEQ ID NO: 774 - protein, 321 aa, synthetic construct
  REGION 1..321: note = Variant of adenosine kinase
MHHHHHHGGSGMSALICGSLAYDTIMVFPDQFKNHILPDRVHRLNVSFLVPRMRREFGGCAGNIAYNLHLLGGAPIVMATVGQDFGPYREHFETLGIDLSRVKIIDDLSTPQAFITTDRDHNQITAFHPGAMMRSYENHVRDVPGVTLGLVGPDGREGMIQNAEEFAAGGIPFIFDPGQALPLFNGPELREFIEQADYVVVNDYESNLLQTRTGWNEQDIVSRVQAYITTQGSKGALVHTPEKTYDIPPIHERRKVDPTGCGDAFRAGLIYGIQHNYDWLTIGRMGNLMGALKVEHPGSQNQRFDFAEFNDQFKQYFGYAL

SEQ ID NO: 775 - DNA, 969 bp, synthetic construct
  misc_feature 1..969: note = Variant of adenosine kinase
  source 1..969: mol_type = other DNA
atgcaccatcatcaccatcacgggggctccggcatgagtgcactgatttgcggttctttagcgtatgataccatcatggtgtttccggaccagttcaagaaccatattctgcccgatcgtgttcaccgcctcaatgtcagctttcttgtaccacgcatgcgtcgtgaatttggaggctgtgccggcaacattgcgtacaatctgcatctgttgggtggtgctccgatcgtaatggctacggtgggccaagatttcggtccgtatcgcgagcacttcgaaactctgggcattgacttatcccgcgtcaagatcatcgatgatctgagtacaccgcaggccttcattaccaccgaccgcgatcataaccagattacggcgtttcatccaggcgcaatgatgcgttcgtacgaaaatcacgttcgtgatgtgccgggtgttaccttgggcctcgtaggtcctgatggacgcgagggcatgatccaaaatgccgaagaatttgctgctggtggcattccgttcatttttgacccaggtcaggcagtgccgctgttcaacggccccgaactgcgcgagtttatcgaacaggcggactatgtggtggtcaacgattacgaaagcaatcttcttcaaacgcgtactggctggaacgagcaggacattgtttcacgcgtgcaggcgtatatcaccacgcaaggttcggctggagccctggtacatacaccggagaagacctacgatattccgccggcacacgaacgtcgtgtggtggatccaactggttgcggcgacgcgtttcgcgccggcctgatctatggtattcagcataattatgattggttgaccattggccgcatgggaaacttaatgggtgcgctgaaagtggaacaccctggcagccaaaatcagcgtttcgattttgccgaattcaacgaccagttcaaacaatattttggctacgcgctctaatga

SEQ ID NO: 776 - protein, 321 aa, synthetic construct
  REGION 1..321: note = Variant of adenosine kinase
MHHHHHHGGSGMSALICGSLAYDTIMVFPDQFKNHILPDRVHRLNVSFLVPRMRREFGGCAGNIAYNLHLLGGAPIVMATVGQDFGPYREHFETLGIDLSRVKIIDDLSTPQAFITTDRDHNQITAFHPGAMMRSYENHVRDVPGVTLGLVGPDGREGMIQNAEEFAAGGIPFIFDPGQAVPLFNGPELREFIEQADYVVVNDYESNLLQTRTGWNEQDIVSRVQAYITTQGSAGALVHTPEKTYDIPPAHERRVVDPTGCGDAFRAGLIYGIQHNYDWLTIGRMGNLMGALKVEHPGSQNQRFDFAEFNDQFKQYFGYAL

SEQ ID NO: 777 - DNA, 969 bp, synthetic construct
  misc_feature 1..969: note = Variant of adenosine kinase
  source 1..969: mol_type = other DNA
atgcaccatcatcaccatcacgggggctccggcatgagtgcactgatttgcggttctttagcgtatgataccatcatggtgtttccggaccagttcaagaaccatattctgcccgatcgtgttcaccgcctcaatgtcagctttcttgtaccacgcatgcgtcgtgaatttggaggctgtgccggcaacattgcgtacaatctgcatctgttgggtggtgctccgatcgtaatggctacggtgggccaagatttcggtccgtatcgcgagcacttcgaaactctgggcattgacttatcccgcgtcaagatcatcgatgatctgagtacaccgcaggccttcattaccaccgaccacgatcataaccagattacggcgtttcatccaggcgcaatgatgcgttcgtacgaaaatcacgttcgtgatgtgccgggtgttaccttgggcctcgtaggtcctgatggacgcgagggcatgatccaaaatgccgaagaatttgctgctggtggcattccgttcatttttgacccaggtcaggcactgccgctgttcaacggccccgaactgcgcgagtttatcgaacaggcggactatgtggtggtcaacgattacgaaagcaatcttcttcaaacgcgtactggctggaacgagcaggacattgtttcacgcgtgcaggcgtatatcaccacgcaaggttcgaaaggagccctggtacatacaccggagaagacctacgatattccgccggctcacacccgtcgtgtcgttgatccaactggttgcggcgacgcgtttcgcgccggcctgatctatggtattcagcataattatgattggttgaccattggccgcatgggaaacttaatgggtgcgctgaaagtggaacaccctggcacgcaaaatcagcgtttcgattttgccgaattcaacgaccagttcaaacaatattttggctacgcgctctaatga

SEQ ID NO: 778 - protein, 321 aa, synthetic construct
  REGION 1..321: note = Variant of adenosine kinase
MHHHHHHGGSGMSALICGSLAYDTIMVFPDQFKNHILPDRVHRLNVSFLVPRMRREFGGCAGNIAYNLHLLGGAPIVMATVGQDFGPYREHFETLGIDLSRVKIIDDLSTPQAFITTDHDHNQITAFHPGAMMRSYENHVRDVPGVTLGLVGPDGREGMIQNAEEFAAGGIPFIFDPGQALPLFNGPELREFIEQADYVVVNDYESNLLQTRTGWNEQDIVSRVQAYITTQGSKGALVHTPEKTYDIPPAHTRRVVDPTGCGDAFRAGLIYGIQHNYDWLTIGRMGNLMGALKVEHPGTQNQRFDFAEFNDQFKQYFGYAL

SEQ ID NO: 779 - DNA, 969 bp, synthetic construct
  misc_feature 1..969: note = Variant of adenosine kinase
  source 1..969: mol_type = other DNA
atgcaccatcatcaccatcacgggggctccggcatgagtgcactgatttgcggttctttagcgtatgataccatcatggtgtttccggaccagttcaagaaccatattctgcccgatcgtgttcaccgcctcaatgtcagctttcttgtaccacgcatgcgtcgtgaatttggaggctgtgccggcaacattgcgtacaatctgcatctgttgggtggtgctccgatcgtaatggctatggtgggccaagatttcggtccgtatcgcgagcacttcgaaactctgggcattgacttatcccgcgtcaagatcatcgatgatctgagtacaccgcaggccttcattaccaccgacatggatcataaccagattacggcgtttcatccaggcgcaatgatgcgttcgtacgaaaatcacgttcgtgatgtgccgggtgttaccttgggcctcgtaggtcctgatggacgcgagggcatgatccaaaatgccgaagaatttgctgctggtggcattccgttcatttttgacccaggtcaggcactgccgctgttcaacggccccgaactgcgcgagtttatcgaacaggcggactatgtggtggtcaacgattacgaaagcaatcttcttcaaacgcgtactggctggaacgagcaggacattgtttcacgcgtgcaggcgtatatcaccacgcaaggttcgaaaggagccctggtacatacaccggagaagacctacgatattccgccggctcacacccgtcgtgtcgttgatccaactggttgcggcgacgcgtttcgcgccggcctgatctatggtattcagcataattatgattggttgaccattggccgcatgggaaacttaatgggtgcgctgaaagtggaacaccctggcacgcaaaatcagcgtttcgattttgccgaattcaacgaccagttcaaacaatattttggctacgcgctctaatga

SEQ ID NO: 780 - protein, 321 aa, synthetic construct
  REGION 1..321: note = Variant of adenosine kinase
MHHHHHHGGSGMSALICGSLAYDTIMVFPDQFKNHILPDRVHRLNVSFLVPRMRREFGGCAGNIAYNLHLLGGAPIVMAMVGQDFGPYREHFETLGIDLSRVKIIDDLSTPQAFITTDMDHNQITAFHPGAMMRSYENHVRDVPGVTLGLVGPDGREGMIQNAEEFAAGGIPFIFDPGQALPLFNGPELREFIEQADYVVVNDYESNLLQTRTGWNEQDIVSRVQAYITTQGSKGALVHTPEKTYDIPPAHTRRVVDPTGCGDAFRAGLIYGIQHNYDWLTIGRMGNLMGALKVEHPGTQNQRFDFAEFNDQFKQYFGYAL

SEQ ID NO: 781 - DNA, 969 bp, synthetic construct
  misc_feature 1..969: note = Variant of adenosine kinase
  source 1..969: mol_type = other DNA
atgcaccatcatcaccatcacgggggctccggcatgagtgcactgatttgcggttctttagcgtatgataccatcatggtgtttccggaccagttcaagaaccatattctgcccgatcgtgttcaccgcctcaatgtcagctttcttgtaccacgcatgcgtcgtgaatttggaggctgtgccggcaacattgcgtacaatctgcatctgttgggtggtgctccgatcgtaatggctacggtgggccaagatttcggtccgtatcgcgagcacttcgaaactctgggcattgacttatcccgcgtcaagatcatcgatgatctgagtacaccgcaggccttcattaccaccgacatggatcataaccagattacggcgtttcatggcggcgcaatgatgcgttcgtacgaaaatcacgttcgtgatgtgccgggtgttaccttgggcctcgtaggtcctgatggacgcgagggcatgatccaaaatgccgaagaatttgctgctggtggcattccgttcatttttgacccaggtcaggcactgccgctgttcaacggccccgaactgcgcgagtttatcgaacaggcggactatgtggtggtcaacgattacgaaagcaatcttcttcaaacgcgtactggctggaacgagcaggacattgtttcacgcgtgcaggcgtatatcaccacgcaaggttcgaaaggagccctggtacatacaccggagaagacctacgatattccgccggcacacgaacgtcgtgtcgttgatccaactggttgcggcgacgcgtttcgcgccggcctgatctatggtattcagcataattatgattggttgaccattggccgcatgggaaacttaatgggtgcgctgaaagtggaacaccctggcacgcaaaatcagcgtttcgattttgccgaattcaacgaccagttcaaacaatattttggctacgcgctctaatga

SEQ ID NO: 782 - protein, 321 aa, synthetic construct
  REGION 1..321: note = Variant of adenosine kinase
MHHHHHHGGSGMSALICGSLAYDTIMVFPDQFKNHILPDRVHRLNVSFLVPRMRREFGGCAGNIAYNLHLLGGAPIVMATVGQDFGPYREHFETLGIDLSRVKIIDDLSTPQAFITTDMDHNQITAFHGGAMMRSYENHVRDVPGVTLGLVGPDGREGMIQNAEEFAAGGIPFIFDPGQALPLFNGPELREFIEQADYVVVNDYESNLLQTRTGWNEQDIVSRVQAYITTQGSKGALVHTPEKTYDIPPAHERRVVDPTGCGDAFRAGLIYGIQHNYDWLTIGRMGNLMGALKVEHPGTQNQRFDFAEFNDQFKQYFGYAL

SEQ ID NO: 783 - DNA, 969 bp, synthetic construct
  misc_feature 1..969: note = Variant of adenosine kinase
  source 1..969: mol_type = other DNA
atgcaccatcatcaccatcacgggggctccggcatgagtgcactgatttgcggttctttagcgtatgataccatcatggtgtttccggaccagttcaagaaccatattctgcccgatcgtgttcaccgcctcaatgtcagctttcttgtaccacgcatgcgtcgtgaatttggaggctgtgccggcaacattgcgtacaatctgcatctgttgggtggtgctccgatcgtaatggctacggtgggccaagatttcggtccgtatcgcgagcacttcgaaactctgggcattgacttatcccgcgtcaagatcatcgatgatctgagtacaccgcaggccttcattaccaccgacatggatcataaccagattacggcgtttcatggcggcgcaatgatgcgttcgtacgaaaatcacgttcgtgatgtgccgggtgttaccttgggcctcgtaggtcctgatggacgcgagggcatgatccaaaatgccgaagaatttgctgctggtggcattccgttcatttttgacccaggtcaggcactgccgctgttcaacggccccgaactgcgcgagtttatcgaacaggcggactatgtggtggtcaacgattacgaaagcaatcttcttcaaacgcgtactggctggaacgagcaggacattgtttcacgcgtgcaggcgtatatcaccacgcaaggttcgaaaggagccctggtacatacaccggagaagacctacgatattccgccgattcacgaacgtcgtgtcgttgatccaactggttgcggcgacgcgtttcgcgccggcctgatctatggtattcagcataattatgattggttgaccattggccgcatgggaaacttaatgggtgcgctgaaagtggaacaccctggcacccaaaatcagcgtttcgattttgccgaattcaacgaccagttcaaacaatattttggctacgcgctctaatga

SEQ ID NO: 784 - protein, 321 aa, synthetic construct
  REGION 1..321: note = Variant of adenosine kinase
MHHHHHHGGSGMSALICGSLAYDTIMVFPDQFKNHILPDRVHRLNVSFLVPRMRREFGGCAGNIAYNLHLLGGAPIVMATVGQDFGPYREHFETLGIDLSRVKIIDDLSTPQAFITTDMDHNQITAFHGGAMMRSYENHVRDVPGVTLGLVGPDGREGMIQNAEEFAAGGIPFIFDPGQALPLFNGPELREFIEQADYVVVNDYESNLLQTRTGWNEQDIVSRVQAYITTQGSKGALVHTPEKTYDIPPIHERRVVDPTGCGDAFRAGLIYGIQHNYDWLTIGRMGNLMGALKVEHPGTQNQRFDFAEFNDQFKQYFGYAL

SEQ ID NO: 785 - DNA, 969 bp, synthetic construct
  misc_feature 1..969: note = Variant of adenosine kinase
  source 1..969: mol_type = other DNA
atgcaccatcatcaccatcacgggggctccggcatgagtgcactgatttgcggttctttagcgtatgataccatcatggtgtttccggaccagttcaagaaccatattctgcccgatcgtgttcaccgcctcaatgtcagctttcttgtaccacgcatgcgtcgtgaatttggaggctgtgccggcaacattgcgtacaatctgcatctgttgggtggtgctccgatcgtaatggctacggtgggccaagatttcggtccgtatcgcgagcacttcgaaactctgggcattgacttatcccgcgtcaagatcatcgatgatctgagtacaccgcaggccttcattaccaccgaccacgatcataaccagattacggcgtttcatccaggcgcaatgatgcgttcgtacgaaaatcacgttcgtgatgtgccgggtgttaccttgggcctcgtaggtcctgatggacgcgagggcatgatccaaaatgccgaagaatttgctgctggtggcattccgttcatttttgacccaggtcaggcagtgccgctgttcaacggccccgaactgcgcgagtttatcgaacaggcggactatgtggtggtcaacgattacgaaagcaatcttcttcaaacgcgtactggctggaacgagcaggacattgtttcacgcgtgcaggcgtatatcaccacgcaaggttcggctggagccctggtacatacaccggagaagacctacgatattccgccggctcacacccgtcgtgtcgttgatccaactggttgcggcgacgcgtttcgcgccggcctgatctatggtattcagcataattatgattggttgaccattggccgcatgggaaacttaatgggtgcgctgaaagtggaacaccctggcagccaaaatcagcgtttcgattttgccgaattcaacgaccagttcaaacaatattttggctacgcgctctaatga

SEQ ID NO: 786 - protein, 321 aa, synthetic construct
  REGION 1..321: note = Variant of adenosine kinase
MHHHHHHGGSGMSALICGSLAYDTIMVFPDQFKNHILPDRVHRLNVSFLVPRMRREFGGCAGNIAYNLHLLGGAPIVMATVGQDFGPYREHFETLGIDLSRVKIIDDLSTPQAFITTDHDHNQITAFHPGAMMRSYENHVRDVPGVTLGLVGPDGREGMIQNAEEFAAGGIPFIFDPGQAVPLFNGPELREFIEQADYVVVNDYESNLLQTRTGWNEQDIVSRVQAYITTQGSAGALVHTPEKTYDIPPAHTRRVVDPTGCGDAFRAGLIYGIQHNYDWLTIGRMGNLMGALKVEHPGSQNQRFDFAEFNDQFKQYFGYAL

SEQ ID NO: 787 - DNA, 969 bp, synthetic construct
  misc_feature 1..969: note = Variant of adenosine kinase
  source 1..969: mol_type = other DNA
atgcaccatcatcaccatcacgggggctccggcatgagtgcactgatttgcggttctttagcgtatgataccatcatggtgtttccggaccagttcaagaaccatattctgcccgatcgtgttcaccgcctcaatgtcagctttcttgtaccacgcatgcgtcgtgaatttggaggctgtgccggcaacattgcgtacaatctgcatctgttgggtggtgctccgatcgtaatggctacggtgggccaagatttcggtccgtatcgcgagcacttcgaaactctgggcattgacttatcccgcgtcaagatcatcgatgatctgagtacaccgcaggccttcattaccaccgaccatgatcataaccagattacggcgtttcatccaggcgcaatgatgcgttcgtacgaaaatcacgttcgtgatgtgccgggtgttaccttgggcctcgtaggtcctgatggacgcgagggcatgatccaaaatgccgaagaatttgctgctggtggcattccgttcatttttgacccaggtcaggcagtgccgctgttcaacggccccgaactgcgcgagtttatcgaacaggcggactatgtggtggtcaacgattacgaaagcaatcttcttcaaacgcgtactggctggaacgagcaggacattgtttcacgcgtgcaggcgtatatcaccacgcaaggttcgaaaggagccctggtacatacaccggagaagacctacgatattccgccgattcacgaacgtcgtgtcgttgatccaactggttgcggcgacgcgtttcgcgccggcctgatctatggtattcagcataattatgattggttgaccattggccgcatgggaaacttaatgggtgcgctgaaagtggaacaccctggcagccaaaatcagcgtttcgattttgccgaattcaacgaccagttcaaacaatattttggctacgcgctctaatga

SEQ ID NO: 788 - protein, 321 aa, synthetic construct
  REGION 1..321: note = Variant of adenosine kinase
MHHHHHHGGSGMSALICGSLAYDTIMVFPDQFKNHILPDRVHRLNVSFLVPRMRREFGGCAGNIAYNLHLLGGAPIVMATVGQDFGPYREHFETLGIDLSRVKIIDDLSTPQAFITTDHDHNQITAFHPGAMMRSYENHVRDVPGVTLGLVGPDGREGMIQNAEEFAAGGIPFIFDPGQAVPLFNGPELREFIEQADYVVVNDYESNLLQTRTGWNEQDIVSRVQAYITTQGSKGALVHTPEKTYDIPPIHERRVVDPTGCGDAFRAGLIYGIQHNYDWLTIGRMGNLMGALKVEHPGSQNQRFDFAEFNDQFKQYFGYAL

SEQ ID NO: 789 - DNA, 969 bp, synthetic construct
  misc_feature 1..969: note = Variant of adenosine kinase
  source 1..969: mol_type = other DNA
atgcaccatcatcaccatcacgggggctccggcatgagtgcactgatttgcggttctttagcgtatgataccatcatggtgtttccggaccagttcaagaaccatattctgcccgatcgtgttcaccgcctcaatgtcagctttcttgtaccacgcatgcgtcgtgaatttggaggctgtgccggcaacattgcgtacaatctgcatctgttgggtggtgctccgatcgtaatggctacggtgggccaagatttcggtccgtatcgcgagcacttcgaaactctgggcattgacttatcccgcgtcaagatcatcgatgatctgagtacaccgcaggccttcattaccaccgaccacgatcataaccagattacggcgtttcatccaggcgcaatgatgcgttcgtacgaaaatcacgttcgtgatgtgccgggtgttaccttgggcctcgtaggtcctgatggacgcgagggcatgatccaaaatgccgaagaatttgctgctggtggcattccgttcatttttgacccaggtcaggcactgccgctgttcaacggccccgaactgcgcgagtttatcgaacaggcggactatgtggtggtcaacgattacgaaagcaatcttcttcaaacgcgtactggctggaacgagcaggacattgtttcacgcgtgcaggcgtatatcaccacgcaaggttcgaaaggagccctggtacatacaccggagaagacctacgatattccgccggctcacacccgtcgtgtcgttgatccaactggttgcggcgacgcgtttcgcgccggcctgatctatggtattcagcataattatgattggttgaccattggccgcatgggaaacttaatgggtgcgctgaaagtggaacaccctggcagccaaaatcagcgtttcgattttgccgaattcaacgaccagttcaaacaatattttggctacgcgctctaatga

SEQ ID NO: 790 - protein, 321 aa, synthetic construct
  REGION 1..321: note = Variant of adenosine kinase
MHHHHHHGGSGMSALICGSLAYDTIMVFPDQFKNHILPDRVHRLNVSFLVPRMRREFGGCAGNIAYNLHLLGGAPIVMATVGQDFGPYREHFETLGIDLSRVKIIDDLSTPQAFITTDHDHNQITAFHPGAMMRSYENHVRDVPGVTLGLVGPDGREGMIQNAEEFAAGGIPFIFDPGQALPLFNGPELREFIEQADYVVVNDYESNLLQTRTGWNEQDIVSRVQAYITTQGSKGALVHTPEKTYDIPPAHTRRVVDPTGCGDAFRAGLIYGIQHNYDWLTIGRMGNLMGALKVEHPGSQNQRFDFAEFNDQFKQYFGYAL

SEQ ID NO: 791 - DNA, 969 bp, synthetic construct
  misc_feature 1..969: note = Variant of adenosine kinase
  source 1..969: mol_type = other DNA
atgcaccatcatcaccatcacgggggctccggcatgagtgcactgatttgcggttctttagcgtatgataccatcatggtgtttccggaccagttcaagaaccatattctgcccgatcgtgttcaccgcctcaatgtcagctttcttgtaccacgcatgcgtcgtgaatttggaggctgtgccggcaacattgcgtacaatctgcatctgttgggtggtgctccgatcgtaatggctacggtgggccaagatttcggtccgtatcgcgagcacttcgaaactctgggcattgacttatcccgcgtcaagatcatcgatgatctgagtacaccgcaggccttcattaccaccgacatggatcataaccagattacggcgtttcatccaggcgcaatgatgcgttcgtacgaaaatcacgttcgtgatgtgccgggtgttaccttgggcctcgtaggtcctgatggacgcgagggcatgatccaaaatgccgaagaatttgctgctggtggcattccgttcatttttgacccaggtcaggcagtgccgctgttcaacggccccgaactgcgcgagtttatcgaacaggcggactatgtggtggtcaacgattacgaaagcaatcttcttcaaacgcgtactggctggaacgagcaggacattgtttcacgcgtgcaggcgtatatcaccacgcaaggttcgaaaggagccctggtacatacaccggagaagacctacgatattccgccggcacacgaacgtcgtgtcgttgatccaactggttgcggcgacgcgtttcgcgccggcctgatctatggtattcagcataattatgattggttgaccattggccgcatgggaaacttaatgggtgcgctgaaagtggaacaccctggcagccaaaatcagcgtttcgattttgccgaattcaacgaccagttcaaacaatattttggctacgcgctctaatga

SEQ ID NO: 792 - protein, 321 aa, synthetic construct
  REGION 1..321: note = Variant of adenosine kinase
MHHHHHHGGSGMSALICGSLAYDTIMVFPDQFKNHILPDRVHRLNVSFLVPRMRREFGGCAGNIAYNLHLLGGAPIVMATVGQDFGPYREHFETLGIDLSRVKIIDDLSTPQAFITTDMDHNQITAFHPGAMMRSYENHVRDVPGVTLGLVGPDGREGMIQNAEEFAAGGIPFIFDPGQAVPLFNGPELREFIEQADYVVVNDYESNLLQTRTGWNEQDIVSRVQAYITTQGSKGALVHTPEKTYDIPPAHERRVVDPTGCGDAFRAGLIYGIQHNYDWLTIGRMGNLMGALKVEHPGSQNQRFDFAEFNDQFKQYFGYAL

SEQ ID NO: 793 - DNA, 969 bp, synthetic construct
  misc_feature 1..969: note = Variant of adenosine kinase
  source 1..969: mol_type = other DNA
atgcaccatcatcaccatcacgggggctccggcatgagtgcactgatttgcggttctttagcgtatgataccatcatggtgtttccggaccagttcaagaaccatattctgcccgatcgtgttcaccgcctcaatgtcagctttcttgtaccacgcatgcgtcgtgaatttggaggctgtgccggcaacattgcgtacaatctgcatctgttgggtggtgctccgatcgtaatggctacggtgggccaagatttcggtccgtatcgcgagcacttcgaaactctgggcattgacttatcccgcgtcaagatcatcgatgatctgagtacaccgcaggccttcattaccaccgaccgcgatcataaccagattacggcgtttcatggcggcgcaatgatgcgttcgtacgaaaatcacgttcgtgatgtgccgggtgttaccttgggcctcgtaggtcctgatggacgcgagggcatgatccaaaatgccgaagaatttgctgctggtggcattccgttcatttttgacccaggtcaggcactgccgctgttcaacggccccgaactgcgcgagtttatcgaacaggcggactatgtggtggtcaacgattacgaaagcaatcttcttcaaacgcgtactggctggaacgagcaggacattgtttcacgcgtgcaggcgtatatcaccacgcaaggttcgaaaggagccctggtacatacaccggagaagacctacgatattccgccggcacacgaacgtcgtgtcgttgatccaactggttgcggcgacgcgtttcgcgccggcctgatctatggtattcagcataattatgattggttgaccattggccgcatgggaaacttaatgggtgcgctgaaagtggaacaccctggcagccaaaatcagcgtttcgattttgccgaattcaacgaccagttcaaacaatattttggctacgcgctctaatga

SEQ ID NO: 794 - protein, 321 aa, synthetic construct
  REGION 1..321: note = Variant of adenosine kinase
MHHHHHHGGSGMSALICGSLAYDTIMVFPDQFKNHILPDRVHRLNVSFLVPRMRREFGGCAGNIAYNLHLLGGAPIVMATVGQDFGPYREHFETLGIDLSRVKIIDDLSTPQAFITTDRDHNQITAFHGGAMMRSYENHVRDVPGVTLGLVGPDGREGMIQNAEEFAAGGIPFIFDPGQALPLFNGPELREFIEQADYVVVNDYESNLLQTRTGWNEQDIVSRVQAYITTQGSKGALVHTPEKTYDIPPAHERRVVDPTGCGDAFRAGLIYGIQHNYDWLTIGRMGNLMGALKVEHPGSQNQRFDFAEFNDQFKQYFGYAL

SEQ ID NO: 795 - DNA, 969 bp, synthetic construct
  misc_feature 1..969: note = Variant of adenosine kinase
  source 1..969: mol_type = other DNA
atgcaccatcatcaccatcacgggggctccggcatgagtgcactgatttgcggttctttagcgtatgataccatcatggtgtttccggaccagttcaagaaccatattctgcccgatcgtgttcaccgcctcaatgtcagctttcttgtaccacgcatgcgtcgtgaatttggaggctgtgccggcaacattgcgtacaatctgcatctgttgggtggtgctccgatcgtaatggctacggtgggccaagatttcggtccgtatcgcgagcacttcgaaactctgggcattgacttatcccgcgtcaagatcatcgatgatctgagtacaccgcaggccttcattaccaccgacatggatcataaccagattacggcgtttcatggcggcgcaatgatgcgttcgtacgaaaatcacgttcgtgatgtgccgggtgttaccttgggcctcgtaggtcctgatggacgcgagggcatgatccaaaatgccgaagaatttgctgctggtggcattccgttcatttttgacccaggtcaggcactgccgctgttcaacggccccgaactgcgcgagtttatcgaacaggcggactatgtggtggtcaacgattacgaaagcaatcttcttcaaacgcgtactggctggaacgagcaggacattgtttcacgcgtgcaggcgtatatcaccacgcaaggttcggctggagccctggtacatacaccggagaagacctacgatattccgccggctcacacccgtcgtgtcgttgatccaactggttgcggcgacgcgtttcgcgccggcctgatctatggtattcagcataattatgattggttgaccattggccgcatgggaaacttaatgggtgcgctgaaagtggaacaccctggcacccaaaatcagcgtttcgattttgccgaattcaacgaccagttcaaacaatattttggctacgcgctctaatga

SEQ ID NO: 796 - protein, 321 aa, synthetic construct
  REGION 1..321: note = Variant of adenosine kinase
MHHHHHHGGSGMSALICGSLAYDTIMVFPDQFKNHILPDRVHRLNVSFLVPRMRREFGGCAGNIAYNLHLLGGAPIVMATVGQDFGPYREHFETLGIDLSRVKIIDDLSTPQAFITTDMDHNQITAFHGGAMMRSYENHVRDVPGVTLGLVGPDGREGMIQNAEEFAAGGIPFIFDPGQALPLFNGPELREFIEQADYVVVNDYESNLLQTRTGWNEQDIVSRVQAYITTQGSAGALVHTPEKTYDIPPAHTRRVVDPTGCGDAFRAGLIYGIQHNYDWLTIGRMGNLMGALKVEHPGTQNQRFDFAEFNDQFKQYFGYAL

SEQ ID NO: 797 - DNA, 969 bp, synthetic construct
  misc_feature 1..969: note = Variant of adenosine kinase
  source 1..969: mol_type = other DNA
atgcaccatcatcaccatcacgggggctccggcatgagtgcactgatttgcggttctttagcgtatgataccatcatggtgtttccggaccagttcaagaaccatattctgcccgatcgtgttcaccgcctcaatgtcagctttcttgtaccacgcatgcgtcgtgaatttggaggctgtgccggcaacattgcgtacaatctgcatctgttgggtggtgctccgatcgtaatggctacggtgggccaagatttcggtccgtatcgcgagcacttcgaaactctgggcattgacttatcccgcgtcaagatcatcgatgatctgagtacaccgcaggccttcattaccaccgacatggatcataaccagattacggcgtttcatggcggcgcaatgatgcgttcgtacgaaaatcacgttcgtgatgtgccgggtgttaccttgggcctcgtaggtcctgatggacgcgagggcatgatccaaaatgccgaagaatttgctgctggtggcattccgttcatttttgacccaggtcaggcactgccgctgttcaacggccccgaactgcgcgagtttatcgaacaggcggactatgtggtggtcaacgattacgaaagcaatcttcttcaaacgcgtactggctggaacgagcaggacattgtttcacgcgtgcaggcgtatatcaccacgcaaggttcggctggagccctggtacatacaccggagaagacctacgatattccgccgattcacgaacgtcgtgtcgttgatccaactggttgcggcgacgcgtttcgcgccggcctgatctatggtattcagcataattatgattggttgaccattggccgcatgggaaacttaatgggtgcgctgaaagtggaacaccctggcagccaaaatcagcgtttcgattttgccgaattcaacgaccagttcaaacaatattttggctacgcgctctaatga

SEQ ID NO: 798 - protein, 321 aa, synthetic construct
  REGION 1..321: note = Variant of adenosine kinase
MHHHHHHGGSGMSALICGSLAYDTIMVFPDQFKNHILPDRVHRLNVSFLVPRMRREFGGCAGNIAYNLHLLGGAPIVMATVGQDFGPYREHFETLGIDLSRVKIIDDLSTPQAFITTDMDHNQITAFHGGAMMRSYENHVRDVPGVTLGLVGPDGREGMIQNAEEFAAGGIPFIFDPGQALPLFNGPELREFIEQADYVVVNDYESNLLQTRTGWNEQDIVSRVQAYITTQGSAGALVHTPEKTYDIPPIHERRVVDPTGCGDAFRAGLIYGIQHNYDWLTIGRMGNLMGALKVEHPGSQNQRFDFAEFNDQFKQYFGYAL

SEQ ID NO: 799 - DNA, 969 bp, synthetic construct
  misc_feature 1..969: note = Variant of adenosine kinase
  source 1..969: mol_type = other DNA
atgcaccatcatcaccatcacgggggctccggcatgagtgcactgatttgcggttctttagcgtatgataccatcatggtgtttccggaccagttcaagaaccatattctgcccgatcgtgttcaccgcctcaatgtcagctttcttgtaccacgcatgcgtcgtgaatttggaggctgtgccggcaacattgcgtacaatctgcatctgttgggtggtgctccgatcgtaatggctacggtgggccaagatttcggtccgtatcgcgagcacttcgaaactctgggcattgacttatcccgcgtcaagatcatcgatgatctgagtacaccgcaggccttcattaccaccgacatggatcataaccagattacggcgtttcatccaggcgcaatgatgcgttcgtacgaaaatcacgttcgtgatgtgccgggtgttaccttgggcctcgtaggtcctgatggacgcgagggcatgatccaaaatgccgaagaatttgctgctggtggcattccgttcatttttgacccaggtcaggcagtgccgctgttcaacggccccgaactgcgcgagtttatcgaacaggcggactatgtggtggtcaacgattacgaaagcaatcttcttcaaacgcgtactggctggaacgagcaggacattgtttcacgcgtgcaggcgtatatcaccacgcaaggttcggctggagccctggtacatacaccggagaagacctacgatattccgccggctcacacccgtcgtgtcgttgatccaactggttgcggcgacgcgtttcgcgccggcctgatctatggtattcagcataattatgattggttgaccattggccgcatgggaaacttaatgggtgcgctgaaagtggaacaccctggcacgcaaaatcagcgtttcgattttgccgaattcaacgaccagttcaaacaatattttggctacgcgctctaatga

SEQ ID NO: 800 - protein, 321 aa, synthetic construct
  REGION 1..321: note = Variant of adenosine kinase
MHHHHHHGGSGMSALICGSLAYDTIMVFPDQFKNHILPDRVHRLNVSFLVPRMRREFGGCAGNIAYNLHLLGGAPIVMATVGQDFGPYREHFETLGIDLSRVKIIDDLSTPQAFITTDMDHNQITAFHPGAMMRSYENHVRDVPGVTLGLVGPDGREGMIQNAEEFAAGGIPFIFDPGQAVPLFNGPELREFIEQADYVVVNDYESNLLQTRTGWNEQDIVSRVQAYITTQGSAGALVHTPEKTYDIPPAHTRRVVDPTGCGDAFRAGLIYGIQHNYDWLTIGRMGNLMGALKVEHPGTQNQRFDFAEFNDQFKQYFGYAL

SEQ ID NO: 801 - DNA, 969 bp, synthetic construct
  misc_feature 1..969: note = Variant of adenosine kinase
  source 1..969: mol_type = other DNA
atgcaccatcatcaccatcacgggggctccggcatgagtgcactgatttgcggttctttagcgtatgataccatcatggtgtttccggaccagttcaagaaccatattctgcccgatcgtgttcaccgcctcaatgtcagctttcttgtaccacgcatgcgtcgtgaatttggaggctgtgccggcaacattgcgtacaatctgcatctgttgggtggtgctccgatcgtaatggctacggtgggccaagatttcggtccgtatcgcgagcacttcgaaactctgggcattgacttatcccgcgtcaagatcatcgatgatctgagtacaccgcaggccttcattaccaccgaccacgatcataaccagattacggcgtttcatggcggcgcaatgatgcgttcgtacgaaaatcacgttcgtgatgtgccgggtgttaccttgggcctcgtaggtcctgatggacgcgagggcatgatccaaaatgccgaagaatttgctgctggtggcattccgttcatttttgacccaggtcaggcactgccgctgttcaacggccccgaactgcgcgagtttatcgaacaggcggactatgtggtggtcaacgattacgaaagcaatcttcttcaaacgcgtactggctggaacgagcaggacattgtttcacgcgtgcaggcgtatatcaccacgcaaggttcggctggagccctggtacatacaccggagaagacctacgatattccgccggcacacgaacgtcgtaaggtggatccaactggttgcggcgacgcgtttcgcgccggcctgatctatggtattcagcataattatgattggttgaccattggccgcatgggaaacttaatgggtgcgctgaaagtggaacaccctggcagccaaaatcagcgtttcgattttgccgaattcaacgaccagttcaaacaatattttggctacgcgctctaatga

SEQ ID NO: 802 - protein, 321 aa, synthetic construct
  REGION 1..321: note = Variant of adenosine kinase
MHHHHHHGGSGMSALICGSLAYDTIMVFPDQFKNHILPDRVHRLNVSFLVPRMRREFGGCAGNIAYNLHLLGGAPIVMATVGQDFGPYREHFETLGIDLSRVKIIDDLSTPQAFITTDHDHNQITAFHGGAMMRSYENHVRDVPGVTLGLVGPDGREGMIQNAEEFAAGGIPFIFDPGQALPLFNGPELREFIEQADYVVVNDYESNLLQTRTGWNEQDIVSRVQAYITTQGSAGALVHTPEKTYDIPPAHERRKVDPTGCGDAFRAGLIYGIQHNYDWLTIGRMGNLMGALKVEHPGSQNQRFDFAEFNDQFKQYFGYAL

SEQ ID NO: 803 - DNA, 969 bp, synthetic construct
  misc_feature 1..969: note = Variant of adenosine kinase
  source 1..969: mol_type = other DNA
atgcaccatcatcaccatcacgggggctccggcatgagtgcactgatttgcggttctttagcgtatgataccatcatggtgtttccggaccagttcaagaaccatattctgcccgatcgtgttcaccgcctcaatgtcagctttcttgtaccacgcatgcgtcgtgaatttggaggctgtgccggcaacattgcgtacaatctgcatctgttgggtggtgctccgatcgtaatggctacggtgggccaagatttcggtccgtatcgcgagcacttcgaaactctgggcattgacttatcccgcgtcaagatcatcgatgatctgagtacaccgcaggccttcattaccaccgaccacgatcataaccagattacggcgtttcatccaggcgcaatgatgcgttcgtacgaaaatcacgttcgtgatgtgccgggtgttaccttgggcctcgtaggtcctgatggacgcgagggcatgatccaaaatgccgaagaatttgctgctggtggcattccgttcatttttgacccaggtcaggcagtgccgctgttcaacggccccgaactgcgcgagtttatcgaacaggcggactatgtggtggtcaacgattacgaaagcaatcttcttcaaacgcgtactggctggaacgagcaggacattgtttcacgcgtgcaggcgtatatcaccacgcaaggttcgaaaggagccctggtacatacaccggagaagacctacgatattccgccggcacacgaacgtcgtgtcgttgatccaactggttgcggcgacgcgtttcgcgccggcctgatctatggtattcagcataattatgattggttgaccattggccgcatgggaaacttaatgggtgcgctgaaagtggaacaccctggcagccaaaatcagcgtttcgattttgccgaattcaacgaccagttcaaacaatattttggctacgcgctctaatga

SEQ ID NO: 804 - protein, 321 aa, synthetic construct
  REGION 1..321: note = Variant of adenosine kinase
MHHHHHHGGSGMSALICGSLAYDTIMVFPDQFKNHILPDRVHRLNVSFLVPRMRREFGGCAGNIAYNLHLLGGAPIVMATVGQDFGPYREHFETLGIDLSRVKIIDDLSTPQAFITTDHDHNQITAFHPGAMMRSYENHVRDVPGVTLGLVGPDGREGMIQNAEEFAAGGIPFIFDPGQAVPLFNGPELREFIEQADYVVVNDYESNLLQTRTGWNEQDIVSRVQAYITTQGSKGALVHTPEKTYDIPPAHERRVVDPTGCGDAFRAGLIYGIQHNYDWLTIGRMGNLMGALKVEHPGSQNQRFDFAEFNDQFKQYFGYAL

SEQ ID NO: 805 - DNA, 969 bp, synthetic construct
  misc_feature 1..969: note = Variant of adenosine kinase
  source 1..969: mol_type = other DNA
atgcaccatcatcaccatcacgggggctccggcatgagtgcactgatttgcggttctttagcgtatgataccatcatggtgtttccggaccagttcaagaaccatattctgcccgatcgtgttcaccgcctcaatgtcagctttcttgtaccacgcatgcgtcgtgaatttggaggctgtgccggcaacattgcgtacaatctgcatctgttgggtggtgctccgatcgtaatggctacggtgggccaagatttcggtccgtatcgcgagcacttcgaaactctgggcattgacttatcccgcgtcaagatcatcgatgatctgagtacaccgcaggccttcattaccaccgaccatgatcataaccagattacggcgtttcatccaggcgcaatgatgcgttcgtacgaaaatcacgttcgtgatgtgccgggtgttaccttgggcctcgtaggtcctgatggacgcgagggcatgatccaaaatgccgaagaatttgctgctggtggcattccgttcatttttgacccaggtcaggcactgccgctgttcaacggccccgaactgcgcgagtttatcgaacaggcggactatgtggtggtcaacgattacgaaagcaatcttcttcaaacgcgtactggctggaacgagcaggacattgtttcacgcgtgcaggcgtatatcaccacgcaaggttcgaaaggagccctggtacatacaccggagaagacctacgatattccgccgattcacacccgtcgtgtcgttgatccaactggttgcggcgacgcgtttcgcgccggcctgatctatggtattcagcataattatgattggttgaccattggccgcatgggaaacttaatgggtgcgctgaaagtggaacaccctggcacgcaaaatcagcgtttcgattttgccgaattcaacgaccagttcaaacaatattttggctacgcgctctaatga

SEQ ID NO: 806 - protein, 321 aa, synthetic construct
  REGION 1..321: note = Variant of adenosine kinase
MHHHHHHGGSGMSALICGSLAYDTIMVFPDQFKNHILPDRVHRLNVSFLVPRMRREFGGCAGNIAYNLHLLGGAPIVMATVGQDFGPYREHFETLGIDLSRVKIIDDLSTPQAFITTDHDHNQITAFHPGAMMRSYENHVRDVPGVTLGLVGPDGREGMIQNAEEFAAGGIPFIFDPGQALPLFNGPELREFIEQADYVVVNDYESNLLQTRTGWNEQDIVSRVQAYITTQGSKGALVHTPEKTYDIPPIHTRRVVDPTGCGDAFRAGLIYGIQHNYDWLTIGRMGNLMGALKVEHPGTQNQRFDFAEFNDQFKQYFGYAL

SEQ ID NO: 807 - DNA, 969 bp, synthetic construct
  misc_feature 1..969: note = Variant of adenosine kinase
  source 1..969: mol_type = other DNA
atgcaccatcatcaccatcacgggggctccggcatgagtgcactgatttgcggttctttagcgtatgataccatcatggtgtttccggaccagttcaagaaccatattctgcccgatcgtgttcaccgcctcaatgtcagctttcttgtaccacgcatgcgtcgtgaatttggaggctgtgccggcaacattgcgtacaatctgcatctgttgggtggtgctccgatcgtaatggctacggtgggccaagatttcggtccgtatcgcgagcacttcgaaactctgggcattgacttatcccgcgtcaagatcatcgatgatctgagtacaccgcaggccttcattaccaccgaccatgatcataaccagattacggcgtttcatccaggcgcaatgatgcgttcgtacgaaaatcacgttcgtgatgtgccgggtgttaccttgggcctcgtaggtcctgatggacgcgagggcatgatccaaaatgccgaagaatttgctgctggtggcattccgttcatttttgacccaggtcaggcactgccgctgttcaacggccccgaactgcgcgagtttatcgaacaggcggactatgtggtggtcaacgattacgaaagcaatcttcttcaaacgcgtactggctggaacgagcaggacattgtttcacgcgtgcaggcgtatatcaccacgcaaggttcgaaaggagccctggtacatacaccggagaagacctacgatattccgccgattcacgaacgtcgtaaggtggatccaactggttgcggcgacgcgtttcgcgccggcctgatctatggtattcagcataattatgattggttgaccattggccgcatgggaaacttaatgggtgcgctgaaagtggaacaccctggcagccaaaatcagcgtttcgattttgccgaattcaacgaccagttcaaacaatattttggctacgcgctctaatga

SEQ ID NO: 808 - protein, 321 aa, synthetic construct
  REGION 1..321: note = Variant of adenosine kinase
MHHHHHHGGSGMSALICGSLAYDTIMVFPDQFKNHILPDRVHRLNVSFLVPRMRREFGGCAGNIAYNLHLLGGAPIVMATVGQDFGPYREHFETLGIDLSRVKIIDDLSTPQAFITTDHDHNQITAFHPGAMMRSYENHVRDVPGVTLGLVGPDGREGMIQNAEEFAAGGIPFIFDPGQALPLFNGPELREFIEQADYVVVNDYESNLLQTRTGWNEQDIVSRVQAYITTQGSKGALVHTPEKTYDIPPIHERRKVDPTGCGDAFRAGLIYGIQHNYDWLTIGRMGNLMGALKVEHPGSQNQRFDFAEFNDQFKQYFGYAL

SEQ ID NO: 809 - DNA, 969 bp, synthetic construct
  misc_feature 1..969: note = Variant of adenosine kinase
  source 1..969: mol_type = other DNA
atgcaccatcatcaccatcacgggggctccggcatgagtgcactgatttgcggttctttagcgtatgataccatcatggtgtttccggaccagttcaagaaccatattctgcccgatcgtgttcaccgcctcaatgtcagctttcttgtaccacgcatgcgtcgtgaatttggaggctgtgccggcaacattgcgtacaatctgcatctgttgggtggtgctccgatcgtaatggctacggtgggccaagatttcggtccgtatcgcgagcacttcgaaactctgggcattgacttatcccgcgtcaagatcatcgatgatctgagtacaccgcaggccttcattaccaccgaccgcgatcataaccagattacggcgtttcatccaggcgcaatgatgcgttcgtacgaaaatcacgttcgtgatgtgccgggtgttaccttgggcctcgtaggtcctgatggacgcgagggcatgatccaaaatgccgaagaatttgctgctggtggcattccgttcatttttgacccaggtcaggcagtgccgctgttcaacggccccgaactgcgcgagtttatcgaacaggcggactatgtggtggtcaacgattacgaaagcaatcttcttcaaacgcgtactggctggaacgagcaggacattgtttcacgcgtgcaggcgtatatcaccacgcaaggttcgaaaggagccctggtacatacaccggagaagacctacgatattccgccggctcacgaacgtcgtgtcgttgatccaactggttgcggcgacgcgtttcgcgccggcctgatctatggtattcagcataattatgattggttgaccattggccgcatgggaaacttaatgggtgcgctgaaagtggaacaccctggcagccaaaatcagcgtttcgattttgccgaattcaacgaccagttcaaacaatattttggctacgcgctctaatga

SEQ ID NO: 810 - protein, 321 aa, synthetic construct
  REGION 1..321: note = Variant of adenosine kinase
MHHHHHHGGSGMSALICGSLAYDTIMVFPDQFKNHILPDRVHRLNVSFLVPRMRREFGGCAGNIAYNLHLLGGAPIVMATVGQDFGPYREHFETLGIDLSRVKIIDDLSTPQAFITTDRDHNQITAFHPGAMMRSYENHVRDVPGVTLGLVGPDGREGMIQNAEEFAAGGIPFIFDPGQAVPLFNGPELREFIEQADYVVVNDYESNLLQTRTGWNEQDIVSRVQAYITTQGSKGALVHTPEKTYDIPPAHERRVVDPTGCGDAFRAGLIYGIQHNYDWLTIGRMGNLMGALKVEHPGSQNQRFDFAEFNDQFKQYFGYAL

SEQ ID NO: 811 - DNA, 969 bp, synthetic construct
  misc_feature 1..969: note = Variant of adenosine kinase
  source 1..969: mol_type = other DNA
atgcaccatcatcaccatcacgggggctccggcatgagtgcactgatttgcggttctttagcgtatgataccatcatggtgtttccggaccagttcaagaaccatattctgcccgatcgtgttcaccgcctcaatgtcagctttcttgtaccacgcatgcgtcgtgaatttggaggctgtgccggcaacattgcgtacaatctgcatctgttgggtggtgctccgatcgtaatggctacggtgggccaagatttcggtccgtatcgcgagcacttcgaaactctgggcattgacttatcccgcgtcaagatcatcgatgatctgagtacaccgcaggccttcattaccaccgacatggatcataaccagattacggcgtttcatccaggcgcaatgatgcgttcgtacgaaaatcacgttcgtgatgtgccgggtgttaccttgggcctcgtaggtcctgatggacgcgagggcatgatccaaaatgccgaagaatttgctgctggtggcattccgttcatttttgacccaggtcaggcactgccgctgttcaacggccccgaactgcgcgagtttatcgaacaggcggactatgtggtggtcaacgattacgaaagcaatcttcttcaaacgcgtactggctggaacgagcaggacattgtttcacgcgtgcaggcgtatatcaccacgcaaggttcggctggagccctggtacatacaccggagaagacctacgatattccgccggctcacgaacgtcgtgtcgttgatccaactggttgcggcgacgcgtttcgcgccggcctgatctatggtattcagcataattatgattggttgaccattggccgcatgggaaacttaatgggtgcgctgaaagtggaacaccctggcagccaaaatcagcgtttcgattttgccgaattcaacgaccagttcaaacaatattttggctacgcgctctaatga

SEQ ID NO: 812 - protein, 321 aa, synthetic construct
  REGION 1..321: note = Variant of adenosine kinase
MHHHHHHGGSGMSALICGSLAYDTIMVFPDQFKNHILPDRVHRLNVSFLVPRMRREFGGCAGNIAYNLHLLGGAPIVMATVGQDFGPYREHFETLGIDLSRVKIIDDLSTPQAFITTDMDHNQITAFHPGAMMRSYENHVRDVPGVTLGLVGPDGREGMIQNAEEFAAGGIPFIFDPGQALPLFNGPELREFIEQADYVVVNDYESNLLQTRTGWNEQDIVSRVQAYITTQGSAGALVHTPEKTYDIPPAHERRVVDPTGCGDAFRAGLIYGIQHNYDWLTIGRMGNLMGALKVEHPGSQNQRFDFAEFNDQFKQYFGYAL

SEQ ID NO: 813 - DNA, 969 bp, synthetic construct
  misc_feature 1..969: note = Variant of adenosine kinase
  source 1..969: mol_type = other DNA
atgcaccatcatcaccatcacgggggctccggcatgagtgcactgatttgcggttctttagcgtatgataccatcatggtgtttccggaccagttcaagaaccatattctgcccgatcgtgttcaccgcctcaatgtcagctttcttgtaccacgcatgcgtcgtgaatttggaggctgtgccggcaacattgcgtacaatctgcatctgttgggtggtgctccgatcgtaatggctacggtgggccaagatttcggtccgtatcgcgagcacttcgaaactctgggcattgacttatcccgcgtcaagatcatcgatgatctgagtacaccgcaggccttcattaccaccgaccgcgatcataaccagattacggcgtttcatccaggcgcaatgatgcgttcgtacgaaaatcacgttcgtgatgtgccgggtgttaccttgggcctcgtaggtcctgatggacgcgagggcatgatccaaaatgccgaagaatttgctgctggtggcattccgttcatttttgacccaggtcaggcactgccgctgttcaacggccccgaactgcgcgagtttatcgaacaggcggactatgtggtggtcaacgattacgaaagcaatcttcttcaaacgcgtactggctggaacgagcaggacattgtttcacgcgtgcaggcgtatatcaccacgcaaggttcgaaaggagccctggtacatacaccggagaagacctacgatattccgccggctcacgaacgtcgtgtcgttgatccaactggttgcggcgacgcgtttcgcgccggcctgatctatggtattcagcataattatgattggttgaccattggccgcatgggaaacttaatgggtgcgctgaaagtggaacaccctggcagccaaaatcagcgtttcgattttgccgaattcaacgaccagttcaaacaatattttggctacgcgctctaatga

SEQ ID NO: 814 - protein, 321 aa, synthetic construct
  REGION 1..321: note = Variant of adenosine kinase
MHHHHHHGGSGMSALICGSLAYDTIMVFPDQFKNHILPDRVHRLNVSFLVPRMRREFGGCAGNIAYNLHLLGGAPIVMATVGQDFGPYREHFETLGIDLSRVKIIDDLSTPQAFITTDRDHNQITAFHPGAMMRSYENHVRDVPGVTLGLVGPDGREGMIQNAEEFAAGGIPFIFDPGQALPLFNGPELREFIEQADYVVVNDYESNLLQTRTGWNEQDIVSRVQAYITTQGSKGALVHTPEKTYDIPPAHERRVVDPTGCGDAFRAGLIYGIQHNYDWLTIGRMGNLMGALKVEHPGSQNQRFDFAEFNDQFKQYFGYAL

SEQ ID NO: 815 - DNA, 969 bp, synthetic construct
  misc_feature 1..969: note = Variant of adenosine kinase
  source 1..969: mol_type = other DNA
atgcaccatcatcaccatcacgggggctccggcatgagtgcactgatttgcggttctttagcgtatgataccatcatggtgtttccggaccagttcaagaaccatattctgcccgatcgtgttcaccgcctcaatgtcagctttcttgtaccacgcatgcgtcgtgaatttggaggctgtgccggcaacattgcgtacaatctgcatctgttgggtggtgctccgatcgtaatggctacggtgggccaagatttcggtccgtatcgcgagcacttcgaaactctgggcattgacttatcccgcgtcaagatcatcgatgatctgagtacaccgcaggccttcattaccaccgacatggatcataaccagattacggcgtttcatccaggcgcaatgatgcgttcgtacgaaaatcacgttcgtgatgtgccgggtgttaccttgggcctcgtaggtcctgatggacgcgagggcatgatccaaaatgccgaagaatttgctgctggtggcattccgttcatttttgacccaggtcaggcagtgccgctgttcaacggccccgaactgcgcgagtttatcgaacaggcggactatgtggtggtcaacgattacgaaagcaatcttcttcaaacgcgtactggctggaacgagcaggacattgtttcacgcgtgcaggcgtatatcaccacgcaaggttcgaaaggagccctggtacatacaccggagaagacctacgatattccgccgattcacgaacgtcgtgtcgttgatccaactggttgcggcgacgcgtttcgcgccggcctgatctatggtattcagcataattatgattggttgaccattggccgcatgggaaacttaatgggtgcgctgaaagtggaacaccctggcacccaaaatcagcgtttcgattttgccgaattcaacgaccagttcaaacaatattttggctacgcgctctaatga

SEQ ID NO: 816 - protein, 321 aa, synthetic construct
  REGION 1..321: note = Variant of adenosine kinase
MHHHHHHGGSGMSALICGSLAYDTIMVFPDQFKNHILPDRVHRLNVSFLVPRMRREFGGCAGNIAYNLHLLGGAPIVMATVGQDFGPYREHFETLGIDLSRVKIIDDLSTPQAFITTDMDHNQITAFHPGAMMRSYENHVRDVPGVTLGLVGPDGREGMIQNAEEFAAGGIPFIFDPGQAVPLFNGPELREFIEQADYVVVNDYESNLLQTRTGWNEQDIVSRVQAYITTQGSKGALVHTPEKTYDIPPIHERRVVDPTGCGDAFRAGLIYGIQHNYDWLTIGRMGNLMGALKVEHPGTQNQRFDFAEFNDQFKQYFGYAL

SEQ ID NO: 817 - DNA, 969 bp, synthetic construct
  misc_feature 1..969: note = Variant of adenosine kinase
  source 1..969: mol_type = other DNA
atgcaccatcatcaccatcacgggggctccggcatgagtgcactgatttgcggttctttagcgtatgataccatcatggtgtttccggaccagttcaagaaccatattctgcccgatcgtgttcaccgcctcaatgtcagctttcttgtaccacgcatgcgtcgtgaatttggaggctgtgccggcaacattgcgtacaatctgcatctgttgggtggtgctccgatcgtaatggctacggtgggccaagatttcggtccgtatcgcgagcacttcgaaactctgggcattgacttatcccgcgtcaagatcatcgatgatctgagtacaccgcaggccttcattaccaccgaccatgatcataaccagattacggcgtttcatggcggcgcaatgatgcgttcgtacgaaaatcacgttcgtgatgtgccgggtgttaccttgggcctcgtaggtcctgatggacgcgagggcatgatccaaaatgccgaagaatttgctgctggtggcattccgttcatttttgacccaggtcaggcactgccgctgttcaacggccccgaactgcgcgagtttatcgaacaggcggactatgtggtggtcaacgattacgaaagcaatcttcttcaaacgcgtactggctggaacgagcaggacattgtttcacgcgtgcaggcgtatatcaccacgcaaggttcgaaaggagccctggtacatacaccggagaagacctacgatattccgccggcacacgaacgtcgtgtcgttgatccaactggttgcggcgacgcgtttcgcgccggcctgatctatggtattcagcataattatgattggttgaccattggccgcatgggaaacttaatgggtgcgctgaaagtggaacaccctggcacgcaaaatcagcgtttcgattttgccgaattcaacgaccagttcaaacaatattttggctacgcgctctaatga

SEQ ID NO: 818 - protein, 321 aa, synthetic construct
  REGION 1..321: note = Variant of adenosine kinase
MHHHHHHGGSGMSALICGSLAYDTIMVFPDQFKNHILPDRVHRLNVSFLVPRMRREFGGCAGNIAYNLHLLGGAPIVMATVGQDFGPYREHFETLGIDLSRVKIIDDLSTPQAFITTDHDHNQITAFHGGAMMRSYENHVRDVPGVTLGLVGPDGREGMIQNAEEFAAGGIPFIFDPGQALPLFNGPELREFIEQADYVVVNDYESNLLQTRTGWNEQDIVSRVQAYITTQGSKGALVHTPEKTYDIPPAHERRVVDPTGCGDAFRAGLIYGIQHNYDWLTIGRMGNLMGALKVEHPGTQNQRFDFAEFNDQFKQYFGYAL

SEQ ID NO: 819 - DNA, 969 bp, synthetic construct
  misc_feature 1..969: note = Variant of adenosine kinase
  source 1..969: mol_type = other DNA
atgcaccatcatcaccatcacgggggctccggcatgagtgcactgatttgcggttctttagcgtatgataccatcatggtgtttccggaccagttcaagaaccatattctgcccgatcgtgttcaccgcctcaatgtcagctttcttgtaccacgcatgcgtcgtgggtttggaggctgtgccggcaacattgcgtacaatctgcatctgttgggtggtgctccgatcgtaatggctacggtgggccaagatttcggtccgtatcgcgagcacttcgaaactctgggcattgacttatcccgcgtcaagatcatcgatgatctgagtacaccgcaggccttcattaccaccgaccatgatcacaaccagattacggcgtttcatccaggcgcaatgatgcgttcgtacgaaaatcacgttcgtgatgtgccgggtgttaccttgggcctcgtaggtcctgatggacgcgagggcatgatccaaaatgccgaagaatttgctgctggtggcattccgttcatttttgacccaggtcaggcactgccgctgttcaacggccccgaactgcgcgagtttatcgaacaggcggactatgtggtggtcaacgattacgaaagcaatcttcttcaaacgcgtactggctggaacgagcaggacattgtttcacgcgtgcaggcgtatatcaccacgcaaggttcgaaaggagccgtggtacatacaccggagaagacctacgatattccgccggcacacgaacgtcgcgtcgttgatccaactggttgcggcgacgcgtttcgcgccggcctgatctatggtattcagcataattatgattggttgaccattggccgcatgggaaacttaatgggtgcgctgaaagtggaacaccctggcacgcaaaatcagcgtttcgattttgccgaattcaacgaccagttcaaacaatattttggctacgcgctctaatga

SEQ ID NO: 820 - protein, 321 aa, synthetic construct
  REGION 1..321: note = Variant of adenosine kinase
MHHHHHHGGSGMSALICGSLAYDTIMVFPDQFKNHILPDRVHRLNVSFLVPRMRRGFGGCAGNIAYNLHLLGGAPIVMATVGQDFGPYREHFETLGIDLSRVKIIDDLSTPQAFITTDHDHNQITAFHPGAMMRSYENHVRDVPGVTLGLVGPDGREGMIQNAEEFAAGGIPFIFDPGQALPLFNGPELREFIEQADYVVVNDYESNLLQTRTGWNEQDIVSRVQAYITTQGSKGAVVHTPEKTYDIPPAHERRVVDPTGCGDAFRAGLIYGIQHNYDWLTIGRMGNLMGALKVEHPGTQNQRFDFAEFNDQFKQYFGYAL

SEQ ID NO: 821 - DNA, 969 bp, synthetic construct
  misc_feature 1..969: note = Variant of adenosine kinase
  source 1..969: mol_type = other DNA
atgcaccatcatcaccatcacgggggctccggcatgagtgcactgatttgcggttctttagcgtatgataccatcatggtgtttccggaccagttcaagaaccatattctgcccgatcgtgttcaccgcctcaatgtcagctttcttgtaccacgcatgcgtcgtgaatttggaggctgtgccggcaacattgcgtacaatctgcatctgttgggtggtgctccgatcgtaatggctacggtgggccaagatttcggtccgtatcgcgagcacttcgaaactctgggcattgacttatcccgcgtcaagatcatcgatgatctgagtacaccgcaggccttcattaccaccgaccacgatcataaccagattacggcgtttcatccaggcgcaatgatgcgttcgtacgaaaatcacgttcgtgatgtgccgggtgttaccttgggcctcgtaggtcctgatggacgcgagggcatgatccaaaatgccgaagaatttgctgctggtggcattccgttcatttttgacccaggtcaggcactgccgctgttcaacggccccgaactgcgcgagtttatcgaacaggcggactatgtggtggtcaacgattacgaaagcaatcttcttcaaacgcgtactggctggaacgagcaggacattgtttcacgcgtgcaggcgtatatcaccacgcaaggttcgaaaggagccctggtacatacaccggagaagacctacgatattccgccgattcacgaacgtcgtgtcgttgatccaactggttgcggcgacgcgtttcgcgccggcctgatctatggtattcagcataattatgattggttgaccattggccgcatgggaaacttaatgggtgcgctgaaagtggaacaccctggcagccaaaatcagcgtttcgattttgccgaattcaacgaccagttcaaacaatattttggctacgcgctctaatga

SEQ ID NO: 822 - protein, 321 aa, synthetic construct
  REGION 1..321: note = Variant of adenosine kinase
MHHHHHHGGSGMSALICGSLAYDTIMVFPDQFKNHILPDRVHRLNVSFLVPRMRREFGGCAGNIAYNLHLLGGAPIVMATVGQDFGPYREHFETLGIDLSRVKIIDDLSTPQAFITTDHDHNQITAFHPGAMMRSYENHVRDVPGVTLGLVGPDGREGMIQNAEEFAAGGIPFIFDPGQALPLFNGPELREFIEQADYVVVNDYESNLLQTRTGWNEQDIVSRVQAYITTQGSKGALVHTPEKTYDIPPIHERRVVDPTGCGDAFRAGLIYGIQHNYDWLTIGRMGNLMGALKVEHPGSQNQRFDFAEFNDQFKQYFGYAL

SEQ ID NO: 823 - DNA, 969 bp, synthetic construct
  misc_feature 1..969: note = Variant of adenosine kinase
  source 1..969: mol_type = other DNA
atgcaccatcatcaccatcacgggggctccggcatgagtgcactgatttgcggttctttagcgtatgataccatcatggtgtttccggaccagttcaagaaccatattctgcccgatcgtgttcaccgcctcaatgtcagctttcttgtaccacgcatgcgtcgtgaatttggaggctgtgccggcaacattgcgtacaatctgcatctgttgggtggtgctccgatcgtaatggctacggtgggccaagatttcggtccgtatcgcgagcacttcgaaactctgggcattgacttatcccgcgtcaagatcatcgatgatctgagtacaccgcaggccttcattaccaccgacatggatcataaccagattacggcgtttcatccaggcgcaatgatgcgttcgtacgaaaatcacgttcgtgatgtgccgggtgttaccttgggcctcgtaggtcctgatggacgcgagggcatgatccaaaatgccgaagaatttgctgctggtggcattccgttcatttttgacccaggtcaggcactgccgctgttcaacggccccgaactgcgcgagtttatcgaacaggcggactatgtggtggtcaacgattacgaaagcaatcttcttcaaacgcgtactggctggaacgagcaggacattgtttcacgcgtgcaggcgtatatcaccacgcaaggttcggctggagccctggtacatacaccggagaagacctacgatattccgccggcacacgaacgtcgtaagatggatccaactggttgcggcgacgcgtttcgcgccggcctgatctatggtattcagcataattatgattggttgaccattggccgcatgggaaacttaatgggtgcgctgaaagtggaacaccctggcagccaaaatcagcgtttcgattttgccgaattcaacgaccagttcaaacaatattttggctacgcgctctaatga

SEQ ID NO: 824 - protein, 321 aa, synthetic construct
  REGION 1..321: note = Variant of adenosine kinase
MHHHHHHGGSGMSALICGSLAYDTIMVFPDQFKNHILPDRVHRLNVSFLVPRMRREFGGCAGNIAYNLHLLGGAPIVMATVGQDFGPYREHFETLGIDLSRVKIIDDLSTPQAFITTDMDHNQITAFHPGAMMRSYENHVRDVPGVTLGLVGPDGREGMIQNAEEFAAGGIPFIFDPGQALPLFNGPELREFIEQADYVVVNDYESNLLQTRTGWNEQDIVSRVQAYITTQGSAGALVHTPEKTYDIPPAHERRKMDPTGCGDAFRAGLIYGIQHNYDWLTIGRMGNLMGALKVEHPGSQNQRFDFAEFNDQFKQYFGYAL

SEQ ID NO: 825 - DNA, 969 bp, synthetic construct
  misc_feature 1..969: note = Variant of adenosine kinase
  source 1..969: mol_type = other DNA
atgcaccatcatcaccatcacgggggctccggcatgagtgcactgatttgcggttctctggcgtatgataccatcatggtgtttccggaccagttcaagaaccatattctgcccgatcgtgttcaccgcctcaatgtcagctttcttgtaccacgcatgcgtcgtgggtttggaggctgtgccggcaacattgcgtacaatctgcatctgttgggtggtgctccgatcgtaatggctacggtgggccaagatttcggtccgtatcgcgagcacttcgaaactctgggcattgacttatcccgcgtcaagatcatcgatgatctgagtacaccgcaggccttcattaccaccgaccatgatcacaaccagattacggcgtttcatccaggcgcaatgatgcgttcgtacgaaaatcacgttcgtgatgtgccgggtgttaccttgggcctcgtaggtcctgatggacgcgagggcatgatccaaaatgccgaagaatttgctgctggtggcattccgttcatttttgacccaggtcaggcactgccgctgttcaacggccccgaactgcgcgagtttatcgaacaggcggactatgtggtggtcaacgattacgaaagcaatcttcttcaaacgcgtactggctggaacgagcaggacattgtttcacgcgtgcaggcgtatatcgttacgcaaggttcgaaaggagccctggtacatacaccggagaagacctacgatattccgccggcacacgaacgtctggtcgttgatccaactggttgcggcgacgcgtttcgcgccggcctgatctatggtattcagcataattatgattggttgaccattggccgcatgggaaacttaatgggtgcgctgaaagtggaacaccctggcacgcaaaatcagcgtttcgattttgccgaattcaacgaccagttcaaacaatatttcggctacgcgctctaatga

SEQ ID NO: 826 - protein, 321 aa, synthetic construct
  REGION 1..321: note = Variant of adenosine kinase
MHHHHHHGGSGMSALICGSLAYDTIMVFPDQFKNHILPDRVHRLNVSFLVPRMRRGFGGCAGNIAYNLHLLGGAPIVMATVGQDFGPYREHFETLGIDLSRVKIIDDLSTPQAFITTDHDHNQITAFHPGAMMRSYENHVRDVPGVTLGLVGPDGREGMIQNAEEFAAGGIPFIFDPGQALPLFNGPELREFIEQADYVVVNDYESNLLQTRTGWNEQDIVSRVQAYIVTQGSKGALVHTPEKTYDIPPAHERLVVDPTGCGDAFRAGLIYGIQHNYDWLTIGRMGNLMGALKVEHPGTQNQRFDFAEFNDQFKQYFGYAL

SEQ ID NO: 827 - DNA, 969 bp, synthetic construct
  misc_feature 1..969: note = Variant of adenosine kinase
  source 1..969: mol_type = other DNA
atgcaccatcatcaccatcacgggggctccggcatgagtgcactgatttgcggttctttagcgtatgataccatcatggtgtttccggaccagttcaagaaccatattctgcccgatcgtgttcaccgcctcaatgtcagctttcttgtaccacgcatgcgtcgtgaatttggaggctgtgccggcaacattgcgtacaatctgcatctgttgggtggtgctccgatcgtaatggctacggtgggccaagatttcggtccgtatcgcgagcacttcgaaactctgggcattgacttatcccgcgtcaagatcatcgatgatctgagtacaccgcaggccttcattaccaccgaccgcgatcataaccagattacggcgtttcatggcggcgcaatgatgcgttcgtacgaaaatcacgttcgtgatgtgccgggtgttaccttgggcctcgtaggtcctgatggacgcgagggcatgatccaaaatgccgaagaatttgctgctggtggcattccgttcatttttgacccaggtcaggcagtgccgctgttcaacggccccgaactgcgcgagtttatcgaacaggcggactatgtggtggtcaacgattacgaaagcaatcttcttcaaacgcgtactggctggaacgagcaggacattgtttcacgcgtgcaggcgtatatcaccacgcaaggttcgaaaggagccctggtacatacaccggagaagacctacgatattccgccggcacacgaacgtcgtgtcgttgatccaactggttgcggcgacgcgtttcgcgccggcctgatctatggtattcagcataattatgattggttgaccattggccgcatgggaaacttaatgggtgcgctgaaagtggaacaccctggcacgcaaaatcagcgtttcgattttgccgaattcaacgaccagttcaaacaatattttggctacgcgctctaatga

SEQ ID NO: 828 - protein, 321 aa, synthetic construct
  REGION 1..321: note = Variant of adenosine kinase
MHHHHHHGGSGMSALICGSLAYDTIMVFPDQFKNHILPDRVHRLNVSFLVPRMRREFGGCAGNIAYNLHLLGGAPIVMATVGQDFGPYREHFETLGIDLSRVKIIDDLSTPQAFITTDRDHNQITAFHGGAMMRSYENHVRDVPGVTLGLVGPDGREGMIQNAEEFAAGGIPFIFDPGQAVPLFNGPELREFIEQADYVVVNDYESNLLQTRTGWNEQDIVSRVQAYITTQGSKGALVHTPEKTYDIPPAHERRVVDPTGCGDAFRAGLIYGIQHNYDWLTIGRMGNLMGALKVEHPGTQNQRFDFAEFNDQFKQYFGYAL

SEQ ID NO: 829 - DNA, 969 bp, synthetic construct
  misc_feature 1..969: note = Variant of adenosine kinase
  source 1..969: mol_type = other DNA
atgcaccatcatcaccatcacgggggctccggcatgagtgcactgatttgcggttctctggcgtatgataccatcatggtgtttccggaccagttcaagaaccatattctgcccgatcgtgttcaccgcctcaatgtcagctttcttgtaccacgcatgcgtcgtgggtttggaggctgtgccggcaacattgcgtacaatctgcatctgttgggtggtgctccgatcgtaatggctacggtgggccaagatttcggtccgtatcgcgagcacttcgaaactctgggcattgacttatcccgcgtcaagatcatcgatgatctgagtacaccgcaggccttcattaccaccgaccatgatatgaaccagattacggcgtttcatccaggcgcaatgatgcgttcgtacgaaaatcacgttcgtgatgtgccgggtgttaccttgggcctcgtaggtcctgatggacgcgagggcatgatccaaaatgccgaagaatttgctgctggtggcattccgttcatttttgacccaggtcaggcactgccgctgttcaacggccccgaactgcgcgagtttatcgaacaggcggactatgtggtggtcaacgattacgaaagcaatcttcttcaaacgcgtactggctggaacgagcaggacattgtttcacgcgtgcaggcgtatatcacgacgcaaggttcgaaaggagccctggtacatacaccggagaagacctacgatattccgccggcacacgaacgtcgcgtcgttgatccaactggttgcggcgacgcgtttcgcgccggcctgatctatggtattcagcataattatgattggttgaccattggccgcatgggaaacttaatgggtgcgctgaaagtggcacaccctggcacgcaaaatcagcgtttcgattttgccgaattcaacgaccagttcaaacaatattacggctacgcgctctaatga

SEQ ID NO: 830 - protein, 321 aa, synthetic construct
  REGION 1..321: note = Variant of adenosine kinase
MHHHHHHGGSGMSALICGSLAYDTIMVFPDQFKNHILPDRVHRLNVSFLVPRMRRGFGGCAGNIAYNLHLLGGAPIVMATVGQDFGPYREHFETLGIDLSRVKIIDDLSTPQAFITTDHDMNQITAFHPGAMMRSYENHVRDVPGVTLGLVGPDGREGMIQNAEEFAAGGIPFIFDPGQALPLFNGPELREFIEQADYVVVNDYESNLLQTRTGWNEQDIVSRVQAYITTQGSKGALVHTPEKTYDIPPAHERRVVDPTGCGDAFRAGLIYGIQHNYDWLTIGRMGNLMGALKVAHPGTQNQRFDFAEFNDQFKQYYGYAL

SEQ ID NO: 831 - DNA, 969 bp, synthetic construct
  misc_feature 1..969: note = Variant of adenosine kinase
  source 1..969: mol_type = other DNA
atgcaccatcatcaccatcacgggggctccggcatgagtgcactgatttgcggttctttagcgtatgataccatcatggtgtttccggaccagttcaagaaccatattctgcccgatcgtgttcaccgcctcaatgtcagctttcttgtaccacgcatgcgtcgtgaatttggaggctgtgccggcaacattgcgtacaatctgcatctgttgggtggtgctccgatcgtaatggctacggtgggccaagatttcggtccgtatcgcgagcacttcgaaactctgggcattgacttatcccgcgtcaagatcatcgatgatctgagtacaccgcaggccttcattaccaccgaccgcgatcataaccagattacggcgtttcatccaggcgcaatgatgcgttcgtacgaaaatcacgttcgtgatgtgccgggtgttaccttgggcctcgtaggtcctgatggacgcgagggcatgatccaaaatgccgaagaatttgctgctggtggcattccgttcatttttgacccaggtcaggcagtgccgctgttcaacggccccgaactgcgcgagtttatcgaacaggcggactatgtggtggtcaacgattacgaaagcaatcttcttcaaacgcgtactggctggaacgagcaggacattgtttcacgcgtgcaggcgtatatcaccacgcaaggttcgaaaggagccctggtacatacaccggagaagacctacgatattccgccgattcacgaacgtcgtgcgatggatccaactggttgcggcgacgcgtttcgcgccggcctgatctatggtattcagcataattatgattggttgaccattggccgcatgggaaacttaatgggtgcgctgaaagtggaacaccctggcacccaaaatcagcgtttcgattttgccgaattcaacgaccagttcaaacaatattttggctacgcgctctaatga

SEQ ID NO: 832 - protein, 321 aa, synthetic construct
  REGION 1..321: note = Variant of adenosine kinase
MHHHHHHGGSGMSALICGSLAYDTIMVFPDQFKNHILPDRVHRLNVSFLVPRMRREFGGCAGNIAYNLHLLGGAPIVMATVGQDFGPYREHFETLGIDLSRVKIIDDLSTPQAFITTDRDHNQITAFHPGAMMRSYENHVRDVPGVTLGLVGPDGREGMIQNAEEFAAGGIPFIFDPGQAVPLFNGPELREFIEQADYVVVNDYESNLLQTRTGWNEQDIVSRVQAYITTQGSKGALVHTPEKTYDIPPIHERRAMDPTGCGDAFRAGLIYGIQHNYDWLTIGRMGNLMGALKVEHPGTQNQRFDFAEFNDQFKQYFGYAL

SEQ ID NO: 833 - DNA, 969 bp, synthetic construct
  misc_feature 1..969: note = Variant of adenosine kinase
  source 1..969: mol_type = other DNA
atgcaccatcatcaccatcacgggggctccggcatgagtgcactgatttgcggttctttagcgtatgataccatcatggtgtttccggaccagttcaagaaccatattctgcccgatcgtgttcaccgcctcaatgtcagctttcttgtaccacgcatgcgtcgtgagtttggaggctgtgccggcaacattgcgtacaatctgcatctgttgggtggtgctccgatcgtaatggctacggtgggccaagatttcggtccgtatcgcgagcacttcgaaactctgggcattgacttatcccgcgtcaagatcatcgatgatctgagtacaccgcaggccttcattaccaccgaccatgatcataaccagattacggcgtttcatccaggcgcaatgatgcgttcgtacgaaaatcacgttcgtgatgtgccgggtgttaccttgggcctcgtaggtcctgatggacgcgagggcatgatccaaaatgccgaagaatttgctgctggtggcattccgttcatttttgacccaggtcaggcactgccgctgttcaacggccccgaactgcgcgagtttatcgaacaggcggactatgtggtggtcaacgattacgaaagcaatcttcttcaaacgcgtactggctggaacgagcaggacattgtttcacgcgtgcaggcgtatatcgttacgcaaggttcgaaaggagccctggtacatacaccggagaagacctacgatattccgccggcacacgaacgtcgcgtcgttgatccaactggttgcggcgacgcgtttcgcgccggcctgatctatggtattcagcataattatgattggttgaccattggccgcatgggaaacttaatgggtgcgctgaaagtggaacaccctggcacgcaaaatcagcgtttcgattttgccgaattcaacgaccagttcaaacaatattttggctacgcgctctaatga

SEQ ID NO: 834 - protein, 321 aa, synthetic construct
  REGION 1..321: note = Variant of adenosine kinase
MHHHHHHGGSGMSALICGSLAYDTIMVFPDQFKNHILPDRVHRLNVSFLVPRMRREFGGCAGNIAYNLHLLGGAPIVMATVGQDFGPYREHFETLGIDLSRVKIIDDLSTPQAFITTDHDHNQITAFHPGAMMRSYENHVRDVPGVTLGLVGPDGREGMIQNAEEFAAGGIPFIFDPGQALPLFNGPELREFIEQADYVVVNDYESNLLQTRTGWNEQDIVSRVQAYIVTQGSKGALVHTPEKTYDIPPAHERRVVDPTGCGDAFRAGLIYGIQHNYDWLTIGRMGNLMGALKVEHPGTQNQRFDFAEFNDQFKQYFGYAL

SEQ ID NO: 835 - DNA, 969 bp, synthetic construct
  misc_feature 1..969: note = Variant of adenosine kinase
  source 1..969: mol_type = other DNA
atgcaccatcatcaccatcacgggggctccggcatgagtgcactgatttgcggttctttagcgtatgataccatcatggtgtttccggaccagttcaagaaccatattctgcccgatcgtgttcaccgcctcaatgtcagctttcttgtaccacgcatgcgtcgtgaatttggaggctgtgccggcaacattgcgtacaatctgcatctgttgggtggtgctccgatcgtaatggctacggtgggccaagatttcggtccgtatcgcgagcacttcgaaactctgggcattgacttatcccgcgtcaagatcatcgatgatctgagtacaccgcaggccttcattaccaccgaccatgatcataaccagattacggcgtttcatccaggcgcaatgatgcgttcgtacgaaaatcacgttcgtgatgtgccgggtgttaccttgggcctcgtaggtcctgatggacgcgagggcatgatccaaaatgccgaagaatttgctgctggtggcattccgttcatttttgacccaggtcaggcactgccgctgttcaacggccccgaactgcgcgagtttatcgaacaggcggactatgtggtggtcaacgattacgaaagcaatcttcttcaaacgcgtactggctggaacgagcaggacattgtttcacgcgtgcaggcgtatatcaccacgcaaggttcgaaaggagccctggtacatacaccggagaagacctacgatattccgccgattcacgaacgtcgtgtcgttgatccaactggttgcggcgacgcgtttcgcgccggcctgatctatggtattcagcataattatgattggttgaccattggccgcatgggaaacttaatgggtgcgctgaaagtggaacaccctggcacgcaaaatcagcgtttcgattttgccgaattcaacgaccagttcaaacaatattttggctacgcgctctaatga

SEQ ID NO: 836 - protein, 321 aa, synthetic construct
  REGION 1..321: note = Variant of adenosine kinase
MHHHHHHGGSGMSALICGSLAYDTIMVFPDQFKNHILPDRVHRLNVSFLVPRMRREFGGCAGNIAYNLHLLGGAPIVMATVGQDFGPYREHFETLGIDLSRVKIIDDLSTPQAFITTDHDHNQITAFHPGAMMRSYENHVRDVPGVTLGLVGPDGREGMIQNAEEFAAGGIPFIFDPGQALPLFNGPELREFIEQADYVVVNDYESNLLQTRTGWNEQDIVSRVQAYITTQGSKGALVHTPEKTYDIPPIHERRVVDPTGCGDAFRAGLIYGIQHNYDWLTIGRMGNLMGALKVEHPGTQNQRFDFAEFNDQFKQYFGYAL

SEQ ID NO: 837 - DNA, 969 bp, synthetic construct
  misc_feature 1..969: note = Variant of adenosine kinase
  source 1..969: mol_type = other DNA
atgcaccatcatcaccatcacgggggctccggcatgagtgcactgatttgcggttctttagcgtatgataccatcatggtgtttccggaccagttcaagaaccatattctgcccgatcgtgttcaccgcctcaatgtcagctttcttgtaccacgcatgcgtcgtgaatttggaggctgtgccggcaacattgcgtacaatctgcatctgttgggtggtgctccgatcgtaatggctacggtgggccaagatttcggtccgtatcgcgagcacttcgaaactctgggcattgacttatcccgcgtcaagatcatcgatgatctgagtacaccgcaggccttcattaccaccgacatggatcataaccagattacggcgtttcatccaggcgcaatgatgcgttcgtacgaaaatcacgttcgtgatgtgccgggtgttaccttgggcctcgtaggtcctgatggacgcgagggcatgatccaaaatgccgaagaatttgctgctggtggcattccgttcatttttgacccaggtcaggcactgccgctgttcaacggccccgaactgcgcgagtttatcgaacaggcggactatgtggtggtcaacgattacgaaagcaatcttcttcaaacgcgtactggctggaacgagcaggacattgtttcacgcgtgcaggcgtatatcaccacgcaaggttcgaaaggagccctggtacatacaccggagaagacctacgatattccgccggctcacgaacgtcgtgtcgttgatccaactggttgcggcgacgcgtttcgcgccggcctgatctatggtattcagcataattatgattggttgaccattggccgcatgggaaacttaatgggtgcgctgaaagtggaacaccctggcacccaaaatcagcgtttcgattttgccgaattcaacgaccagttcaaacaatattttggctacgcgctctaatga

SEQ ID NO: 838 - protein, 321 aa, synthetic construct
  REGION 1..321: note = Variant of adenosine kinase
MHHHHHHGGSGMSALICGSLAYDTIMVFPDQFKNHILPDRVHRLNVSFLVPRMRREFGGCAGNIAYNLHLLGGAPIVMATVGQDFGPYREHFETLGIDLSRVKIIDDLSTPQAFITTDMDHNQITAFHPGAMMRSYENHVRDVPGVTLGLVGPDGREGMIQNAEEFAAGGIPFIFDPGQALPLFNGPELREFIEQADYVVVNDYESNLLQTRTGWNEQDIVSRVQAYITTQGSKGALVHTPEKTYDIPPAHERRVVDPTGCGDAFRAGLIYGIQHNYDWLTIGRMGNLMGALKVEHPGTQNQRFDFAEFNDQFKQYFGYAL

SEQ ID NO: 839 - DNA, 969 bp, synthetic construct
  misc_feature 1..969: note = Variant of adenosine kinase
  source 1..969: mol_type = other DNA
atgcaccatcatcaccatcacgggggctccggcatgagtgcactgatttgcggttctttagcgtatgataccatcatggtgtttccggaccagttcaagaaccatattctgcccgatcgtgttcaccgcctcaatgtcagctttcttgtaccacgcatgcgtcgtgaatttggaggctgtgccggcaacattgcgtacaatctgcatctgttgggtggtgctccgatcgtaatggctacggtgggccaagatttcggtccgtatcgcgagcacttcgaaactctgggcattgacttatcccgcgtcaagatcatcgatgatctgagtacaccgcaggccttcattaccaccgacatggatcataaccagattacggcgtttcatccaggcgcaatgatgcgttcgtacgaaaatcacgttcgtgatgtgccgggtgttaccttgggcctcgtaggtcctgatggacgcgagggcatgatccaaaatgccgaagaatttgctgctggtggcattccgttcatttttgacccaggtcaggcactgccgctgttcaacggccccgaactgcgcgagtttatcgaacaggcggactatgtggtggtcaacgattacgaaagcaatcttcttcaaacgcgtactggctggaacgagcaggacattgtttcacgcgtgcaggcgtatatcaccacgcaaggttcggctggagccctggtacatacaccggagaagacctacgatattccgccggcacacgaacgtcgtgtggtggatccaactggttgcggcgacgcgtttcgcgccggcctgatctatggtattcagcataattatgattggttgaccattggccgcatgggaaacttaatgggtgcgctgaaagtggaacaccctggcacgcaaaatcagcgtttcgattttgccgaattcaacgaccagttcaaacaatattttggctacgcgctctaatga

SEQ ID NO: 840 - protein, 321 aa, synthetic construct
  REGION 1..321: note = Variant of adenosine kinase
MHHHHHHGGSGMSALICGSLAYDTIMVFPDQFKNHILPDRVHRLNVSFLVPRMRREFGGCAGNIAYNLHLLGGAPIVMATVGQDFGPYREHFETLGIDLSRVKIIDDLSTPQAFITTDMDHNQITAFHPGAMMRSYENHVRDVPGVTLGLVGPDGREGMIQNAEEFAAGGIPFIFDPGQALPLFNGPELREFIEQADYVVVNDYESNLLQTRTGWNEQDIVSRVQAYITTQGSAGALVHTPEKTYDIPPAHERRVVDPTGCGDAFRAGLIYGIQHNYDWLTIGRMGNLMGALKVEHPGTQNQRFDFAEFNDQFKQYFGYAL

SEQ ID NO: 841 - DNA, 969 bp, synthetic construct
  misc_feature 1..969: note = Variant of adenosine kinase
  source 1..969: mol_type = other DNA
atgcaccatcatcaccatcacgggggctccggcatgagtgcactgatttgcggttctttcgcgtatgataccatcatggtgtttccggaccagttcaagaaccatattctgcccgatcgtgttcaccgcctcaatgtcagctttcttgtaccacgcatgcgtcgtgagtttggaggctgtgccggcaacattgcgtacaatctgcatctgttgggtggtgctccgatcgtaatggctacggtgggccaagatttcggtccgtatcgcgagcacttcgaaactctgggcattgacttatcccgcgtcaagatcatcgatgatctgagtacaccgcaggccttcattaccaccgaccatgatcacaaccagattacggcgtttcatccaggcgcaatgatgcgttcgtacgaaaatcacgttcgtgatgtgccgggtgttaccttgggcctcgtaggtcctgatggacgcgagggcatgatccaaaatgccgaagaatttgctgctggtggcattccgttcatttttgacccaggtcaggcactgccgctgttcaacggccccgaactgcgcgagtttatcgaacaggcggactatgtggtggtcaacgattacgaaagcaatcttcttcaaacgcgtactggctggaacgagcaggacattgtttcacgcgtgcaggcgtatatcgttacgcaaggttcgaaaggagccgtggtacatacaccggagaagacctacgatattccgccggcacacgaacgtcgcgtcgttgatccaactggttgcggcgacgcgtttcgcgccggcctgatctatggtattcagcataattatgattggttgaccattggccgcatgggaaacttaatgggtgcgctgaaagtggaacaccctggcacgcaaaatcagcgtttcgattttgccgaattcaacgaccagttcaaacaatattacggctacgcgctctaatga

SEQ ID NO: 842 - protein, 321 aa, synthetic construct
  REGION 1..321: note = Variant of adenosine kinase
MHHHHHHGGSGMSALICGSFAYDTIMVFPDQFKNHILPDRVHRLNVSFLVPRMRREFGGCAGNIAYNLHLLGGAPIVMATVGQDFGPYREHFETLGIDLSRVKIIDDLSTPQAFITTDHDHNQITAFHPGAMMRSYENHVRDVPGVTLGLVGPDGREGMIQNAEEFAAGGIPFIFDPGQALPLFNGPELREFIEQADYVVVNDYESNLLQTRTGWNEQDIVSRVQAYIVTQGSKGAVVHTPEKTYDIPPAHERRVVDPTGCGDAFRAGLIYGIQHNYDWLTIGRMGNLMGALKVEHPGTQNQRFDFAEFNDQFKQYYGYAL

SEQ ID NO: 843 - DNA, 969 bp, synthetic construct
  misc_feature 1..969: note = Variant of adenosine kinase
  source 1..969: mol_type = other DNA
atgcaccatcatcaccatcacgggggctccggcatgagtgcactgatttgcggttctttagcgtatgataccatcatggtgtttccggaccagttcaagaaccatattctgcccgatcgtgttcaccgcctcaatgtcagctttcttgtaccacgcatgcgtcgtgaatttggaggctgtgccggcaacattgcgtacaatctgcatctgttgggtggtgctccgatcgtaatggctacggtgggccaagatttcggtccgtatcgcgagcacttcgaaactctgggcattgacttatcccgcgtcaagatcatcgatgatctgagtacaccgcaggccttcattaccaccgaccatgatcataaccagattacggcgtttcatccaggcgcaatgatgcgttcgtacgaaaatcacgttcgtgatgtgccgggtgttaccttgggcctcgtaggtcctgatggacgcgagggcatgatccaaaatgccgaagaatttgctgctggtggcattccgttcatttttgacccaggtcaggcagtgccgctgttcaacggccccgaactgcgcgagtttatcgaacaggcggactatgtggtggtcaacgattacgaaagcaatcttcttcaaacgcgtactggctggaacgagcaggacattgtttcacgcgtgcaggcgtatatcaccacgcaaggttcgaaaggagccctggtacatacaccggagaagacctacgatattccgccgattcacgaacgtcgtgtcgttgatccaactggttgcggcgacgcgtttcgcgccggcctgatctatggtattcagcataattatgattggttgaccattggccgcatgggaaacttaatgggtgcgctgaaagtggaacaccctggcacgcaaaatcagcgtttcgattttgccgaattcaacgaccagttcaaacaatattttggctacgcgctctaatga

SEQ ID NO: 844 - protein, 321 aa, synthetic construct
  REGION 1..321: note = Variant of adenosine kinase
MHHHHHHGGSGMSALICGSLAYDTIMVFPDQFKNHILPDRVHRLNVSFLVPRMRREFGGCAGNIAYNLHLLGGAPIVMATVGQDFGPYREHFETLGIDLSRVKIIDDLSTPQAFITTDHDHNQITAFHPGAMMRSYENHVRDVPGVTLGLVGPDGREGMIQNAEEFAAGGIPFIFDPGQAVPLFNGPELREFIEQADYVVVNDYESNLLQTRTGWNEQDIVSRVQAYITTQGSKGALVHTPEKTYDIPPIHERRVVDPTGCGDAFRAGLIYGIQHNYDWLTIGRMGNLMGALKVEHPGTQNQRFDFAEFNDQFKQYFGYAL

SEQ ID NO: 845 - DNA, 969 bp, synthetic construct
  misc_feature 1..969: note = Variant of adenosine kinase
  source 1..969: mol_type = other DNA
atgcaccatcatcaccatcacgggggctccggcatgagtgcactgatttgcggttctttagcgtatgataccatcatggtgtttccggaccagttcaagaaccatattctgcccgatcgtgttcaccgcctcaatgtcagctttcttgtaccacgcatgcgtcgtgaatttggaggctgtgccggcaacattgcgtacaatctgcatctgttgggtggtgctccgatcgtaatggctacggtgggccaagatttcggtccgtatcgcgagcacttcgaaactctgggcattgacttatcccgcgtcaagatcatcgatgatctgagtacaccgcaggccttcattaccaccgacatggatcataaccagattacggcgtttcatccaggcgcaatgatgcgttcgtacgaaaatcacgttcgtgatgtgccgggtgttaccttgggcctcgtaggtcctgatggacgcgagggcatgatccaaaatgccgaagaatttgctgctggtggcattccgttcatttttgacccaggtcaggcactgccgctgttcaacggccccgaactgcgcgagtttatcgaacaggcggactatgtggtggtcaacgattacgaaagcaatcttcttcaaacgcgtactggctggaacgagcaggacattgtttcacgcgtgcaggcgtatatcaccacgcaaggttcgaaaggagccctggtacatacaccggagaagacctacgatattccgccggcacacgaacgtcgtaaggtggatccaactggttgcggcgacgcgtttcgcgccggcctgatctatggtattcagcataattatgattggttgaccattggccgcatgggaaacttaatgggtgcgctgaaagtggaacaccctggcacgcaaaatcagcgtttcgattttgccgaattcaacgaccagttcaaacaatattttggctacgcgctctaatga

SEQ ID NO: 846 - protein, 321 aa, synthetic construct
  REGION 1..321: note = Variant of adenosine kinase
MHHHHHHGGSGMSALICGSLAYDTIMVFPDQFKNHILPDRVHRLNVSFLVPRMRREFGGCAGNIAYNLHLLGGAPIVMATVGQDFGPYREHFETLGIDLSRVKIIDDLSTPQAFITTDMDHNQITAFHPGAMMRSYENHVRDVPGVTLGLVGPDGREGMIQNAEEFAAGGIPFIFDPGQALPLFNGPELREFIEQADYVVVNDYESNLLQTRTGWNEQDIVSRVQAYITTQGSKGALVHTPEKTYDIPPAHERRKVDPTGCGDAFRAGLIYGIQHNYDWLTIGRMGNLMGALKVEHPGTQNQRFDFAEFNDQFKQYFGYAL

SEQ ID NO: 847 - DNA, 969 bp, synthetic construct
  misc_feature 1..969: note = Variant of adenosine kinase
  source 1..969: mol_type = other DNA
atgcaccatcatcaccatcacgggggctccggcatgagtgcactgatttgcggttctctggcgtatgataccatcatggtgtttccggaccagttcaagaaccatattctgcccgatcgtgttcaccgcctcaatgtcagctttcttgtaccacgcatgcgtcgtgaatttggaggctgtgccggcaacattgcgtacaatctgcatctgttgggtggtgctccgatcgtaatggctacggtgggccaagatttcggtccgtatcgcgagcacttcgaaactctgggcattgacttatcccgcgtcaagatcatcgatgatctgagtacaccgcaggccttcattaccaccgaccatgatatgaaccagattacggcgtttcatccaggcgcaatgatgcgttcgtacgaaaatcacgttcgtgatgtgccgggtgttaccttgggcctcgtaggtcctgatggatatgagggcatgatccaaaatgccgaagaatttgctgctggtggcattccgttcatttttgacccaggtcaggcactgccgctgttcaacggccccgaactgcgcgagtttatcgaacaggcggactatgtggtggtcaacgattacgaaagcaatcttcttcaaacgcgtactggctggaacgagcaggacattgtttcacgcgtgcaggcgtatatcgttacgcaaggttcgaaaggagccctggtacatacaccggagaagacctacgatattccgccggcacacgaacgtcgcgtcgttgatccaactggttgcggcgacgcgtttcgcgccggcctgatctatggtattcagcataattatgattggttgaccattggccgcatgggaaacttaatgggtgcgctgaaagtggaacaccctggcacgcaaaatcagcgtttcgattttgccgaattcaacgaccagttcaaacaatattttggctacgcgctctaatga

SEQ ID NO: 848 - protein, 321 aa, synthetic construct
  REGION 1..321: note = Variant of adenosine kinase
MHHHHHHGGSGMSALICGSLAYDTIMVFPDQFKNHILPDRVHRLNVSFLVPRMRREFGGCAGNIAYNLHLLGGAPIVMATVGQDFGPYREHFETLGIDLSRVKIIDDLSTPQAFITTDHDMNQITAFHPGAMMRSYENHVRDVPGVTLGLVGPDGYEGMIQNAEEFAAGGIPFIFDPGQALPLFNGPELREFIEQADYVVVNDYESNLLQTRTGWNEQDIVSRVQAYIVTQGSKGALVHTPEKTYDIPPAHERRVVDPTGCGDAFRAGLIYGIQHNYDWLTIGRMGNLMGALKVEHPGTQNQRFDFAEFNDQFKQYFGYAL

SEQ ID NO: 849 - DNA, 969 bp, synthetic construct
  misc_feature 1..969: note = Variant of adenosine kinase
  source 1..969: mol_type = other DNA
atgcaccatcatcaccatcacgggggctccggcatgagtgcactgatttgcggttctctggcgtatgataccatcatggtgtttccggaccagttcaagaaccatattctgcccgatcgtgttcaccgcctcaatgtcagctttcttgtaccacgcatgcgtcgtgggtttggaggctgtgccggcaacattgcgtacaatctgcatctgttgggtggtgctccgatcgtaatggctacggtgggccaagatttcggtccgtatcgcgagcacttcgaaactctgggcattgacttatcccgcgtcaagatcatcgatgatctgagtacaccgcaggccttcattaccaccgaccatgatatgaaccagattacggcgtttcatccaggcgcaatgatgcgttcgtacgaaaatcacgttcgtgatgtgccgggtgttaccttgggcctcgtaggtcctgatggacgcgagggcatgatccaaaatgccgaagaatttgctgctggtggcattccgttcatttttgacccaggtcaggcactgccgctgttcaacggccccgaactgcgcgagtttatcgaacaggcggactatgtggtggtcaacgattacgaaagcaatcttcttcaaacgcgtactggctggaacgagcaggacattgtttcacgcgtgcaggcgtatatcacgacgcaaggttcgaaaggagccgtggtacatacaccggagaagacctacgatattccgccggcacacgaacgtcgcgtcgttgatccaactggttgcggcgacgcgtttcgcgccggcctgatctatggtattcagcataattatgattggttgaccattggccgcatgggaaacttaatgggtgcgctgaaagtggaacaccctggcacgcaaaatcagcgtttcgattttgccgaattcaacgaccagttcaaacaatattttggctacgcgctctaatga

SEQ ID NO: 850 - protein, 321 aa, synthetic construct
  REGION 1..321: note = Variant of adenosine kinase
MHHHHHHGGSGMSALICGSLAYDTIMVFPDQFKNHILPDRVHRLNVSFLVPRMRRGFGGCAGNIAYNLHLLGGAPIVMATVGQDFGPYREHFETLGIDLSRVKIIDDLSTPQAFITTDHDMNQITAFHPGAMMRSYENHVRDVPGVTLGLVGPDGREGMIQNAEEFAAGGIPFIFDPGQALPLFNGPELREFIEQADYVVVNDYESNLLQTRTGWNEQDIVSRVQAYITTQGSKGAVVHTPEKTYDIPPAHERRVVDPTGCGDAFRAGLIYGIQHNYDWLTIGRMGNLMGALKVEHPGTQNQRFDFAEFNDQFKQYFGYAL

SEQ ID NO: 851 - DNA, 969 bp, synthetic construct
  misc_feature 1..969: note = Variant of adenosine kinase
  source 1..969: mol_type = other DNA
atgcaccatcatcaccatcacgggggctccggcatgagtgcactgatttgcggttctttagcgtatgataccatcatggtgtttccggaccagttcaagaaccatattctgcccgatcgtgttcaccgcctcaatgtcagctttcttgtaccacgcatgcgtcgtgagtttggaggctgtgccggcaacattgcgtacaatctgcatctgttgggtggtgctccgatcgtaatggctacggtgggccaagatttcggtccgtatcgcgagcacttcgaaactctgggcattgacttatcccgcgtcaagatcatcgatgatctgagtacaccgcaggccttcattaccaccgaccatgatcataaccagattacggcgtttcatccaggcgcaatgatgcgttcgtacgaaaatcacgttcgtgatgtgccgggtgttaccttgggcctcgtaggtcctgatggacgcgagggcatgatccaaaatgccgaagaatttgctgctggtggcattccgttcatttttgacccaggtcaggcactgccgctgttcaacggccccgaactgcgcgagtttatcgaacaggcggactatgtggtggtcaacgattacgaaagcaatcttcttcaaacgcgtactggctggaacgagcaggacattgtttcacgcgtgcaggcgtatatcaccacgcaaggttcgaaaggagccgtggtacatacaccggagaagacctacgatattccgccggcacacgaacgtcgcgtcgttgatccaactggttgcggcgacgcgtttcgcgccggcctgatctatggtattcagcataattatgattggttgaccattggccgcatgggaaacttaatgggtgcgctgaaagtggaacaccctggcacgcaaaatcagcgtttcgattttgccgaattcaacgaccagttcaaacaatattacggctacgcgctctaatga

SEQ ID NO: 852 - protein, 321 aa, synthetic construct
  REGION 1..321: note = Variant of adenosine kinase
MHHHHHHGGSGMSALICGSLAYDTIMVFPDQFKNHILPDRVHRLNVSFLVPRMRREFGGCAGNIAYNLHLLGGAPIVMATVGQDFGPYREHFETLGIDLSRVKIIDDLSTPQAFITTDHDHNQITAFHPGAMMRSYENHVRDVPGVTLGLVGPDGREGMIQNAEEFAAGGIPFIFDPGQALPLFNGPELREFIEQADYVVVNDYESNLLQTRTGWNEQDIVSRVQAYITTQGSKGAVVHTPEKTYDIPPAHERRVVDPTGCGDAFRAGLIYGIQHNYDWLTIGRMGNLMGALKVEHPGTQNQRFDFAEFNDQFKQYYGYAL

SEQ ID NO: 853 - DNA, 969 bp, synthetic construct
  misc_feature 1..969: note = Variant of adenosine kinase
  source 1..969: mol_type = other DNA
atgcaccatcatcaccatcacgggggctccggcatgagtgcactgatttgcggttctctggcgtatgataccatcatggtgtttccggaccagttcaagaaccatattctgcccgatcgtgttcaccgcctcaatgtcagctttcttgtaccacgcatgcgtcgtgggtttggaggctgtgccggcaacattgcgtacaatctgcatctgttgggtggtgctccgatcgtaatggctacggtgggccaagatttcggtccgtatcgcgagcacttcgaaactctgggcattgacttatcccgcgtcaagatcatcgatgatctgagtacaccgcaggccttcattaccaccgaccatgatcataaccagattacggcgtttcatccaggcgcaatgatgcgttcgtacgaaaatcacgttcgtgatgtgccgggtgttaccttgggcctcgtaggtcctgatggacgcgagggcatgatccaaaatgccgaagaatttgctgctggtggcattccgttcatttttgacccaggtcaggcactgccgctgttcaacggccccgaactgcgcgagtttatcgaacaggcggactatgtggtggtcaacgattacgaaagcaatcttcttcaaacgcgtactggctggaacgagcaggacattgtttcacgcgtgcaggcgtatatcaccacgcaaggttcgaaaggagccctggtacatacaccggagaagacctacgatattccgccggcacacgaacgtcgtgtcgttgatccaactggttgcggcgacgcgtttcgcgccggcctgatctatggtattcagcataattatgattggttgaccattggccgcatgggaaacttaatgggtgcgctgaaagtggcacaccctggcacgcaaaatcagcgtttcgattttgccgaattcaacgaccagttcaaacaatatttcggctacgcgctctaatga

SEQ ID NO: 854 - protein, 321 aa, synthetic construct
  REGION 1..321: note = Variant of adenosine kinase
MHHHHHHGGSGMSALICGSLAYDTIMVFPDQFKNHILPDRVHRLNVSFLVPRMRRGFGGCAGNIAYNLHLLGGAPIVMATVGQDFGPYREHFETLGIDLSRVKIIDDLSTPQAFITTDHDHNQITAFHPGAMMRSYENHVRDVPGVTLGLVGPDGREGMIQNAEEFAAGGIPFIFDPGQALPLFNGPELREFIEQADYVVVNDYESNLLQTRTGWNEQDIVSRVQAYITTQGSKGALVHTPEKTYDIPPAHERRVVDPTGCGDAFRAGLIYGIQHNYDWLTIGRMGNLMGALKVAHPGTQNQRFDFAEFNDQFKQYFGYAL

SEQ ID NO: 855 - DNA, 969 bp, synthetic construct
  misc_feature 1..969: note = Variant of adenosine kinase
  source 1..969: mol_type = other DNA
atgcaccatcatcaccatcacgggggctccggcatgagtgcactgatttgcggttctctggcgtatgataccatcatggtgtttccggaccagttcaagaaccatattctgcccgatcgtgttcaccgcctcaatgtcagctttcttgtaccacgcatgcgtcgtgggtttggaggctgtgccggcaacattgcgtacaatctgcatctgttgggtggtgctccgatcgtaatggctacggtgggccaagatttcggtccgtatcgcgagcacttcgaaactctgggcattgacttatcccgcgtcaagatcatcgatgatctgagtacaccgcaggccttcattaccaccgaccatgatatgaaccagattacggcgtttcatccaggcgcaatgatgcgttcgtacgaaaatcacgttcgtgatgtgccgggtgttaccttgggcctcgtaggtcctgatggacgcgagggcatgatccaaaatgccgaagaatttgctgctggtggcattccgttcatttttgacccaggtcaggcactgccgctgttcaacggccccgaactgcgcgagtttatcgaacaggcggactatgtggtggtcaacgattacgaaagcaatcttcttcaaacgcgtactggctggaacgagcaggacattgtttcacgcgtgcaggcgtatatcgttacgcaaggttcgaaaggatccctggtacatacaccggagaagacctacgatattccgccggcacacgaacgtctggtcgttgatccaactggttgcggcgacgcgtttcgcgccggcctgatctatggtattcagcataattatgattggttgaccattggccgcatgggaaacttaatgggtgcgctgaaagtggcacaccctggcacgcaaaatcagcgtttcgattttgccgaattcaacgaccagttcaaacaatatttcggctacgcgctctaatga

SEQ ID NO: 856 - protein, 321 aa, synthetic construct
  REGION 1..321: note = Variant of adenosine kinase
MHHHHHHGGSGMSALICGSLAYDTIMVFPDQFKNHILPDRVHRLNVSFLVPRMRRGFGGCAGNIAYNLHLLGGAPIVMATVGQDFGPYREHFETLGIDLSRVKIIDDLSTPQAFITTDHDMNQITAFHPGAMMRSYENHVRDVPGVTLGLVGPDGREGMIQNAEEFAAGGIPFIFDPGQALPLFNGPELREFIEQADYVVVNDYESNLLQTRTGWNEQDIVSRVQAYIVTQGSKGSLVHTPEKTYDIPPAHERLVVDPTGCGDAFRAGLIYGIQHNYDWLTIGRMGNLMGALKVAHPGTQNQRFDFAEFNDQFKQYFGYAL

SEQ ID NO: 857 - DNA, 969 bp, synthetic construct
  misc_feature 1..969: note = Variant of adenosine kinase
  source 1..969: mol_type = other DNA
atgcaccatcatcaccatcacgggggctccggcatgagtgcactgatttgcggttctttagcgtatgataccatcatggtgtttccggaccagttcaagaaccatattctgcccgatcgtgttcaccgcctcaatgtcagctttcttgtaccacgcatgcgtcgtgggtttggaggctgtgccggcaacattgcgtacaatctgcatctgttgggtggtgctccgatcgtaatggctacggtgggccaagatttcggtccgtatcgcgagcacttcgaaactctgggcattgacttatcccgcgtcaagatcatcgatgatctgagtacaccgcaggccttcattaccaccgaccatgatcataaccagattacggcgtttcatccaggcgcaatgatgcgttcgtacgaaaatcacgttcgtgatgtgccgggtgttaccttgggcctcgtaggtcctgatggacgcgagggcatgatccaaaatgccgaagaatttgctgctggtggcattccgttcatttttgacccaggtcaggcactgccgctgttcaacggccccgaactgcgcgagtttatcgaacaggcggactatgtggtggtcaacgattacgaaagcaatcttcttcaaacgcgtactggctggaacgagcaggacattgtttcacgcgtgcaggcgtatatcacgacgcaaggttcgaaaggagccctggtacatacaccggagaagacctacgatattccgccggcacacgaacgtctggtcgttgatccaactggttgcggcgacgcgtttcgcgccggcctgatctatggtattcagcataattatgattggttgaccattggccgcatgggaaacttaatgggtgcgctgaaagtggaacaccctggcacgcaaaatcagcgtttcgattttgccgaattcaacgaccagttcaaacaatattttggctacgcgctctaatga

SEQ ID NO: 858 - protein, 321 aa, synthetic construct
  REGION 1..321: note = Variant of adenosine kinase
MHHHHHHGGSGMSALICGSLAYDTIMVFPDQFKNHILPDRVHRLNVSFLVPRMRRGFGGCAGNIAYNLHLLGGAPIVMATVGQDFGPYREHFETLGIDLSRVKIIDDLSTPQAFITTDHDHNQITAFHPGAMMRSYENHVRDVPGVTLGLVGPDGREGMIQNAEEFAAGGIPFIFDPGQALPLFNGPELREFIEQADYVVVNDYESNLLQTRTGWNEQDIVSRVQAYITTQGSKGALVHTPEKTYDIPPAHERLVVDPTGCGDAFRAGLIYGIQHNYDWLTIGRMGNLMGALKVEHPGTQNQRFDFAEFNDQFKQYFGYAL

SEQ ID NO: 859 - DNA, 969 bp, synthetic construct
  misc_feature 1..969: note = Variant of adenosine kinase
  source 1..969: mol_type = other DNA
atgcaccatcatcaccatcacgggggctccggcatgagtgcactgatttgcggttctttagcgtatgataccatcatggtgtttccggaccagttcaagaaccatattctgcccgatcgtgttcaccgcctcaatgtcagctttcttgtaccacgcatgcgtcgtgaatttggaggctgtgccggcaacattgcgtacaatctgcatctgttgggtggtgctccgatcgtaatggctacggtgggccaagatttcggtccgtatcgcgagcacttcgaaactctgggcattgacttatcccgcgtcaagatcatcgatgatctgagtacaccgcaggccttcattaccaccgaccgcgatcataaccagattacggcgtttcatccaggcgcaatgatgcgttcgtacgaaaatcacgttcgtgatgtgccgggtgttaccttgggcctcgtaggtcctgatggacgcgagggcatgatccaaaatgccgaagaatttgctgctggtggcattccgttcatttttgacccaggtcaggcactgccgctgttcaacggccccgaactgcgcgagtttatcgaacaggcggactatgtggtggtcaacgattacgaaagcaatcttcttcaaacgcgtactggctggaacgagcaggacattgtttcacgcgtgcaggcgtatatcaccacgcaaggttcgaaaggagccctggtacatacaccggagaagacctacgatattccgccgattcacgaacgtcgtgtcgttgatccaactggttgcggcgacgcgtttcgcgccggcctgatctatggtattcagcataattatgattggttgaccattggccgcatgggaaacttaatgggtgcgctgaaagtggaacaccctggcagccaaaatcagcgtttcgattttgccgaattcaacgaccagttcaaacaatattttggctacgcgctctaatga

SEQ ID NO: 860 - protein, 321 aa, synthetic construct
  REGION 1..321: note = Variant of adenosine kinase
MHHHHHHGGSGMSALICGSLAYDTIMVFPDQFKNHILPDRVHRLNVSFLVPRMRREFGGCAGNIAYNLHLLGGAPIVMATVGQDFGPYREHFETLGIDLSRVKIIDDLSTPQAFITTDRDHNQITAFHPGAMMRSYENHVRDVPGVTLGLVGPDGREGMIQNAEEFAAGGIPFIFDPGQALPLFNGPELREFIEQADYVVVNDYESNLLQTRTGWNEQDIVSRVQAYITTQGSKGALVHTPEKTYDIPPIHERRVVDPTGCGDAFRAGLIYGIQHNYDWLTIGRMGNLMGALKVEHPGSQNQRFDFAEFNDQFKQYFGYAL

SEQ ID NO: 861 - DNA, 969 bp, synthetic construct
  misc_feature 1..969: note = Variant of adenosine kinase
  source 1..969: mol_type = other DNA
atgcaccatcatcaccatcacgggggctccggcatgagtgcactgatttgcggttctttagcgtatgataccatcatggtgtttccggaccagttcaagaaccatattctgcccgatcgtgttcaccgcctcaatgtcagctttcttgtaccacgcatgcgtcgtgagtttggaggctgtgccggcaacattgcgtacaatctgcatctgttgggtggtgctccgatcgtaatggctacggtgggccaagatttcggtccgtatcgcgagcacttcgaaactctgggcattgacttatcccgcgtcaagatcatcgatgatctgagtacaccgcaggccttcattaccaccgaccatgatcacaaccagattacggcgtttcatccaggcgcaatgatgcgttcgtacgaaaatcacgttcgtgatgtgccgggtgttaccttgggcctcgtaggtcctgatggacgcgagggcatgatccaaaatgccgaagaatttgctgctggtggcattccgttcatttttgacccaggtcaggcactgccgctgttcaacggccccgaactgcgcgagtttatcgaacaggcggactatgtggtggtcaacgattacgaaagcaatcttcttcaaacgcgtactggctggaacgagcaggacattgtttcacgcgtgcaggcgtatatcgttacgcaaggttcgaaaggagccgtggtacatacaccggagaagacctacgatattccgccggcacacgaacgtcgtgtcgttgatccaactggttgcggcgacgcgtttcgcgccggcctgatctatggtattcagcataattatgattggttgaccattggccgcatgggaaacttaatgggtgcgctgaaagtggcacaccctggcacgcaaaatcagcgtttcgattttgccgaattcaacgaccagttcaaacaatattttggctacgcgctctaatga

SEQ ID NO: 862 - protein, 321 aa, synthetic construct
  REGION 1..321: note = Variant of adenosine kinase
MHHHHHHGGSGMSALICGSLAYDTIMVFPDQFKNHILPDRVHRLNVSFLVPRMRREFGGCAGNIAYNLHLLGGAPIVMATVGQDFGPYREHFETLGIDLSRVKIIDDLSTPQAFITTDHDHNQITAFHPGAMMRSYENHVRDVPGVTLGLVGPDGREGMIQNAEEFAAGGIPFIFDPGQALPLFNGPELREFIEQADYVVVNDYESNLLQTRTGWNEQDIVSRVQAYIVTQGSKGAVVHTPEKTYDIPPAHERRVVDPTGCGDAFRAGLIYGIQHNYDWLTIGRMGNLMGALKVAHPGTQNQRFDFAEFNDQFKQYFGYAL

SEQ ID NO: 863 - DNA, 969 bp, synthetic construct
  misc_feature 1..969: note = Variant of adenosine kinase
  source 1..969: mol_type = other DNA
atgcaccatcatcaccatcacgggggctccggcatgagtgcactgatttgcggttctttcgcgtatgataccatcatggtgtttccggaccagttcaagaaccatattctgcccgatcgtgttcaccgcctcaatgtcagctttcttgtaccacgcatgcgtcgtgaatttggaggctgtgccggcaacattgcgtacaatctgcatctgttgggtggtgctccgatcgtaatggctacggtgggccaagatttcggtccgtatcgcgagcacttcgaaactctgggcattgacttatcccgcgtcaagatcatcgatgatctgagtacaccgcaggccttcattaccaccgaccatgatcataaccagattacggcgtttcatccaggcgcaatgatgcgttcgtacgaaaatcacgttcgtgatgtgccgggtgttaccttgggcctcgtaggtcctgatggacgcgagggcatgatccaaaatgccgaagaatttgctgctggtggcattccgttcatttttgacccaggtcaggcactgccgctgttcaacggccccgaactgcgcgagtttatcgaacaggcggactatgtggtggtcaacgattacgaaagcaatcttcttcaaacgcgtactggctggaacgagcaggacattgtttcacgcgtgcaggcgtatatcgttacgcaaggttcgaaaggagccctggtacatacaccggagaagacctacgatattccgccggcacacgaacgtcgcgtcgttgatccaactggttgcggcgacgcgtttcgcgccggcctgatctatggtattcagcataattatgattggttgaccattggccgcatgggaaacttaatgggtgcgctgaaagtggaacaccctggcacgcaaaatcagcgtttcgattttgccgaattcaacgaccagttcaaacaatattacggctacgcgctctaatga

SEQ ID NO: 864 - protein, 321 aa, synthetic construct
  REGION 1..321: note = Variant of adenosine kinase
MHHHHHHGGSGMSALICGSFAYDTIMVFPDQFKNHILPDRVHRLNVSFLVPRMRREFGGCAGNIAYNLHLLGGAPIVMATVGQDFGPYREHFETLGIDLSRVKIIDDLSTPQAFITTDHDHNQITAFHPGAMMRSYENHVRDVPGVTLGLVGPDGREGMIQNAEEFAAGGIPFIFDPGQALPLFNGPELREFIEQADYVVVNDYESNLLQTRTGWNEQDIVSRVQAYIVTQGSKGALVHTPEKTYDIPPAHERRVVDPTGCGDAFRAGLIYGIQHNYDWLTIGRMGNLMGALKVEHPGTQNQRFDFAEFNDQFKQYYGYAL

SEQ ID NO: 865 - DNA, 969 bp, synthetic construct
  misc_feature 1..969: note = Variant of adenosine kinase
  source 1..969: mol_type = other DNA
atgcaccatcatcaccatcacgggggctccggcatgagtgcactgatttgcggttctttagcgtatgataccatcatggtgtttccggaccagttcaagaaccatattctgcccgatcgtgttcaccgcctcaatgtcagctttcttgtaccacgcatgcgtcgtgaatttggaggctgtgccggcaacattgcgtacaatctgcatctgttgggtggtgctccgatcgtaatggctacggtgggccaagatttcggtccgtatcgcgagcacttcgaaactctgggcattgacttatcccgcgtcaagatcatcgatgatctgagtacaccgcaggccttcattaccaccgaccatgatcataaccagattacggcgtttcatccaggcgcaatgatgcgttcgtacgaaaatcacgttcgtgatgtgccgggtgttaccttgggcctcgtaggtcctgatggacgcgagggcatgatccaaaatgccgaagaatttgctgctggtggcattccgttcatttttgacccaggtcaggcactgccgctgttcaacggccccgaactgcgcgagtttatcgaacaggcggactatgtggtggtcaacgattacgaaagcaatcttcttcaaacgcgtactggctggaacgagcaggacattgtttcacgcgtgcaggcgtatatcaccacgcaaggttcggctggagccctggtacatacaccggagaagacctacgatattccgccggcacacgaacgtcgtgtggtggatccaactggttgcggcgacgcgtttcgcgccggcctgatctatggtattcagcataattatgattggttgaccattggccgcatgggaaacttaatgggtgcgctgaaagtggaacaccctggcacgcaaaatcagcgtttcgattttgccgaattcaacgaccagttcaaacaatattttggctacgcgctctaatga

SEQ ID NO: 866 - protein, 321 aa, synthetic construct
  REGION 1..321: note = Variant of adenosine kinase
MHHHHHHGGSGMSALICGSLAYDTIMVFPDQFKNHILPDRVHRLNVSFLVPRMRREFGGCAGNIAYNLHLLGGAPIVMATVGQDFGPYREHFETLGIDLSRVKIIDDLSTPQAFITTDHDHNQITAFHPGAMMRSYENHVRDVPGVTLGLVGPDGREGMIQNAEEFAAGGIPFIFDPGQALPLFNGPELREFIEQADYVVVNDYESNLLQTRTGWNEQDIVSRVQAYITTQGSAGALVHTPEKTYDIPPAHERRVVDPTGCGDAFRAGLIYGIQHNYDWLTIGRMGNLMGALKVEHPGTQNQRFDFAEFNDQFKQYFGYAL

SEQ ID NO: 867 - DNA, 969 bp, synthetic construct
  misc_feature 1..969: note = Variant of adenosine kinase
  source 1..969: mol_type = other DNA
atgcaccatcatcaccatcacgggggctccggcatgagtgcactgatttgcggttctttagcgtatgataccatcatggtgtttccggaccagttcaagaaccatattctgcccgatcgtgttcaccgcctcaatgtcagctttcttgtaccacgcatgcgtcgtgaatttggaggctgtgccggcaacattgcgtacaatctgcatctgttgggtggtgctccgatcgtaatggctacggtgggccaagatttcggtccgtatcgcgagcacttcgaaactctgggcattgacttatcccgcgtcaagatcatcgatgatctgagtacaccgcaggccttcattaccaccgaccgcgatcataaccagattacggcgtttcatccaggcgcaatgatgcgttcgtacgaaaatcacgttcgtgatgtgccgggtgttaccttgggcctcgtaggtcctgatggacgcgagggcatgatccaaaatgccgaagaatttgctgctggtggcattccgttcatttttgacccaggtcaggcactgccgctgttcaacggccccgaactgcgcgagtttatcgaacaggcggactatgtggtggtcaacgattacgaaagcaatcttcttcaaacgcgtactggctggaacgagcaggacattgtttcacgcgtgcaggcgtatatcaccacgcaaggttcggctggagccctggtacatacaccggagaagacctacgatattccgccggcacacgaacgtcgtgtcgttgatccaactggttgcggcgacgcgtttcgcgccggcctgatctatggtattcagcataattatgattggttgaccattggccgcatgggaaacttaatgggtgcgctgaaagtggaacaccctggcacgcaaaatcagcgtttcgattttgccgaattcaacgaccagttcaaacaatattttggctacgcgctctaatga

SEQ ID NO: 868 - protein, 321 aa, synthetic construct
  REGION 1..321: note = Variant of adenosine kinase
MHHHHHHGGSGMSALICGSLAYDTIMVFPDQFKNHILPDRVHRLNVSFLVPRMRREFGGCAGNIAYNLHLLGGAPIVMATVGQDFGPYREHFETLGIDLSRVKIIDDLSTPQAFITTDRDHNQITAFHPGAMMRSYENHVRDVPGVTLGLVGPDGREGMIQNAEEFAAGGIPFIFDPGQALPLFNGPELREFIEQADYVVVNDYESNLLQTRTGWNEQDIVSRVQAYITTQGSAGALVHTPEKTYDIPPAHERRVVDPTGCGDAFRAGLIYGIQHNYDWLTIGRMGNLMGALKVEHPGTQNQRFDFAEFNDQFKQYFGYAL

SEQ ID NO: 869 - DNA, 969 bp, synthetic construct
  misc_feature 1..969: note = Variant of adenosine kinase
  source 1..969: mol_type = other DNA
atgcaccatcatcaccatcacgggggctccggcatgagtgcactgatttgcggttctttagcgtatgataccatcatggtgtttccggaccagttcaagaaccatattctgcccgatcgtgttcaccgcctcaatgtcagctttcttgtaccacgcatgcgtcgtgaatttggaggctgtgccggcaacattgcgtacaatctgcatctgttgggtggtgctccgatcgtaatggctacggtgggccaagatttcggtccgtatcgcgagcacttcgaaactctgggcattgacttatcccgcgtcaagatcatcgatgatctgagtacaccgcaggccttcattaccaccgaccatgatcataaccagattacggcgtttcatccaggcgcaatgatgcgttcgtacgaaaatcacgttcgtgatgtgccgggtgttaccttgggcctcgtaggtcctgatggacgcgagggcatgatccaaaatgccgaagaatttgctgctggtggcattccgttcatttttgacccaggtcaggcactgccgctgttcaacggccccgaactgcgcgagtttatcgaacaggcggactatgtggtggtcaacgattacgaaagcaatcttcttcaaacgcgtactggctggaacgagcaggacattgtttcacgcgtgcaggcgtatatcaccacgcaaggttcgaaaggagccctggtacatacaccggagaagacctacgatattccgccggcacacgaacgtctggtcgttgatccaactggttgcggcgacgcgtttcgcgccggcctgatctatggtattcagcataattatgattggttgaccattggccgcatgggaaacttaatgggtgcgctgaaagtggaacaccctggcacgcaaaatcagcgtttcgattttgccgaattcaacgaccagttcaaacaatattttggctacgcgctctaatga

SEQ ID NO: 870 - protein, 321 aa, synthetic construct
  REGION 1..321: note = Variant of adenosine kinase
MHHHHHHGGSGMSALICGSLAYDTIMVFPDQFKNHILPDRVHRLNVSFLVPRMRREFGGCAGNIAYNLHLLGGAPIVMATVGQDFGPYREHFETLGIDLSRVKIIDDLSTPQAFITTDHDHNQITAFHPGAMMRSYENHVRDVPGVTLGLVGPDGREGMIQNAEEFAAGGIPFIFDPGQALPLFNGPELREFIEQADYVVVNDYESNLLQTRTGWNEQDIVSRVQAYITTQGSKGALVHTPEKTYDIPPAHERLVVDPTGCGDAFRAGLIYGIQHNYDWLTIGRMGNLMGALKVEHPGTQNQRFDFAEFNDQFKQYFGYAL

SEQ ID NO: 871 - DNA, 969 bp, synthetic construct
  misc_feature 1..969: note = Variant of adenosine kinase
  source 1..969: mol_type = other DNA
atgcaccatcatcaccatcacgggggctccggcatgagtgcactgatttgcggttctctggcgtatgataccatcatggtgtttccggaccagttcaagaaccatattctgcccgatcgtgttcaccgcctcaatgtcagctttcttgtaccacgcatgcgtcgtgaatttggaggctgtgccggcaacattgcgtacaatctgcatctgttgggtggtgctccgatcgtaatggctacggtgggccaagatttcggtccgtatcgcgagcacttcgaaactctgggcattgacttatcccgcgtcaagatcatcgatgatctgagtacaccgcaggccttcattaccaccgaccatgatcacaaccagattacggcgtttcatccaggcgcaatgatgcgttcgtacgaaaatcacgttcgtgatgtgccgggtgttaccttgggcctcgtaggtcctgatggacgcgagggcatgatccaaaatgccgaagaatttgctgctggtggcattccgttcatttttgacccaggtcaggcactgccgctgttcaacggccccgaactgcgcgagtttatcgaacaggcggactatgtggtggtcaacgattacgaaagcaatcttcttcaaacgcgtactggctggaacgagcaggacattgtttcacgcgtgcaggcgtatatcgttacgcaaggttcgaaaggagccctggtacatacaccggagaagacctacgatattccgccggcacacgaacgtcgtgtcgttgatccaactggttgcggcgacgcgtttcgcgccggcctgatctatggtattcagcataattatgattggttgaccattggccgcatgggaaacttaatgggtgcgctgaaagtggcacaccctggcacgcaaaatcagcgtttcgattttgccgaattcaacgaccagttcaaacaatattttggctacgcgctctaatga

SEQ ID NO: 872 - protein, 321 aa, synthetic construct
  REGION 1..321: note = Variant of adenosine kinase
MHHHHHHGGSGMSALICGSLAYDTIMVFPDQFKNHILPDRVHRLNVSFLVPRMRREFGGCAGNIAYNLHLLGGAPIVMATVGQDFGPYREHFETLGIDLSRVKIIDDLSTPQAFITTDHDHNQITAFHPGAMMRSYENHVRDVPGVTLGLVGPDGREGMIQNAEEFAAGGIPFIFDPGQALPLFNGPELREFIEQADYVVVNDYESNLLQTRTGWNEQDIVSRVQAYIVTQGSKGALVHTPEKTYDIPPAHERRVVDPTGCGDAFRAGLIYGIQHNYDWLTIGRMGNLMGALKVAHPGTQNQRFDFAEFNDQFKQYFGYAL

SEQ ID NO: 873 - DNA, 969 bp, synthetic construct
  misc_feature 1..969: note = Variant of adenosine kinase
  source 1..969: mol_type = other DNA
atgcaccatcatcaccatcacgggggctccggcatgagtgcactgatttgcggttctttagcgtatgataccatcatggtgtttccggaccagttcaagaaccatattctgcccgatcgtgttcaccgcctcaatgtcagctttcttgtaccacgcatgcgtcgtgagtttggaggctgtgccggcaacattgcgtacaatctgcatctgttgggtggtgctccgatcgtaatggctacggtgggccaagatttcggtccgtatcgcgagcacttcgaaactctgggcattgacttatcccgcgtcaagatcatcgatgatctgagtacaccgcaggccttcattaccaccgaccatgatcacaaccagattacggcgtttcatccaggcgcaatgatgcgttcgtacgaaaatcacgttcgtgatgtgccgggtgttaccttgggcctcgtaggtcctgatggatatgagggcatgatccaaaatgccgaagaatttgctgctggtggcattccgttcatttttgacccaggtcaggcactgccgctgttcaacggccccgaactgcgcgagtttatcgaacaggcggactatgtggtggtcaacgattacgaaagcaatcttcttcaaacgcgtactggctggaacgagcaggacattgtttcacgcgtgcaggcgtatatcgttacgcaaggttcgaaaggagccctggtacatacaccggagaagacctacgatattccgccggcacacgaacgtcgcgtcgttgatccaactggttgcggcgacgcgtttcgcgccggcctgatctatggtattcagcataattatgattggttgaccattggccgcatgggaaacttaatgggtgcgctgaaagtggaacaccctggcacgcaaaatcagcgtttcgattttgccgaattcaacgaccagttcaaacaatattttggctacgcgctctaatga

SEQ ID NO: 874 - protein, 321 aa, synthetic construct
  REGION 1..321: note = Variant of adenosine kinase
MHHHHHHGGSGMSALICGSLAYDTIMVFPDQFKNHILPDRVHRLNVSFLVPRMRREFGGCAGNIAYNLHLLGGAPIVMATVGQDFGPYREHFETLGIDLSRVKIIDDLSTPQAFITTDHDHNQITAFHPGAMMRSYENHVRDVPGVTLGLVGPDGYEGMIQNAEEFAAGGIPFIFDPGQALPLFNGPELREFIEQADYVVVNDYESNLLQTRTGWNEQDIVSRVQAYIVTQGSKGALVHTPEKTYDIPPAHERRVVDPTGCGDAFRAGLIYGIQHNYDWLTIGRMGNLMGALKVEHPGTQNQRFDFAEFNDQFKQYFGYAL

SEQ ID NO: 875 - DNA, 969 bp, synthetic construct
  misc_feature 1..969: note = Variant of adenosine kinase
  source 1..969: mol_type = other DNA
atgcaccatcatcaccatcacgggggctccggcatgagtgcactgatttgcggttctctggcgtatgataccatcatggtgtttccggaccagttcaagaaccatattctgcccgatcgtgttcaccgcctcaatgtcagctttcttgtaccacgcatgcgtcgtttttttggaggctgtgccggcaacattgcgtacaatctgcatctgttgggtggtgctccgatcgtaatggctacggtgggccaagatttcggtccgtatcgcgagcacttcgaaactctgggcattgacttatcccgcgtcaagatcatcgatgatctgagtacaccgcaggccttcattaccaccgaccatgatatgaaccagattacggcgtttcatccaggcgcaatgatgcgttcgtacgaaaatcacgttcgtgatgtgccgggtgttaccttgggcctcgtaggtcctgatggacgcgagggcatgatccaaaatgccgaagaatttgctgctggtggcattccgttcatttttgacccaggtcaggcactgccgctgttcaacggccccgaactgcgcgagtttatcgaacaggcggactatgtggtggtcaacgattacgaaagcaatcttcttcaaacgcgtactggctggaacgagcaggacattgtttcacgcgtgcaggcgtatatcgttacgcaaggttcgaaaggagccgtggtacatacaccggagaagacctacgatattccgccggcacacgaacgtcgcgtcgttgatccaactggttgcggcgacgcgtttcgcgccggcctgatctatggtattcagcataattatgattggttgaccattggccgcatgggaaacttaatgggtgcgctgaaagtggcacaccctggcacgcaaaatcagcgtttcgattttgccgaattcaacgaccagttcaaacaatatttcggctacgcgctctaatga

SEQ ID NO: 876 - protein, 321 aa, synthetic construct
  REGION 1..321: note = Variant of adenosine kinase
MHHHHHHGGSGMSALICGSLAYDTIMVFPDQFKNHILPDRVHRLNVSFLVPRMRRFFGGCAGNIAYNLHLLGGAPIVMATVGQDFGPYREHFETLGIDLSRVKIIDDLSTPQAFITTDHDMNQITAFHPGAMMRSYENHVRDVPGVTLGLVGPDGREGMIQNAEEFAAGGIPFIFDPGQALPLFNGPELREFIEQADYVVVNDYESNLLQTRTGWNEQDIVSRVQAYIVTQGSKGAVVHTPEKTYDIPPAHERRVVDPTGCGDAFRAGLIYGIQHNYDWLTIGRMGNLMGALKVAHPGTQNQRFDFAEFNDQFKQYFGYAL

SEQ ID NO: 877 - DNA, 969 bp, synthetic construct
  misc_feature 1..969: note = Variant of adenosine kinase
  source 1..969: mol_type = other DNA
atgcaccatcatcaccatcacgggggctccggcatgagtgcactgatttgcggttctctggcgtatgataccatcatggtgtttccggaccagttcaagaaccatattctgcccgatcgtgttcaccgcctcaatgtcagctttcttgtaccacgcatgcgtcgtttttttggaggctgtgccggcaacattgcgtacaatctgcatctgttgggtggtgctccgatcgtaatggctacggtgggccaagatttcggtccgtatcgcgagcacttcgaaactctgggcattgacttatcccgcgtcaagatcatcgatgatctgagtacaccgcaggccttcattaccaccgaccatgatcacaaccagattacggcgtttcatccaggcgcaatgatgcgttcgtacgaaaatcacgttcgtgatgtgccgggtgttaccttgggcctcgtaggtcctgatggacgcgagggcatgatccaaaatgccgaagaatttgctgctggtggcattccgttcatttttgacccaggtcaggcactgccgctgttcaacggccccgaactgcgcgagtttatcgaacaggcggactatgtggtggtcaacgattacgaaagcaatcttcttcaaacgcgtactggctggaacgagcaggacattgtttcacgcgtgcaggcgtatatcacgacgcaaggttcgaaaggagccgtggtacatacaccggagaagacctacgatattccgccggcacacgaacgtcgcgtcgttgatccaactggttgcggcgacgcgtttcgcgccggcctgatctatggtattcagcataattatgattggttgaccattggccgcatgggaaacttaatgggtgcgctgaaagtggaacaccctggcacgcaaaatcagcgtttcgattttgccgaattcaacgaccagttcaaacaatattttggctacgcgctctaatga

SEQ ID NO: 878 - protein, 321 aa, synthetic construct
  REGION 1..321: note = Variant of adenosine kinase
MHHHHHHGGSGMSALICGSLAYDTIMVFPDQFKNHILPDRVHRLNVSFLVPRMRRFFGGCAGNIAYNLHLLGGAPIVMATVGQDFGPYREHFETLGIDLSRVKIIDDLSTPQAFITTDHDHNQITAFHPGAMMRSYENHVRDVPGVTLGLVGPDGREGMIQNAEEFAAGGIPFIFDPGQALPLFNGPELREFIEQADYVVVNDYESNLLQTRTGWNEQDIVSRVQAYITTQGSKGAVVHTPEKTYDIPPAHERRVVDPTGCGDAFRAGLIYGIQHNYDWLTIGRMGNLMGALKVEHPGTQNQRFDFAEFNDQFKQYFGYAL

SEQ ID NO: 879 - DNA, 969 bp, synthetic construct
  misc_feature 1..969: note = Variant of adenosine kinase
  source 1..969: mol_type = other DNA
atgcaccatcatcaccatcacgggggctccggcatgagtgcactgatttgcggttctttagcgtatgataccatcatggtgtttccggaccagttcaagaaccatattctgcccgatcgtgttcaccgcctcaatgtcagctttcttgtaccacgcatgcgtcgtgaatttggaggctgtgccggcaacattgcgtacaatctgcatctgttgggtggtgctccgatcgtaatggctacggtgggccaagatttcggtccgtatcgcgagcacttcgaaactctgggcattgacttatcccgcgtcaagatcatcgatgatctgagtacaccgcaggccttcattaccaccgaccatgatcataaccagattacggcgtttcatccaggcgcaatgatgcgttcgtacgaaaatcacgttcgtgatgtgccgggtgttaccttgggcctcgtaggtcctgatggacgcgagggcatgatccaaaatgccgaagaatttgctgctggtggcattccgttcatttttgacccaggtcaggcactgccgctgttcaacggccccgaactgcgcgagtttatcgaacaggcggactatgtggtggtcaacgattacgaaagcaatcttcttcaaacgcgtactggctggaacgagcaggacattgtttcacgcgtgcaggcgtatatcacgacgcaaggttcgaaaggagccgtggtacatacaccggagaagacctacgatattccgccggcacacgaacgtctggtcgttgatccaactggttgcggcgacgcgtttcgcgccggcctgatctatggtattcagcataattatgattggttgaccattggccgcatgggaaacttaatgggtgcgctgaaagtggaacaccctggcacgcaaaatcagcgtttcgattttgccgaattcaacgaccagttcaaacaatattttggctacgcgctctaatga

SEQ ID NO: 880 - protein, 321 aa, synthetic construct
  REGION 1..321: note = Variant of adenosine kinase
MHHHHHHGGSGMSALICGSLAYDTIMVFPDQFKNHILPDRVHRLNVSFLVPRMRREFGGCAGNIAYNLHLLGGAPIVMATVGQDFGPYREHFETLGIDLSRVKIIDDLSTPQAFITTDHDHNQITAFHPGAMMRSYENHVRDVPGVTLGLVGPDGREGMIQNAEEFAAGGIPFIFDPGQALPLFNGPELREFIEQADYVVVNDYESNLLQTRTGWNEQDIVSRVQAYITTQGSKGAVVHTPEKTYDIPPAHERLVVDPTGCGDAFRAGLIYGIQHNYDWLTIGRMGNLMGALKVEHPGTQNQRFDFAEFNDQFKQYFGYAL

SEQ ID NO: 881 - DNA, 969 bp, synthetic construct
  misc_feature 1..969: note = Variant of adenosine kinase
  source 1..969: mol_type = other DNA
atgcaccatcatcaccatcacgggggctccggcatgagtgcactgatttgcggttctttagcgtatgataccatcatggtgtttccggaccagttcaagaaccatattctgcccgatcgtgttcaccgcctcaatgtcagctttcttgtaccacgcatgcgtcgtgaatttggaggctgtgccggcaacattgcgtacaatctgcatctgttgggtggtgctccgatcgtaatggctacggtgggccaagatttcggtccgtatcgcgagcacttcgaaactctgggcattgacttatcccgcgtcaagatcatcgatgatctgagtacaccgcaggccttcattaccaccgaccacgatcataaccagattacggcgtttcatccaggcgcaatgatgcgttcgtacgaaaatcacgttcgtgatgtgccgggtgttaccttgggcctcgtaggtcctgatggacgcgagggcatgatccaaaatgccgaagaatttgctgctggtggcattccgttcatttttgacccaggtcaggcactgccgctgttcaacggccccgaactgcgcgagtttatcgaacaggcggactatgtggtggtcaacgattacgaaagcaatcttcttcaaacgcgtactggctggaacgagcaggacattgtttcacgcgtgcaggcgtatatcaccacgcaaggttcgaaaggagccctggtacatacaccggagaagacctacgatattccgccggctcacgaacgtcgtgtcgttgatccaactggttgcggcgacgcgtttcgcgccggcctgatctatggtattcagcataattatgattggttgaccattggccgcatgggaaacttaatgggtgcgctgaaagtggaacaccctggcagccaaaatcagcgtttcgattttgccgaattcaacgaccagttcaaacaatattttggctacgcgctctaatga

SEQ ID NO: 882 - protein, 321 aa, synthetic construct; identical to SEQ ID NO: 660
  REGION 1..321: note = Variant of adenosine kinase

SEQ ID NO: 883 - DNA, 969 bp, synthetic construct
  misc_feature 1..969: note = Variant of adenosine kinase
  source 1..969: mol_type = other DNA
atgcaccatcatcaccatcacgggggctccggcatgagtgcactgatttgcggttctttcgcgtatgataccatcatggtgtttccggaccagttcaagaaccatattctgcccgatcgtgttcaccgcctcaatgtcagctttcttgtaccacgcatgcgtcgtgggtttggaggctgtgccggcaacattgcgtacaatctgcatctgttgggtggtgctccgatcgtaatggctacggtgggccaagatttcggtccgtatcgcgagcacttcgaaactctgggcattgacttatcccgcgtcaagatcatcgatgatctgagtacaccgcaggccttcattaccaccgaccatgatcataaccagattacggcgtttcatccaggcgcaatgatgcgttcgtacgaaaatcacgttcgtgatgtgccgggtgttaccttgggcctcgtaggtcctgatggacgcgagggcatgatccaaaatgccgaagaatttgctgctggtggcattccgttcatttttgacccaggtcaggcactgccgctgttcaacggccccgaactgcgcgagtttatcgaacaggcggactatgtggtggtcaacgattacgaaagcaatcttcttcaaacgcgtactggctggaacgagcaggacattgtttcacgcgtgcaggcgtatatcaccacgcaaggttcgaaaggagccctggtacatacaccggagaagacctacgatattccgccggcacacgaacgtcgtgtcgttgatccaactggttgcggcgacgcgtttcgcgccggcctgatctatggtattcagcataattatgattggttgaccattggccgcatgggaaacttaatgggtgcgctgaaagtggaacaccctggcacgcaaaatcagcgtttcgattttgccgaattcaacgaccagttcaaacaatattttggctacgcgctctaatga

SEQ ID NO: 884 - protein, 321 aa, synthetic construct
  REGION 1..321: note = Variant of adenosine kinase
MHHHHHHGGSGMSALICGSFAYDTIMVFPDQFKNHILPDRVHRLNVSFLVPRMRRGFGGCAGNIAYNLHLLGGAPIVMATVGQDFGPYREHFETLGIDLSRVKIIDDLSTPQAFITTDHDHNQITAFHPGAMMRSYENHVRDVPGVTLGLVGPDGREGMIQNAEEFAAGGIPFIFDPGQALPLFNGPELREFIEQADYVVVNDYESNLLQTRTGWNEQDIVSRVQAYITTQGSKGALVHTPEKTYDIPPAHERRVVDPTGCGDAFRAGLIYGIQHNYDWLTIGRMGNLMGALKVEHPGTQNQRFDFAEFNDQFKQYFGYAL

SEQ ID NO: 885 - DNA, 969 bp, synthetic construct
  misc_feature 1..969: note = Variant of adenosine kinase
  source 1..969: mol_type = other DNA
atgcaccatcatcaccatcacgggggctccggcatgagtgcactgatttgcggttctctggcgtatgataccatcatggtgtttccggaccagttcaagaaccatattctgcccgatcgtgttcaccgcctcaatgtcagctttcttgtaccacgcatgcgtcgtgggtttggaggctgtgccggcaacattgcgtacaatctgcatctgttgggtggtgctccgatcgtaatggctacggtgggccaagatttcggtccgtatcgcgagcacttcgaaactctgggcattgacttatcccgcgtcaagatcatcgatgatctgagtacaccgcaggccttcattaccaccgaccatgatcacaaccagattacggcgtttcatccaggcgcaatgatgcgttcgtacgaaaatcacgttcgtgatgtgccgggtgttaccttgggcctcgtaggtcctgatggatatgagggcatgatccaaaatgccgaagaatttgctgctggtggcattccgttcatttttgacccaggtcaggcactgccgctgttcaacggccccgaactgcgcgagtttatcgaacaggcggactatgtggtggtcaacgattacgaaagcaatcttcttcaaacgcgtactggctggaacgagcaggacattgtttcacgcgtgcaggcgtatatcacgacgcaaggttcgaaaggagccctggtacatacaccggagaagacctacgatattccgccggcacacgaacgtcgtgtcgttgatccaactggttgcggcgacgcgtttcgcgccggcctgatctatggtattcagcataattatgattggttgaccattggccgcatgggaaacttaatgggtgcgctgaaagtggaacaccctggcacgcaaaatcagcgtttcgattttgccgaattcaacgaccagttcaaacaatattttggctacgcgctctaatga

SEQ ID NO: 886 - protein, 321 aa, synthetic construct
  REGION 1..321: note = Variant of adenosine kinase
MHHHHHHGGSGMSALICGSLAYDTIMVFPDQFKNHILPDRVHRLNVSFLVPRMRRGFGGCAGNIAYNLHLLGGAPIVMATVGQDFGPYREHFETLGIDLSRVKIIDDLSTPQAFITTDHDHNQITAFHPGAMMRSYENHVRDVPGVTLGLVGPDGYEGMIQNAEEFAAGGIPFIFDPGQALPLFNGPELREFIEQADYVVVNDYESNLLQTRTGWNEQDIVSRVQAYITTQGSKGALVHTPEKTYDIPPAHERRVVDPTGCGDAFRAGLIYGIQHNYDWLTIGRMGNLMGALKVEHPGTQNQRFDFAEFNDQFKQYFGYAL

SEQ ID NO: 887 - DNA, 969 bp, synthetic construct
  misc_feature 1..969: note = Variant of adenosine kinase
  source 1..969: mol_type = other DNA
atgcaccatcatcaccatcacgggggctccggcatgagtgcactgatttgcggttctctggcgtatgataccatcatggtgtttccggaccagttcaagaaccatattctgcccgatcgtgttcaccgcctcaatgtcagctttcttgtaccacgcatgcgtcgtgggtttggaggctgtgccggcaacattgcgtacaatctgcatctgttgggtggtgctccgatcgtaatggctacggtgggccaagatttcggtccgtatcgcgagcacttcgaaactctgggcattgacttatcccgcgtcaagatcatcgatgatctgagtacaccgcaggccttcattaccaccgaccatgatcacaaccagattacggcgtttcatccaggcgcaatgatgcgttcgtacgaaaatcacgttcgtgatgtgccgggtgttaccttgggcctcgtaggtcctgatggatatgagggcatgatccaaaatgccgaagaatttgctgctggtggcattccgttcatttttgacccaggtcaggcactgccgctgttcaacggccccgaactgcgcgagtttatcgaacaggcggactatgtggtggtcaacgattacgaaagcaatcttcttcaaacgcgtactggctggaacgagcaggacattgtttcacgcgtgcaggcgtatatcacgacgcaaggttcgaaaggagccctggtacatacaccggagaagacctacgatattccgccggcacacgaacgtctggtcgttgatccaactggttgcggcgacgcgtttcgcgccggcctgatctatggtattcagcataattatgattggttgaccattggccgcatgggaaacttaatgggtgcgctgaaagtggcacaccctggcacgcaaaatcagcgtttcgattttgccgaattcaacgaccagttcaaacaatattttggctacgcgctctaatga

SEQ ID NO: 888 - protein, 321 aa, synthetic construct
  REGION 1..321: note = Variant of adenosine kinase
MHHHHHHGGSGMSALICGSLAYDTIMVFPDQFKNHILPDRVHRLNVSFLVPRMRRGFGGCAGNIAYNLHLLGGAPIVMATVGQDFGPYREHFETLGIDLSRVKIIDDLSTPQAFITTDHDHNQITAFHPGAMMRSYENHVRDVPGVTLGLVGPDGYEGMIQNAEEFAAGGIPFIFDPGQALPLFNGPELREFIEQADYVVVNDYESNLLQTRTGWNEQDIVSRVQAYITTQGSKGALVHTPEKTYDIPPAHERLVVDPTGCGDAFRAGLIYGIQHNYDWLTIGRMGNLMGALKVAHPGTQNQRFDFAEFNDQFKQYFGYAL

SEQ ID NO: 889 - DNA, 969 bp, synthetic construct
  misc_feature 1..969: note = Variant of adenosine kinase
  source 1..969: mol_type = other DNA
atgcaccatcatcaccatcacgggggctccggcatgagtgcactgatttgcggttctttcgcgtatgataccatcatggtgtttccggaccagttcaagaaccatattctgcccgatcgtgttcaccgcctcaatgtcagctttcttgtaccacgcatgcgtcgtgggtttggaggctgtgccggcaacattgcgtacaatctgcatctgttgggtggtgctccgatcgtaatggctacggtgggccaagatttcggtccgtatcgcgagcacttcgaaactctgggcattgacttatcccgcgtcaagatcatcgatgatctgagtacaccgcaggccttcattaccaccgaccatgatcacaaccagattacggcgtttcatccaggcgcaatgatgcgttcgtacgaaaatcacgttcgtgatgtgccgggtgttaccttgggcctcgtaggtcctgatggacgcgagggcatgatccaaaatgccgaagaatttgctgctggtggcattccgttcatttttgacccaggtcaggcactgccgctgttcaacggccccgaactgcgcgagtttatcgaacaggcggactatgtggtggtcaacgattacgaaagcaatcttcttcaaacgcgtactggctggaacgagcaggacattgtttcacgcgtgcaggcgtatatcgttacgcaaggttcgaaaggagccctggtacatacaccggagaagacctacgatattccgccggcacacgaacgtcgcgtcgttgatccaactggttgcggcgacgcgtttcgcgccggcctgatctatggtattcagcataattatgattggttgaccattggccgcatgggaaacttaatgggtgcgctgaaagtggaacaccctggcacgcaaaatcagcgtttcgattttgccgaattcaacgaccagttcaaacaatattttggctacgcgctctaatga

SEQ ID NO: 890 - protein, 321 aa, synthetic construct
  REGION 1..321: note = Variant of adenosine kinase
MHHHHHHGGSGMSALICGSFAYDTIMVFPDQFKNHILPDRVHRLNVSFLVPRMRRGFGGCAGNIAYNLHLLGGAPIVMATVGQDFGPYREHFETLGIDLSRVKIIDDLSTPQAFITTDHDHNQITAFHPGAMMRSYENHVRDVPGVTLGLVGPDGREGMIQNAEEFAAGGIPFIFDPGQALPLFNGPELREFIEQADYVVVNDYESNLLQTRTGWNEQDIVSRVQAYIVTQGSKGALVHTPEKTYDIPPAHERRVVDPTGCGDAFRAGLIYGIQHNYDWLTIGRMGNLMGALKVEHPGTQNQRFDFAEFNDQFKQYFGYAL

SEQ ID NO: 891 - DNA, 969 bp, synthetic construct
  misc_feature 1..969: note = Variant of adenosine kinase
  source 1..969: mol_type = other DNA
atgcaccatcatcaccatcacgggggctccggcatgagtgcactgatttgcggttctttagcgtatgataccatcatggtgtttccggaccagttcaagaaccatattctgcccgatcgtgttcaccgcctcaatgtcagctttcttgtaccacgcatgcgtcgtgaatttggaggctgtgccggcaacattgcgtacaatctgcatctgttgggtggtgctccgatcgtaatggctacggtgggccaagatttcggtccgtatcgcgagcacttcgaaactctgggcattgacttatcccgcgtcaagatcatcgatgatctgagtacaccgcaggccttcattaccaccgacatggatcataaccagattacggcgtttcatggcggcgcaatgatgcgttcgtacgaaaatcacgttcgtgatgtgccgggtgttaccttgggcctcgtaggtcctgatggacgcgagggcatgatccaaaatgccgaagaatttgctgctggtggcattccgttcatttttgacccaggtcaggcagtgccgctgttcaacggccccgaactgcgcgagtttatcgaacaggcggactatgtggtggtcaacgattacgaaagcaatcttcttcaaacgcgtactggctggaacgagcaggacattgtttcacgcgtgcaggcgtatatcaccacgcaaggttcggctggagccctggtacatacaccggagaagacctacgatattccgccggctcacgaacgtcgtgtcgttgatccaactggttgcggcgacgcgtttcgcgccggcctgatctatggtattcagcataattatgattggttgaccattggccgcatgggaaacttaatgggtgcgctgaaagtggaacaccctggcacccaaaatcagcgtttcgattttgccgaattcaacgaccagttcaaacaatattttggctacgcgctctaatga

SEQ ID NO: 892 - protein, 321 aa, synthetic construct
  REGION 1..321: note = Variant of adenosine kinase
MHHHHHHGGSGMSALICGSLAYDTIMVFPDQFKNHILPDRVHRLNVSFLVPRMRREFGGCAGNIAYNLHLLGGAPIVMATVGQDFGPYREHFETLGIDLSRVKIIDDLSTPQAFITTDMDHNQITAFHGGAMMRSYENHVRDVPGVTLGLVGPDGREGMIQNAEEFAAGGIPFIFDPGQAVPLFNGPELREFIEQADYVVVNDYESNLLQTRTGWNEQDIVSRVQAYITTQGSAGALVHTPEKTYDIPPAHERRVVDPTGCGDAFRAGLIYGIQHNYDWLTIGRMGNLMGALKVEHPGTQNQRFDFAEFNDQFKQYFGYAL

SEQ ID NO: 893 - DNA, 969 bp, synthetic construct
  misc_feature 1..969: note = Variant of adenosine kinase
  source 1..969: mol_type = other DNA
atgcaccatcatcaccatcacgggggctccggcatgagtgcactgatttgcggttctctggcgtatgataccatcatggtgtttccggaccagttcaagaaccatattctgcccgatcgtgttcaccgcctcaatgtcagctttcttgtaccacgcatgcgtcgtgaatttggaggctgtgccggcaacattgcgtacaatctgcatctgttgggtggtgctccgatcgtaatggctacggtgggccaagatttcggtccgtatcgcgagcacttcgaaactctgggcattgacttatcccgcgtcaagatcatcgatgatctgagtacaccgcaggccttcattaccaccgaccatgatcacaaccagattacggcgtttcatccaggcgcaatgatgcgttcgtacgaaaatcacgttcgtgatgtgccgggtgttaccttgggcctcgtaggtcctgatggacgcgagggcatgatccaaaatgccgaagaatttgctgctggtggcattccgttcatttttgacccaggtcaggcactgccgctgttcaacggccccgaactgcgcgagtttatcgaacaggcggactatgtggtggtcaacgattacgaaagcaatcttcttcaaacgcgtactggctggaacgagcaggacattgtttcacgcgtgcaggcgtatatcacgacgcaaggttcgaaaggagccgtggtacatacaccggagaagacctacgatattccgccggcacacgaacgtcgcgtcgttgatccaactggttgcggcgacgcgtttcgcgccggcctgatctatggtattcagcataattatgattggttgaccattggccgcatgggaaacttaatgggtgcgctgaaagtggaacaccctggcacgcaaaatcagcgtttcgattttgccgaattcaacgaccagttcaaacaatattttggctacgcgctctaatga

SEQ ID NO: 894 - protein, 321 aa, synthetic construct
  REGION 1..321: note = Variant of adenosine kinase
MHHHHHHGGSGMSALICGSLAYDTIMVFPDQFKNHILPDRVHRLNVSFLVPRMRREFGGCAGNIAYNLHLLGGAPIVMATVGQDFGPYREHFETLGIDLSRVKIIDDLSTPQAFITTDHDHNQITAFHPGAMMRSYENHVRDVPGVTLGLVGPDGREGMIQNAEEFAAGGIPFIFDPGQALPLFNGPELREFIEQADYVVVNDYESNLLQTRTGWNEQDIVSRVQAYITTQGSKGAVVHTPEKTYDIPPAHERRVVDPTGCGDAFRAGLIYGIQHNYDWLTIGRMGNLMGALKVEHPGTQNQRFDFAEFNDQFKQYFGYAL

SEQ ID NO: 895 - DNA, 969 bp, synthetic construct
  misc_feature 1..969: note = Variant of adenosine kinase
  source 1..969: mol_type = other DNA
atgcaccatcatcaccatcacgggggctccggcatgagtgcactgatttgcggttctttcgcgtatgataccatcatggtgtttccggaccagttcaagaaccatattctgcccgatcgtgttcaccgcctcaatgtcagctttcttgtaccacgcatgcgtcgtgaatttggaggctgtgccggcaacattgcgtacaatctgcatctgttgggtggtgctccgatcgtaatggctacggtgggccaagatttcggtccgtatcgcgagcacttcgaaactctgggcattgacttatcccgcgtcaagatcatcgatgatctgagtacaccgcaggccttcattaccaccgaccatgatcataaccagattacggcgtttcatccaggcgcaatgatgcgttcgtacgaaaatcacgttcgtgatgtgccgggtgttaccttgggcctcgtaggtcctgatggacgcgagggcatgatccaaaatgccgaagaatttgctgctggtggcattccgttcatttttgacccaggtcaggcactgccgctgttcaacggccccgaactgcgcgagtttatcgaacaggcggactatgtggtggtcaacgattacgaaagcaatcttcttcaaacgcgtactggctggaacgagcaggacattgtttcacgcgtgcaggcgtatatcaccacgcaaggttcgaaaggagccctggtacatacaccggagaagacctacgatattccgccggcacacgaacgtcgcgtcgttgatccaactggttgcggcgacgcgtttcgcgccggcctgatctatggtattcagcataattatgattggttgaccattggccgcatgggaaacttaatgggtgcgctgaaagtggaacaccctggcacgcaaaatcagcgtttcgattttgccgaattcaacgaccagttcaaacaatattttggctacgcgctctaatga

SEQ ID NO: 896 - protein, 321 aa, synthetic construct
  REGION 1..321: note = Variant of adenosine kinase
MHHHHHHGGSGMSALICGSFAYDTIMVFPDQFKNHILPDRVHRLNVSFLVPRMRREFGGCAGNIAYNLHLLGGAPIVMATVGQDFGPYREHFETLGIDLSRVKIIDDLSTPQAFITTDHDHNQITAFHPGAMMRSYENHVRDVPGVTLGLVGPDGREGMIQNAEEFAAGGIPFIFDPGQALPLFNGPELREFIEQADYVVVNDYESNLLQTRTGWNEQDIVSRVQAYITTQGSKGALVHTPEKTYDIPPAHERRVVDPTGCGDAFRAGLIYGIQHNYDWLTIGRMGNLMGALKVEHPGTQNQRFDFAEFNDQFKQYFGYAL

SEQ ID NO: 897 - DNA, 969 bp, synthetic construct
  misc_feature 1..969: note = Variant of adenosine kinase
  source 1..969: mol_type = other DNA
atgcaccatcatcaccatcacgggggctccggcatgagtgcactgatttgcggttctctggcgtatgataccatcatggtgtttccggaccagttcaagaaccatattctgcccgatcgtgttcaccgcctcaatgtcagctttcttgtaccacgcatgcgtcgtttttttggaggctgtgccggcaacattgcgtacaatctgcatctgttgggtggtgctccgatcgtaatggctacggtgggccaagatttcggtccgtatcgcgagcacttcgaaactctgggcattgacttatcccgcgtcaagatcatcgatgatctgagtacaccgcaggccttcattaccaccgaccatgatcacaaccagattacggcgtttcatccaggcgcaatgatgcgttcgtacgaaaatcacgttcgtgatgtgccgggtgttaccttgggcctcgtaggtcctgatggatatgagggcatgatccaaaatgccgaagaatttgctgctggtggcattccgttcatttttgacccaggtcaggcactgccgctgttcaacggccccgaactgcgcgagtttatcgaacaggcggactatgtggtggtcaacgattacgaaagcaatcttcttcaaacgcgtactggctggaacgagcaggacattgtttcacgcgtgcaggcgtatatcgttacgcaaggttcgaaaggagccgtggtacatacaccggagaagacctacgatattccgccggcacacgaacgtcgcgtcgttgatccaactggttgcggcgacgcgtttcgcgccggcctgatctatggtattcagcataattatgattggttgaccattggccgcatgggaaacttaatgggtgcgctgaaagtggaacaccctggcacgcaaaatcagcgtttcgattttgccgaattcaacgaccagttcaaacaatattttggctacgcgctctaatga

SEQ ID NO: 898 - protein, 321 aa, synthetic construct
  REGION 1..321: note = Variant of adenosine kinase
MHHHHHHGGSGMSALICGSLAYDTIMVFPDQFKNHILPDRVHRLNVSFLVPRMRRFFGGCAGNIAYNLHLLGGAPIVMATVGQDFGPYREHFETLGIDLSRVKIIDDLSTPQAFITTDHDHNQITAFHPGAMMRSYENHVRDVPGVTLGLVGPDGYEGMIQNAEEFAAGGIPFIFDPGQALPLFNGPELREFIEQADYVVVNDYESNLLQTRTGWNEQDIVSRVQAYIVTQGSKGAVVHTPEKTYDIPPAHERRVVDPTGCGDAFRAGLIYGIQHNYDWLTIGRMGNLMGALKVEHPGTQNQRFDFAEFNDQFKQYFGYAL

SEQ ID NO: 899 - DNA, 969 bp, synthetic construct
  misc_feature 1..969: note = Variant of adenosine kinase
  source 1..969: mol_type = other DNA
atgcaccatcatcaccatcacgggggctccggcatgagtgcactgatttgcggttctttagcgtatgataccatcatggtgtttccggaccagttcaagaaccatattctgcccgatcgtgttcaccgcctcaatgtcagctttcttgtaccacgcatgcgtcgtttttttggaggctgtgccggcaacattgcgtacaatctgcatctgttgggtggtgctccgatcgtaatggctacggtgggccaagatttcggtccgtatcgcgagcacttcgaaactctgggcattgacttatcccgcgtcaagatcatcgatgatctgagtacaccgcaggccttcattaccaccgaccatgatcacaaccagattacggcgtttcatccaggcgcaatgatgcgttcgtacgaaaatcacgttcgtgatgtgccgggtgttaccttgggcctcgtaggtcctgatggacgcgagggcatgatccaaaatgccgaagaatttgctgctggtggcattccgttcatttttgacccaggtcaggcactgccgctgttcaacggccccgaactgcgcgagtttatcgaacaggcggactatgtggtggtcaacgattacgaaagcaatcttcttcaaacgcgtactggctggaacgagcaggacattgtttcacgcgtgcaggcgtatatcaccacgcaaggttcgaaaggagccctggtacatacaccggagaagacctacgatattccgccggcacacgaacgtctggtcgttgatccaactggttgcggcgacgcgtttcgcgccggcctgatctatggtattcagcataattatgattggttgaccattggccgcatgggaaacttaatgggtgcgctgaaagtggaacaccctggcacgcaaaatcagcgtttcgattttgccgaattcaacgaccagttcaaacaatattttggctacgcgctctaatga

SEQ ID NO: 900 - protein, 321 aa, synthetic construct
  REGION 1..321: note = Variant of adenosine kinase
MHHHHHHGGSGMSALICGSLAYDTIMVFPDQFKNHILPDRVHRLNVSFLVPRMRRFFGGCAGNIAYNLHLLGGAPIVMATVGQDFGPYREHFETLGIDLSRVKIIDDLSTPQAFITTDHDHNQITAFHPGAMMRSYENHVRDVPGVTLGLVGPDGREGMIQNAEEFAAGGIPFIFDPGQALPLFNGPELREFIEQADYVVVNDYESNLLQTRTGWNEQDIVSRVQAYITTQGSKGALVHTPEKTYDIPPAHERLVVDPTGCGDAFRAGLIYGIQHNYDWLTIGRMGNLMGALKVEHPGTQNQRFDFAEFNDQFKQYFGYAL

SEQ ID NO: 901 - DNA, 969 bp, synthetic construct
  misc_feature 1..969: note = Variant of adenosine kinase
  source 1..969: mol_type = other DNA
atgcaccatcatcaccatcacgggggctccggcatgagtgcactgatttgcggttctttcgcgtatgataccatcatggtgtttccggaccagttcaagaaccatattctgcccgatcgtgttcaccgcctcaatgtcagctttcttgtaccacgcatgcgtcgtgggtttggaggctgtgccggcaacattgcgtacaatctgcatctgttgggtggtgctccgatcgtaatggctacggtgggccaagatttcggtccgtatcgcgagcacttcgaaactctgggcattgacttatcccgcatcaagatcatcgatgatctgagtacaccgcaggccttcattaccaccgaccatgatcacaaccagattacggcgtttcatccaggcgcaatgatgcgttcgtacgaaaatcacgttcgtgatgtgccgggtgttaccttgggcctcgtaggtcctgatggacgcgagggcatgatccaaaatgccgaagaatttgctgctggtggcattccgttcatttttgacccaggtcaggcactgccgctgttcaacggccccgaactgcgcgagtttatcgaacaggcggactatgtggtggtcaacgattacgaaagcaatcttcttcaaacgcgtactggctggaacgagcaggacattgtttcacgcgtgcaggcgtatatcgttacgcaaggttcgaaaggagccctggtacatacaccggagaagacctacgatattccgccggcacacgaacgtcgcgtcgttgatccaactggttgcggcgacgcgtttcgcgccggcctgatctatggtattcagcataattatgattggttgaccattggccgcatgggaaacttaatgggtgcgctgaaagtggaacaccctggcacgcaaaatcagcgtttcgattttgccgaattcaacgaccagttcaaacaatattttggctacgcgctctaatga

SEQ ID NO: 902 - protein, 321 aa, synthetic construct
  REGION 1..321: note = Variant of adenosine kinase
MHHHHHHGGSGMSALICGSFAYDTIMVFPDQFKNHILPDRVHRLNVSFLVPRMRRGFGGCAGNIAYNLHLLGGAPIVMATVGQDFGPYREHFETLGIDLSRIKIIDDLSTPQAFITTDHDHNQITAFHPGAMMRSYENHVRDVPGVTLGLVGPDGREGMIQNAEEFAAGGIPFIFDPGQALPLFNGPELREFIEQADYVVVNDYESNLLQTRTGWNEQDIVSRVQAYIVTQGSKGALVHTPEKTYDIPPAHERRVVDPTGCGDAFRAGLIYGIQHNYDWLTIGRMGNLMGALKVEHPGTQNQRFDFAEFNDQFKQYFGYAL

SEQ ID NO: 903 - DNA, 969 bp, synthetic construct
  misc_feature 1..969: note = Variant of adenosine kinase
  source 1..969: mol_type = other DNA
atgcaccatcatcaccatcacgggggctccggcatgagtgcactgatttgcggttctttcgcgtatgataccatcatggtgtttccggaccagttcaagaaccatattctgcccgatcgtgttcaccgcctcaatgtcagctttcttgtaccacgcatgcgtcgtttttttggaggctgtgccggcaacattgcgtacaatctgcatctgttgggtggtgctccgatcgtaatggctacggtgggccaagatttcggtccgtatcgcgagcacttcgaaactctgggcattgacttatcccgcgtcaagatcatcgatgatctgagtacaccgcaggccttcattaccaccgaccatgatcacaaccagattacggcgtttcatccaggcgcaatgatgcgttcgtacgaaaatcacgttcgtgatgtgccgggtgttaccttgggcctcgtaggtcctgatggacgcgagggcatgatccaaaatgccgaagaatttgctgctggtggcattccgttcatttttgacccaggtcaggcactgccgctgttcaacggccccgaactgcgcgagtttatcgaacaggcggactatgtggtggtcaacgattacgaaagcaatcttcttcaaacgcgtactggctggaacgagcaggacattgtttcacgcgtgcaggcgtatatcaccacgcaaggttcgaaaggagccctggtacatacaccggagaagacctacgatattccgccggcacacgaacgtcgcgtcgttgatccaactggttgcggcgacgcgtttcgcgccggcctgatctatggtattcagcataattatgattggttgaccattggccgcatgggaaacttaatgggtgcgctgaaagtggaacaccctggcacgcaaaatcagcgtttcgattttgccgaattcaacgaccagttcaaacaatattttggctacgcgctctaatga

SEQ ID NO: 904 - protein, 321 aa, synthetic construct
  REGION 1..321: note = Variant of adenosine kinase
MHHHHHHGGSGMSALICGSFAYDTIMVFPDQFKNHILPDRVHRLNVSFLVPRMRRFFGGCAGNIAYNLHLLGGAPIVMATVGQDFGPYREHFETLGIDLSRVKIIDDLSTPQAFITTDHDHNQITAFHPGAMMRSYENHVRDVPGVTLGLVGPDGREGMIQNAEEFAAGGIPFIFDPGQALPLFNGPELREFIEQADYVVVNDYESNLLQTRTGWNEQDIVSRVQAYITTQGSKGALVHTPEKTYDIPPAHERRVVDPTGCGDAFRAGLIYGIQHNYDWLTIGRMGNLMGALKVEHPGTQNQRFDFAEFNDQFKQYFGYAL

SEQ ID NO: 905 - DNA, 969 bp, synthetic construct
  misc_feature 1..969: note = Variant of adenosine kinase
  source 1..969: mol_type = other DNA
atgcaccatcatcaccatcacgggggctccggcatgagtgcactgatttgcggttctttagcgtatgataccatcatggtgtttccggaccagttcaagaaccatattctgcccgatcgtgttcaccgcctcaatgtcagctttcttgtaccacgcatgcgtcgtgaatttggaggctgtgccggcaacattgcgtacaatctgcatctgttgggtggtgctccgatcgtaatggctacggtgggccaagatttcggtccgtatcgcgagcacttcgaaactctgggcattgacttatcccgcgtcaagatcatcgatgatctgagtacaccgcaggccttcattaccaccgaccatgatcataaccagattacggcgtttcatccaggcgcaatgatgcgttcgtacgaaaatcacgttcgtgatgtgccgggtgttaccttgggcctcgtaggtcctgatggacgcgagggcatgatccaaaatgccgaagaatttgctgctggtggcattccgttcatttttgacccaggtcaggcactgccgctgttcaacggccccgaactgcgcgagtttatcgaacaggcggactatgtggtggtcaacgattacgaaagcaatcttcttcaaacgcgtactggctggaacgagcaggacattgtttcacgcgtgcaggcgtatatcaccacgcaaggttcgaaaggagccctggtacatacaccggagaagacctacgatattccgccggcacacgaacgtcgtgtgatggatccaactggttgcggcgacgcgtttcgcgccggcctgatctatggtattcagcataattatgattggttgaccattggccgcatgggaaacttaatgggtgcgctgaaagtggaacaccctggcacgcaaaatcagcgtttcgattttgccgaattcaacgaccagttcaaacaatattttggctacgcgctctaatga

SEQ ID NO: 906 - protein, 321 aa, synthetic construct
  REGION 1..321: note = Variant of adenosine kinase
MHHHHHHGGSGMSALICGSLAYDTIMVFPDQFKNHILPDRVHRLNVSFLVPRMRREFGGCAGNIAYNLHLLGGAPIVMATVGQDFGPYREHFETLGIDLSRVKIIDDLSTPQAFITTDHDHNQITAFHPGAMMRSYENHVRDVPGVTLGLVGPDGREGMIQNAEEFAAGGIPFIFDPGQALPLFNGPELREFIEQADYVVVNDYESNLLQTRTGWNEQDIVSRVQAYITTQGSKGALVHTPEKTYDIPPAHERRVMDPTGCGDAFRAGLIYGIQHNYDWLTIGRMGNLMGALKVEHPGTQNQRFDFAEFNDQFKQYFGYAL

SEQ ID NO: 907 - DNA, 969 bp, synthetic construct
  misc_feature 1..969: note = Variant of adenosine kinase
  source 1..969: mol_type = other DNA
atgcaccatcatcaccatcacgggggctccggcatgagtgcactgatttgcggttctttagcgtatgataccatcatggtgtttccggaccagttcaagaaccatattctgcccgatcgtgttcaccgcctcaatgtcagctttcttgtaccacgcatgcgtcgtgaatttggaggctgtgccggcaacattgcgtacaatctgcatctgttgggtggtgctccgatcgtaatggctacggtgggccaagatttcggtccgtatcgcgagcacttcgaaactctgggcattgacttatcccgcgtcaagatcatcgatgatctgagtacaccgcaggccttcattaccaccgacatggatcataaccagattacggcgtttcatccaggcgcaatgatgcgttcgtacgaaaatcacgttcgtgatgtgccgggtgttaccttgggcctcgtaggtcctgatggacgcgagggcatgatccaaaatgccgaagaatttgctgctggtggcattccgttcatttttgacccaggtcaggcagtgccgctgttcaacggccccgaactgcgcgagtttatcgaacaggcggactatgtggtggtcaacgattacgaaagcaatcttcttcaaacgcgtactggctggaacgagcaggacattgtttcacgcgtgcaggcgtatatcaccacgcaaggttcggctggagccctggtacatacaccggagaagacctacgatattccgccggcacacgaacgtcgtgtcgttgatccaactggttgcggcgacgcgtttcgcgccggcctgatctatggtattcagcataattatgattggttgaccattggccgcatgggaaacttaatgggtgcgctgaaagtggaacaccctggcacccaaaatcagcgtttcgattttgccgaattcaacgaccagttcaaacaatattttggctacgcgctctaatga

SEQ ID NO: 908 - protein, 321 aa, synthetic construct
  REGION 1..321: note = Variant of adenosine kinase
MHHHHHHGGSGMSALICGSLAYDTIMVFPDQFKNHILPDRVHRLNVSFLVPRMRREFGGCAGNIAYNLHLLGGAPIVMATVGQDFGPYREHFETLGIDLSRVKIIDDLSTPQAFITTDMDHNQITAFHPGAMMRSYENHVRDVPGVTLGLVGPDGREGMIQNAEEFAAGGIPFIFDPGQAVPLFNGPELREFIEQADYVVVNDYESNLLQTRTGWNEQDIVSRVQAYITTQGSAGALVHTPEKTYDIPPAHERRVVDPTGCGDAFRAGLIYGIQHNYDWLTIGRMGNLMGALKVEHPGTQNQRFDFAEFNDQFKQYFGYAL

SEQ ID NO: 909 - DNA, 969 bp, synthetic construct
  misc_feature 1..969: note = Variant of adenosine kinase
  source 1..969: mol_type = other DNA
atgcaccatcatcaccatcacgggggctccggcatgagtgcactgatttgcggttctttcgcgtatgataccatcatggtgtttccggaccagttcaagaaccatattctgcccgatcgtgttcaccgcctcaatgtcagctttcttgtaccacgcatgcgtcgtgaatttggaggctgtgccggcaacattgcgtacaatctgcatctgttgggtggtgctccgatcgtaatggctacggtgggccaagatttcggtccgtatcgcgagcacttcgaaactctgggcattgacttatcccgcgtcaagatcatcgatgatctgagtacaccgcaggccttcattaccaccgaccatgatcataaccagattacggcgtttcatccaggcgcaatgatgcgttcgtacgaaaatcacgttcgtgatgtgccgggtgttaccttgggcctcgtaggtcctgatggacgcgagggcatgatccaaaatgccgaagaatttgctgctggtggcattccgttcatttttgacccaggtcaggcactgccgctgttcaacggccccgaactgcgcgagtttatcgaacaggcggactatgtggtggtcaacgattacgaaagcaatcttcttcaaacgcgtactggctggaacgagcaggacattgtttcacgcgtgcaggcgtatatcgttacgcaaggttcgaaaggagccctggtacatacaccggagaagacctacgatattccgccggcacacgaacgtcgtgtcgttgatccaactggttgcggcgacgcgtttcgcgccggcctgatctatggtattcagcataattatgattggttgaccattggccgcatgggaaacttaatgggtgcgctgaaagtggaacaccctggcacgcaaaatcagcgtttcgattttgccgaattcaacgaccagttcaaacaatattttggctacgcgctctaatga

SEQ ID NO: 910 - protein, 321 aa, synthetic construct
  REGION 1..321: note = Variant of adenosine kinase
MHHHHHHGGSGMSALICGSFAYDTIMVFPDQFKNHILPDRVHRLNVSFLVPRMRREFGGCAGNIAYNLHLLGGAPIVMATVGQDFGPYREHFETLGIDLSRVKIIDDLSTPQAFITTDHDHNQITAFHPGAMMRSYENHVRDVPGVTLGLVGPDGREGMIQNAEEFAAGGIPFIFDPGQALPLFNGPELREFIEQADYVVVNDYESNLLQTRTGWNEQDIVSRVQAYIVTQGSKGALVHTPEKTYDIPPAHERRVVDPTGCGDAFRAGLIYGIQHNYDWLTIGRMGNLMGALKVEHPGTQNQRFDFAEFNDQFKQYFGYAL

SEQ ID NO: 911 - DNA, 969 bp, synthetic construct
  misc_feature 1..969: note = Variant of adenosine kinase
  source 1..969: mol_type = other DNA
atgcaccatcatcaccatcacgggggctccggcatgagtgcactgatttgcggttctctggcgtatgataccatcatggtgtttccggaccagttcaagaaccatattctgcccgatcgtgttcaccgcctcaatgtcagctttcttgtaccacgcatgcgtcgtttttttggaggctgtgccggcaacattgcgtacaatctgcatctgttgggtggtgctccgatcgtaatggctacggtgggccaagatttcggtccgtatcgcgagcacttcgaaactctgggcattgacttatcccgcgtcaagatcatcgatgatctgagtacaccgcaggccttcattaccaccgaccatgatatgaaccagattacggcgtttcatccaggcgcaatgatgcgttcgtacgaaaatcacgttcgtgatgtgccgggtgttaccttgggcctcgtaggtcctgatggatatgagggcatgatccaaaatgccgaagaatttgctgctggtggcattccgttcatttttgacccaggtcaggcactgccgctgttcaacggccccgaactgcgcgagtttatcgaacaggcggactatgtggtggtcaacgattacgaaagcaatcttcttcaaacgcgtactggctggaacgagcaggacattgtttcacgcgtgcaggcgtatatcaccacgcaaggttcgaaaggagccgtggtacatacaccggagaagacctacgatattccgccggcacacgaacgtcgcgtcgttgatccaactggttgcggcgacgcgtttcgcgccggcctgatctatggtattcagcataattatgattggttgaccattggccgcatgggaaacttaatgggtgcgctgaaagtggaacaccctggcacgcaaaatcagcgtttcgattttgccgaattcaacgaccagttcaaacaatattttggctacgcgctctaatga

SEQ ID NO: 912 - protein, 321 aa, synthetic construct
  REGION 1..321: note = Variant of adenosine kinase
MHHHHHHGGSGMSALICGSLAYDTIMVFPDQFKNHILPDRVHRLNVSFLVPRMRRFFGGCAGNIAYNLHLLGGAPIVMATVGQDFGPYREHFETLGIDLSRVKIIDDLSTPQAFITTDHDMNQITAFHPGAMMRSYENHVRDVPGVTLGLVGPDGYEGMIQNAEEFAAGGIPFIFDPGQALPLFNGPELREFIEQADYVVVNDYESNLLQTRTGWNEQDIVSRVQAYITTQGSKGAVVHTPEKTYDIPPAHERRVVDPTGCGDAFRAGLIYGIQHNYDWLTIGRMGNLMGALKVEHPGTQNQRFDFAEFNDQFKQYFGYAL

SEQ ID NO: 913 - DNA, 969 bp, synthetic construct
  misc_feature 1..969: note = Variant of adenosine kinase
  source 1..969: mol_type = other DNA
atgcaccatcatcaccatcacgggggctccggcatgagtgcactgatttgcggttctctggcgtatgataccatcatggtgtttccggaccagttcaagaaccatattctgcccgatcgtgttcaccgcctcaatgtcagctttcttgtaccacgcatgcgtcgtttttttggaggctgtgccggcaacattgcgtacaatctgcatctgttgggtggtgctccgatcgtaatggctacggtgggccaagatttcggtccgtatcgcgagcacttcgaaactctgggcattgacttatcccgcgtcaagatcatcgatgatctgagtacaccgcaggccttcattaccaccgaccatgatcacaaccagattacggcgtttcatccaggcgcaatgatgcgttcgtacgaaaatcacgttcgtgatgtgccgggtgttaccttgggcctcgtaggtcctgatggatatgagggcatgatccaaaatgccgaagaatttgctgctggtggcattccgttcatttttgacccaggtcaggcactgccgctgttcaacggccccgaactgcgcgagtttatcgaacaggcggactatgtggtggtcaacgattacgaaagcaatcttcttcaaacgcgtactggctggaacgagcaggacattgtttcacgcgtgcaggcgtatatcgttacgcaaggttcgaaaggagccctggtacatacaccggagaagacctacgatattccgccggcacacgaacgtcgcgtcgttgatccaactggttgcggcgacgcgtttcgcgccggcctgatctatggtattcagcataattatgattggttgaccattggccgcatgggaaacttaatgggtgcgctgaaagtggaacaccctggcacgcaaaatcagcgtttcgattttgccgaattcaacgaccagttcaaacaatattttggctacgcgctctaatga

SEQ ID NO: 914 - protein, 321 aa, synthetic construct
  REGION 1..321: note = Variant of adenosine kinase
MHHHHHHGGSGMSALICGSLAYDTIMVFPDQFKNHILPDRVHRLNVSFLVPRMRRFFGGCAGNIAYNLHLLGGAPIVMATVGQDFGPYREHFETLGIDLSRVKIIDDLSTPQAFITTDHDHNQITAFHPGAMMRSYENHVRDVPGVTLGLVGPDGYEGMIQNAEEFAAGGIPFIFDPGQALPLFNGPELREFIEQADYVVVNDYESNLLQTRTGWNEQDIVSRVQAYIVTQGSKGALVHTPEKTYDIPPAHERRVVDPTGCGDAFRAGLIYGIQHNYDWLTIGRMGNLMGALKVEHPGTQNQRFDFAEFNDQFKQYFGYAL

SEQ ID NO: 915 - DNA, 969 bp, synthetic construct
  misc_feature 1..969: note = Variant of adenosine kinase
  source 1..969: mol_type = other DNA
atgcaccatcatcaccatcacgggggctccggcatgagtgcactgatttgcggttctttcgcgtatgataccatcatggtgtttccggaccagttcaagaaccatattctgcccgatcgtgttcaccgcctcaatgtcagctttcttgtaccacgcatgcgtcgtgggtttggaggctgtgccggcaacattgcgtacaatctgcatctgttgggtggtgctccgatcgtaatggctacggtgggccaagatttcggtccgtatcgcgagcacttcgaaactctgggcattgacttatcccgcgtcaagatcatcgatgatctgagtacaccgcaggccttcattaccaccgaccatgatcacaaccagattacggcgtttcatccaggcgcaatgatgcgttcgtacgaaaatcacgttcgtgatgtgccgggtgttaccttgggcctcgtaggtcctgatggatatgagggcatgatccaaaatgccgaagaatttgctgctggtggcattccgttcatttttgacccaggtcaggcactgccgctgttcaacggccccgaactgcgcgagtttatcgaacaggcggactatgtggtggtcaacgattacgaaagcaatcttcttcaaacgcgtactggctggaacgagcaggacattgtttcacgcgtgcaggcgtatatcgttacgcaaggttcgaaaggagccgtggtacatacaccggagaagacctacgatattccgccggcacacgaacgtcgcgtcgttgatccaactggttgcggcgacgcgtttcgcgccggcctgatctatggtattcagcataattatgattggttgaccattggccgcatgggaaacttaatgggtgcgctgaaagtggcacaccctggcacgcaaaatcagcgtttcgattttgccgaattcaacgaccagttcaaacaatattttggctacgcgctctaatga

SEQ ID NO: 916 - protein, 321 aa, synthetic construct
  REGION 1..321: note = Variant of adenosine kinase
MHHHHHHGGSGMSALICGSFAYDTIMVFPDQFKNHILPDRVHRLNVSFLVPRMRRGFGGCAGNIAYNLHLLGGAPIVMATVGQDFGPYREHFETLGIDLSRVKIIDDLSTPQAFITTDHDHNQITAFHPGAMMRSYENHVRDVPGVTLGLVGPDGYEGMIQNAEEFAAGGIPFIFDPGQALPLFNGPELREFIEQADYVVVNDYESNLLQTRTGWNEQDIVSRVQAYIVTQGSKGAVVHTPEKTYDIPPAHERRVVDPTGCGDAFRAGLIYGIQHNYDWLTIGRMGNLMGALKVAHPGTQNQRFDFAEFNDQFKQYFGYAL

SEQ ID NO: 917 - DNA, 969 bp, synthetic construct
  misc_feature 1..969: note = Variant of adenosine kinase
  source 1..969: mol_type = other DNA
atgcaccatcatcaccatcacgggggctccggcatgagtgcactgatttgcggttctctggcgtatgataccatcatggtgtttccggaccagttcaagaaccatattctgcccgatcgtgttcaccgcctcaatgtcagctttcttgtaccacgcatgcgtcgtttttttggaggctgtgccggcaacattgcgtacaatctgcatctgttgggtggtgctccgatcgtaatggctacggtgggccaagatttcggtccgtatcgcgagcacttcgaaactctgggcattgacttatcccgcgtcaagatcatcgatgatctgagtacaccgcaggccttcattaccaccgaccatgatcacaaccagattacggcgtttcatccaggcgcaatgatgcgttcgtacgaaaatcacgttcgtgatgtgccgggtgttaccttgggcctcgtaggtcctgatggacgcgagggcatgatccaaaatgccgaagaatttgctgctggtggcattccgttcatttttgacccaggtcaggcactgccgctgttcaacggccccgaactgcgcgagtttatcgaacaggcggactatgtggtggtcaacgattacgaaagcaatcttcttcaaacgcgtactggctggaacgagcaggacattgtttcacgcgtgcaggcgtatatcgttacgcaaggttcgaaaggagccctggtacatacaccggagaagacctacgatattccgccggcacacgaacgtctggtcgttgatccaactggttgcggcgacgcgtttcgcgccggcctgatctatggtattcagcataattatgattggttgaccattggccgcatgggaaacttaatgggtgcgctgaaagtggaacaccctggcacgcaaaatcagcgtttcgattttgccgaattcaacgaccagttcaaacaatattttggctacgcgctctaatga

SEQ ID NO: 918 - protein, 321 aa, synthetic construct
  REGION 1..321: note = Variant of adenosine kinase
MHHHHHHGGSGMSALICGSLAYDTIMVFPDQFKNHILPDRVHRLNVSFLVPRMRRFFGGCAGNIAYNLHLLGGAPIVMATVGQDFGPYREHFETLGIDLSRVKIIDDLSTPQAFITTDHDHNQITAFHPGAMMRSYENHVRDVPGVTLGLVGPDGREGMIQNAEEFAAGGIPFIFDPGQALPLFNGPELREFIEQADYVVVNDYESNLLQTRTGWNEQDIVSRVQAYIVTQGSKGALVHTPEKTYDIPPAHERLVVDPTGCGDAFRAGLIYGIQHNYDWLTIGRMGNLMGALKVEHPGTQNQRFDFAEFNDQFKQYFGYAL

SEQ ID NO: 919 - DNA, 969 bp, synthetic construct
  misc_feature 1..969: note = Variant of adenosine kinase
  source 1..969: mol_type = other DNA
atgcaccatcatcaccatcacgggggctccggcatgagtgcactgatttgcggttctttcgcgtatgataccatcatggtgtttccggaccagttcaagaaccatattctgcccgatcgtgttcaccgcctcaatgtcagctttcttgtaccacgcatgcgtcgtttttttggaggctgtgccggcaacattgcgtacaatctgcatctgttgggtggtgctccgatcgtaatggctacggtgggccaagatttcggtccgtatcgcgagcacttcgaaactctgggcattgacttatcccgcgtcaagatcatcgatgatctgagtacaccgcaggccttcattaccaccgaccatgatatgaaccagattacggcgtttcatccaggcgcaatgatgcgttcgtacgaaaatcacgttcgtgatgtgccgggtgttaccttgggcctcgtaggtcctgatggacgcgagggcatgatccaaaatgccgaagaatttgctgctggtggcattccgttcatttttgacccaggtcaggcactgccgctgttcaacggccccgaactgcgcgagtttatcgaacaggcggactatgtggtggtcaacgattacgaaagcaatcttcttcaaacgcgtactggctggaacgagcaggacattgtttcacgcgtgcaggcgtatatcacgacgcaaggttcgaaaggagccgtggtacatacaccggagaagacctacgatattccgccggcacacgaacgtcgcgtcgttgatccaactggttgcggcgacgcgtttcgcgccggcctgatctatggtattcagcataattatgattggttgaccattggccgcatgggaaacttaatgggtgcgctgaaagtggaacaccctggcacgcaaaatcagcgtttcgattttgccgaattcaacgaccagttcaaacaatattacggctacgcgctctaatga

SEQ ID NO: 920 - protein, 321 aa, synthetic construct
  REGION 1..321: note = Variant of adenosine kinase
MHHHHHHGGSGMSALICGSFAYDTIMVFPDQFKNHILPDRVHRLNVSFLVPRMRRFFGGCAGNIAYNLHLLGGAPIVMATVGQDFGPYREHFETLGIDLSRVKIIDDLSTPQAFITTDHDMNQITAFHPGAMMRSYENHVRDVPGVTLGLVGPDGREGMIQNAEEFAAGGIPFIFDPGQALPLFNGPELREFIEQADYVVVNDYESNLLQTRTGWNEQDIVSRVQAYITTQGSKGAVVHTPEKTYDIPPAHERRVVDPTGCGDAFRAGLIYGIQHNYDWLTIGRMGNLMGALKVEHPGTQNQRFDFAEFNDQFKQYYGYAL

SEQ ID NO: 921 - DNA, 969 bp, synthetic construct
  misc_feature 1..969: note = Variant of adenosine kinase
  source 1..969: mol_type = other DNA
atgcaccatcatcaccatcacgggggctccggcatgagtgcactgatttgcggttctttcgcgtatgataccatcatggtgtttccggaccagttcaagaaccatattctgcccgatcgtgttcaccgcctcaatgtcagctttcttgtaccacgcatgcgtcgtttttttggaggctgtgccggcaacattgcgtacaatctgcatctgttgggtggtgctccgatcgtaatggctacggtgggccaagatttcggtccgtatcgcgagcacttcgaaactctgggcattgacttatcccgcgtcaagatcatcgatgatctgagtacaccgcaggccttcattaccaccgaccatgatcacaaccagattacggcgtttcatccaggcgcaatgatgcgttcgtacgaaaatcacgttcgtgatgtgccgggtgttaccttgggcctcgtaggtcctgatggacgcgagggcatgatccaaaatgccgaagaatttgctgctggtggcattccgttcatttttgacccaggtcaggcactgccgctgttcaacggccccgaactgcgcgagtttatcgaacaggcggactatgtggtggtcaacgattacgaaagcaatcttcttcaaacgcgtactggctggaacgagcaggacattgtttcacgcgtgcaggcgtatatcgttacgcaaggttcgaaaggagccctggtacatacaccggagaagacctacgatattccgccggcacacgaacgtcgtgtcgttgatccaactggttgcggcgacgcgtttcgcgccggcctgatctatggtattcagcataattatgattggttgaccattggccgcatgggaaacttaatgggtgcgctgaaagtggaacaccctggcacgcaaaatcagcgtttcgattttgccgaattcaacgaccagttcaaacaatattttggctacgcgctctaatga

SEQ ID NO: 922 - protein, 321 aa, synthetic construct
  REGION 1..321: note = Variant of adenosine kinase
MHHHHHHGGSGMSALICGSFAYDTIMVFPDQFKNHILPDRVHRLNVSFLVPRMRRFFGGCAGNIAYNLHLLGGAPIVMATVGQDFGPYREHFETLGIDLSRVKIIDDLSTPQAFITTDHDHNQITAFHPGAMMRSYENHVRDVPGVTLGLVGPDGREGMIQNAEEFAAGGIPFIFDPGQALPLFNGPELREFIEQADYVVVNDYESNLLQTRTGWNEQDIVSRVQAYIVTQGSKGALVHTPEKTYDIPPAHERRVVDPTGCGDAFRAGLIYGIQHNYDWLTIGRMGNLMGALKVEHPGTQNQRFDFAEFNDQFKQYFGYAL

SEQ ID NO: 923 - DNA, 969 bp, synthetic construct
  misc_feature 1..969: note = Variant of adenosine kinase
  source 1..969: mol_type = other DNA
atgcaccatcatcaccatcacgggggctccggcatgagtgcactgatttgcggttctttagcgtatgataccatcatggtgtttccggaccagttcaagaaccatattctgcccgatcgtgttcaccgcctcaatgtcagctttcttgtaccacgcatgcgtcgtgaatttggaggctgtgccggcaacattgcgtacaatctgcatctgttgggtggtgctccgatcgtaatggctacggtgggccaagatttcggtccgtatcgcgagcacttcgaaactctgggcattgacttatcccgcgtcaagatcatcgatgatctgagtacaccgcaggccttcattaccaccgaccgcgatcataaccagattacggcgtttcatccaggcgcaatgatgcgttcgtacgaaaatcacgttcgtgatgtgccgggtgttaccttgggcctcgtaggtcctgatggacgcgagggcatgatccaaaatgccgaagaatttgctgctggtggcattccgttcatttttgacccaggtcaggcagtgccgctgttcaacggccccgaactgcgcgagtttatcgaacaggcggactatgtggtggtcaacgattacgaaagcaatcttcttcaaacgcgtactggctggaacgagcaggacattgtttcacgcgtgcaggcgtatatcaccacgcaaggttcggctggagccctggtacatacaccggagaagacctacgatattccgccggctcacgaacgtcgtgtcgttgatccaactggttgcggcgacgcgtttcgcgccggcctgatctatggtattcagcataattatgattggttgaccattggccgcatgggaaacttaatgggtgcgctgaaagtggaacaccctggcacgcaaaatcagcgtttcgattttgccgaattcaacgaccagttcaaacaatattttggctacgcgctctaatga

SEQ ID NO: 924 - protein, 321 aa, synthetic construct
  REGION 1..321: note = Variant of adenosine kinase
MHHHHHHGGSGMSALICGSLAYDTIMVFPDQFKNHILPDRVHRLNVSFLVPRMRREFGGCAGNIAYNLHLLGGAPIVMATVGQDFGPYREHFETLGIDLSRVKIIDDLSTPQAFITTDRDHNQITAFHPGAMMRSYENHVRDVPGVTLGLVGPDGREGMIQNAEEFAAGGIPFIFDPGQAVPLFNGPELREFIEQADYVVVNDYESNLLQTRTGWNEQDIVSRVQAYITTQGSAGALVHTPEKTYDIPPAHERRVVDPTGCGDAFRAGLIYGIQHNYDWLTIGRMGNLMGALKVEHPGTQNQRFDFAEFNDQFKQYFGYAL

SEQ ID NO: 925 - DNA, 969 bp, synthetic construct
  misc_feature 1..969: note = Variant of adenosine kinase
  source 1..969: mol_type = other DNA
atgcaccatcatcaccatcacgggggctccggcatgagtgcactgatttgcggttctttagcgtatgataccatcatggtgtttccggaccagttcaagaaccatattctgcccgatcgtgttcaccgcctcaatgtcagctttcttgtaccacgcatgcgtcgtgaatttggaggctgtgccggcaacattgcgtacaatctgcatctgttgggtggtgctccgatcgtaatggctacggtgggccaagatttcggtccgtatcgcgagcacttcgaaactctgggcattgacttatcccgcgtcaagatcatcgatgatctgagtacaccgcaggccttcattaccaccgaccgcgatcataaccagattacggcgtttcatccaggcgcaatgatgcgttcgtacgaaaatcacgttcgtgatgtgccgggtgttaccttgggcctcgtaggtcctgatggacgcgagggcatgatccaaaatgccgaagaatttgctgctggtggcattccgttcatttttgacccaggtcaggcactgccgctgttcaacggccccgaactgcgcgagtttatcgaacaggcggactatgtggtggtcaacgattacgaaagcaatcttcttcaaacgcgtactggctggaacgagcaggacattgtttcacgcgtgcaggcgtatatcaccacgcaaggttcgaaaggagccctggtacatacaccggagaagacctacgatattccgccggcacacgaacgtcgtgtcgttgatccaactggttgcggcgacgcgtttcgcgccggcctgatctatggtattcagcataattatgattggttgaccattggccgcatgggaaacttaatgggtgcgctgaaagtggaacaccctggcacgcaaaatcagcgtttcgattttgccgaattcaacgaccagttcaaacaatattttggctacgcgctctaatga

SEQ ID NO: 926 - protein, 321 aa, synthetic construct
  REGION 1..321: note = Variant of adenosine kinase
MHHHHHHGGSGMSALICGSLAYDTIMVFPDQFKNHILPDRVHRLNVSFLVPRMRREFGGCAGNIAYNLHLLGGAPIVMATVGQDFGPYREHFETLGIDLSRVKIIDDLSTPQAFITTDRDHNQITAFHPGAMMRSYENHVRDVPGVTLGLVGPDGREGMIQNAEEFAAGGIPFIFDPGQALPLFNGPELREFIEQADYVVVNDYESNLLQTRTGWNEQDIVSRVQAYITTQGSKGALVHTPEKTYDIPPAHERRVVDPTGCGDAFRAGLIYGIQHNYDWLTIGRMGNLMGALKVEHPGTQNQRFDFAEFNDQFKQYFGYAL

SEQ ID NO: 927 - DNA, 969 bp, synthetic construct
  misc_feature 1..969: note = Variant of adenosine kinase
  source 1..969: mol_type = other DNA
atgcaccatcatcaccatcacgggggctccggcatgagtgcactgatttgcggttctttagcgtatgataccatcatggtgtttccggaccagttcaagaaccatattctgcccgatcgtgttcaccgcctcaatgtcagctttcttgtaccacgcatgcgtcgtgaatttggaggctgtgccggcaacattgcgtacaatctgcatctgttgggtggtgctccgatcgtaatggctacggtgggccaagatttcggtccgtatcgcgagcacttcgaaactctgggcattgacttatcccgcgtcaagatcatcgatgatctgagtacaccgcaggccttcattaccaccgaccatgatcacaaccagattacggcgtttcatccaggcgcaatgatgcgttcgtacgaaaatcacgttcgtgatgtgccgggtgttaccttgggcctcgtaggtcctgatggatatgagggcatgatccaaaatgccgaagaatttgctgctggtggcattccgttcatttttgacccaggtcaggcactgccgctgttcaacggccccgaactgcgcgagtttatcgaacaggcggactatgtggtggtcaacgattacgaaagcaatcttcttcaaacgcgtactggctggaacgagcaggacattgtttcacgcgtgcaggcgtatatcacgacgcaaggttcgaaaggagccctggtacatacaccggagaagacctacgatattccgccggcacacgaacgtcgtgtcgttgatccaactggttgcggcgacgcgtttcgcgccggcctgatctatggtattcagcataattatgattggttgaccattggccgcatgggaaacttaatgggtgcgctgaaagtggaacaccctggcacgcaaaatcagcgtttcgattttgccgaattcaacgaccagttcaaacaatattttggctacgcgctctaatga

SEQ ID NO: 928 - protein, 321 aa, synthetic construct
  REGION 1..321: note = Variant of adenosine kinase
MHHHHHHGGSGMSALICGSLAYDTIMVFPDQFKNHILPDRVHRLNVSFLVPRMRREFGGCAGNIAYNLHLLGGAPIVMATVGQDFGPYREHFETLGIDLSRVKIIDDLSTPQAFITTDHDHNQITAFHPGAMMRSYENHVRDVPGVTLGLVGPDGYEGMIQNAEEFAAGGIPFIFDPGQALPLFNGPELREFIEQADYVVVNDYESNLLQTRTGWNEQDIVSRVQAYITTQGSKGALVHTPEKTYDIPPAHERRVVDPTGCGDAFRAGLIYGIQHNYDWLTIGRMGNLMGALKVEHPGTQNQRFDFAEFNDQFKQYFGYAL

SEQ ID NO: 929 - DNA, 969 bp, synthetic construct
  misc_feature 1..969: note = Variant of adenosine kinase
  source 1..969: mol_type = other DNA
atgcaccatcatcaccatcacgggggctccggcatgagtgcactgatttgcggttctctggcgtatgataccatcatggtgtttccggaccagttcaagaaccatattctgcccgatcgtgttcaccgcctcaatgtcagctttcttgtaccacgcatgcgtcgtgagtttggaggctgtgccggcaacattgcgtacaatctgcatctgttgggtggtgctccgatcgtaatggctacggtgggccaagatttcggtccgtatcgcgagcacttcgaaactctgggcattgacttatcccgcgtcaagatcatcgatgatctgagtacaccgcaggccttcattaccaccgaccatgatcacaaccagattacggcgtttcatccaggcgcaatgatgcgttcgtacgaaaatcacgttcgtgatgtgccgggtgttaccttgggcctcgtaggtcctgatggatatgagggcatgatccaaaatgccgaagaatttgctgctggtggcattccgttcatttttgacccaggtcaggcactgccgctgttcaacggccccgaactgcgcgagtttatcgaacaggcggactatgtggtggtcaacgattacgaaagcaatcttcttcaaacgcgtactggctggaacgagcaggacattgtttcacgcgtgcaggcgtatatcacgacgcaaggttcgaaaggagccgtggtacatacaccggagaagacctacgatattccgccggcacacgaacgtcgcgtcgttgatccaactggttgcggcgacgcgtttcgcgccggcctgatctatggtattcagcataattatgattggttgaccattggccgcatgggaaacttaatgggtgcgctgaaagtggcacaccctggcacgcaaaatcagcgtttcgattttgccgaattcaacgaccagttcaaacaatattttggctacgcgctctaatga

SEQ ID NO: 930 - protein, 321 aa, synthetic construct
  REGION 1..321: note = Variant of adenosine kinase
MHHHHHHGGSGMSALICGSLAYDTIMVFPDQFKNHILPDRVHRLNVSFLVPRMRREFGGCAGNIAYNLHLLGGAPIVMATVGQDFGPYREHFETLGIDLSRVKIIDDLSTPQAFITTDHDHNQITAFHPGAMMRSYENHVRDVPGVTLGLVGPDGYEGMIQNAEEFAAGGIPFIFDPGQALPLFNGPELREFIEQADYVVVNDYESNLLQTRTGWNEQDIVSRVQAYITTQGSKGAVVHTPEKTYDIPPAHERRVVDPTGCGDAFRAGLIYGIQHNYDWLTIGRMGNLMGALKVAHPGTQNQRFDFAEFNDQFKQYFGYAL

SEQ ID NO: 931 - DNA, 969 bp, synthetic construct
  misc_feature 1..969: note = Variant of adenosine kinase
  source 1..969: mol_type = other DNA
atgcaccatcatcaccatcacgggggctccggcatgagtgcactgatttgcggttctttcgcgtatgataccatcatggtgtttccggaccagttcaagaaccatattctgcccgatcgtgttcaccgcctcaatgtcagctttcttgtaccacgcatgcgtcgtttttttggaggctgtgccggcaacattgcgtacaatctgcatctgttgggtggtgctccgatcgtaatggctacggtgggccaagatttcggtccgtatcgcgagcacttcgaaactctgggcattgacttatcccgcgtcaagatcatcgatgatctgagtacaccgcaggccttcattaccaccgaccatgatatgaaccagattacggcgtttcatccaggcgcaatgatgcgttcgtacgaaaatcacgttcgtgatgtgccgggtgttaccttgggcctcgtaggtcctgatggacgcgagggcatgatccaaaatgccgaagaatttgctgctggtggcattccgttcatttttgacccaggtcaggcactgccgctgttcaacggccccgaactgcgcgagtttatcgaacaggcggactatgtggtggtcaacgattacgaaagcaatcttcttcaaacgcgtactggctggaacgagcaggacattgtttcacgcgtgcaggcgtatatcaccacgcaaggttcgaaaggagccctggtacatacaccggagaagacctacgatattccgccggcacacgaacgtcgtgtcgttgatccaactggttgcggcgacgcgtttcgcgccggcctgatctatggtattcagcataattatgattggttgaccattggccgcatgggaaacttaatgggtgcgctgaaagtggaacaccctggcacgcaaaatcagcgtttcgattttgccgaattcaacgaccagttcaaacaatattttggctacgcgctctaatga

SEQ ID NO: 932 - protein, 321 aa, synthetic construct
  REGION 1..321: note = Variant of adenosine kinase
MHHHHHHGGSGMSALICGSFAYDTIMVFPDQFKNHILPDRVHRLNVSFLVPRMRRFFGGCAGNIAYNLHLLGGAPIVMATVGQDFGPYREHFETLGIDLSRVKIIDDLSTPQAFITTDHDMNQITAFHPGAMMRSYENHVRDVPGVTLGLVGPDGREGMIQNAEEFAAGGIPFIFDPGQALPLFNGPELREFIEQADYVVVNDYESNLLQTRTGWNEQDIVSRVQAYITTQGSKGALVHTPEKTYDIPPAHERRVVDPTGCGDAFRAGLIYGIQHNYDWLTIGRMGNLMGALKVEHPGTQNQRFDFAEFNDQFKQYFGYAL

SEQ ID NO: 933 - DNA, 969 bp, synthetic construct
  misc_feature 1..969: note = Variant of adenosine kinase
  source 1..969: mol_type = other DNA
atgcaccatcatcaccatcacgggggctccggcatgagtgcactgatttgcggttctttagcgtatgataccatcatggtgtttccggaccagttcaagaaccatattctgcccgatcgtgttcaccgcctcaatgtcagctttcttgtaccacgcatgcgtcgtgaatttggaggctgtgccggcaacattgcgtacaatctgcatctgttgggtggtgctccgatcgtaatggctacggtgggccaagatttcggtccgtatcgcgagcacttcgaaactctgggcattgacttatcccgcgtcaagatcatcgatgatctgagtacaccgcaggccttcattaccaccgacatggatcataaccagattacggcgtttcatccaggcgcaatgatgcgttcgtacgaaaatcacgttcgtgatgtgccgggtgttaccttgggcctcgtaggtcctgatggacgcgagggcatgatccaaaatgccgaagaatttgctgctggtggcattccgttcatttttgacccaggtcaggcagtgccgctgttcaacggccccgaactgcgcgagtttatcgaacaggcggactatgtggtggtcaacgattacgaaagcaatcttcttcaaacgcgtactggctggaacgagcaggacattgtttcacgcgtgcaggcgtatatcaccacgcaaggttcgaaaggagccctggtacatacaccggagaagacctacgatattccgccggcacacgaacgtcgtgtcgttgatccaactggttgcggcgacgcgtttcgcgccggcctgatctatggtattcagcataattatgattggttgaccattggccgcatgggaaacttaatgggtgcgctgaaagtggaacaccctggcacgcaaaatcagcgtttcgattttgccgaattcaacgaccagttcaaacaatattttggctacgcgctctaatga

SEQ ID NO: 934 - protein, 321 aa, synthetic construct
  REGION 1..321: note = Variant of adenosine kinase
MHHHHHHGGSGMSALICGSLAYDTIMVFPDQFKNHILPDRVHRLNVSFLVPRMRREFGGCAGNIAYNLHLLGGAPIVMATVGQDFGPYREHFETLGIDLSRVKIIDDLSTPQAFITTDMDHNQITAFHPGAMMRSYENHVRDVPGVTLGLVGPDGREGMIQNAEEFAAGGIPFIFDPGQAVPLFNGPELREFIEQADYVVVNDYESNLLQTRTGWNEQDIVSRVQAYITTQGSKGALVHTPEKTYDIPPAHERRVVDPTGCGDAFRAGLIYGIQHNYDWLTIGRMGNLMGALKVEHPGTQNQRFDFAEFNDQFKQYFGYAL

SEQ ID NO: 935 - DNA, 969 bp, synthetic construct
  misc_feature 1..969: note = Variant of adenosine kinase
  source 1..969: mol_type = other DNA
atgcaccatcatcaccatcacgggggctccggcatgagtgcactgatttgcggttctttcgcgtatgataccatcatggtgtttccggaccagttcaagaaccatattctgcccgatcgtgttcaccgcctcaatgtcagctttcttgtaccacgcatgcgtcgtgggtttggaggctgtgccggcaacattgcgtacaatctgcatctgttgggtggtgctccgatcgtaatggctacggtgggccaagatttcggtccgtatcgcgagcacttcgaaactctgggcattgacttatcccgcgtcaagatcatcgatgatctgagtacaccgcaggccttcattaccaccgaccatgatcacaaccagattacggcgtttcatccaggcgcaatgatgcgttcgtacgaaaatcacgttcgtgatgtgccgggtgttaccttgggcctcgtaggtcctgatggacgcgagggcatgatccaaaatgccgaagaatttgctgctggtggcattccgttcatttttgacccaggtcaggcactgccgctgttcaacggccccgaactgcgcgagtttatcgaacaggcggactatgtggtggtcaacgattacgaaagcaatcttcttcaaacgcgtactggctggaacgagcaggacattgtttcacgcgtgcaggcgtatatcgttacgcaaggttcgaaaggagccctggtacatacaccggagaagacctacgatattccgccggcacacgaacgtctggtcgttgatccaactggttgcggcgacgcgtttcgcgccggcctgatctatggtattcagcataattatgattggttgaccattggccgcatgggaaacttaatgggtgcgctgaaagtggaacaccctggcacgcaaaatcagcgtttcgattttgccgaattcaacgaccagttcaaacaatattttggctacgcgctctaatga

SEQ ID NO: 936 - protein, 321 aa, synthetic construct
  REGION 1..321: note = Variant of adenosine kinase
MHHHHHHGGSGMSALICGSFAYDTIMVFPDQFKNHILPDRVHRLNVSFLVPRMRRGFGGCAGNIAYNLHLLGGAPIVMATVGQDFGPYREHFETLGIDLSRVKIIDDLSTPQAFITTDHDHNQITAFHPGAMMRSYENHVRDVPGVTLGLVGPDGREGMIQNAEEFAAGGIPFIFDPGQALPLFNGPELREFIEQADYVVVNDYESNLLQTRTGWNEQDIVSRVQAYIVTQGSKGALVHTPEKTYDIPPAHERLVVDPTGCGDAFRAGLIYGIQHNYDWLTIGRMGNLMGALKVEHPGTQNQRFDFAEFNDQFKQYFGYAL

SEQ ID NO: 937 - DNA, 969 bp, synthetic construct
  misc_feature 1..969: note = Variant of adenosine kinase
  source 1..969: mol_type = other DNA
atgcaccatcatcaccatcacgggggctccggcatgagtgcactgatttgcggttctttagcgtatgataccatcatggtgtttccggaccagttcaagaaccatattctgcccgatcgtgttcaccgcctcaatgtcagctttcttgtaccacgcatgcgtcgtttttttggaggctgtgccggcaacattgcgtacaatctgcatctgttgggtggtgctccgatcgtaatggctacggtgggccaagatttcggtccgtatcgcgagcacttcgaaactctgggcattgacttatcccgcgtcaagatcatcgatgatctgagtacaccgcaggccttcattaccaccgaccatgatcacaaccagattacggcgtttcatccaggcgcaatgatgcgttcgtacgaaaatcacgttcgtgatgtgccgggtgttaccttgggcctcgtaggtcctgatggacgcgagggcatgatccaaaatgccgaagaatttgctgctggtggcattccgttcatttttgacccaggtcaggcactgccgctgttcaacggccccgaactgcgcgagtttatcgaacaggcggactatgtggtggtcaacgattacgaaagcaatcttcttcaaacgcgtactggctggaacgagcaggacattgtttcacgcgtgcaggcgtatatcacgacgcaaggttcgaaaggagccctggtacatacaccggagaagacctacgatattccgccggcacacgaacgtcgcgtcgttgatccaactggttgcggcgacgcgtttcgcgccggcctgatctatggtattcagcataattatgattggttgaccattggccgcatgggaaacttaatgggtgcgctgaaagtggaacaccctggcacgcaaaatcagcgtttcgattttgccgaattcaacgaccagttcaaacaatatttcggctacgcgctctaatga

SEQ ID NO: 938 - protein, 321 aa, synthetic construct
  REGION 1..321: note = Variant of adenosine kinase
MHHHHHHGGSGMSALICGSLAYDTIMVFPDQFKNHILPDRVHRLNVSFLVPRMRRFFGGCAGNIAYNLHLLGGAPIVMATVGQDFGPYREHFETLGIDLSRVKIIDDLSTPQAFITTDHDHNQITAFHPGAMMRSYENHVRDVPGVTLGLVGPDGREGMIQNAEEFAAGGIPFIFDPGQALPLFNGPELREFIEQADYVVVNDYESNLLQTRTGWNEQDIVSRVQAYITTQGSKGALVHTPEKTYDIPPAHERRVVDPTGCGDAFRAGLIYGIQHNYDWLTIGRMGNLMGALKVEHPGTQNQRFDFAEFNDQFKQYFGYAL

SEQ ID NO: 939 - DNA, 969 bp, synthetic construct
  misc_feature 1..969: note = Variant of adenosine kinase
  source 1..969: mol_type = other DNA
atgcaccatcatcaccatcacgggggctccggcatgagtgcactgatttgcggttctctggcgtatgataccatcatggtgtttccggaccagttcaagaaccatattctgcccgatcgtgttcaccgcctcaatgtcagctttcttgtaccacgcatgcgtcgtgaatttggaggctgtgccggcaacattgcgtacaatctgcatctgttgggtggtgctccgatcgtaatggctacggtgggccaagatttcggtccgtatcgcgagcacttcgaaactctgggcattgacttatcccgcgtcaagatcatcgatgatctgagtacaccgcaggccttcattaccaccgaccatgatatgaaccagattacggcgtttcatccaggcgcaatgatgcgttcgtacgaaaatcacgttcgtgatgtgccgggtgttaccttgggcctcgtaggtcctgatggacgcgagggcatgatccaaaatgccgaagaatttgctgctggtggcattccgttcatttttgacccaggtcaggcactgccgctgttcaacggccccgaactgcgcgagtttatcgaacaggcggactatgtggtggtcaacgattacgaaagcaatcttcttcaaacgcgtactggctggaacgagcaggacattgtttcacgcgtgcaggcgtatatcacgacgcaaggttcgaaaggagccctggtacatacaccggagaagacctacgatattccgccggcacacgaacgtctggtcgttgatccaactggttgcggcgacgcgtttcgcgccggcctgatctatggtattcagcataattatgattggttgaccattggccgcatgggaaacttaatgggtgcgctgaaagtggaacaccctggcacgcaaaatcagcgtttcgattttgccgaattcaacgaccagttcaaacaatattttggctacgcgctctaatga

SEQ ID NO: 940 - protein, 321 aa, synthetic construct
  REGION 1..321: note = Variant of adenosine kinase
MHHHHHHGGSGMSALICGSLAYDTIMVFPDQFKNHILPDRVHRLNVSFLVPRMRREFGGCAGNIAYNLHLLGGAPIVMATVGQDFGPYREHFETLGIDLSRVKIIDDLSTPQAFITTDHDMNQITAFHPGAMMRSYENHVRDVPGVTLGLVGPDGREGMIQNAEEFAAGGIPFIFDPGQALPLFNGPELREFIEQADYVVVNDYESNLLQTRTGWNEQDIVSRVQAYITTQGSKGALVHTPEKTYDIPPAHERLVVDPTGCGDAFRAGLIYGIQHNYDWLTIGRMGNLMGALKVEHPGTQNQRFDFAEFNDQFKQYFGYAL

SEQ ID NO: 941 - DNA, 969 bp, synthetic construct
  misc_feature 1..969: note = Variant of adenosine kinase
  source 1..969: mol_type = other DNA
atgcaccatcatcaccatcacgggggctccggcatgagtgcactgatttgcggttctttcgcgtatgataccatcatggtgtttccggaccagttcaagaaccatattctgcccgatcgtgttcaccgcctcaatgtcagctttcttgtaccacgcatgcgtcgtgagtttggaggctgtgccggcaacattgcgtacaatctgcatctgttgggtggtgctccgatcgtaatggctacggtgggccaagatttcggtccgtatcgcgagcacttcgaaactctgggcattgacttatcccgcgtcaagatcatcgatgatctgagtacaccgcaggccttcattaccaccgaccatgatcacaaccagattacggcgtttcatccaggcgcaatgatgcgttcgtacgaaaatcacgttcgtgatgtgccgggtgttaccttgggcctcgtaggtcctgatggacgcgagggcatgatccaaaatgccgaagaatttgctgctggtggcattccgttcatttttgacccaggtcaggcactgccgctgttcaacggccccgaactgcgcgagtttatcgaacaggcggactatgtggtggtcaacgattacgaaagcaatcttcttcaaacgcgtactggctggaacgagcaggacattgtttcacgcgtgcaggcgtatatcacgacgcaaggttcgaaaggagccctggtacatacaccggagaagacctacgatattccgccggcacacgaacgtcgcgtcgttgatccaactggttgcggcgacgcgtttcgcgccggcctgatctatggtattcagcataattatgattggttgaccattggccgcatgggaaacttaatgggtgcgctgaaagtggcacaccctggcacgcaaaatcagcgtttcgattttgccgaattcaacgaccagttcaaacaatattttggctacgcgctctaatga

SEQ ID NO: 942 - protein, 321 aa, synthetic construct
  REGION 1..321: note = Variant of adenosine kinase
MHHHHHHGGSGMSALICGSFAYDTIMVFPDQFKNHILPDRVHRLNVSFLVPRMRREFGGCAGNIAYNLHLLGGAPIVMATVGQDFGPYREHFETLGIDLSRVKIIDDLSTPQAFITTDHDHNQITAFHPGAMMRSYENHVRDVPGVTLGLVGPDGREGMIQNAEEFAAGGIPFIFDPGQALPLFNGPELREFIEQADYVVVNDYESNLLQTRTGWNEQDIVSRVQAYITTQGSKGALVHTPEKTYDIPPAHERRVVDPTGCGDAFRAGLIYGIQHNYDWLTIGRMGNLMGALKVAHPGTQNQRFDFAEFNDQFKQYFGYAL

SEQ ID NO: 943 - DNA, 969 bp, synthetic construct
  misc_feature 1..969: note = Variant of adenosine kinase
  source 1..969: mol_type = other DNA
atgcaccatcatcaccatcacgggggctccggcatgagtgcactgatttgcggttctttagcgtatgataccatcatggtgtttccggaccagttcaagaaccatattctgcccgatcgtgttcaccgcctcaatgtcagctttcttgtaccacgcatgcgtcgtgaatttggaggctgtgccggcaacattgcgtacaatctgcatctgttgggtggtgctccgatcgtaatggctacggtgggccaagatttcggtccgtatcgcgagcacttcgaaactctgggcattgacttatcccgcgtcaagatcatcgatgatctgagtacaccgcaggccttcattaccaccgaccatgatcataaccagattacggcgtttcatccaggcgcaatgatgcgttcgtacgaaaatcacgttcgtgatgtgccgggtgttaccttgggcctcgtaggtcctgatggacgcgagggcatgatccaaaatgccgaagaatttgctgctggtggcattccgttcatttttgacccaggtcaggcactgccgctgttcaacggccccgaactgcgcgagtttatcgaacaggcggactatgtggtggtcaacgattacgaaagcaatcttcttcaaacgcgtactggctggaacgagcaggacattgtttcacgcgtgcaggcgtatatcaccacgcaaggttcgaaaggagccctggtacatacaccggagaagacctacgatattccgccggcacacgaacgtcgtaagatggatccaactggttgcggcgacgcgtttcgcgccggcctgatctatggtattcagcataattatgattggttgaccattggccgcatgggaaacttaatgggtgcgctgaaagtggaacaccctggcacgcaaaatcagcgtttcgattttgccgaattcaacgaccagttcaaacaatattttggctacgcgctctaatga

SEQ ID NO: 944 - protein, 321 aa, synthetic construct
  REGION 1..321: note = Variant of adenosine kinase
MHHHHHHGGSGMSALICGSLAYDTIMVFPDQFKNHILPDRVHRLNVSFLVPRMRREFGGCAGNIAYNLHLLGGAPIVMATVGQDFGPYREHFETLGIDLSRVKIIDDLSTPQAFITTDHDHNQITAFHPGAMMRSYENHVRDVPGVTLGLVGPDGREGMIQNAEEFAAGGIPFIFDPGQALPLFNGPELREFIEQADYVVVNDYESNLLQTRTGWNEQDIVSRVQAYITTQGSKGALVHTPEKTYDIPPAHERRKMDPTGCGDAFRAGLIYGIQHNYDWLTIGRMGNLMGALKVEHPGTQNQRFDFAEFNDQFKQYFGYAL

SEQ ID NO: 945 - DNA, 969 bp, synthetic construct
  misc_feature 1..969: note = Variant of adenosine kinase
  source 1..969: mol_type = other DNA
atgcaccatcatcaccatcacgggggctccggcatgagtgcactgatttgcggttctctggcgtatgataccatcatggtgtttccggaccagttcaagaaccatattctgcccgatcgtgttcaccgcctcaatgtcagctttcttgtaccacgcatgcgtcgtttttttggaggctgtgccggcaacattgcgtacaatctgcatctgttgggtggtgctccgatcgtaatggctacggtgggccaagatttcggtccgtatcgcgagcacttcgaaactctgggcattgacttatcccgcgtcaagatcatcgatgatctgagtacaccgcaggccttcattaccaccgaccatgatatgaaccagattacggcgtttcatccaggcgcaatgatgcgttcgtacgaaaatcacgttcgtgatgtgccgggtgttaccttgggcctcgtaggtcctgatggacgcgagggcatgatccaaaatgccgaagaatttgctgctggtggcattccgttcatttttgacccaggtcaggcactgccgctgttcaacggccccgaactgcgcgagtttatcgaacaggcggactatgtggtggtcaacgattacgaaagcaatcttcttcaaacgcgtactggctggaacgagcaggacattgtttcacgcgtgcaggcgtatatcgttacgcaaggttcgaaaggagccctggtacatacaccggagaagacctacgatattccgccggcacacgaacgtctggtcgttgatccaactggttgcggcgacgcgtttcgcgccggcctgatctatggtattcagcataattatgattggttgaccattggccgcatgggaaacttaatgggtgcgctgaaagtggaacaccctggcacgcaaaatcagcgtttcgattttgccgaattcaacgaccagttcaaacaatattttggctacgcgctctaatga

SEQ ID NO: 946 - protein, 321 aa, synthetic construct
  REGION 1..321: note = Variant of adenosine kinase
MHHHHHHGGSGMSALICGSLAYDTIMVFPDQFKNHILPDRVHRLNVSFLVPRMRRFFGGCAGNIAYNLHLLGGAPIVMATVGQDFGPYREHFETLGIDLSRVKIIDDLSTPQAFITTDHDMNQITAFHPGAMMRSYENHVRDVPGVTLGLVGPDGREGMIQNAEEFAAGGIPFIFDPGQALPLFNGPELREFIEQADYVVVNDYESNLLQTRTGWNEQDIVSRVQAYIVTQGSKGALVHTPEKTYDIPPAHERLVVDPTGCGDAFRAGLIYGIQHNYDWLTIGRMGNLMGALKVEHPGTQNQRFDFAEFNDQFKQYFGYAL

SEQ ID NO: 947 - DNA, 969 bp, synthetic construct
  misc_feature 1..969: note = Variant of adenosine kinase
  source 1..969: mol_type = other DNA
atgcaccatcatcaccatcacgggggctccggcatgagtgcactgatttgcggttctttagcgtatgataccatcatggtgtttccggaccagttcaagaaccatattctgcccgatcgtgttcaccgcctcaatgtcagctttcttgtaccacgcatgcgtcgtgaatttggaggctgtgccggcaacattgcgtacaatctgcatctgttgggtggtgctccgatcgtaatggctacggtgggccaagatttcggtccgtatcgcgagcacttcgaaactctgggcattgacttatcccgcgtcaagatcatcgatgatctgagtacaccgcaggccttcattaccaccgacatggatcataaccagattacggcgtttcatggcggcgcaatgatgcgttcgtacgaaaatcacgttcgtgatgtgccgggtgttaccttgggcctcgtaggtcctgatggacgcgagggcatgatccaaaatgccgaagaatttgctgctggtggcattccgttcatttttgacccaggtcaggcactgccgctgttcaacggccccgaactgcgcgagtttatcgaacaggcggactatgtggtggtcaacgattacgaaagcaatcttcttcaaacgcgtactggctggaacgagcaggacattgtttcacgcgtgcaggcgtatatcaccacgcaaggttcggctggagccctggtacatacaccggagaagacctacgatattccgccggcacacgaacgtcgtgcgatggatccaactggttgcggcgacgcgtttcgcgccggcctgatctatggtattcagcataattatgattggttgaccattggccgcatgggaaacttaatgggtgcgctgaaagtggaacaccctggcacgcaaaatcagcgtttcgattttgccgaattcaacgaccagttcaaacaatattttggctacgcgctctaatga

SEQ ID NO: 948 - protein, 321 aa, synthetic construct
  REGION 1..321: note = Variant of adenosine kinase
MHHHHHHGGSGMSALICGSLAYDTIMVFPDQFKNHILPDRVHRLNVSFLVPRMRREFGGCAGNIAYNLHLLGGAPIVMATVGQDFGPYREHFETLGIDLSRVKIIDDLSTPQAFITTDMDHNQITAFHGGAMMRSYENHVRDVPGVTLGLVGPDGREGMIQNAEEFAAGGIPFIFDPGQALPLFNGPELREFIEQADYVVVNDYESNLLQTRTGWNEQDIVSRVQAYITTQGSAGALVHTPEKTYDIPPAHERRAMDPTGCGDAFRAGLIYGIQHNYDWLTIGRMGNLMGALKVEHPGTQNQRFDFAEFNDQFKQYFGYAL

SEQ ID NO: 949 - DNA, 969 bp, synthetic construct
  misc_feature 1..969: note = Variant of adenosine kinase
  source 1..969: mol_type = other DNA
atgcaccatcatcaccatcacgggggctccggcatgagtgcactgatttgcggttctttagcgtatgataccatcatggtgtttccggaccagttcaagaaccatattctgcccgatcgtgttcaccgcctcaatgtcagctttcttgtaccacgcatgcgtcgtgaatttggaggctgtgccggcaacattgcgtacaatctgcatctgttgggtggtgctccgatcgtaatggctacggtgggccaagatttcggtccgtatcgcgagcacttcgaaactctgggcattgacttatcccgcgtcaagatcatcgatgatctgagtacaccgcaggccttcattaccaccgaccgcgatcataaccagattacggcgtttcatccaggcgcaatgatgcgttcgtacgaaaatcacgttcgtgatgtgccgggtgttaccttgggcctcgtaggtcctgatggacgcgagggcatgatccaaaatgccgaagaatttgctgctggtggcattccgttcatttttgacccaggtcaggcagtgccgctgttcaacggccccgaactgcgcgagtttatcgaacaggcggactatgtggtggtcaacgattacgaaagcaatcttcttcaaacgcgtactggctggaacgagcaggacattgtttcacgcgtgcaggcgtatatcaccacgcaaggttcgaaaggagccctggtacatacaccggagaagacctacgatattccgccggctcacgaacgtcgtgtcgttgatccaactggttgcggcgacgcgtttcgcgccggcctgatctatggtattcagcataattatgattggttgaccattggccgcatgggaaacttaatgggtgcgctgaaagtggaacaccctggcacgcaaaatcagcgtttcgattttgccgaattcaacgaccagttcaaacaatattttggctacgcgctctaatga

SEQ ID NO: 950 - protein, 321 aa, synthetic construct
  REGION 1..321: note = Variant of adenosine kinase
MHHHHHHGGSGMSALICGSLAYDTIMVFPDQFKNHILPDRVHRLNVSFLVPRMRREFGGCAGNIAYNLHLLGGAPIVMATVGQDFGPYREHFETLGIDLSRVKIIDDLSTPQAFITTDRDHNQITAFHPGAMMRSYENHVRDVPGVTLGLVGPDGREGMIQNAEEFAAGGIPFIFDPGQAVPLFNGPELREFIEQADYVVVNDYESNLLQTRTGWNEQDIVSRVQAYITTQGSKGALVHTPEKTYDIPPAHERRVVDPTGCGDAFRAGLIYGIQHNYDWLTIGRMGNLMGALKVEHPGTQNQRFDFAEFNDQFKQYFGYAL

SEQ ID NO: 951 - DNA, 969 bp, synthetic construct
  misc_feature 1..969: note = Variant of adenosine kinase
  source 1..969: mol_type = other DNA
atgcaccatcatcaccatcacgggggctccggcatgagtgcactgatttgcggttctttagcgtatgataccatcatggtgtttccggaccagttcaagaaccatattctgcccgatcgtgttcaccgcctcaatgtcagctttcttgtaccacgcatgcgtcgtgggtttggaggctgtgccggcaacattgcgtacaatctgcatctgttgggtggtgctccgatcgtaatggctacggtgggccaagatttcggtccgtatcgcgagcacttcgaaactctgggcattgacttatcccgcgtcaagatcatcgatgatctgagtacaccgcaggccttcattaccaccgacatggatcacaaccagattacggcgtttcatggcggcgcaatgatgcgttcgtacgaaaatcacgttcgtgatgtgccgggtgttaccttgggcctcgtaggtcctgatggacgcgagggcatgatccaaaatgccgaagaatttgctgctggtggcattccgttcatttttgacccaggtcaggcactgccgctgttcaacggccccgaactgcgcgagtttatcgaacaggcggactatgtggtggtcaacgattacgaaagcaatcttcttcaaacgcgtactggctggaacgagcaggacattgtttcacgcgtgcaggcgtatatcgttacgcaaggttcggctggagccctggtacatacaccggagaagacctacgatattccgccggctcacacccgtcgtgtcgttgatccaactggttgcggcgacgcgtttcgcgccggcctgatctatggtattcagcataattatgattggttgaccattggccgcatgggaaacttaatgggtgcgctgaaagtggaacaccctggcacccaaaatcagcgtttcgattttgccgaattcaacgaccagttcaaacaatattttggctacgcgctctaatga

SEQ ID NO: 952 - protein, 321 aa, synthetic construct
  REGION 1..321: note = Variant of adenosine kinase
MHHHHHHGGSGMSALICGSLAYDTIMVFPDQFKNHILPDRVHRLNVSFLVPRMRRGFGGCAGNIAYNLHLLGGAPIVMATVGQDFGPYREHFETLGIDLSRVKIIDDLSTPQAFITTDMDHNQITAFHGGAMMRSYENHVRDVPGVTLGLVGPDGREGMIQNAEEFAAGGIPFIFDPGQALPLFNGPELREFIEQADYVVVNDYESNLLQTRTGWNEQDIVSRVQAYIVTQGSAGALVHTPEKTYDIPPAHTRRVVDPTGCGDAFRAGLIYGIQHNYDWLTIGRMGNLMGALKVEHPGTQNQRFDFAEFNDQFKQYFGYAL

SEQ ID NO: 953 - DNA, 969 bp, synthetic construct
  misc_feature 1..969: note = Variant of adenosine kinase
  source 1..969: mol_type = other DNA
atgcaccatcatcaccatcacgggggctccggcatgagtgcactgatttgcggttctttagggtatgataccatcatggtgtttccggaccagttcaagaaccatattctgcccgatcgtgttcaccgcctcaatgtcagctttcttgtaccacgcatgcgtcgtgggtttggaggctgtgccggcaacattgcgtacaatctgcatctgttgggtggtgctccgatcgtaatggctacggtgggccaagatttcggtccgtatcgcgagcacttcgaaactctgggcattgacttatcccgcgtcaagatcatcgatgatctgagtacaccgcaggccttcattaccaccgacatggatcacaaccagattacggcgtttcatggcggcgcaatgatgcgttcgtacgaaaatcacgttcgtgatgtgccgggtgttaccttgggcctcgtaggtcctgatggacgcgagggcatgatccaaaatgccgaagaatttgctgctggtggcattccgttcatttttgacccaggtcaggcactgccgctgttcaacggccccgaactgcgcgagtttatcgaacaggcggactatgtggtggtcaacgattacgaaagcaatcttcttcaaacgcgtactggctggaacgagcaggacattgtttcacgcgtgcaggcgtatatcaccacgcaaggttcggctggagccctggtacatacaccggagaagacctacgatattccgccggctcacacccgtcgtgtcgttgatccaactggttgcggcgacgcgtttcgcgccggcctgatctatggtattcagcataattatgattggttgaccattggccgcatgggaaacttaatgggtgcgctgaaagtggaacaccctggcacccaaaatcagcgtttcgattttgccgaattcaacgaccagttcaaacaatattttggctacgcgctctaatga

SEQ ID NO: 954 - protein, 321 aa, synthetic construct
  REGION 1..321: note = Variant of adenosine kinase
MHHHHHHGGSGMSALICGSLGYDTIMVFPDQFKNHILPDRVHRLNVSFLVPRMRRGFGGCAGNIAYNLHLLGGAPIVMATVGQDFGPYREHFETLGIDLSRVKIIDDLSTPQAFITTDMDHNQITAFHGGAMMRSYENHVRDVPGVTLGLVGPDGREGMIQNAEEFAAGGIPFIFDPGQALPLFNGPELREFIEQADYVVVNDYESNLLQTRTGWNEQDIVSRVQAYITTQGSAGALVHTPEKTYDIPPAHTRRVVDPTGCGDAFRAGLIYGIQHNYDWLTIGRMGNLMGALKVEHPGTQNQRFDFAEFNDQFKQYFGYAL

SEQ ID NO: 955 - DNA, 969 bp, synthetic construct
  misc_feature 1..969: note = Variant of adenosine kinase
  source 1..969: mol_type = other DNA
atgcaccatcatcaccatcacgggggctccggcatgagtgcactgatttgcggttctttagcgtatgataccatcatggtgtttccggaccagttcaagaaccatattctgcccgatcgtgttcaccgcctcaatgtcagctttcttgtaccacgcatgcgtcgtgaatttggaggctgtgccggcaacattgcgtacaatctgcatctgttgggtggtgctccgatcgtaatggctacggtgggccaagatttcggtccgtatcgcgagcacttcgaaactctgggcattgacttatcccgcgtcaagatcatcgatgatctgagtacaccgcaggcgttcattaccaccgacatggatcataaccagattacggcgtttcatggcggcgcaatgatgcgttcgtacgaaaatcacgttcgtgatgtgccgggtgttaccttgggcctcgtaggtcctgatggacgcgagggcatgatccaaaatgccgaagaatttgctgctggtggcattccgttcatttttgacccaggtcaggcagtgccgctgttcaacggccccgaactgcgcgagtttatcgaacaggcggactatgtggtggtcaacgattacgaaagcaatcttcttcaaacgcgtactggctggaacgagcaggacattgtttcacgcgtgcaggcgtatatcaccacgcaaggttcggctggagccctggtacatacaccggagaagacctacgatattccgccggctcacacccgtcgtgtcgttgatccaactggttgcggcgacgcgtttcgcgccggcctgatctatggtattcagcataattatgattggttgaccattggccgcatgggaaacttaatgggtgcgctgaaagtggaacaccctggcacccaaaatcagcgtttcgattttgccgaattcaacgaccagttcaaacaatattttggctacgcgctctaatga

SEQ ID NO: 956 - protein, 321 aa, synthetic construct
  REGION 1..321: note = Variant of adenosine kinase
MHHHHHHGGSGMSALICGSLAYDTIMVFPDQFKNHILPDRVHRLNVSFLVPRMRREFGGCAGNIAYNLHLLGGAPIVMATVGQDFGPYREHFETLGIDLSRVKIIDDLSTPQAFITTDMDHNQITAFHGGAMMRSYENHVRDVPGVTLGLVGPDGREGMIQNAEEFAAGGIPFIFDPGQAVPLFNGPELREFIEQADYVVVNDYESNLLQTRTGWNEQDIVSRVQAYITTQGSAGALVHTPEKTYDIPPAHTRRVVDPTGCGDAFRAGLIYGIQHNYDWLTIGRMGNLMGALKVEHPGTQNQRFDFAEFNDQFKQYFGYAL

SEQ ID NO: 957 - DNA, 969 bp, synthetic construct
  misc_feature 1..969: note = Variant of adenosine kinase
  source 1..969: mol_type = other DNA
atgcaccatcatcaccatcacgggggctccggcatgagtgcactgatttgcggttctttagcgtatgataccatcatggtgtttccggaccagttcaagaaccatattctgcccgatcgtgttcaccgcctcaatgtcagctttcttgtaccacgcatgcgtcgtgaatttggaggctgtgccggcaacattgcgtacaatctgcatctgttgggtggtgctccgatcgtaatggctacggtgggccaagatttcggtccgtatcgcgagcacttcgaaactctgggcattgacttatcccgcgtcaagatcatcgatgatctgagtacaccgcaggccttcattaccaccgacatggatcataaccagattacggcgtttcacggcggcgcaatgatgcgttcgtacgaaaatcacgttcgtgatgtgccgggtgttaccttgggcctcgtaggtcctgatggacgcgagggcatgatccaaaatgccgaagaatttgctgctggtggcattccgttcatttttgacccaggtcaggcagtgccgctgttcaacggccccgaactgcgcgagtttatcgaacaggcggactatgtggtggtcaacgattacgaaagcaatcttcttcaagcccgtactggctggaacgagcaggacattgtttcacgcgtgcaggcgtatatcaccacgcaaggttcggctggagccctggtacatacaccggagaagacctacgatattccgccggctaaaacccgtcgtgtcgttgatccaactggttgcggcgacgcgtttcgcgccggcctgatctatggtattcagcataattatgattggttgaccattggccgcatgggaaacttaatgggtgcgctgaaagtggaacaccctggcacccaaaatcagcgtttcgattttgccgaattcaacgaccagttcaaacaatattttggctacgcgctctaatga

SEQ ID NO: 958 - protein, 321 aa, synthetic construct
  REGION 1..321: note = Variant of adenosine kinase
MHHHHHHGGSGMSALICGSLAYDTIMVFPDQFKNHILPDRVHRLNVSFLVPRMRREFGGCAGNIAYNLHLLGGAPIVMATVGQDFGPYREHFETLGIDLSRVKIIDDLSTPQAFITTDMDHNQITAFHGGAMMRSYENHVRDVPGVTLGLVGPDGREGMIQNAEEFAAGGIPFIFDPGQAVPLFNGPELREFIEQADYVVVNDYESNLLQARTGWNEQDIVSRVQAYITTQGSAGALVHTPEKTYDIPPAKTRRVVDPTGCGDAFRAGLIYGIQHNYDWLTIGRMGNLMGALKVEHPGTQNQRFDFAEFNDQFKQYFGYAL

SEQ ID NO: 959 - DNA, 969 bp, synthetic construct
  misc_feature 1..969: note = Variant of adenosine kinase
  source 1..969: mol_type = other DNA
atgcaccatcatcaccatcacgggggctccggcatgagtgcactgatttgcggttctttagcgtatgataccatcatggtgtttccggaccagttcaagaaccatattctgcccgatcgtgttcaccgcctcaatgtcagctttcttgtaccacgcatgcgtcgtgaatttggaggctgtgccggcaacattgcgtacaatctgcatctgttgggtggtgctccgatcgtaatggctacggtgggccaagatttcggtccgtatcgcgagcacttcgaaactctgggcattgacttatcccgcgtcaagatcatcgatgatctgagtacaccgcaggccttcattaccaccgacatggatcataaccagattacggcgtttcacggcggcgcaatgatgcgttcgtacgaaaatcacgttcgtgatgtgccgggtgttaccttgggcctcgtaggtcctgatggacgcgagggcatgatccaaaatgccgaagaatttgctgctggtggcattccgttcatttttgacccaggtcaggcagtgccgctgttcaacggccccgaactgcgcgagtttatcgaacaggcggactatgtggtggtcaacgattacgaaagcaatcttcttcaagcccgtactggctggaacgagcaggacattgtttcacgcgtgcaggcgtatatcaccacgcaaggttcggctggagccctggtacatacaccggagaagacctacgatattccgccggctcatacccgtcgtgtcgttgatccaactggttgcggcgacgcgtttcgcgccggcctgatctatggtattcagcataattatgattggttgaccattggccgcatgggaaacttaatgggtgcgctgaaagtggaacaccctggcacccaaaatcagcgtttcgattttgccgaattcaacgaccagttcaaacaatattttggctacgcgctctaatga

SEQ ID NO: 960 - protein, 321 aa, synthetic construct
  REGION 1..321: note = Variant of adenosine kinase
MHHHHHHGGSGMSALICGSLAYDTIMVFPDQFKNHILPDRVHRLNVSFLVPRMRREFGGCAGNIAYNLHLLGGAPIVMATVGQDFGPYREHFETLGIDLSRVKIIDDLSTPQAFITTDMDHNQITAFHGGAMMRSYENHVRDVPGVTLGLVGPDGREGMIQNAEEFAAGGIPFIFDPGQAVPLFNGPELREFIEQADYVVVNDYESNLLQARTGWNEQDIVSRVQAYITTQGSAGALVHTPEKTYDIPPAHTRRVVDPTGCGDAFRAGLIYGIQHNYDWLTIGRMGNLMGALKVEHPGTQNQRFDFAEFNDQFKQYFGYAL

SEQ ID NO: 961 - DNA, 969 bp, synthetic construct
  misc_feature 1..969: note = Variant of adenosine kinase
  source 1..969: mol_type = other DNA
atgcaccatcatcaccatcacgggggctccggcatgagtgcactgatttgcggttctttagggtatgataccatcatggtgtttccggaccagttcaagaaccatattctgcccgatcgtgttcaccgcctcaatgtcagctttcttgtaccacgcatgcgtcgtgagtttggaggctgtgccggcaacattgcgtacaatctgcatctgttgggtggtgctccgatcgtaatggctacggtgggccaagatttcggtccgtatcgcgagcacttcgaaactctgggcattgacttatcccgcgtcaagatcatcgatgatctgagtacaccgcaggccttcattaccaccgacatggatctgaaccagattacggcgtttcatggcggcgcaatgatgcgttcgtacgaaaatcacgttcgtgatgtgccgggtgttaccttgggcctcgtaggtcctgatggacgcgagggcatgatccaaaatgccgaagaatttgctgctggtggcattccgttcatttttgacccaggtcaggcactgccgctgttcaacggccccgaactgcgcgagtttatcgaacaggcggactatgtggtggtcaacgattacgaaagcaatcttcttcaaacgcgtactggctggaacgagcaggacattgtttcacgcgtgcaggcgtatatcacgacgcaaggttcggctggagccctggtacatacaccggagaagacctacgatattccgccggctcacacccgtcgtgtcgttgatccaactggttgcggcgacgcgtttcgcgccggcctgatctatggtattcagcataattatgattggttgaccattggccgcatgggaaacttaatgggtgcgctgaaagtggaacaccctggcagccaaaatcagcgtttcgattttgccgaattcaacgaccagttcaaacaatattttggctacgcgctctaatga

SEQ ID NO: 962 - protein, 321 aa, synthetic construct
  REGION 1..321: note = Variant of adenosine kinase
MHHHHHHGGSGMSALICGSLGYDTIMVFPDQFKNHILPDRVHRLNVSFLVPRMRREFGGCAGNIAYNLHLLGGAPIVMATVGQDFGPYREHFETLGIDLSRVKIIDDLSTPQAFITTDMDLNQITAFHGGAMMRSYENHVRDVPGVTLGLVGPDGREGMIQNAEEFAAGGIPFIFDPGQALPLFNGPELREFIEQADYVVVNDYESNLLQTRTGWNEQDIVSRVQAYITTQGSAGALVHTPEKTYDIPPAHTRRVVDPTGCGDAFRAGLIYGIQHNYDWLTIGRMGNLMGALKVEHPGSQNQRFDFAEFNDQFKQYFGYAL

SEQ ID NO: 963 - DNA, 969 bp, synthetic construct
  misc_feature 1..969: note = Variant of adenosine kinase
  source 1..969: mol_type = other DNA
atgcaccatcatcaccatcacgggggctccggcatgagtgcactgatttgcggttctttagcgtatgataccatcatggtgtttccggaccagttcaagaaccatattctgcccgatcgtgttcaccgcctcaatgtcagctttcttgtaccacgcatgcgtcgtgaatttggaggctgtgccggcaacattgcgtacaatctgcatctgttgggtggtgctccgatcgtaatggctacggtgggccaagatttcggtccgtatcgcgagcacttcgaaactctgggcattgacttatcccgcgtcaagatcatcgatgatctgagtacaccgcaggccttcattaccaccgacatggatcacaaccagattacggcgtttcatggcggcgcaatgatgcgttcgtacgaaaatcacgttcgtgatgtgccgggtgttaccttgggcctcgtaggtcctgatggacgcgagggcatgatccaaaatgccgaagaatttgctgctggtggcattccgttcatttttgacccaggtcaggcactgccgctgttcaacggccccgaactgcgcgagtttatcgaacaggcggactatgtggtggtcaacgattacgaaagcaatcttcttcaaacgcgtactggctggaacgagcaggacattgtttcacgcgtgcaggcgtatatcgttacgcaaggttcggctggagccctggtacatacaccggagaagacctacgatattccgccggctcacacccgtcgtgtagttgatccaactggttgcggcgacgcgtttcgcgccggcctgatctatggtattcagcataattatgattggttgaccattggccgcatgggaaacttaatgggtgcgctgaaagtggaacaccctggcacccaaaatcagcgtttcgattttgccgaattcaacgaccagttcaaacaatattttggctacgcgctctaatga

SEQ ID NO: 964 - protein, 321 aa, synthetic construct
  REGION 1..321: note = Variant of adenosine kinase
MHHHHHHGGSGMSALICGSLAYDTIMVFPDQFKNHILPDRVHRLNVSFLVPRMRREFGGCAGNIAYNLHLLGGAPIVMATVGQDFGPYREHFETLGIDLSRVKIIDDLSTPQAFITTDMDHNQITAFHGGAMMRSYENHVRDVPGVTLGLVGPDGREGMIQNAEEFAAGGIPFIFDPGQALPLFNGPELREFIEQADYVVVNDYESNLLQTRTGWNEQDIVSRVQAYIVTQGSAGALVHTPEKTYDIPPAHTRRVVDPTGCGDAFRAGLIYGIQHNYDWLTIGRMGNLMGALKVEHPGTQNQRFDFAEFNDQFKQYFGYAL

SEQ ID NO: 965 - DNA, 969 bp, synthetic construct
  misc_feature 1..969: note = Variant of adenosine kinase
  source 1..969: mol_type = other DNA
atgcaccatcatcaccatcacgggggctccggcatgagtgcactgatttgcggttctttagcgtatgataccatcatggtgtttccggaccagttcaagaaccatattctgcccgatcgtgttcaccgcctcaatgtcagctttcttgtaccacgcatgcgtcgtgggtttggaggctgtgccggcaacattgcgtacaatctgcatctgttgggtggtgctccgatcgtaatggctacggtgggccaagatttcggtccgtatcgcgagcacttcgaaactctgggcattgacttatcccgcgtcaagatcatcgatgatctgagtacaccgcaggccttcattaccaccgacatggatcataaccagattacggcgtttcatggcggcgcaatgatgcgttcgtacgaaaatcacgttcgtgatgtgccgggtgttaccttgggcctcgtaggtcctgatggacgcgagggcatgatccaaaatgccgaagaatttgctgctggtggcattccgttcatttttgacccaggtcaggcactgccgctgttcaacggccccgaactgcgcgagtttatcgaacaggcggactatgtggtggtcaacgattacgaaagcaatcttcttcaaacgcgtactggctggaacgagcaggacattgtttcacgcgtgcaggcgtatatcaccacgcaaggttcggctggagccctggtacatacaccggagaagacctacgatattccgccggctcacacccgtcgtgtcgttgatccaactggttgcggcgacgcgtttcgcgccggcctgatctatggtattcagcataattatgattggttgaccattggccgcatgggaaacttaatgggtgcgctgaaagtggaacaccctggcacccaaaatcagcgtttcgattttgccgaattcaacgaccagttcaaacaatattttggctacgcgctctaatga

SEQ ID NO: 966 - protein, 321 aa, synthetic construct
  REGION 1..321: note = Variant of adenosine kinase
MHHHHHHGGSGMSALICGSLAYDTIMVFPDQFKNHILPDRVHRLNVSFLVPRMRRGFGGCAGNIAYNLHLLGGAPIVMATVGQDFGPYREHFETLGIDLSRVKIIDDLSTPQAFITTDMDHNQITAFHGGAMMRSYENHVRDVPGVTLGLVGPDGREGMIQNAEEFAAGGIPFIFDPGQALPLFNGPELREFIEQADYVVVNDYESNLLQTRTGWNEQDIVSRVQAYITTQGSAGALVHTPEKTYDIPPAHTRRVVDPTGCGDAFRAGLIYGIQHNYDWLTIGRMGNLMGALKVEHPGTQNQRFDFAEFNDQFKQYFGYAL

SEQ ID NO: 967 - DNA, 969 bp, synthetic construct
  misc_feature 1..969: note = Variant of adenosine kinase
  source 1..969: mol_type = other DNA
atgcaccatcatcaccatcacgggggctccggcatgagtgcactgatttgcggttctttagcgtatgataccatcatggtgtttccggaccagttcaagaaccatattctgcccgatcgtgttcaccgcctcaatgtcagctttcttgtaccacgcatgcgtcgtgggtttggaggctgtgccggcaacattgcgtacaatctgcatctgttgggtggtgctccgatcgtaatggctacggtgggccaagatttcggtccgtatcgcgagcacttcgaaactctgggcattgacttatcccgcgtcaagatcatcgatgatctgagtacaccgcaggccttcattaccaccgacatggatcataaccagattacggcgtttcatggcggcgcaatgatgcgttcgtacgaaaatcacgttcgtgatgtgccgggtgttaccttgggcctcgtaggtcctgatggacgcgagggcatgatccaaaatgccgaagaatttgctgctgatggcattccgttcatttttgacccaggtcaggcactgccgctgttcaacggccccgaactgcgcgagtttatcgaacaggcggactatgtggtggtcaacgattacgaaagcaatcttcttcaaacgcgtactggctggaacgagcaggacattgtttcacgcgtgcaggcgtatatcacgacgcaaggttcggctggagccctggtacatacaccggagaagacctacgatattccgccggctcacacccgtcgtgtcgttgatccaactggttgcggcgacgcgtttcgcgccggcctgatctatggtattcagcataattatgattggttgaccattggccgcatgggaaacttaatgggtgcgctgaaagtggaacaccctggcacccaaaatcagcgtttcgattttgccgaattcaacgaccagttcaaacaatattttggctacgcgctctaatga

SEQ ID NO: 968 - protein, 321 aa, synthetic construct
  REGION 1..321: note = Variant of adenosine kinase
MHHHHHHGGSGMSALICGSLAYDTIMVFPDQFKNHILPDRVHRLNVSFLVPRMRRGFGGCAGNIAYNLHLLGGAPIVMATVGQDFGPYREHFETLGIDLSRVKIIDDLSTPQAFITTDMDHNQITAFHGGAMMRSYENHVRDVPGVTLGLVGPDGREGMIQNAEEFAADGIPFIFDPGQALPLFNGPELREFIEQADYVVVNDYESNLLQTRTGWNEQDIVSRVQAYITTQGSAGALVHTPEKTYDIPPAHTRRVVDPTGCGDAFRAGLIYGIQHNYDWLTIGRMGNLMGALKVEHPGTQNQRFDFAEFNDQFKQYFGYAL

SEQ ID NO: 969 - DNA, 969 bp, synthetic construct
  misc_feature 1..969: note = Variant of adenosine kinase
  source 1..969: mol_type = other DNA
atgcaccatcatcaccatcacgggggctccggcatgagtgcactgatttgcggttctttagcgtatgataccatcatggtgtttccggaccagttcaagaaccatattctgcccgatcgtgttcaccgcctcaatgtcagctttcttgtaccacgcatgcgtcgtgaatttggaggctgtgccggcaacattgcgtacaatctgcatctgttgggtggtgctccgatcgtaatggctacggtgggccaagatttcggtccgtatcgcgagcacttcgaaactctgggcattgacttatcccgcgtcaagatcatcgatgatctgagtacaccgcaggccttcattaccaccgacatggatcataaccagattacggcgtttcatggcggcgcaatgatgcgttcgtacgaaaatcacgttcgtgatgtgccgggtgttaccttgggcctcgtaggtcctgatggacgcgagggcatgatccaaaatgccgaagaatttgctgctggtggcattccgttcatttttgacccaggtcaggcactgccgctgttcaacggccccgaactgcgcgagtttatcgaacaggcggactatgtggtggtcaacgattacgaaagcaatcttcttcaaacgcgtactggctggaacgagcaggacattgtttcacgcgtgcaggcgtatatcaccacgcaaggttcggctggagccctggtacatacaccggagaagacctacgatattccgccggctcacacccgtcgtgtcgttgatccaactggttgcggcgacgcgtttcgcgccggcctgatctatggtattcagcataattatgattggttgaccattggccgcatgggaaacttaatgggtgcgctgaaagtggaacaccctggcacccaaaatcagcgtttcgattttgccgaattcaaccagcagttcaaacaatattttggctacgcgctctaatga

SEQ ID NO: 970 - protein, 321 aa, synthetic construct
  REGION 1..321: note = Variant of adenosine kinase
MHHHHHHGGSGMSALICGSLAYDTIMVFPDQFKNHILPDRVHRLNVSFLVPRMRREFGGCAGNIAYNLHLLGGAPIVMATVGQDFGPYREHFETLGIDLSRVKIIDDLSTPQAFITTDMDHNQITAFHGGAMMRSYENHVRDVPGVTLGLVGPDGREGMIQNAEEFAAGGIPFIFDPGQALPLFNGPELREFIEQADYVVVNDYESNLLQTRTGWNEQDIVSRVQAYITTQGSAGALVHTPEKTYDIPPAHTRRVVDPTGCGDAFRAGLIYGIQHNYDWLTIGRMGNLMGALKVEHPGTQNQRFDFAEFNQQFKQYFGYAL

SEQ ID NO: 971 - DNA, 969 bp, synthetic construct
  misc_feature 1..969: note = Variant of adenosine kinase
  source 1..969: mol_type = other DNA
atgcaccatcatcaccatcacgggggctccggcatgagtgcactgatttgcggttctttagcgtatgataccatcatggtgtttccggaccagttcaagaaccatattctgcccgatcgtgttcaccgcctcaatgtcagctttcttgtaccagatatgcgtcgtgaatttggaggctgtgccggcaacattgcgtacaatctgcatctgttgggtggtgctccgatcgtaatggctacggtgggccaagatttcggtccgtatcgcgagcacttcgaaactctgggcattgacttatcccgcgtcaagatcatcgatgatctgagtacaccgcaggccttcattaccaccgacatggatcataaccagattacggcgtttcatggcggcgcaatgatgcgttcgtacgaaaatcacgttcgtgatgtgccgggtgttaccttgggcctcgtaggtcctgatggacgcgagggcatgatccaaaatgccgaagaatttgctgctggtggcattccgttcatttttgacccaggtcaggcactgccgctgttcaacggccccgaactgcgcgagtttatcgaacaggcggactatgtggtggtcaacgattacgaaagcaatcttcttcaaacgcgtactggctggaacgagcaggacattgtttcacgcgtgcaggcgtatatcaccacgcaaggttcggctggagccctggtacatacaccggagaagacctacgatattccgccggctcacacccgtcgtgtcgttgatccaactggttgcggcgacgcgtttcgcgccggcctgatctatggtattcagcataattatgattggttgaccattggccgcatgggaaacttaatgggtgcgctgaaagtggaacaccctggcacccaaaatcagcgtttcgattttgccgaattcaacgaccagttcaaacaatattttggctacgcgctctaatga

SEQ ID NO: 972 - protein, 321 aa, synthetic construct
  REGION 1..321: note = Variant of adenosine kinase
MHHHHHHGGSGMSALICGSLAYDTIMVFPDQFKNHILPDRVHRLNVSFLVPDMRREFGGCAGNIAYNLHLLGGAPIVMATVGQDFGPYREHFETLGIDLSRVKIIDDLSTPQAFITTDMDHNQITAFHGGAMMRSYENHVRDVPGVTLGLVGPDGREGMIQNAEEFAAGGIPFIFDPGQALPLFNGPELREFIEQADYVVVNDYESNLLQTRTGWNEQDIVSRVQAYITTQGSAGALVHTPEKTYDIPPAHTRRVVDPTGCGDAFRAGLIYGIQHNYDWLTIGRMGNLMGALKVEHPGTQNQRFDFAEFNDQFKQYFGYAL

SEQ ID NO: 973 - DNA, 969 bp, synthetic construct
  misc_feature 1..969: note = Variant of adenosine kinase
  source 1..969: mol_type = other DNA
atgcaccatcatcaccatcacgggggctccggcatgagtgcactgatttgcggttctttagcgtatgataccatcatggtgtttccggaccagttcaagaaccatattctgcccgatcgtgttcaccgcctcaatgtcagctttcttgtaccacgcatgcgtcgtgaatttggaggctgtgccggcaacattgcgtacaatctgcatctgttgggtggtgctccgatcgtaatggctacggtgggccaagatttcggtccgtatcgcgagcacttcgaaactctgggcattgacttatcccgcgtcaagatcatcgatgatctgagtacaccgcaggccttcattaccaccgacatggatcataaccagattacggcgtttcatggcggcgcaatgatgcgttcgtacgaaaatcacgttcgtgatgtgccgggtgttaccttgggcctcgtaggtcctgatggacgcgagggcatgatccaaaatgccgaagaatttgctgctggtcggattccgttcatttttgacccaggtcaggcactgccgctgttcaacggccccgaactgcgcgagtttatcgaacaggcggactatgtggtggtcaacgattacgaaagcaatcttcttcaaacgcgtactggctggaacgagcaggacattgtttcacgcgtgcaggcgtatatcaccacgcaaggttcggctggagccctggtacatacaccggagaagacctacgatattccgccggctcacacccgtcgtgtcgttgatccaactggttgcggcgacgcgtttcgcgccggcctgatctatggtattcagcataattatgattggttgaccattggccgcatgggaaacttaatgggtgcgctgaaagtggaacaccctggcacccaaaatcagcgtttcgattttgccgaattcaacgaccagttcaaacaatattttggctacgcgctctaatga

SEQ ID NO: 974 - protein, 321 aa, synthetic construct
  REGION 1..321: note = Variant of adenosine kinase
MHHHHHHGGSGMSALICGSLAYDTIMVFPDQFKNHILPDRVHRLNVSFLVPRMRREFGGCAGNIAYNLHLLGGAPIVMATVGQDFGPYREHFETLGIDLSRVKIIDDLSTPQAFITTDMDHNQITAFHGGAMMRSYENHVRDVPGVTLGLVGPDGREGMIQNAEEFAAGRIPFIFDPGQALPLFNGPELREFIEQADYVVVNDYESNLLQTRTGWNEQDIVSRVQAYITTQGSAGALVHTPEKTYDIPPAHTRRVVDPTGCGDAFRAGLIYGIQHNYDWLTIGRMGNLMGALKVEHPGTQNQRFDFAEFNDQFKQYFGYAL

SEQ ID NO: 975 - DNA, 969 bp, synthetic construct
  misc_feature 1..969: note = Variant of adenosine kinase
  source 1..969: mol_type = other DNA
atgcaccatcatcaccatcacgggggctccggcatgagtgcactgatttgcggttctttagcgtatgataccatcatggtgtttccggacctgttcaagaaccatattctgcccgatcgtgttcaccgcctcaatgtcagctttcttgtaccacgcatgcgtcgtgaatttggaggctgtgccggcaacattgcgtacaatctgcatctgttgggtggtgctccgatcgtaatggctacggtgggccaagatttcggtccgtatcgcgagcacttcgaaactctgggcattgacttatcccgcgtcaagatcatcgatgatctgagtacaccgcaggcgttcattaccaccgacatggatcataaccagattacggcgtttcacggcggcgcaatgatgcgttcgtacgaaaatcacgttcgtgatgtgccgggtgttaccttgggcctcgtaggtcctgatggacgcgagggcatgatccaaaatgccgaagaatttgctgctggtggcattccgttcatttttgacccaggtcaggcagtgccgctgttcaacggccccgaactgcgcgagtttatcgaacaggcggactatgtggtggtcaacgattacgaaagcaatcttcttcaagcccgtactggctggaacgagcaggacattgtttcacgcgtgcaggcgtatatcaccacgcaaggttcggctggagccctggtacatacaccggagaagacctacgatattccgccggctcacacccgtcgtgtcgttgatccaactggttgcggcgacgcgtttcgcgccggcctgatctatggtattcagcataattatgattggttgaccattggccgcatgggaaacttaatgggtgcgctgaaagtggaacaccctggcacccaaaatcagcgtttcgattttgccgaattcaacgaccagttcaaacaatattttggctacgcgctctaatga

SEQ ID NO: 976 - protein, 321 aa, synthetic construct
  REGION 1..321: note = Variant of adenosine kinase
MHHHHHHGGSGMSALICGSLAYDTIMVFPDLFKNHILPDRVHRLNVSFLVPRMRREFGGCAGNIAYNLHLLGGAPIVMATVGQDFGPYREHFETLGIDLSRVKIIDDLSTPQAFITTDMDHNQITAFHGGAMMRSYENHVRDVPGVTLGLVGPDGREGMIQNAEEFAAGGIPFIFDPGQAVPLFNGPELREFIEQADYVVVNDYESNLLQARTGWNEQDIVSRVQAYITTQGSAGALVHTPEKTYDIPPAHTRRVVDPTGCGDAFRAGLIYGIQHNYDWLTIGRMGNLMGALKVEHPGTQNQRFDFAEFNDQFKQYFGYAL

SEQ ID NO: 977 - DNA, 969 bp, synthetic construct
  misc_feature 1..969: note = Variant of adenosine kinase
  source 1..969: mol_type = other DNA
atgcaccatcatcaccatcacgggggctccggcatgagtgcactgatttgcggttctttagcgtatgataccatcatggtgtttccggaccagttcaagaaccatattctgcccgatcgtgttcaccgcctcaatgtcagctttcttgtaccacgcatgcgtcgtgaatttggaggctgtgccggcaacattgcgtacaatctgcatctgttgggtggtgctccgatcgtaatggctacggtgggccaagatttcggtccgtatcgcgagcacttcgaaactctgggcattgacttatcccgcgtcaagatcatcgatgatctgagtacaccgcaggccttcattaccaccgacatggatcataaccagattacggcgtttcatggcggcgcaatgatgcgttcgtacgaaaatcacgttcgtgatgtgccgggtgttaccttgggcctcgtaggtcctgatggacgcgagggcatgatccaaaatgccgaagaattttgggctggtggcattccgttcatttttgacccaggtcaggcactgccgctgttcaacggccccgaactgcgcgagtttatcgaacaggcggactatgtggtggtcaacgattacgaaagcaatcttcttcaaacgcgtactggctggaacgagcaggacattgtttcacgcgtgcaggcgtatatcaccacgcaaggttcggctggagccctggtacatacaccggagaagacctacgatattccgccggctcacacccgtcgtgtcgttgatccaactggttgcggcgacgcgtttcgcgccggcctgatctatggtattcagcataattatgattggttgaccattggccgcatgggaaacttaatgggtgcgctgaaagtggaacaccctggcacccaaaatcagcgtttcgattttgccgaattcaacgaccagttcaaacaatattttggctacgcgctctaatga

SEQ ID NO: 978 - protein, 321 aa, synthetic construct
  REGION 1..321: note = Variant of adenosine kinase
MHHHHHHGGSGMSALICGSLAYDTIMVFPDQFKNHILPDRVHRLNVSFLVPRMRREFGGCAGNIAYNLHLLGGAPIVMATVGQDFGPYREHFETLGIDLSRVKIIDDLSTPQAFITTDMDHNQITAFHGGAMMRSYENHVRDVPGVTLGLVGPDGREGMIQNAEEFWAGGIPFIFDPGQALPLFNGPELREFIEQADYVVVNDYESNLLQTRTGWNEQDIVSRVQAYITTQGSAGALVHTPEKTYDIPPAHTRRVVDPTGCGDAFRAGLIYGIQHNYDWLTIGRMGNLMGALKVEHPGTQNQRFDFAEFNDQFKQYFGYAL

SEQ ID NO: 979 - DNA, 969 bp, synthetic construct
  misc_feature 1..969: note = Variant of adenosine kinase
  source 1..969: mol_type = other DNA
atgcaccatcatcaccatcacgggggctccggcatgagtgcactgatttgcggttctttagcgtatgataccatcatggtgtttccggaccagttcaagaaccatattctgcccgatcgtgttcaccgcctcaatgtcagctttcttgtaccacgcatgcgtcgtgaatttggaggctgtgccggcaacattgcgtacaatctgcatctgttgggtggtgctccgatcgtaatggctacggtgggccaagatttcggtccgtatcgcgagcacttcgaaactctgggcattgacttatcccgcgtcaagatcatcgatgatctgagtacaccgcaggccttcattaccaccgacatggatcataaccagattacggcgtttcatggcggcgcaatgatgcgttcgtacgaaaatcacgttcgtgatgtgccgggtgttaccttgggcctcgtaggtcctgatggacgcgagggcatgatccaaaatgccgaagaatttgctgctggtcatattccgttcatttttgacccaggtcaggcactgccgctgttcaacggccccgaactgcgcgagtttatcgaacaggcggactatgtggtggtcaacgattacgaaagcaatcttcttcaaacgcgtactggctggaacgagcaggacattgtttcacgcgtgcaggcgtatatcaccacgcaaggttcggctggagccctggtacatacaccggagaagacctacgatattccgccggctcacacccgtcgtgtcgttgatccaactggttgcggcgacgcgtttcgcgccggcctgatctatggtattcagcataattatgattggttgaccattggccgcatgggaaacttaatgggtgcgctgaaagtggaacaccctggcacccaaaatcagcgtttcgattttgccgaattcaacgaccagttcaaacaatattttggctacgcgctctaatga

SEQ ID NO: 980 - protein, 321 aa, synthetic construct
  REGION 1..321: note = Variant of adenosine kinase
MHHHHHHGGSGMSALICGSLAYDTIMVFPDQFKNHILPDRVHRLNVSFLVPRMRREFGGCAGNIAYNLHLLGGAPIVMATVGQDFGPYREHFETLGIDLSRVKIIDDLSTPQAFITTDMDHNQITAFHGGAMMRSYENHVRDVPGVTLGLVGPDGREGMIQNAEEFAAGHIPFIFDPGQALPLFNGPELREFIEQADYVVVNDYESNLLQTRTGWNEQDIVSRVQAYITTQGSAGALVHTPEKTYDIPPAHTRRVVDPTGCGDAFRAGLIYGIQHNYDWLTIGRMGNLMGALKVEHPGTQNQRFDFAEFNDQFKQYFGYAL

SEQ ID NO: 981 - DNA, 969 bp, synthetic construct
  misc_feature 1..969: note = Variant of adenosine kinase
  source 1..969: mol_type = other DNA
atgcaccatcatcaccatcacgggggctccggcatgagtgcactgatttgcggttctttagcgtatgataccatcatggtgtttccggaccagttcaagaaccatattctgcccgatcgtgttcaccgcctcaatgtcagctttcttgtaccacgcatgcgtcgtgaatttggaggctgtgccggcaacattgcgtacaatctgcatctgttgggtggtgctccgatcgtaatggctacggtgggccaagatttcggtccgtatcgcgagcacttcgaaactctgggcattgacttatcccgcgtcaagatcatcgatgatctgagtacaccgcaggccttcattaccaccgacatggatcataaccagattacggcgtttcatggcggcgcaatgatgcgttcgtacgaaaatcacgttcgtgatgtgccgggtgttaccttgggcctcgtaggtcctgatggacgcgagggcatgatccaaaatgccgaagaatttgctgctggtggcattccgttcatttttgacccaggtcaggcactgccgctgttcaacggccccgaactgcgcgagtttatcgaacaggcggactatgtggtggtcaacgattacgaaagcaatcttcttcaaacgcgtactggctggaacgagcaggacattgtttcacgcgtgcaggcgtatatcaccacgcaaggttcggctggagccctggtacatacaccggagaagacctacgatattccgccggctcacacccgtcgtgtcgttgatccaactggttgcggcgacgcgtttcgcgccggcctgatctatggtattcagcataattatgattggttgaccattggccgcatgggaaacttaatgggtgcgctgaaagtggaacaccctggcacgcaaaatcagatgttcgattttgccgaattcaacgaccagttcaaacaatattttggctacgcgctctaatga

SEQ ID NO: 982 - protein, 321 aa, synthetic construct
  REGION 1..321: note = Variant of adenosine kinase
MHHHHHHGGSGMSALICGSLAYDTIMVFPDQFKNHILPDRVHRLNVSFLVPRMRREFGGCAGNIAYNLHLLGGAPIVMATVGQDFGPYREHFETLGIDLSRVKIIDDLSTPQAFITTDMDHNQITAFHGGAMMRSYENHVRDVPGVTLGLVGPDGREGMIQNAEEFAAGGIPFIFDPGQALPLFNGPELREFIEQADYVVVNDYESNLLQTRTGWNEQDIVSRVQAYITTQGSAGALVHTPEKTYDIPPAHTRRVVDPTGCGDAFRAGLIYGIQHNYDWLTIGRMGNLMGALKVEHPGTQNQMFDFAEFNDQFKQYFGYAL

SEQ ID NO: 983 - DNA, 969 bp, synthetic construct
  misc_feature 1..969: note = Variant of adenosine kinase
  source 1..969: mol_type = other DNA
atgcaccatcatcaccatcacgggggctccggcatgagtgcactgatttgcggttctttagcgtatgataccatcatggtgtttccggaccagttcaagaaccatattctgcccgatcgtgttcaccgcctcaatgtcagctttcttgtaccacgcatgcgtcgtgaatttggaggctgtgccggcaacattgcgtacaatctgcatctgttgggtggtgctccgatcgtaatggctacggtgggccaagatttcggtccgtatcgcgagcacttcgaaactctgggcattgacttatcccgcgtcaagatcatcgatgatctgagtacaccgcaggccttcattaccaccgacatggatcataaccagattacggcgtttcatggcggcgcaatgatgcgttcgtacgaaaatcacgttcgtgatgtgccgggtgttaccttgggcctcgtaggtcctgatggacgcgagggcatgatccaaaatgccgaagaatttgctgctggtggcattccgttcatttttgacccaggtcaggcactgccgctgttcaacggccccgaactgcgcgagtttatcgaacaggcggactatgtggtggtcaacgattacgaaagcaatcttcttcaaacgcgtactggctggaacgagcaggacattgttggtcgcgtgcaggcgtatatcaccacgcaaggttcggctggagccctggtacatacaccggagaagacctacgatattccgccggctcacacccgtcgtgtcgttgatccaactggttgcggcgacgcgtttcgcgccggcctgatctatggtattcagcataattatgattggttgaccattggccgcatgggaaacttaatgggtgcgctgaaagtggaacaccctggcacccaaaatcagcgtttcgattttgccgaattcaacgaccagttcaaacaatattttggctacgcgctctaatga

SEQ ID NO: 984 - protein, 321 aa, synthetic construct
  REGION 1..321: note = Variant of adenosine kinase
MHHHHHHGGSGMSALICGSLAYDTIMVFPDQFKNHILPDRVHRLNVSFLVPRMRREFGGCAGNIAYNLHLLGGAPIVMATVGQDFGPYREHFETLGIDLSRVKIIDDLSTPQAFITTDMDHNQITAFHGGAMMRSYENHVRDVPGVTLGLVGPDGREGMIQNAEEFAAGGIPFIFDPGQALPLFNGPELREFIEQADYVVVNDYESNLLQTRTGWNEQDIVGRVQAYITTQGSAGALVHTPEKTYDIPPAHTRRVVDPTGCGDAFRAGLIYGIQHNYDWLTIGRMGNLMGALKVEHPGTQNQRFDFAEFNDQFKQYFGYAL

SEQ ID NO: 985 - DNA, 969 bp, synthetic construct
  misc_feature 1..969: note = Variant of adenosine kinase
  source 1..969: mol_type = other DNA
atgcaccatcatcaccatcacgggggctccggcatgagtgcactgatttgcggttctttagcgtatgataccatcatggtgtttccggaccagttcaagaaccatattctgcccgatcgtgttcacgtgctcaatgtcagctttcttgtaccacgcatgcgtcgtgaatttggaggctgtgccggcaacattgcgtacaatctgcatctgttgggtggtgctccgatcgtaatggctacggtgggccaagatttcggtccgtatcgcgagcacttcgaaactctgggcattgacttatcccgcgtcaagatcatcgatgatctgagtacaccgcaggccttcattaccaccgacatggatcataaccagattacggcgtttcatggcggcgcaatgatgcgttcgtacgaaaatcacgttcgtgatgtgccgggtgttaccttgggcctcgtaggtcctgatggacgcgagggcatgatccaaaatgccgaagaatttgctgctggtggcattccgttcatttttgacccaggtcaggcactgccgctgttcaacggccccgaactgcgcgagtttatcgaacaggcggactatgtggtggtcaacgattacgaaagcaatcttcttcaaacgcgtactggctggaacgagcaggacattgtttcacgcgtgcaggcgtatatcaccacgcaaggttcggctggagccctggtacatacaccggagaagacctacgatattccgccggctcacacccgtcgtgtcgttgatccaactggttgcggcgacgcgtttcgcgccggcctgatctatggtattcagcataattatgattggttgaccattggccgcatgggaaacttaatgggtgcgctgaaagtggaacaccctggcacccaaaatcagcgtttcgattttgccgaattcaacgaccagttcaaacaatattttggctacgcgctctaatga

SEQ ID NO: 986 - protein, 321 aa, synthetic construct
  REGION 1..321: note = Variant of adenosine kinase
MHHHHHHGGSGMSALICGSLAYDTIMVFPDQFKNHILPDRVHVLNVSFLVPRMRREFGGCAGNIAYNLHLLGGAPIVMATVGQDFGPYREHFETLGIDLSRVKIIDDLSTPQAFITTDMDHNQITAFHGGAMMRSYENHVRDVPGVTLGLVGPDGREGMIQNAEEFAAGGIPFIFDPGQALPLFNGPELREFIEQADYVVVNDYESNLLQTRTGWNEQDIVSRVQAYITTQGSAGALVHTPEKTYDIPPAHTRRVVDPTGCGDAFRAGLIYGIQHNYDWLTIGRMGNLMGALKVEHPGTQNQRFDFAEFNDQFKQYFGYAL

SEQ ID NO: 987 - DNA, 969 bp, synthetic construct
  misc_feature 1..969: note = Variant of adenosine kinase
  source 1..969: mol_type = other DNA
atgcaccatcatcaccatcacgggggctccggcatgagtgcactgatttgcggttctttagcgtatgataccatcatggtgtttccggaccagttcaagaaccatattctgcccgatcgtgttcaccgcctcaatgtcagctttcttgtaccacgcatgcgtcgtgaatttggaggctgtgccggcaacattgcgtacaatctgcatctgttgggtggtgctccgatcgtaatggctacggtgggcgtggatttcggtccgtatcgcgagcacttcgaaactctgggcattgacttatcccgcgtcaagatcatcgatgatctgagtacaccgcaggccttcattaccaccgacatggatcataaccagattacggcgtttcatggcggcgcaatgatgcgttcgtacgaaaatcacgttcgtgatgtgccgggtgttaccttgggcctcgtaggtcctgatggacgcgagggcatgatccaaaatgccgaagaatttgctgctggtggcattccgttcatttttgacccaggtcaggcactgccgctgttcaacggccccgaactgcgcgagtttatcgaacaggcggactatgtggtggtcaacgattacgaaagcaatcttcttcaaacgcgtactggctggaacgagcaggacattgtttcacgcgtgcaggcgtatatcaccacgcaaggttcggctggagccctggtacatacaccggagaagacctacgatattccgccggctcacacccgtcgtgtcgttgatccaactggttgcggcgacgcgtttcgcgccggcctgatctatggtattcagcataattatgattggttgaccattggccgcatgggaaacttaatgggtgcgctgaaagtggaacaccctggcacccaaaatcagcgtttcgattttgccgaattcaacgaccagttcaaacaatattttggctacgcgctctaatga

SEQ ID NO: 988 - protein, 321 aa, synthetic construct
  REGION 1..321: note = Variant of adenosine kinase
MHHHHHHGGSGMSALICGSLAYDTIMVFPDQFKNHILPDRVHRLNVSFLVPRMRREFGGCAGNIAYNLHLLGGAPIVMATVGVDFGPYREHFETLGIDLSRVKIIDDLSTPQAFITTDMDHNQITAFHGGAMMRSYENHVRDVPGVTLGLVGPDGREGMIQNAEEFAAGGIPFIFDPGQALPLFNGPELREFIEQADYVVVNDYESNLLQTRTGWNEQDIVSRVQAYITTQGSAGALVHTPEKTYDIPPAHTRRVVDPTGCGDAFRAGLIYGIQHNYDWLTIGRMGNLMGALKVEHPGTQNQRFDFAEFNDQFKQYFGYAL

SEQ ID NO: 989 - DNA, 969 bp, synthetic construct
  misc_feature 1..969: note = Variant of adenosine kinase
  source 1..969: mol_type = other DNA
atgcaccatcatcaccatcacgggggctccggcatgagtgcactgatttgcggttctttagcgtatgataccatcatggtgtttccggaccagttcaagaaccatattctgcccgatcgtgttcaccgcctcaatgtcagctttcttgtaccacgcatgcgtcgtgaatttggaggctgtgccggcaacattgcgtacaatctgcatctgttgggtggtgctccgatcgtaatggctacggtgggccaagatttcggtccgtatcgcgagcacttcgaaactctgggcattgacttatcccgcgtcaagatcatcgatgatctgagtacaccgcagtcgttcattaccaccgacatggatcataaccagattacggcgtttcacggcggcgcaatgatgcgttcgtacgaaaatcacgttcgtgatgtgccgggtgttaccttgggcctcgtaggtcctgatggacgcgagggcatgatccaaaatgccgaagaatttgctgctggtggcattccgttcatttttgacccaggtcaggcagtgccgctgttcaacggccccgaactgcgcgagtttatcgaacaggcggactatgtggtggtcaacgattacgaaagcaatcttcttcaagcccgtactggctggaacgagcaggacattgtttcacgcgtgcaggcgtatatcaccacgcaaggttcggctggagccctggtacatacaccggagaagacctacgatattccgccggctcacacccgtcgtgtcgttgatccaactggttgcggcgacgcgtttcgcgccggcctgatctatggtattcagcataattatgattggttgaccattggccgcatgggaaacttaatgggtgcgctgaaagtggaacaccctggcacccaaaatcagcgtttcgattttgccgaattcaacgaccagttcaaacaatattttggctacgcgctctaatga

SEQ ID NO: 990 - protein, 321 aa, synthetic construct
  REGION 1..321: note = Variant of adenosine kinase
MHHHHHHGGSGMSALICGSLAYDTIMVFPDQFKNHILPDRVHRLNVSFLVPRMRREFGGCAGNIAYNLHLLGGAPIVMATVGQDFGPYREHFETLGIDLSRVKIIDDLSTPQSFITTDMDHNQITAFHGGAMMRSYENHVRDVPGVTLGLVGPDGREGMIQNAEEFAAGGIPFIFDPGQAVPLFNGPELREFIEQADYVVVNDYESNLLQARTGWNEQDIVSRVQAYITTQGSAGALVHTPEKTYDIPPAHTRRVVDPTGCGDAFRAGLIYGIQHNYDWLTIGRMGNLMGALKVEHPGTQNQRFDFAEFNDQFKQYFGYAL

SEQ ID NO: 991 - DNA, 969 bp, synthetic construct
  misc_feature 1..969: note = Variant of adenosine kinase
  source 1..969: mol_type = other DNA
atgcaccatcatcaccatcacgggggctctggcatgagtgcactgatttgcggttctttagcgtatgataccatcatggtgtttccggaccagttcaagaaccatattctgcccgatcgtgttcaccgcctcaatgtcagctttcttgtaccacgcatgcgtcgtgaatttggaggctgtgccggcaacattgcgtacaatctgcatctgttgggtggtgctccgatcgtaatggctacggtgggccaagatttcggtccgtatcgcgagcacttcgaaactctgggcattgacttatcccgcgtcaagatcatcgatgatctgagtacaccgcaggccttcattaccaccgacatggatcataaccagattacggcgtttcacggcggcgcaatgatgcgttcgtacgaaaatcacgttcgtgatgtgccgggtgttaccttgggcctcgtaggtcctgatggacgcgagggcatgatccaaaatgccgaagaatttgctgctggtggcattccgttcatttttgacccaggtcaggcactgccgctgttcaacggccccgaactgcgcgagtttatcgaacaggcggactatgtggtggtcaacgattacgaaagcaatcttcttcaaacgcgtactggctggaacgagcaggacattgtttcacgcgtgcaggcgtatatcaccacgcaaggttcggctggagccctggtacatacaccggagaagacctacgatattccgccggctaaaacccgtcgtgtcgttgatccaactggttgcggcgacgcgtttcgcgccggcctgatctatggtattcagcataattatgattggttgaccattggccgcatgggaaacttaatgggtgcgctgaaagtggaacaccctggcacccaaaatcagcgtttcgattttgccgaattcaacgaccagttcaaacaatattttggctacgcgctctaatga

SEQ ID NO: 992 - protein, 321 aa, synthetic construct
  REGION 1..321: note = Variant of adenosine kinase
MHHHHHHGGSGMSALICGSLAYDTIMVFPDQFKNHILPDRVHRLNVSFLVPRMRREFGGCAGNIAYNLHLLGGAPIVMATVGQDFGPYREHFETLGIDLSRVKIIDDLSTPQAFITTDMDHNQITAFHGGAMMRSYENHVRDVPGVTLGLVGPDGREGMIQNAEEFAAGGIPFIFDPGQALPLFNGPELREFIEQADYVVVNDYESNLLQTRTGWNEQDIVSRVQAYITTQGSAGALVHTPEKTYDIPPAKTRRVVDPTGCGDAFRAGLIYGIQHNYDWLTIGRMGNLMGALKVEHPGTQNQRFDFAEFNDQFKQYFGYAL

SEQ ID NO: 993 - DNA, 969 bp, synthetic construct
  misc_feature 1..969: note = Variant of adenosine kinase
  source 1..969: mol_type = other DNA
atgcaccatcatcaccatcacgggggctccggcatgagtgcactgatttgcggttctttagcgtatgataccatcatggtgtttccggaccagttcaagaaccatattctgcccgatcgtgttcaccgcctcaatgtcagctttcttgtaccacgcatgcgtcgtgaatttggaggctgtgccggcaacattgcgtacaatctgcatctgttgggtggtgctccgatcgtaatggctacggtgggccaagatttcggtccgtatcgcgagcacttcgaaactctgggcattgacttatcccgcgtcaagatcatcgatgatctgagtacaccgcaggccttcattaccaccgacatggatcataaccagattacggcgtttcatggcggcgcaatgatgcgttcgtacgaaaatcacgttcgtgatgtgccgggtgttaccttgggcctcgtaggtcctgatggacgcgagggcatgatccaaaatgccgaagaatttgctgctggtggcattccgttcatttttgacccaggtcaggcactgccgctgttcaacggcgttgaactgcgcgagtttatcgaacaggcggactatgtggtggtcaacgattacgaaagcaatcttcttcaaacgcgtactggctggaacgagcaggacattgtttcacgcgtgcaggcgtatatcaccacgcaaggttcggctggagccctggtacatacaccggagaagacctacgatattccgccggctcacacccgtcgtgtcgttgatccaactggttgcggcgacgcgtttcgcgccggcctgatctatggtattcagcataattatgattggttgaccattggccgcatgggaaacttaatgggtgcgctgaaagtggaacaccctggcacccaaaatcagcgtttcgattttgccgaattcaacgaccagttcaaacaatattttggctacgcgctctaatga

SEQ ID NO: 994 - protein, 321 aa, synthetic construct
  REGION 1..321: note = Variant of adenosine kinase
MHHHHHHGGSGMSALICGSLAYDTIMVFPDQFKNHILPDRVHRLNVSFLVPRMRREFGGCAGNIAYNLHLLGGAPIVMATVGQDFGPYREHFETLGIDLSRVKIIDDLSTPQAFITTDMDHNQITAFHGGAMMRSYENHVRDVPGVTLGLVGPDGREGMIQNAEEFAAGGIPFIFDPGQALPLFNGVELREFIEQADYVVVNDYESNLLQTRTGWNEQDIVSRVQAYITTQGSAGALVHTPEKTYDIPPAHTRRVVDPTGCGDAFRAGLIYGIQHNYDWLTIGRMGNLMGALKVEHPGTQNQRFDFAEFNDQFKQYFGYAL

SEQ ID NO: 995 - DNA, 969 bp, synthetic construct
  misc_feature 1..969: note = Variant of adenosine kinase
  source 1..969: mol_type = other DNA
atgcaccatcatcaccatcacgggggatccggcatgagtgcactgatttgcggttctttagcgtatgataccatcatggtgtttccggaccagttcaagaaccatattctgcccgatcgtgttcaccgcctcaatgtcagctttcttgtaccacgcatgcgtcgtgaatttggaggctgtgccggcaacattgcgtacaatctgcatctgttgggtggtgctccgatcgtaatggctacggtgggccaagatttcggtccgtatcgcgagcacttcgaaactctgggcattgacttatcccgcgtcaagatcatcgatgatctgagtacaccgcaggccttcattaccaccgacatggatcataaccagattacggcgtttcatggcggcgcaatgatgcgttcgtacgaaaatcacgttcgtgatgtgccgggtgttaccttgggcctcgtaggtcctgatggacgcgagggcatgatccaaaatgccgaagaatttgctgctggtggcattccgttcatttttgacccaggtcaggcactgccgctgttcaacggccccgaactgcgcgagtttatcgaacaggcggactatgtggtggtcaacgattacgaaagcaatcttcttcaaacgcgtactggctggaacgaggtggacattgtttcacgcgtgcaggcgtatatcaccacgcaaggttcggctggagccctggtacatacaccggagaagacctacgatattccgccggctcacacccgtcgtgtcgttgatccaactggttgcggcgacgcgtttcgcgccggcctgatctatggtattcagcataattatgattggttgaccattggccgcatgggaaacttaatgggtgcgctgaaagtggaacaccctggcacccaaaatcagcgtttcgattttgccgaattcaacgaccagttcaaacaatattttggctacgcgctctaatga

SEQ ID NO: 996 - protein, 321 aa, synthetic construct
  REGION 1..321: note = Variant of adenosine kinase
MHHHHHHGGSGMSALICGSLAYDTIMVFPDQFKNHILPDRVHRLNVSFLVPRMRREFGGCAGNIAYNLHLLGGAPIVMATVGQDFGPYREHFETLGIDLSRVKIIDDLSTPQAFITTDMDHNQITAFHGGAMMRSYENHVRDVPGVTLGLVGPDGREGMIQNAEEFAAGGIPFIFDPGQALPLFNGPELREFIEQADYVVVNDYESNLLQTRTGWNEVDIVSRVQAYITTQGSAGALVHTPEKTYDIPPAHTRRVVDPTGCGDAFRAGLIYGIQHNYDWLTIGRMGNLMGALKVEHPGTQNQRFDFAEFNDQFKQYFGYAL

SEQ ID NO: 997 - DNA, 969 bp, synthetic construct
  misc_feature 1..969: note = Variant of adenosine kinase
  source 1..969: mol_type = other DNA
atgcaccatcatcaccatcacgggggctccggcatgagtgcactgatttgcggttctttagcgtatgataccatcatggtgtttccggaccagttcaagaaccatattctgcccgatcgtgttcaccgcctcaatgtcagctttcttgtaccacgcatgcgtcgtgaatttggaggctgtgccggcaacattgcgtacaatctgcatctgttgggtggtgctccgatcgtaatggctacggtgggccaagatttcggtccgtatcgcgagcacttcgaaactctgggcattgacttatcccgcgtcaagatcatcgatgatctgagtacaccgcaggccttcattaccaccgacatggatcataaccagattacggcgtttcacggcggcgcaatgatgcgttcgtacgaaaatcacgttcgtgatgtgccgggtgttaccttgggcctcgtaggtcctgatggacgcgagggcatgatccaaaatgccgaagaatttgctgctggtggcattccgttcatttttgacccaggtcaggcagtgccgctgttcaacggccccgaactgcgcgagtttatcgaacaggcggactatgtggtggtcaacgattacgaaagcaatcttcttcaaacccgtactggctggaacgagcaggacattgtttcacgcgtgcaggcgtatatcaccacgcaaggttcggctggagccctggtacatacaccggagaagacctacgatattccgccggctaaaacccgtcgtgtcgttgatccaactggttgcggcgacgcgtttcgcgccggcctgatctatggtattcagcataattatgattggttgaccattggccgcatgggaaacttaatgggtgcgctgaaagtggaacaccctggcacccaaaatcagcgtttcgattttgccgaattcaacgaccagttcaaacaatattttggctacgcgctctaatga

SEQ ID NO: 998 - protein, 321 aa, synthetic construct
  REGION 1..321: note = Variant of adenosine kinase
MHHHHHHGGSGMSALICGSLAYDTIMVFPDQFKNHILPDRVHRLNVSFLVPRMRREFGGCAGNIAYNLHLLGGAPIVMATVGQDFGPYREHFETLGIDLSRVKIIDDLSTPQAFITTDMDHNQITAFHGGAMMRSYENHVRDVPGVTLGLVGPDGREGMIQNAEEFAAGGIPFIFDPGQAVPLFNGPELREFIEQADYVVVNDYESNLLQTRTGWNEQDIVSRVQAYITTQGSAGALVHTPEKTYDIPPAKTRRVVDPTGCGDAFRAGLIYGIQHNYDWLTIGRMGNLMGALKVEHPGTQNQRFDFAEFNDQFKQYFGYAL

SEQ ID NO: 999 - DNA, 969 bp, synthetic construct
  misc_feature 1..969: note = Variant of adenosine kinase
  source 1..969: mol_type = other DNA
atgcaccatcatcaccatcacgggggctccggcatgagtgcactgatttgcggttctttagcgtatgataccatcatggtgtttccggaccagttcaagaaccatattctgcccgatcgtgttcaccgcctcaatgtcagctttcttgtaccacgcatgcgtcgtgaatttggaggctgtgccggcaacattgcgtacaatctgcatctgttgggtggtgctccgatcgtaatggctacggtgggccaagatttcggtccgtatcgcgagcacttcgaaactctgggcattgacttatcccgcgtcaagatcatcgatgatctgagtacaccgcaggccttcattaccaccgacatggatcataaccagattacggcgtttcatggcggcgcaatgatgcgttcgtacgaaaatcacgttcgtgatgtgccgggtgttaccttgggcctcgtaggtcctgatggacgcgagggcatgatccaaaatgccgaagaatttgctgctggtggcattccgttcatttttgacccaggtcaggcactgccgctgttcaacggccccgaactgcgcgagtttatcgaaacggcggactatgtggtggtcaacgattacgaaagcaatcttcttcaaacgcgtactggctggaacgagcaggacattgtttcacgcgtgcaggcgtatatcaccacgcaaggttcggctggagccctggtacatacaccggagaagacctacgatattccgccggctcacacccgtcgtgtcgttgatccaactggttgcggcgacgcgtttcgcgccggcctgatctatggtattcagcataattatgattggttgaccattggccgcatgggaaacttaatgggtgcgctgaaagtggaacaccctggcacccaaaatcagcgtttcgattttgccgaattcaacgaccagttcaaacaatattttggctacgcgctctaatga

SEQ ID NO: 1000 - protein, 321 aa, synthetic construct
  REGION 1..321: note = Variant of adenosine kinase
MHHHHHHGGSGMSALICGSLAYDTIMVFPDQFKNHILPDRVHRLNVSFLVPRMRREFGGCAGNIAYNLHLLGGAPIVMATVGQDFGPYREHFETLGIDLSRVKIIDDLSTPQAFITTDMDHNQITAFHGGAMMRSYENHVRDVPGVTLGLVGPDGREGMIQNAEEFAAGGIPFIFDPGQALPLFNGPELREFIETADYVVVNDYESNLLQTRTGWNEQDIVSRVQAYITTQGSAGALVHTPEKTYDIPPAHTRRVVDPTGCGDAFRAGLIYGIQHNYDWLTIGRMGNLMGALKVEHPGTQNQRFDFAEFNDQFKQYFGYAL

SEQ ID NO: 1001 - DNA, 969 bp, synthetic construct
  misc_feature 1..969: note = Variant of adenosine kinase
  source 1..969: mol_type = other DNA
atgcaccatcatcaccatcacgggggctccggcatgagtgcactgatttgcggttctttagcgtatgataccatcatggtgtttccggaccagttcaagaaccatattctgcccgatcgtgttcaccgcctcaatgtcagctttcttgtaccacgcatgcgtcgtgagtttggaggctgtgccggcaacattgcgtacaatctgcatctgttgggtggtgctccgatcgtaatggctacggtgggccaagatttcggtccgtatcgcgagcacttcgaaactctgggcattgacttatcccgcgtcaagatcatcgatgatctgagtacaccgcaggccttcattaccaccgacatggatctgaaccagattacggcgtttcatggcggcgcaatgatgcgttcgtacgaaaatcacgttcgtgatgtgccgggtgttaccttgggcctcgtaggtcctgatggacgcgagggcatgatccaaaatgccgaagaatttgctgctggtggcattccgttcatttttgacccaggtcaggcactgccgctgttcaacggccccgaactgcgcgagtttatcgaacaggcggactatgtggtggtcaacgattacgaaagcaatcttcttcaaacgcgtactggctggaacgagcaggacattgtttcacgcgtgcaggcgtatatcgttacgcaaggttcggctggagccctggtacatacaccggagaagacctacgatattccgccggctcacacccgtcgtgtcgttgatccaactggttgcggcgacgcgtttcgcgccggcctgatctatggtattcagcataattatgattggttgaccattggccgcatgggaaacttaatgggtgcgctgaaagtggaacaccctggcacccaaaatcagcgtttcgattttgccgaattcaacgaccagttcaaacaatattttggctacgcgctctaatga

SEQ ID NO: 1002 - protein, 321 aa, synthetic construct
  REGION 1..321: note = Variant of adenosine kinase
MHHHHHHGGSGMSALICGSLAYDTIMVFPDQFKNHILPDRVHRLNVSFLVPRMRREFGGCAGNIAYNLHLLGGAPIVMATVGQDFGPYREHFETLGIDLSRVKIIDDLSTPQAFITTDMDLNQITAFHGGAMMRSYENHVRDVPGVTLGLVGPDGREGMIQNAEEFAAGGIPFIFDPGQALPLFNGPELREFIEQADYVVVNDYESNLLQTRTGWNEQDIVSRVQAYIVTQGSAGALVHTPEKTYDIPPAHTRRVVDPTGCGDAFRAGLIYGIQHNYDWLTIGRMGNLMGALKVEHPGTQNQRFDFAEFNDQFKQYFGYAL

SEQ ID NO: 1003 - DNA, 969 bp, synthetic construct
  misc_feature 1..969: note = Variant of adenosine kinase
  source 1..969: mol_type = other DNA
atgcaccatcatcaccatcacgggggctccggcatgagtgcactgatttgcggttctttagcgtatgataccatcatggtgtttccggaccagttcaagaaccatattctgcccgatcgtgttcaccgcctcaatgtcagctttcttgtaccacgcatgcgtcgtgaatttggaggctgtgccggcaacattgcgtacaatctgcatctgttgggtggtgctccgatcgtaatggctacggtgggccaagatttcggtccgtatcgcgagcacttcgaaactctgggcattgacttatcccgcgtcaagatcatcgatcatctgagtacaccgcaggccttcattaccaccgacatggatcataaccagattacggcgtttcatggcggcgcaatgatgcgttcgtacgaaaatcacgttcgtgatgtgccgggtgttaccttgggcctcgtaggtcctgatggacgcgagggcatgatccaaaatgccgaagaatttgctgctggtggcattccgttcatttttgacccaggtcaggcactgccgctgttcaacggccccgaactgcgcgagtttatcgaacaggcggactatgtggtggtcaacgattacgaaagcaatcttcttcaaacgcgtactggctggaacgagcaggacattgtttcacgcgtgcaggcgtatatcaccacgcaaggttcggctggagccctggtacatacaccggagaagacctacgatattccgccggctcacacccgtcgtgtcgttgatccaactggttgcggcgacgcgtttcgcgccggcctgatctatggtattcagcataattatgattggttgaccattggccgcatgggaaacttaatgggtgcgctgaaagtggaacaccctggcacccaaaatcagcgtttcgattttgccgaattcaacgaccagttcaaacaatattttggctacgcgctctaatga

SEQ ID NO: 1004 - protein, 321 aa, synthetic construct
  REGION 1..321: note = Variant of adenosine kinase
MHHHHHHGGSGMSALICGSLAYDTIMVFPDQFKNHILPDRVHRLNVSFLVPRMRREFGGCAGNIAYNLHLLGGAPIVMATVGQDFGPYREHFETLGIDLSRVKIIDHLSTPQAFITTDMDHNQITAFHGGAMMRSYENHVRDVPGVTLGLVGPDGREGMIQNAEEFAAGGIPFIFDPGQALPLFNGPELREFIEQADYVVVNDYESNLLQTRTGWNEQDIVSRVQAYITTQGSAGALVHTPEKTYDIPPAHTRRVVDPTGCGDAFRAGLIYGIQHNYDWLTIGRMGNLMGALKVEHPGTQNQRFDFAEFNDQFKQYFGYAL

SEQ ID NO: 1005 - DNA, 969 bp, synthetic construct
  misc_feature 1..969: note = Variant of adenosine kinase
  source 1..969: mol_type = other DNA
atgcaccatcatcaccatcacgggggctccggcatgagtgcactgatttgcggttctttagcgtatgataccatcatggtgtttccggaccagttcaagaaccatattctgcccgatcgtgttcaccgcctcaatgtcagctttcttgtaccacgcatgcgtcgtgaatttggaggctgtgccggcaacattgcgtacaatctgcatctgttgggtggtgctccgatcgtaatggctacggtgggccaagatttcggtccgtatcgcgagcacttcgaaactctgggcattgacttatcccgcgtcaagatcatcgatgatctgagtacaccgcaggccttcattaccaccgacatggatcataaccagattacggcgtttcatggcggcgcaatgatgcgttcgtacgaaaatcacgttagtgatgtgccgggtgttaccttgggcctcgtaggtcctgatggacgcgagggcatgatccaaaatgccgaagaatttgctgctggtggcattccgttcatttttgacccaggtcaggcactgccgctgttcaacggccccgaactgcgcgagtttatcgaacaggcggactatgtggtggtcaacgattacgaaagcaatcttcttcaaacgcgtactggctggaacgagcaggacattgtttcacgcgtgcaggcgtatatcaccacgcaaggttcggctggagccctggtacatacaccggagaagacctacgatattccgccggctcacacccgtcgtgtcgttgatccaactggttgcggcgacgcgtttcgcgccggcctgatctatggtattcagcataattatgattggttgaccattggccgcatgggaaacttaatgggtgcgctgaaagtggaacaccctggcacccaaaatcagcgtttcgattttgccgaattcaacgaccagttcaaacaatattttggctacgcgctctaatga

SEQ ID NO: 1006 - protein, 321 aa, synthetic construct
  REGION 1..321: note = Variant of adenosine kinase
MHHHHHHGGSGMSALICGSLAYDTIMVFPDQFKNHILPDRVHRLNVSFLVPRMRREFGGCAGNIAYNLHLLGGAPIVMATVGQDFGPYREHFETLGIDLSRVKIIDDLSTPQAFITTDMDHNQITAFHGGAMMRSYENHVSDVPGVTLGLVGPDGREGMIQNAEEFAAGGIPFIFDPGQALPLFNGPELREFIEQADYVVVNDYESNLLQTRTGWNEQDIVSRVQAYITTQGSAGALVHTPEKTYDIPPAHTRRVVDPTGCGDAFRAGLIYGIQHNYDWLTIGRMGNLMGALKVEHPGTQNQRFDFAEFNDQFKQYFGYAL

SEQ ID NO: 1007 - DNA, 969 bp, synthetic construct
  misc_feature 1..969: note = Variant of adenosine kinase
  source 1..969: mol_type = other DNA
atgcaccatcatcaccatcacgggggctccggcatgagtgcactgatttgcggttctttagcgtatgataccatcatggtgtttccggacctgttcaagaaccatattctgcccgatcgtgttcaccgcctcaatgtcagctttcttgtaccacgcatgcgtcgtgaatttggaggctgtgccggcaacattgcgtacaatctgcatctgttgggtggtgctccgatcgtaatggctacggtgggccaagatttcggtccgtatcgcgagcacttcgaaactctgggcattgacttatcccgcgtcaagatcatcgatgatctgagtacaccgcaggccttcattaccaccgacatggatcataaccagattacggcgtttcatggcggcgcaatgatgcgttcgtacgaaaatcacgttcgtgatgtgccgggtgttaccttgggcctcgtaggtcctgatggacgcgagggcatgatccaaaatgccgaagaatttgctgctggtggcattccgttcatttttgacccaggtcaggcagtgccgctgttcaacggccccgaactgcgcgagtttatcgaacaggcggactatgtggtggtcaacgattacgaaagcaatcttcttcaaacgcgtactggctggaacgagcaggacattgtttcacgcgtgcaggcgtatatcaccacgcaaggttcggctggagccctggtacatacaccggagaagacctacgatattccgccggctcacacccgtcgtgtcgttgatccaactggttgcggcgacgcgtttcgcgccggcctgatctatggtattcagcataattatgattggttgaccattggccgcatgggaaacttaatgggtgcgctgaaagtggaacaccctggcacccaaaatcagcgtttcgattttgccgaattcaacgaccagttcaaacaatattttggctacgcgctctaatga

SEQ ID NO: 1008 - protein, 321 aa, synthetic construct
  REGION 1..321: note = Variant of adenosine kinase
MHHHHHHGGSGMSALICGSLAYDTIMVFPDLFKNHILPDRVHRLNVSFLVPRMRREFGGCAGNIAYNLHLLGGAPIVMATVGQDFGPYREHFETLGIDLSRVKIIDDLSTPQAFITTDMDHNQITAFHGGAMMRSYENHVRDVPGVTLGLVGPDGREGMIQNAEEFAAGGIPFIFDPGQAVPLFNGPELREFIEQADYVVVNDYESNLLQTRTGWNEQDIVSRVQAYITTQGSAGALVHTPEKTYDIPPAHTRRVVDPTGCGDAFRAGLIYGIQHNYDWLTIGRMGNLMGALKVEHPGTQNQRFDFAEFNDQFKQYFGYAL

SEQ ID NO: 1009 - DNA, 969 bp, synthetic construct
  misc_feature 1..969: note = Variant of adenosine kinase
  source 1..969: mol_type = other DNA
atgcaccatcatcaccatcacgggggctccggcatgagtgcactgatttgcggttctttagcgtatgataccatcatggtgtttccggaccagttcaagaaccatattctgcccgatcgtgttcaccgcctcaatgtcagctttcttgtaccacgcatgcgtcgtgaatttggaggctgtgccggcaacattgcgtacaatctgcatctgttgggtggtgctccgatcgtaatggctacggtgggccaagatttcggtccgtatcgcgagcacttcgaaactctgggcattgacttatcccgcgtcaagatcatcgatgatctgagtacaccgcaggccttcattaccaccgacatggatcataaccagattacggcgtttcatggcggcgcaatgatgcgttcgtacgaaaatcacgttcgtgatgtgccgggtgttaccttgggcctcgtaggtcctgatggacgcgagggcatgatccaaaatgccgaagaatttgctgctggtggcattccgttcatttttgacccaggtcaggcactgccgctgttcaacggccccgaactgcgcgagtttatcgaacaggcggactatgtggtggtcaacgattacgaaagcaatcttcttcaaacgcgtactggctggaacgagcaggacattgtttcacgcgtgcaggcgtatatcaccacgcaaggttcggctggagccctggtacatacaccggagaagacctacgatattccgccggctcacacccgtcgtgtcgttgatccaactggttgcggcgacgcgtttcgcgccggcctgatctatggtattcagcataattatgattggttgaccattggccgcatgggaaacttaatgggtgcgctgaaagtggaacaccctggcacgcaaaatcagcgtttcgatttttttgaattcaacgaccagttcaaacaatattttggctacgcgctctaatga

SEQ ID NO: 1010 - protein, 321 aa, synthetic construct
  REGION 1..321: note = Variant of adenosine kinase
MHHHHHHGGSGMSALICGSLAYDTIMVFPDQFKNHILPDRVHRLNVSFLVPRMRREFGGCAGNIAYNLHLLGGAPIVMATVGQDFGPYREHFETLGIDLSRVKIIDDLSTPQAFITTDMDHNQITAFHGGAMMRSYENHVRDVPGVTLGLVGPDGREGMIQNAEEFAAGGIPFIFDPGQALPLFNGPELREFIEQADYVVVNDYESNLLQTRTGWNEQDIVSRVQAYITTQGSAGALVHTPEKTYDIPPAHTRRVVDPTGCGDAFRAGLIYGIQHNYDWLTIGRMGNLMGALKVEHPGTQNQRFDFFEFNDQFKQYFGYAL

SEQ ID NO: 1011 - DNA, 969 bp, synthetic construct
  misc_feature 1..969: note = Variant of adenosine kinase
  source 1..969: mol_type = other DNA
atgcaccatcatcaccatcacgggggctccggcatgagtgcactgatttgcggttctttagcgtatgataccatcatggtgtttccggaccagttcaagaaccatattctgcccgatcgtgttcaccgcctcaatgtcagctttcttgtaccacgcatgcgtcgtgaatttggaggctgtgccggcaacattgcgtacaatctgcatctgttgggtggtgctccgatcgtaatggctacggtgggccaagatttcggtccgtatcgcgagcacttcgaaactctgggcattgacttaggtcgcgtcaagatcatcgatgatctgagtacaccgcaggccttcattaccaccgacatggatcataaccagattacggcgtttcatggcggcgcaatgatgcgttcgtacgaaaatcacgttcgtgatgtgccgggtgttaccttgggcctcgtaggtcctgatggacgcgagggcatgatccaaaatgccgaagaatttgctgctggtggcattccgttcatttttgacccaggtcaggcactgccgctgttcaacggccccgaactgcgcgagtttatcgaacaggcggactatgtggtggtcaacgattacgaaagcaatcttcttcaaacgcgtactggctggaacgagcaggacattgtttcacgcgtgcaggcgtatatcaccacgcaaggttcggctggagccctggtacatacaccggagaagacctacgatattccgccggctcacacccgtcgtgtcgttgatccaactggttgcggcgacgcgtttcgcgccggcctgatctatggtattcagcataattatgattggttgaccattggccgcatgggaaacttaatgggtgcgctgaaagtggaacaccctggcacccaaaatcagcgtttcgattttgccgaattcaacgaccagttcaaacaatattttggctacgcgctctaatga

SEQ ID NO: 1012 - protein, 321 aa, synthetic construct
  REGION 1..321: note = Variant of adenosine kinase
MHHHHHHGGSGMSALICGSLAYDTIMVFPDQFKNHILPDRVHRLNVSFLVPRMRREFGGCAGNIAYNLHLLGGAPIVMATVGQDFGPYREHFETLGIDLGRVKIIDDLSTPQAFITTDMDHNQITAFHGGAMMRSYENHVRDVPGVTLGLVGPDGREGMIQNAEEFAAGGIPFIFDPGQALPLFNGPELREFIEQADYVVVNDYESNLLQTRTGWNEQDIVSRVQAYITTQGSAGALVHTPEKTYDIPPAHTRRVVDPTGCGDAFRAGLIYGIQHNYDWLTIGRMGNLMGALKVEHPGTQNQRFDFAEFNDQFKQYFGYAL

SEQ ID NO: 1013 - DNA, 969 bp, synthetic construct
  misc_feature 1..969: note = Variant of adenosine kinase
  source 1..969: mol_type = other DNA
atgcaccatcatcaccatcacgggggctccggcatgagtgcactgatttgcggttctttagcgtatgataccatcatggtgtttccggaccagttcaagaaccatattctgcccgatcgtgttcaccgcctcaatgtcagctttcttgtaccacgcatgcgtcgtgaatttggaggctgtgccggcaacattgcgtacaatctgcatctgttgggtggtgctccgatcgtaatggctacggtgggccaagatttcggtccgtatcgcgagcacttcgaaactctgggcattgacttatcccgcgtcaagatcatcgatgatctgagtacaccgcaggccttcattaccaccgacatggatcataaccagattacggcgtttcatggcggcgcaatgatgcgttcgtacgaaaatcacgttcgtgatgtgccgggtgttaccttgggcctcgtaggtcctgatggacgcgagggcatgatccaaaatgccgaagaatttgctgctttgggcattccgttcatttttgacccaggtcaggcactgccgctgttcaacggccccgaactgcgcgagtttatcgaacaggcggactatgtggtggtcaacgattacgaaagcaatcttcttcaaacgcgtactggctggaacgagcaggacattgtttcacgcgtgcaggcgtatatcaccacgcaaggttcggctggagccctggtacatacaccggagaagacctacgatattccgccggctcacacccgtcgtgtcgttgatccaactggttgcggcgacgcgtttcgcgccggcctgatctatggtattcagcataattatgattggttgaccattggccgcatgggaaacttaatgggtgcgctgaaagtggaacaccctggcacccaaaatcagcgtttcgattttgccgaattcaacgaccagttcaaacaatattttggctacgcgctctaatga

SEQ ID NO: 1014 - protein, 321 aa, synthetic construct
  REGION 1..321: note = Variant of adenosine kinase
MHHHHHHGGSGMSALICGSLAYDTIMVFPDQFKNHILPDRVHRLNVSFLVPRMRREFGGCAGNIAYNLHLLGGAPIVMATVGQDFGPYREHFETLGIDLSRVKIIDDLSTPQAFITTDMDHNQITAFHGGAMMRSYENHVRDVPGVTLGLVGPDGREGMIQNAEEFAALGIPFIFDPGQALPLFNGPELREFIEQADYVVVNDYESNLLQTRTGWNEQDIVSRVQAYITTQGSAGALVHTPEKTYDIPPAHTRRVVDPTGCGDAFRAGLIYGIQHNYDWLTIGRMGNLMGALKVEHPGTQNQRFDFAEFNDQFKQYFGYAL

SEQ ID NO: 1015 - DNA, 969 bp, synthetic construct
  misc_feature 1..969: note = Variant of adenosine kinase
  source 1..969: mol_type = other DNA
atgcaccatcatcaccatcacgggggctccggcatgagtgcactgatttgcggttctttagcgtatgataccatcatggtgtttccggaccagttcaagaaccatattctgcccgatcgtgttcaccgcctcaatgtcagctttcttgtaccacgcatgcgtcgtgaatttggaggctgtgccggcaacattgcgtacaatctgcatctgttgggtggtgctccgatcgtaatggctacggtgggccaagatttcggtccgtatcgcgagcacttcgaaactctgggcattgacttatcccgcgtcaagatcatcgatgatctgagtacaccgcaggccttcattaccaccgacatggatcataaccagattacggcgtttcatggcggcgcaatgatgcgttcgtacgaaaatcacgttcgtgatgtgccgggtgttaccttgggcctcgtaggtcctgatggacgcgagggcatgatccaaaatgccgaagaatttgctgctatgggcattccgttcatttttgacccaggtcaggcactgccgctgttcaacggccccgaactgcgcgagtttatcgaacaggcggactatgtggtggtcaacgattacgaaagcaatcttcttcaaacgcgtactggctggaacgagcaggacattgtttcacgcgtgcaggcgtatatcaccacgcaaggttcggctggagccctggtacatacaccggagaagacctacgatattccgccggctcacacccgtcgtgtcgttgatccaactggttgcggcgacgcgtttcgcgccggcctgatctatggtattcagcataattatgattggttgaccattggccgcatgggaaacttaatgggtgcgctgaaagtggaacaccctggcacccaaaatcagcgtttcgattttgccgaattcaacgaccagttcaaacaatattttggctacgcgctctaatga

SEQ ID NO: 1016 - protein, 321 aa, synthetic construct
  REGION 1..321: note = Variant of adenosine kinase
MHHHHHHGGSGMSALICGSLAYDTIMVFPDQFKNHILPDRVHRLNVSFLVPRMRREFGGCAGNIAYNLHLLGGAPIVMATVGQDFGPYREHFETLGIDLSRVKIIDDLSTPQAFITTDMDHNQITAFHGGAMMRSYENHVRDVPGVTLGLVGPDGREGMIQNAEEFAAMGIPFIFDPGQALPLFNGPELREFIEQADYVVVNDYESNLLQTRTGWNEQDIVSRVQAYITTQGSAGALVHTPEKTYDIPPAHTRRVVDPTGCGDAFRAGLIYGIQHNYDWLTIGRMGNLMGALKVEHPGTQNQRFDFAEFNDQFKQYFGYAL

SEQ ID NO: 1017 - DNA, 969 bp, synthetic construct
  misc_feature 1..969: note = Variant of adenosine kinase
  source 1..969: mol_type = other DNA
atgcaccatcatcaccatcacgggggctccggcatgagtgcactgatttgcggttctttagcgtatgataccatcatggtgtttccggaccagttcaagaaccatattctgcccgatcgtgttcaccgcctcaatgtcagctttcttgtaccaggtatgcgtcgtgaatttggaggctgtgccggcaacattgcgtacaatctgcatctgttgggtggtgctccgatcgtaatggctacggtgggccaagatttcggtccgtatcgcgagcacttcgaaactctgggcattgacttatcccgcgtcaagatcatcgatgatctgagtacaccgcaggccttcattaccaccgacatggatcataaccagattacggcgtttcatggcggcgcaatgatgcgttcgtacgaaaatcacgttcgtgatgtgccgggtgttaccttgggcctcgtaggtcctgatggacgcgagggcatgatccaaaatgccgaagaatttgctgctggtggcattccgttcatttttgacccaggtcaggcactgccgctgttcaacggccccgaactgcgcgagtttatcgaacaggcggactatgtggtggtcaacgattacgaaagcaatcttcttcaaacgcgtactggctggaacgagcaggacattgtttcacgcgtgcaggcgtatatcaccacgcaaggttcggctggagccctggtacatacaccggagaagacctacgatattccgccggctcacacccgtcgtgtcgttgatccaactggttgcggcgacgcgtttcgcgccggcctgatctatggtattcagcataattatgattggttgaccattggccgcatgggaaacttaatgggtgcgctgaaagtggaacaccctggcacccaaaatcagcgtttcgattttgccgaattcaacgaccagttcaaacaatattttggctacgcgctctaatga

SEQ ID NO: 1018 - protein, 321 aa, synthetic construct
  REGION 1..321: note = Variant of adenosine kinase
MHHHHHHGGSGMSALICGSLAYDTIMVFPDQFKNHILPDRVHRLNVSFLVPGMRREFGGCAGNIAYNLHLLGGAPIVMATVGQDFGPYREHFETLGIDLSRVKIIDDLSTPQAFITTDMDHNQITAFHGGAMMRSYENHVRDVPGVTLGLVGPDGREGMIQNAEEFAAGGIPFIFDPGQALPLFNGPELREFIEQADYVVVNDYESNLLQTRTGWNEQDIVSRVQAYITTQGSAGALVHTPEKTYDIPPAHTRRVVDPTGCGDAFRAGLIYGIQHNYDWLTIGRMGNLMGALKVEHPGTQNQRFDFAEFNDQFKQYFGYAL

SEQ ID NO: 1019 - DNA, 969 bp, synthetic construct
  misc_feature 1..969: note = Variant of adenosine kinase
  source 1..969: mol_type = other DNA
atgcaccatcatcaccatcacgggggctccggcatgagtgcactgatttgcggttctttagcgtatgataccatcatggtgtttccggaccagttcaagaaccatattctgcccgatcgtgttcaccgcctcaatgtcagctttcttgtaccacgcatgcgtcgtgaatttggaggctgtgccggcaacattgcgtacaatctgcatctgttgggtggtgctccgatcgtaatggctacggtgggccaagatttcttgccgtatcgcgagcacttcgaaactctgggcattgacttatcccgcgtcaagatcatcgatgatctgagtacaccgcaggccttcattaccaccgacatggatcataaccagattacggcgtttcatggcggcgcaatgatgcgttcgtacgaaaatcacgttcgtgatgtgccgggtgttaccttgggcctcgtaggtcctgatggacgcgagggcatgatccaaaatgccgaagaatttgctgctggtggcattccgttcatttttgacccaggtcaggcactgccgctgttcaacggccccgaactgcgcgagtttatcgaacaggcggactatgtggtggtcaacgattacgaaagcaatcttcttcaaacgcgtactggctggaacgagcaggacattgtttcacgcgtgcaggcgtatatcaccacgcaaggttcggctggagccctggtacatacaccggagaagacctacgatattccgccggctcacacccgtcgtgtcgttgatccaactggttgcggcgacgcgtttcgcgccggcctgatctatggtattcagcataattatgattggttgaccattggccgcatgggaaacttaatgggtgcgctgaaagtggaacaccctggcacccaaaatcagcgtttcgattttgccgaattcaacgaccagttcaaacaatattttggctacgcgctctaatga

SEQ ID NO: 1020 - protein, 321 aa, synthetic construct
  REGION 1..321: note = Variant of adenosine kinase
MHHHHHHGGSGMSALICGSLAYDTIMVFPDQFKNHILPDRVHRLNVSFLVPRMRREFGGCAGNIAYNLHLLGGAPIVMATVGQDFLPYREHFETLGIDLSRVKIIDDLSTPQAFITTDMDHNQITAFHGGAMMRSYENHVRDVPGVTLGLVGPDGREGMIQNAEEFAAGGIPFIFDPGQALPLFNGPELREFIEQADYVVVNDYESNLLQTRTGWNEQDIVSRVQAYITTQGSAGALVHTPEKTYDIPPAHTRRVVDPTGCGDAFRAGLIYGIQHNYDWLTIGRMGNLMGALKVEHPGTQNQRFDFAEFNDQFKQYFGYAL

SEQ ID NO: 1021 - DNA, 969 bp, synthetic construct
  misc_feature 1..969: note = Variant of adenosine kinase
  source 1..969: mol_type = other DNA
atgcaccatcatcaccatcacgggggctccggcatgagtgcactgatttgcggttctttagcgtatgataccatcatggtgtttccggaccagttcaagaaccatattctgcccgatcgtgttcaccgcctcaatgtcagctttcttgtaccacgcatgcgtcgtgaatttggaggctgtgccggcaacattgcgtacaatctgcatctgttgggtggtgctccgatcgtaatggctacggtgggccaagatttcggtccgtatcgccttcacttcgaaactctgggcattgacttatcccgcgtcaagatcatcgatgatctgagtacaccgcaggccttcattaccaccgacatggatcataaccagattacggcgtttcatggcggcgcaatgatgcgttcgtacgaaaatcacgttcgtgatgtgccgggtgttaccttgggcctcgtaggtcctgatggacgcgagggcatgatccaaaatgccgaagaatttgctgctggtggcattccgttcatttttgacccaggtcaggcactgccgctgttcaacggccccgaactgcgcgagtttatcgaacaggcggactatgtggtggtcaacgattacgaaagcaatcttcttcaaacgcgtactggctggaacgagcaggacattgtttcacgcgtgcaggcgtatatcaccacgcaaggttcggctggagccctggtacatacaccggagaagacctacgatattccgccggctcacacccgtcgtgtcgttgatccaactggttgcggcgacgcgtttcgcgccggcctgatctatggtattcagcataattatgattggttgaccattggccgcatgggaaacttaatgggtgcgctgaaagtggaacaccctggcacccaaaatcagcgtttcgattttgccgaattcaacgaccagttcaaacaatattttggctacgcgctctaatga

SEQ ID NO: 1022 - protein, 321 aa, synthetic construct
  REGION 1..321: note = Variant of adenosine kinase
MHHHHHHGGSGMSALICGSLAYDTIMVFPDQFKNHILPDRVHRLNVSFLVPRMRREFGGCAGNIAYNLHLLGGAPIVMATVGQDFGPYRLHFETLGIDLSRVKIIDDLSTPQAFITTDMDHNQITAFHGGAMMRSYENHVRDVPGVTLGLVGPDGREGMIQNAEEFAAGGIPFIFDPGQALPLFNGPELREFIEQADYVVVNDYESNLLQTRTGWNEQDIVSRVQAYITTQGSAGALVHTPEKTYDIPPAHTRRVVDPTGCGDAFRAGLIYGIQHNYDWLTIGRMGNLMGALKVEHPGTQNQRFDFAEFNDQFKQYFGYAL

SEQ ID NO: 1023 - DNA, 969 bp, synthetic construct
  misc_feature 1..969: note = Variant of adenosine kinase
  source 1..969: mol_type = other DNA
atgcaccatcatcaccatcacgggggctccggcatgagtgcactgatttgcggttctttagcgtatgataccatcatggtgtttccggaccagttcaagaaccatattctgcccgatcgtgttcaccgcctcaatgtcagctttcttgtaccacgcatgcgtcgtgaatttggaggctgtgccggcaacattgcgtacaatctgcatctgttgggtggtgctccgatcgtaatggctacggtgggccaagatttcggtccgtatcgcgagcacttcgaaactctgggcattgacttatcccgcgtcaagatcatcgatgatctgagtacaccgcaggccttcattaccaccgacatggatcataaccagattacggcgtttcatggcggcgcaatgatgcgttcgtacgaaaatcacgttcgtgatgtgccgggtgttaccttgggcctcgtaggtcctgatggacgcgagggcatgatccaaaatgccgaagaatttgctgctggtggcattccgttcatttttgacccaggtcaggcactgccgctgttcaacggccccgaactgcgcgagtttatcgaacaggcggactatgtggtggtcaacgattacgaaagcaatcttcttcaaacgcgtactggctggaacgagcaggacattgtttcacgcgtgcaggcgtatatcaccacgcaaggttcggctggagccctggtacatacaccggagaagacctacgatattccgccggctcacacccgtcgtgtcgttgatccaactggttgcggcgacgcgtttcgcgccggcctgatctatggtattcagcataattatgattggttgaccattggccgcatgggaaacttaatgggtgcgctgaaagtggaacaccctggcacccaaaatcagcgtttcgattttgccgaattcaacggtcagttcaaacaatattttggctacgcgctctaatga

SEQ ID NO: 1024 - protein, 321 aa, synthetic construct
  REGION 1..321: note = Variant of adenosine kinase
MHHHHHHGGSGMSALICGSLAYDTIMVFPDQFKNHILPDRVHRLNVSFLVPRMRREFGGCAGNIAYNLHLLGGAPIVMATVGQDFGPYREHFETLGIDLSRVKIIDDLSTPQAFITTDMDHNQITAFHGGAMMRSYENHVRDVPGVTLGLVGPDGREGMIQNAEEFAAGGIPFIFDPGQALPLFNGPELREFIEQADYVVVNDYESNLLQTRTGWNEQDIVSRVQAYITTQGSAGALVHTPEKTYDIPPAHTRRVVDPTGCGDAFRAGLIYGIQHNYDWLTIGRMGNLMGALKVEHPGTQNQRFDFAEFNGQFKQYFGYAL

SEQ ID NO: 1025 - DNA, 969 bp, synthetic construct
  misc_feature 1..969: note = Variant of adenosine kinase
  source 1..969: mol_type = other DNA
atgcaccatcatcaccatcacgggggctccggcatgagtgcactgatttgcggttctttagcgtatgataccatcatggtgtttccggaccagttcaagaaccatattctgcccgatcgtgttcaccgcctcaatgtcagctttcttgtaccacgcatgcgtcgtgaatttggaggctgtgccggcaacattgcgtacaatctgcatctgttgggtggtgctccgatcgtaatggctacggtgggccaagatttcggtccgtatcgcgagcacttcgaaactctgggcattgacttatcccgcgtcaagatcatcgatgatctgagtacaccgcaggccttcattaccaccgacatggatcataaccagattacggcgtttcatggcggcgcaatgatgcgttcgtacgaaaatcacgttcgtgatgtgccgggtgttaccttgggcctcgtaggtcctgatggacgcgagggcatgatccaaaatgcctgggaatttgctgctggtggcattccgttcatttttgacccaggtcaggcactgccgctgttcaacggccccgaactgcgcgagtttatcgaacaggcggactatgtggtggtcaacgattacgaaagcaatcttcttcaaacgcgtactggctggaacgagcaggacattgtttcacgcgtgcaggcgtatatcaccacgcaaggttcggctggagccctggtacatacaccggagaagacctacgatattccgccggctcacacccgtcgtgtcgttgatccaactggttgcggcgacgcgtttcgcgccggcctgatctatggtattcagcataattatgattggttgaccattggccgcatgggaaacttaatgggtgcgctgaaagtggaacaccctggcacccaaaatcagcgtttcgattttgccgaattcaacgaccagttcaaacaatattttggctacgcgctctaatga

SEQ ID NO: 1026 - protein, 321 aa, synthetic construct
  REGION 1..321: note = Variant of adenosine kinase
MHHHHHHGGSGMSALICGSLAYDTIMVFPDQFKNHILPDRVHRLNVSFLVPRMRREFGGCAGNIAYNLHLLGGAPIVMATVGQDFGPYREHFETLGIDLSRVKIIDDLSTPQAFITTDMDHNQITAFHGGAMMRSYENHVRDVPGVTLGLVGPDGREGMIQNAWEFAAGGIPFIFDPGQALPLFNGPELREFIEQADYVVVNDYESNLLQTRTGWNEQDIVSRVQAYITTQGSAGALVHTPEKTYDIPPAHTRRVVDPTGCGDAFRAGLIYGIQHNYDWLTIGRMGNLMGALKVEHPGTQNQRFDFAEFNDQFKQYFGYAL

SEQ ID NO: 1027 - DNA, 969 bp, synthetic construct
  misc_feature 1..969: note = Variant of adenosine kinase
  source 1..969: mol_type = other DNA
atgcaccatcatcaccatcacgggggctccggcatgagtgcactgatttgcggttctttagcgtatgataccatcatggtgtttccggaccagttcaagaaccatattctgcccgatcgtgttcaccgcctcaatgtcagctttcttgtaccacgcatgcgtcgtgaatttggaggctgtgccggcaacattgcgtacaatctgcatctgttgggtggtgctccgatcgtaatggctacggtgggccaagatttcggtccgtatcgcgagcacttcgaaactctgggcattgacttatcccgcgtcaagatcatcgatgatctgagtacaccgcaggccttcattaccaccgacatggatcataaccagattacggcgtttcatggcggcgcaatgatgcgttcgtacgaaaatcacgttcgtgatgtgccgggtgttaccttgggcctcgtaggtcctgatggacgcgagggcatgatccaaaatgccgaagaatttgctgctggtggcattccgttcatttttgacccaggtcaggcactgccgctgttcaacggccccgaactgcgcgagtttatcgaacaggcggactatgtggtggtcaacgattacgaaagcaatcttcttcaaacgcgtactggctggaacgagcaggacattgtttcacgcgtgcaggcgtatatcaccacgcaaggttcggctggagccctggtacatacaccggagaagacctacgatattccgccggctcacacccgtcgtgtcgttgatccaactggttgcggcgacgcgtttcgcgccggcctgatctatggtattcagcataattatgattggttgaccattggccgcatgggaaacttaatgggtgcgctgaaagtggaacaccctggcacccaaaatcagcgtttcgattttgccgaattctgtgaccagttcaaacaatattttggctacgcgctctaatga

SEQ ID NO: 1028 - protein, 321 aa, synthetic construct
  REGION 1..321: note = Variant of adenosine kinase
MHHHHHHGGSGMSALICGSLAYDTIMVFPDQFKNHILPDRVHRLNVSFLVPRMRREFGGCAGNIAYNLHLLGGAPIVMATVGQDFGPYREHFETLGIDLSRVKIIDDLSTPQAFITTDMDHNQITAFHGGAMMRSYENHVRDVPGVTLGLVGPDGREGMIQNAEEFAAGGIPFIFDPGQALPLFNGPELREFIEQADYVVVNDYESNLLQTRTGWNEQDIVSRVQAYITTQGSAGALVHTPEKTYDIPPAHTRRVVDPTGCGDAFRAGLIYGIQHNYDWLTIGRMGNLMGALKVEHPGTQNQRFDFAEFCDQFKQYFGYAL

SEQ ID NO: 1029 - DNA, 969 bp, synthetic construct
  misc_feature 1..969: note = Variant of adenosine kinase
  source 1..969: mol_type = other DNA
atgcaccatcatcaccatcacgggggctccggcatgagtgcactgatttgcggttctttagcgtatgataccatcatggtgtttccggaccagttcaagaaccatattctgcccgatcgtgttcaccgcctcaatgtcagctttcttgtaccacgcatgcgtcgtgaatttggaggctgtgccggcaacattgcgtacaatctgcatctgttgggtggtgctccgatcgtaatggctacggtgggccaagatttcggtccgtatcgcgagcacttcgaaactctgggcattgacttatcccgcgtcaagatcatcgatgatctgagtacaccgcaggccttcattaccaccgacatggatcataaccagattacggcgtttcatggcggcgcaatgatgcgttcgtacgaaaatcacgttcgtgatgtgccgggtgttaccttgggcctcgtaggtcctgatggacgcgagggcatgatccaaaatgccgaagaattttttgctggtggcattccgttcatttttgacccaggtcaggcactgccgctgttcaacggccccgaactgcgcgagtttatcgaacaggcggactatgtggtggtcaacgattacgaaagcaatcttcttcaaacgcgtactggctggaacgagcaggacattgtttcacgcgtgcaggcgtatatcaccacgcaaggttcggctggagccctggtacatacaccggagaagacctacgatattccgccggctcacacccgtcgtgtcgttgatccaactggttgcggcgacgcgtttcgcgccggcctgatctatggtattcagcataattatgattggttgaccattggccgcatgggaaacttaatgggtgcgctgaaagtggaacaccctggcacccaaaatcagcgtttcgattttgccgaattcaacgaccagttcaaacaatattttggctacgcgctctaatga

SEQ ID NO: 1030 - protein, 321 aa, synthetic construct
  REGION 1..321: note = Variant of adenosine kinase
MHHHHHHGGSGMSALICGSLAYDTIMVFPDQFKNHILPDRVHRLNVSFLVPRMRREFGGCAGNIAYNLHLLGGAPIVMATVGQDFGPYREHFETLGIDLSRVKIIDDLSTPQAFITTDMDHNQITAFHGGAMMRSYENHVRDVPGVTLGLVGPDGREGMIQNAEEFFAGGIPFIFDPGQALPLFNGPELREFIEQADYVVVNDYESNLLQTRTGWNEQDIVSRVQAYITTQGSAGALVHTPEKTYDIPPAHTRRVVDPTGCGDAFRAGLIYGIQHNYDWLTIGRMGNLMGALKVEHPGTQNQRFDFAEFNDQFKQYFGYAL

SEQ ID NO: 1031 - DNA, 969 bp, synthetic construct
  misc_feature 1..969: note = Variant of adenosine kinase
  source 1..969: mol_type = other DNA
atgcaccatcatcaccatcacgggggctccggcatgagtgcactgatttgcggttctttagcgtatgataccatcatggtgtttccggaccagttcaagaaccatattctgcccgatcgtgttcaccgcctcaatgtcagctttcttgtaccacgcatgcgtcgtgaatttggaggctgtgccggcaacattgcgtacaatctgcatctgttgggtggtgctccgatcgtaatggctacggtgggccaagatttcggtccgtatcgcgagcacttcgaaactctgggcattgacttatcccgcgtcaagatcatcgatgatctgagtacaccgcaggccttcattaccaccgacatggatcataaccagattacggcgtttcatggcggcgcaatgatgcgttcgtacgaaaatcacgttcgtgatgtgccgggtgttaccttgggcctcgtaggtcctgatggacgcgagggcatgatccaaaatgccgaagaatttgctgctggtggcattccgttcatttttgacccaggtcaggcactgccgctgttcaacggccccgaactgcgcgagtttatcgaacaggcggactatgtggtggtcaacgattacgaaagcaatcttcttcaaacgcgtactggctggaacgagcaggacattgtttcacgcgtgcaggcgtatatcaccacgcaaggttcggctggagccctggtacatacaccggagaagacctacgatattccgccggctcacacccgtcgtgtcgttgatccaactggttgcggcgacgcgtttcgcgccggcctgatctatggtattcagcatgagtatgattggttgaccattggccgcatgggaaacttaatgggtgcgctgaaagtggaacaccctggcacccaaaatcagcgtttcgattttgccgaattcaacgaccagttcaaacaatattttggctacgcgctctaatga

SEQ ID NO: 1032 - protein, 321 aa, synthetic construct
  REGION 1..321: note = Variant of adenosine kinase
MHHHHHHGGSGMSALICGSLAYDTIMVFPDQFKNHILPDRVHRLNVSFLVPRMRREFGGCAGNIAYNLHLLGGAPIVMATVGQDFGPYREHFETLGIDLSRVKIIDDLSTPQAFITTDMDHNQITAFHGGAMMRSYENHVRDVPGVTLGLVGPDGREGMIQNAEEFAAGGIPFIFDPGQALPLFNGPELREFIEQADYVVVNDYESNLLQTRTGWNEQDIVSRVQAYITTQGSAGALVHTPEKTYDIPPAHTRRVVDPTGCGDAFRAGLIYGIQHEYDWLTIGRMGNLMGALKVEHPGTQNQRFDFAEFNDQFKQYFGYAL

SEQ ID NO: 1033 - DNA, 969 bp, synthetic construct
  misc_feature 1..969: note = Variant of adenosine kinase
  source 1..969: mol_type = other DNA
atgcaccatcatcaccatcacgggggctccggcatgagtgcactgatttgcggttctttagcgtatgataccatcatggtgtttccggaccagttcaagaacgttattctgcccgatcgtgttcaccgcctcaatgtcagctttcttgtaccacgcatgcgtcgtgaatttggaggctgtgccggcaacattgcgtacaatctgcatctgttgggtggtgctccgatcgtaatggctacggtgggccaagatttcggtccgtatcgcgagcacttcgaaactctgggcattgacttatcccgcgtcaagatcatcgatgatctgagtacaccgcaggccttcattaccaccgacatggatcataaccagattacggcgtttcatggcggcgcaatgatgcgttcgtacgaaaatcacgttcgtgatgtgccgggtgttaccttgggcctcgtaggtcctgatggacgcgagggcatgatccaaaatgccgaagaatttgctgctggtggcattccgttcatttttgacccaggtcaggcactgccgctgttcaacggccccgaactgcgcgagtttatcgaacaggcggactatgtggtggtcaacgattacgaaagcaatcttcttcaaacgcgtactggctggaacgagcaggacattgtttcacgcgtgcaggcgtatatcaccacgcaaggttcggctggagccctggtacatacaccggagaagacctacgatattccgccggctcacacccgtcgtgtcgttgatccaactggttgcggcgacgcgtttcgcgccggcctgatctatggtattcagcataattatgattggttgaccattggccgcatgggaaacttaatgggtgcgctgaaagtggaacaccctggcacccaaaatcagcgtttcgattttgccgaattcaacgaccagttcaaacaatattttggctacgcgctctaatga

SEQ ID NO: 1034 - protein, 321 aa, synthetic construct
  REGION 1..321: note = Variant of adenosine kinase
MHHHHHHGGSGMSALICGSLAYDTIMVFPDQFKNVILPDRVHRLNVSFLVPRMRREFGGCAGNIAYNLHLLGGAPIVMATVGQDFGPYREHFETLGIDLSRVKIIDDLSTPQAFITTDMDHNQITAFHGGAMMRSYENHVRDVPGVTLGLVGPDGREGMIQNAEEFAAGGIPFIFDPGQALPLFNGPELREFIEQADYVVVNDYESNLLQTRTGWNEQDIVSRVQAYITTQGSAGALVHTPEKTYDIPPAHTRRVVDPTGCGDAFRAGLIYGIQHNYDWLTIGRMGNLMGALKVEHPGTQNQRFDFAEFNDQFKQYFGYAL

SEQ ID NO: 1035 - DNA, 969 bp, synthetic construct
  misc_feature 1..969: note = Variant of adenosine kinase
  source 1..969: mol_type = other DNA
atgcaccatcatcaccatcacgggggctccggcatgagtgcactgatttgcggttctttagcgtatgataccatcatggtgtttccggaccagttcaagaaccatattctgcccgatcgtgttcaccgcctcaatgtcagctttcttgtaccacgcatgcgtcgtgggtttggaggctgtgccggcaacattgcgtacaatctgcatctgttgggtggtgctccgatcgtaatggctacggtgggccaagatttcggtccgtatcgcgagcacttcgaaactctgggcattgacttatcccgcgtcaagatcatcgatgatctgagtacaccgcaggccttcattaccaccgacatggatcataaccagattacggcgtttcatggcggcgcaatgatgcattcgtacgaaaatcacgttcgtgatgtgccgggtgttaccttgggcctcgtaggtcctgatggacgcgagggcatgatccaaaatgccgaagaatttgctgctggtggcattccgttcatttttgacccaggtcaggcactgccgctgttcaacggccccgaactgcgcgagtttatcgaacaggcggactatgtggtggtcaacgattacgaaagcaatcttcttcaaacgcgtactggctggaacgagcaggacattgtttcacgcgtgcaggcgtatatcacgacgcaaggttcggctggagccctggtacatacaccggagaagacctacgatattccgccggctcacacccgtcgtgtcgttgatccaactggttgcggcgacgcgtttcgcgccggcctgatctatggtattcagcataattatgattggttgaccattggccgcatgggaaacttaatgggtgcgctgaaagtggaacaccctggcacccaaaatcagcgtttcgattttgccgaattcaacgaccagttcaaacaatattttggctacgcgctctaatga

SEQ ID NO: 1036 - protein, 321 aa, synthetic construct
  REGION 1..321: note = Variant of adenosine kinase
MHHHHHHGGSGMSALICGSLAYDTIMVFPDQFKNHILPDRVHRLNVSFLVPRMRRGFGGCAGNIAYNLHLLGGAPIVMATVGQDFGPYREHFETLGIDLSRVKIIDDLSTPQAFITTDMDHNQITAFHGGAMMHSYENHVRDVPGVTLGLVGPDGREGMIQNAEEFAAGGIPFIFDPGQALPLFNGPELREFIEQADYVVVNDYESNLLQTRTGWNEQDIVSRVQAYITTQGSAGALVHTPEKTYDIPPAHTRRVVDPTGCGDAFRAGLIYGIQHNYDWLTIGRMGNLMGALKVEHPGTQNQRFDFAEFNDQFKQYFGYAL

SEQ ID NO: 1037 - DNA, 969 bp, synthetic construct
  misc_feature 1..969: note = Variant of adenosine kinase
  source 1..969: mol_type = other DNA
atgcaccatcatcaccatcacgggggctccggcatgagtgcactgatttgcggttctttagcgtatgataccatcatggtgtttccggaccagttcaagaaccatattctgcccgatcgtgttcaccgcctcaatgtcagctttcttgtaccacgcatgcgtcgtgaatttggaggctgtgccggcaacattgcgtacaatctgcatctgttgggtggtgctccgatcgtaatggctacggtgggccaagatttcggtccgtatcgcgagcacttcgaaactctgggcattgacttatcccgcgtcaagatcatcgatgatctgagtacaccgcaggccttcattaccaccgacatggatcataaccagattacggcgtttcatggcggcgcaatgatgcgttcgtacgaaaatcacgttcgtgatgtgccgggtgttaccttgggcctcgtaggtcctgatggacgcgagggcatgatccaaaatgccgaagaatttgctgctggtggcattccgttcatttttgacccaggtcaggcactgccgctgttcaacggccccgaactgcgcgagtttatcgaacaggcggactatgtggtggtcaacgattacgaaagcaatcttcttcaaatgcgtactggctggaacgagcaggacattgtttcacgcgtgcaggcgtatatcaccacgcaaggttcggctggagccctggtacatacaccggagaagacctacgatattccgccggctcacacccgtcgtgtcgttgatccaactggttgcggcgacgcgtttcgcgccggcctgatctatggtattcagcataattatgattggttgaccattggccgcatgggaaacttaatgggtgcgctgaaagtggaacaccctggcacccaaaatcagcgtttcgattttgccgaattcaacgaccagttcaaacaatattttggctacgcgctctaatga

SEQ ID NO: 1038 - protein, 321 aa, synthetic construct
  REGION 1..321: note = Variant of adenosine kinase
MHHHHHHGGSGMSALICGSLAYDTIMVFPDQFKNHILPDRVHRLNVSFLVPRMRREFGGCAGNIAYNLHLLGGAPIVMATVGQDFGPYREHFETLGIDLSRVKIIDDLSTPQAFITTDMDHNQITAFHGGAMMRSYENHVRDVPGVTLGLVGPDGREGMIQNAEEFAAGGIPFIFDPGQALPLFNGPELREFIEQADYVVVNDYESNLLQMRTGWNEQDIVSRVQAYITTQGSAGALVHTPEKTYDIPPAHTRRVVDPTGCGDAFRAGLIYGIQHNYDWLTIGRMGNLMGALKVEHPGTQNQRFDFAEFNDQFKQYFGYAL

SEQ ID NO: 1039 - DNA, 969 bp, synthetic construct
  misc_feature 1..969: note = Variant of adenosine kinase
  source 1..969: mol_type = other DNA
atgcaccatcatcaccatcacgggggctccggcatgagtgcactgatttgcggttctttagcgtatgataccatcatggtgtttccggaccagttcaagaaccatattctgcccgatcgtgttcaccgcctcaatgtcagctttcttgtaccacgcatgcgtcgtgaatttggaggctgtgccggcaacattgcgtacaatctgcatctgttgggtggtgctccgatcgtaatggctacggtgggccaagatttcggtccgtatcgcgagcacttcgaaactctgggcattgacttatcccgcgtcaagatcatcgatgatctgagtacaccgcaggccttcattaccaccgacatggatcataaccagattacggcgtttcatggcggcgcaatgatgcgttcgtacgaaaatcacgttcgtgatgtgccgggtgttaccttgggcctcgtaggtcctgatggacgcgagggcatgatccaaaatgccgaagaatttgctgctggtgtgattccgttcatttttgacccaggtcaggcactgccgctgttcaacggccccgaactgcgcgagtttatcgaacaggcggactatgtggtggtcaacgattacgaaagcaatcttcttcaaacgcgtactggctggaacgagcaggacattgtttcacgcgtgcaggcgtatatcaccacgcaaggttcggctggagccctggtacatacaccggagaagacctacgatattccgccggctcacacccgtcgtgtcgttgatccaactggttgcggcgacgcgtttcgcgccggcctgatctatggtattcagcataattatgattggttgaccattggccgcatgggaaacttaatgggtgcgctgaaagtggaacaccctggcacccaaaatcagcgtttcgattttgccgaattcaacgaccagttcaaacaatattttggctacgcgctctaatga

SEQ ID NO: 1040 - protein, 321 aa, synthetic construct
  REGION 1..321: note = Variant of adenosine kinase
MHHHHHHGGSGMSALICGSLAYDTIMVFPDQFKNHILPDRVHRLNVSFLVPRMRREFGGCAGNIAYNLHLLGGAPIVMATVGQDFGPYREHFETLGIDLSRVKIIDDLSTPQAFITTDMDHNQITAFHGGAMMRSYENHVRDVPGVTLGLVGPDGREGMIQNAEEFAAGVIPFIFDPGQALPLFNGPELREFIEQADYVVVNDYESNLLQTRTGWNEQDIVSRVQAYITTQGSAGALVHTPEKTYDIPPAHTRRVVDPTGCGDAFRAGLIYGIQHNYDWLTIGRMGNLMGALKVEHPGTQNQRFDFAEFNDQFKQYFGYAL

SEQ ID NO: 1041 - DNA, 969 bp, synthetic construct
  misc_feature 1..969: note = Variant of adenosine kinase
  source 1..969: mol_type = other DNA
atgcaccatcatcaccatcacgggggctccggcatgagtgcactgatttgcggttctttagcgtatgataccatcatggtgtttccggaccagttcaagaaccatattctgcccgatcgtgttcaccgcctcaatgtcagctttctttgtccacgcatgcgtcgtgaatttggaggctgtgccggcaacattgcgtacaatctgcatctgttgggtggtgctccgatcgtaatggctacggtgggccaagatttcggtccgtatcgcgagcacttcgaaactctgggcattgacttatcccgcgtcaagatcatcgatgatctgagtacaccgcaggccttcattaccaccgacatggatcataaccagattacggcgtttcatggcggcgcaatgatgcgttcgtacgaaaatcacgttcgtgatgtgccgggtgttaccttgggcctcgtaggtcctgatggacgcgagggcatgatccaaaatgccgaagaatttgctgctggtggcattccgttcatttttgacccaggtcaggcactgccgctgttcaacggccccgaactgcgcgagtttatcgaacaggcggactatgtggtggtcaacgattacgaaagcaatcttcttcaaacgcgtactggctggaacgagcaggacattgtttcacgcgtgcaggcgtatatcaccacgcaaggttcggctggagccctggtacatacaccggagaagacctacgatattccgccggctcacacccgtcgtgtcgttgatccaactggttgcggcgacgcgtttcgcgccggcctgatctatggtattcagcataattatgattggttgaccattggccgcatgggaaacttaatgggtgcgctgaaagtggaacaccctggcacccaaaatcagcgtttcgattttgccgaattcaacgaccagttcaaacaatattttggctacgcgctctaatga

SEQ ID NO: 1042 - protein, 321 aa, synthetic construct
  REGION 1..321: note = Variant of adenosine kinase
MHHHHHHGGSGMSALICGSLAYDTIMVFPDQFKNHILPDRVHRLNVSFLCPRMRREFGGCAGNIAYNLHLLGGAPIVMATVGQDFGPYREHFETLGIDLSRVKIIDDLSTPQAFITTDMDHNQITAFHGGAMMRSYENHVRDVPGVTLGLVGPDGREGMIQNAEEFAAGGIPFIFDPGQALPLFNGPELREFIEQADYVVVNDYESNLLQTRTGWNEQDIVSRVQAYITTQGSAGALVHTPEKTYDIPPAHTRRVVDPTGCGDAFRAGLIYGIQHNYDWLTIGRMGNLMGALKVEHPGTQNQRFDFAEFNDQFKQYFGYAL

SEQ ID NO: 1043 - DNA, 969 bp, synthetic construct
  misc_feature 1..969: note = Variant of adenosine kinase
  source 1..969: mol_type = other DNA
atgcaccatcatcaccatcacgggggctccggcatgagtgcactgatttgcggttctttagcgtatgataccatcatggtgtttccggaccagttcaagaaccatattctgcccgatcgtttgcaccgcctcaatgtcagctttcttgtaccacgcatgcgtcgtgaatttggaggctgtgccggcaacattgcgtacaatctgcatctgttgggtggtgctccgatcgtaatggctacggtgggccaagatttcggtccgtatcgcgagcacttcgaaactctgggcattgacttatcccgcgtcaagatcatcgatgatctgagtacaccgcaggccttcattaccaccgacatggatcataaccagattacggcgtttcatggcggcgcaatgatgcgttcgtacgaaaatcacgttcgtgatgtgccgggtgttaccttgggcctcgtaggtcctgatggacgcgagggcatgatccaaaatgccgaagaatttgctgctggtggcattccgttcatttttgacccaggtcaggcactgccgctgttcaacggccccgaactgcgcgagtttatcgaacaggcggactatgtggtggtcaacgattacgaaagcaatcttcttcaaacgcgtactggctggaacgagcaggacattgtttcacgcgtgcaggcgtatatcaccacgcaaggttcggctggagccctggtacatacaccggagaagacctacgatattccgccggctcacacccgtcgtgtcgttgatccaactggttgcggcgacgcgtttcgcgccggcctgatctatggtattcagcataattatgattggttgaccattggccgcatgggaaacttaatgggtgcgctgaaagtggaacaccctggcacccaaaatcagcgtttcgattttgccgaattcaacgaccagttcaaacaatattttggctacgcgctctaatga

SEQ ID NO: 1044 - protein, 321 aa, synthetic construct
  REGION 1..321: note = Variant of adenosine kinase
MHHHHHHGGSGMSALICGSLAYDTIMVFPDQFKNHILPDRLHRLNVSFLVPRMRREFGGCAGNIAYNLHLLGGAPIVMATVGQDFGPYREHFETLGIDLSRVKIIDDLSTPQAFITTDMDHNQITAFHGGAMMRSYENHVRDVPGVTLGLVGPDGREGMIQNAEEFAAGGIPFIFDPGQALPLFNGPELREFIEQADYVVVNDYESNLLQTRTGWNEQDIVSRVQAYITTQGSAGALVHTPEKTYDIPPAHTRRVVDPTGCGDAFRAGLIYGIQHNYDWLTIGRMGNLMGALKVEHPGTQNQRFDFAEFNDQFKQYFGYAL

SEQ ID NO: 1045 - DNA, 969 bp, synthetic construct
  misc_feature 1..969: note = Variant of adenosine kinase
  source 1..969: mol_type = other DNA
atgcaccatcatcaccatcacgggggctccggcatgagtgcactgatttgcggttctttagcgtatgataccatcatggtgtttccggaccagttcaagaaccatattctgcccgatcgtgttcaccgcctcaatgtcagctttcttgtaccacgcatgcgtcgtgaatttggaggctgtgccggcaacattgcgtacaatctgcatctgttgggtggtgctccgatcgtaatggctacggtgggccaagatttcggtccgtatcgcgagcacttcgaaactctgggcattgacttatcccgcgtcaagatcatcgatgatctgagtacaccgcaggccttcattaccaccgacatggatcataaccagattacggcgtttcatggcggcgcaatgatgcgttcgtacgaaaatcacgttcgtgatgtgccgggtgttaccttgggcctcgtaggtcctgatggacgcgagggcatgatccaaaatgccgaagaatttgctgctggtggcattccgttcatttttgacccaggtcaggcactgccgctgttcaacggccccgaactgcgcgagtttatcgaacaggcggactatgtggtggtcaacgattacgaaagcaatcttcttcaaacgcgtactggctggaacgagcaggacattgtttcacgcgtgcaggcgtatatcaccacgcaaggttcggctggagccctggtacatacaccggagaagacctacgatattccgccggctcacacccgtcgtgtcgttgatccaactggttgcggcgacgcgtttcgcgccggcctgatctatggtattcagcataattatgattggttgaccattggccgcatgggaaacttaatgggtgcgctgaaagtggaacaccctggcacccaaaatcagcgtttcgattttgccgaattcaactcgcagttcaaacaatattttggctacgcgctctaatga

SEQ ID NO: 1046 - protein, 321 aa, synthetic construct
  REGION 1..321: note = Variant of adenosine kinase
MHHHHHHGGSGMSALICGSLAYDTIMVFPDQFKNHILPDRVHRLNVSFLVPRMRREFGGCAGNIAYNLHLLGGAPIVMATVGQDFGPYREHFETLGIDLSRVKIIDDLSTPQAFITTDMDHNQITAFHGGAMMRSYENHVRDVPGVTLGLVGPDGREGMIQNAEEFAAGGIPFIFDPGQALPLFNGPELREFIEQADYVVVNDYESNLLQTRTGWNEQDIVSRVQAYITTQGSAGALVHTPEKTYDIPPAHTRRVVDPTGCGDAFRAGLIYGIQHNYDWLTIGRMGNLMGALKVEHPGTQNQRFDFAEFNSQFKQYFGYAL

SEQ ID NO: 1047 - DNA, 969 bp, synthetic construct
  misc_feature 1..969: note = Variant of adenosine kinase
  source 1..969: mol_type = other DNA
atgcaccatcatcaccatcacgggggctccggcatgagtgcactgatttgcggttctttagcgtatgataccatcatggtgtttccggaccagttcaagaaccatattctgcccgatcgtgttcaccgcctcaatgtcagctttcttgtaccacgcatgcgtcgtgagtttggaggctgtgccggcaacattgcgtacaatctgcatctgttgggtggtgctccgatcgtaatggctacggtgggccaagatttcggtccgtatcgcgagcacttcgaaactctgggcattgacttatcccgcgtcaagatcatcgatgatctgagtacaccgcaggccttcattaccaccgacatggatctgaaccagattacggcgtttcatggcggcgcaatgatgcgttcgtacgaaaatcacgttcgtgatgtgccgggtgttaccttgggcctcgtaggtcctgatggacgcgagggcatgatccaaaatgccgaagaatttgctgctgatggcattccgttcatttttgacccaggtcaggcactgccgctgttcaacggccccgaactgcgcgagtttatcgaacaggcggactatgtggtggtcaacgattacgaaagcaatcttcttcaaacgcgtactggctggaacgagcaggacattgtttcacgcgtgcaggcgtatatcgttacgcaaggttcggctggagccctggtacatacaccggagaagacctacgatattccgccggctcacacccgtcgtgtagttgatccaactggttgcggcgacgcgtttcgcgccggcctgatctatggtattcagcataattatgattggttgaccattggccgcatgggaaacttaatgggtgcgctgaaagtggaacaccctggcacccaaaatcagcgtttcgattttgccgaattcaacgaccagttcaaacaatattttggctacgcgctctaatga

SEQ ID NO: 1048 - protein, 321 aa, synthetic construct
  REGION 1..321: note = Variant of adenosine kinase
MHHHHHHGGSGMSALICGSLAYDTIMVFPDQFKNHILPDRVHRLNVSFLVPRMRREFGGCAGNIAYNLHLLGGAPIVMATVGQDFGPYREHFETLGIDLSRVKIIDDLSTPQAFITTDMDLNQITAFHGGAMMRSYENHVRDVPGVTLGLVGPDGREGMIQNAEEFAADGIPFIFDPGQALPLFNGPELREFIEQADYVVVNDYESNLLQTRTGWNEQDIVSRVQAYIVTQGSAGALVHTPEKTYDIPPAHTRRVVDPTGCGDAFRAGLIYGIQHNYDWLTIGRMGNLMGALKVEHPGTQNQRFDFAEFNDQFKQYFGYAL

SEQ ID NO: 1049 - DNA, 969 bp, synthetic construct
  misc_feature 1..969: note = Variant of adenosine kinase
  source 1..969: mol_type = other DNA
atgcaccatcatcaccatcacgggggctccggcatgagtgcactgatttgcggttctttagcgtatgataccatcatggtgtttccggaccagttcaagaaccatattctgcccgatcgtgttcaccgcctcaatgtcagctttcttgtaccacgcatgcgtcgtgaatttggaggctgtgccggcaacattgcgtacaatctgcatctgttgggtggtattccgatcgtaatggctacggtgggccaagatttcggtccgtatcgcgagcacttcgaaactctgggcattgacttatcccgcgtcaagatcatcgatgatctgagtacaccgcaggccttcattaccaccgacatggatcataaccagattacggcgtttcatggcggcgcaatgatgcgttcgtacgaaaatcacgttcgtgatgtgccgggtgttaccttgggcctcgtaggtcctgatggacgcgagggcatgatccaaaatgccgaagaatttgctgctggtggcattccgttcatttttgacccaggtcaggcactgccgctgttcaacggccccgaactgcgcgagtttatcgaacaggcggactatgtggtggtcaacgattacgaaagcaatcttcttcaaacgcgtactggctggaacgagcaggacattgtttcacgcgtgcaggcgtatatcaccacgcaaggttcggctggagccctggtacatacaccggagaagacctacgatattccgccggctcacacccgtcgtgtcgttgatccaactggttgcggcgacgcgtttcgcgccggcctgatctatggtattcagcataattatgattggttgaccattggccgcatgggaaacttaatgggtgcgctgaaagtggaacaccctggcacccaaaatcagcgtttcgattttgccgaattcaacgaccagttcaaacaatattttggctacgcgctctaatga

SEQ ID NO: 1050 - protein, 321 aa, synthetic construct
  REGION 1..321: note = Variant of adenosine kinase
MHHHHHHGGSGMSALICGSLAYDTIMVFPDQFKNHILPDRVHRLNVSFLVPRMRREFGGCAGNIAYNLHLLGGIPIVMATVGQDFGPYREHFETLGIDLSRVKIIDDLSTPQAFITTDMDHNQITAFHGGAMMRSYENHVRDVPGVTLGLVGPDGREGMIQNAEEFAAGGIPFIFDPGQALPLFNGPELREFIEQADYVVVNDYESNLLQTRTGWNEQDIVSRVQAYITTQGSAGALVHTPEKTYDIPPAHTRRVVDPTGCGDAFRAGLIYGIQHNYDWLTIGRMGNLMGALKVEHPGTQNQRFDFAEFNDQFKQYFGYAL

SEQ ID NO: 1051 - DNA, 969 bp, synthetic construct
  misc_feature 1..969: note = Variant of adenosine kinase
  source 1..969: mol_type = other DNA
atgcaccatcatcaccatcacgggggctccggcatgagtgcactgatttgcggttctttagcgtatgataccatcatggtgtttccggaccagttcaagaaccatattctgcccgatcgtgttcaccgcctcaatgtcagctttcttgtaccacgcatgcgtcgtgaatttggaggctgtgccggcaacattgcgtacaatctgcatctgttgggtggtgctccgatcgtaatggctacggtgggccaagatttcggtccgtatcgcgagcacttcgaaactctgggcattgacttatcccgcgtcaagatcatcgatgatctgagtacaccgcaggccttcattaccaccgacatggatcataaccagattacggcgtttcatggcggcgcaatgatgcgttcgtacgaaaatcacgttcgtgatgtgccgggtgttaccttgggcctcgtaggtcctgatggacgcgagggcatgatccaaaatgccgaagaatttgctgctggtggcattccgttcatttttgacccaggtcaggcactgccgctgttcaacggccccgaactgcgcgagtttatcgaacaggcggactatgtggtggtcaacgattacgaaagcaatcttcttcaaacgcgtactggctggaacgagcaggacattgtttcacgcgtgggtgcgtatatcaccacgcaaggttcggctggagccctggtacatacaccggagaagacctacgatattccgccggctcacacccgtcgtgtcgttgatccaactggttgcggcgacgcgtttcgcgccggcctgatctatggtattcagcataattatgattggttgaccattggccgcatgggaaacttaatgggtgcgctgaaagtggaacaccctggcacccaaaatcagcgtttcgattttgccgaattcaacgaccagttcaaacaatattttggctacgcgctctaatga

SEQ ID NO: 1052 - protein, 321 aa, synthetic construct
  REGION 1..321: note = Variant of adenosine kinase
MHHHHHHGGSGMSALICGSLAYDTIMVFPDQFKNHILPDRVHRLNVSFLVPRMRREFGGCAGNIAYNLHLLGGAPIVMATVGQDFGPYREHFETLGIDLSRVKIIDDLSTPQAFITTDMDHNQITAFHGGAMMRSYENHVRDVPGVTLGLVGPDGREGMIQNAEEFAAGGIPFIFDPGQALPLFNGPELREFIEQADYVVVNDYESNLLQTRTGWNEQDIVSRVGAYITTQGSAGALVHTPEKTYDIPPAHTRRVVDPTGCGDAFRAGLIYGIQHNYDWLTIGRMGNLMGALKVEHPGTQNQRFDFAEFNDQFKQYFGYAL

SEQ ID NO: 1053 - DNA, 969 bp, synthetic construct
  misc_feature 1..969: note = Variant of adenosine kinase
  source 1..969: mol_type = other DNA
atgcaccatcatcaccatcacgggggctccggcatgagtgcactgatttgcggttctttagcgtatgataccatcatggtgtttccggaccagttcaagaaccatattctgcccgatcgtgttcaccgcctcaatgtcagctttcttgtaccacgcatgcgtcgtgaatttggaggctgtgccggcaacattgcgtacaatctgcatctgttgggtggtgctccgatcgtaatggctacggtgggccaagatttcggtccgtatcgcgagcacttcgaaactctgggcattgacttatcccgcgtcaagatcatcggtgatctgagtacaccgcaggccttcattaccaccgacatggatcataaccagattacggcgtttcatggcggcgcaatgatgcgttcgtacgaaaatcacgttcgtgatgtgccgggtgttaccttgggcctcgtaggtcctgatggacgcgagggcatgatccaaaatgccgaagaatttgctgctggtggcattccgttcatttttgacccaggtcaggcactgccgctgttcaacggccccgaactgcgcgagtttatcgaacaggcggactatgtggtggtcaacgattacgaaagcaatcttcttcaaacgcgtactggctggaacgagcaggacattgtttcacgcgtgcaggcgtatatcaccacgcaaggttcggctggagccctggtacatacaccggagaagacctacgatattccgccggctcacacccgtcgtgtcgttgatccaactggttgcggcgacgcgtttcgcgccggcctgatctatggtattcagcataattatgattggttgaccattggccgcatgggaaacttaatgggtgcgctgaaagtggaacaccctggcacccaaaatcagcgtttcgattttgccgaattcaacgaccagttcaaacaatattttggctacgcgctctaatga

SEQ ID NO: 1054 - protein, 321 aa, synthetic construct
  REGION 1..321: note = Variant of adenosine kinase
MHHHHHHGGSGMSALICGSLAYDTIMVFPDQFKNHILPDRVHRLNVSFLVPRMRREFGGCAGNIAYNLHLLGGAPIVMATVGQDFGPYREHFETLGIDLSRVKIIGDLSTPQAFITTDMDHNQITAFHGGAMMRSYENHVRDVPGVTLGLVGPDGREGMIQNAEEFAAGGIPFIFDPGQALPLFNGPELREFIEQADYVVVNDYESNLLQTRTGWNEQDIVSRVQAYITTQGSAGALVHTPEKTYDIPPAHTRRVVDPTGCGDAFRAGLIYGIQHNYDWLTIGRMGNLMGALKVEHPGTQNQRFDFAEFNDQFKQYFGYAL

SEQ ID NO: 1055 - DNA, 969 bp, synthetic construct
  misc_feature 1..969: note = Variant of adenosine kinase
  source 1..969: mol_type = other DNA
atgcaccatcatcaccatcacgggggctccggcatgagtgcactgatttgcggttctttagcgtatgataccatcatggtgtttccggaccagttcaagaaccatattctgcccgatcgtgttcaccgcctcaatgtcagctttcttgtaccacgcatgcgtcgtgagtttggaggctgtgccggcaacattgcgtacaatctgcatctgttgggtggtgctccgatcgtaatggctacggtgggccaagatttcggtccgtatcgcgagcacttcgaaactctgggcattgacttatcccgcgtcaagatcatcgatgatctgagtacaccgcaggccttcattaccaccgacatggatctgaaccagattacggcgtttcatggcggcgcaatgatgcgttcgtacgaaaatcacgttcgtgatgtgccgggtgttaccttgggcctcgtaggtcctgatggacgcgagggcatgatccaaaatgccgaagaatttgctgctggtggcattccgttcatttttgacccaggtcaggcactgccgctgttcaacggccccgaactgcgcgagtttatcgaacaggcggactatgtggtggtcaacgattacgaaagcaatcttcttcaaacgcgtactggctggaacgagcaggacattgtttcacgcgtgcaggcgtatatcaccacgcaaggttcggctggagccctggtacatacaccggagaagacctacgatattccgccggctcacacccgtcgtgtcgttgatccaactggttgcggcgacgcgtttcgcgccggcctgatctatggtattcagcataattatgattggttgaccattggccgcatgggaaacttaatgggtgcgctgaaagtggaacaccctggcacccaaaatcagcgtttcgattttgccgaattcaacgaccagttcaaacaatattttggctacgcgctctaatga

SEQ ID NO: 1056 - protein, 321 aa, synthetic construct
  REGION 1..321: note = Variant of adenosine kinase
MHHHHHHGGSGMSALICGSLAYDTIMVFPDQFKNHILPDRVHRLNVSFLVPRMRREFGGCAGNIAYNLHLLGGAPIVMATVGQDFGPYREHFETLGIDLSRVKIIDDLSTPQAFITTDMDLNQITAFHGGAMMRSYENHVRDVPGVTLGLVGPDGREGMIQNAEEFAAGGIPFIFDPGQALPLFNGPELREFIEQADYVVVNDYESNLLQTRTGWNEQDIVSRVQAYITTQGSAGALVHTPEKTYDIPPAHTRRVVDPTGCGDAFRAGLIYGIQHNYDWLTIGRMGNLMGALKVEHPGTQNQRFDFAEFNDQFKQYFGYAL

SEQ ID NO: 1057 - DNA, 969 bp, synthetic construct
  misc_feature 1..969: note = Variant of adenosine kinase
  source 1..969: mol_type = other DNA
atgcaccatcatcaccatcacgggggctccggcatgagtgcactgatttgcggttctttagcgtatgataccatcatggtgtttccggacctgttcaagaaccatattctgcccgatcgtgttcaccgcctcaatgtcagctttcttgtaccacgcatgcgtcgtgaatttggaggctgtgccggcaacattgcgtacaatctgcatctgttgggtggtgctccgatcgtaatggctacggtgggccaagatttcggtccgtatcgcgagcacttcgaaactctgggcattgacttatcccgcgtcaagatcatcgatgatctgagtacaccgcagtcgttcattaccaccgacatggatcataaccagattacggcgtttcacggcggcgcaatgatgcgttcgtacgaaaatcacgttcgtgatgtgccgggtgttaccttgggcctcgtaggtcctgatggacgcgagggcatgatccaaaatgccgaagaatttgctgctggtggcattccgttcatttttgacccaggtcaggcagtgccgctgttcaacggccccgaactgcgcgagtttatcgaacaggcggactatgtggtggtcaacgattacgaaagcaatcttcttcaaacgcgtactggctggaacgagcaggacattgtttcacgcgtgcaggcgtatatcaccacgcaaggttcggctggagccctggtacatacaccggagaagacctacgatattccgccggctcacacccgtcgtgtcgttgatccaactggttgcggcgacgcgtttcgcgccggcctgatctatggtattcagcataattatgattggttgaccattggccgcatgggaaacttaatgggtgcgctgaaagtggaacaccctggcacccaaaatcagcgtttcgattttgccgaattcaacgaccagttcaaacaatattttggctacgcgctctaatga

SEQ ID NO: 1058 - protein, 321 aa, synthetic construct
  REGION 1..321: note = Variant of adenosine kinase
MHHHHHHGGSGMSALICGSLAYDTIMVFPDLFKNHILPDRVHRLNVSFLVPRMRREFGGCAGNIAYNLHLLGGAPIVMATVGQDFGPYREHFETLGIDLSRVKIIDDLSTPQSFITTDMDHNQITAFHGGAMMRSYENHVRDVPGVTLGLVGPDGREGMIQNAEEFAAGGIPFIFDPGQAVPLFNGPELREFIEQADYVVVNDYESNLLQTRTGWNEQDIVSRVQAYITTQGSAGALVHTPEKTYDIPPAHTRRVVDPTGCGDAFRAGLIYGIQHNYDWLTIGRMGNLMGALKVEHPGTQNQRFDFAEFNDQFKQYFGYAL

SEQ ID NO: 1059 - DNA, 969 bp, synthetic construct
  misc_feature 1..969: note = Variant of adenosine kinase
  source 1..969: mol_type = other DNA
atgcaccatcatcaccatcacgggggctccggcatgagtgcactgatttgcggttctttagcgtatgataccatcatggtgtttccggaccagttcaagaaccatattctgcccgatcgtgttcaccgcctcaatgtcagctttcttgtaccacgcatgcgtcgtgaatttggaggctgtgccggcaacattgcgtacaatctgcatctgttgggtggtgctccgatcgtaatggctacggtgggccaagatttcggtccgtatcgcgagcacttcgaaactctgggcattgacttatcccgcgtcaagatcatcgatgatctgagtacaccgcaggccttcattaccaccgacatggatcataaccagattacggcgtttcatggcggcgcaatgatgcgttcgtacgaaaatcacgttcgtgatgtgccgggtgttaccttgggcctcgtaggtcctgatggacgcgagggcatgatccaaaatgccgaagaatttgctgctggtggcattccgttcatttttgacccaggtcaggcactgccgctgttcaacggccccgaactgcgcgcttttatcgaacaggcggactatgtggtggtcaacgattacgaaagcaatcttcttcaaacgcgtactggctggaacgagcaggacattgtttcacgcgtgcaggcgtatatcaccacgcaaggttcggctggagccctggtacatacaccggagaagacctacgatattccgccggctcacacccgtcgtgtcgttgatccaactggttgcggcgacgcgtttcgcgccggcctgatctatggtattcagcataattatgattggttgaccattggccgcatgggaaacttaatgggtgcgctgaaagtggaacaccctggcacccaaaatcagcgtttcgattttgccgaattcaacgaccagttcaaacaatattttggctacgcgctctaatga

SEQ ID NO: 1060 - protein, 321 aa, synthetic construct
  REGION 1..321: note = Variant of adenosine kinase
MHHHHHHGGSGMSALICGSLAYDTIMVFPDQFKNHILPDRVHRLNVSFLVPRMRREFGGCAGNIAYNLHLLGGAPIVMATVGQDFGPYREHFETLGIDLSRVKIIDDLSTPQAFITTDMDHNQITAFHGGAMMRSYENHVRDVPGVTLGLVGPDGREGMIQNAEEFAAGGIPFIFDPGQALPLFNGPELRAFIEQADYVVVNDYESNLLQTRTGWNEQDIVSRVQAYITTQGSAGALVHTPEKTYDIPPAHTRRVVDPTGCGDAFRAGLIYGIQHNYDWLTIGRMGNLMGALKVEHPGTQNQRFDFAEFNDQFKQYFGYAL

SEQ ID NO: 1061 - DNA, 969 bp, synthetic construct
  misc_feature 1..969: note = Variant of adenosine kinase
  source 1..969: mol_type = other DNA
atgcaccatcatcaccatcacgggggctccggcatgagtgcactgatttgcggttctttagcgtatgataccatcatggtgtttccggaccagttcaagaaccatattctgcccgatcgtgttcaccgcctcaatgtcagctttcttgtaccacgcatgcgtcgtgaatttggaggctgtgccggcaacattgcgtacaatctgcatctgttgggtggtgctccgatcgtaatggctacggtgggccaagatttcggtccgtatcgcgagcacttcgaaactctgggcattgacttatcccgcgtcaagatcatcgatgatctgagtacaccgcaggccttcattaccaccgacatggatcataaccagattacggcgtttcatggcggcgcaatgatgcgttcgtacgaaaatcacgttcgtgatgtgccgggtgttaccttgggcctcgtaggtcctgatggacgcgagggcatgatccaaaatgccgaagaatttgctgctggtggcattccgttcatttttgacccaggtcaggcactgccgctgttcaacggccccgaactgcgcagttttatcgaacaggcggactatgtggtggtcaacgattacgaaagcaatcttcttcaaacgcgtactggctggaacgagcaggacattgtttcacgcgtgcaggcgtatatcaccacgcaaggttcggctggagccctggtacatacaccggagaagacctacgatattccgccggctcacacccgtcgtgtcgttgatccaactggttgcggcgacgcgtttcgcgccggcctgatctatggtattcagcataattatgattggttgaccattggccgcatgggaaacttaatgggtgcgctgaaagtggaacaccctggcacccaaaatcagcgtttcgattttgccgaattcaacgaccagttcaaacaatattttggctacgcgctctaatga

SEQ ID NO: 1062 - protein, 321 aa, synthetic construct
  REGION 1..321: note = Variant of adenosine kinase
MHHHHHHGGSGMSALICGSLAYDTIMVFPDQFKNHILPDRVHRLNVSFLVPRMRREFGGCAGNIAYNLHLLGGAPIVMATVGQDFGPYREHFETLGIDLSRVKIIDDLSTPQAFITTDMDHNQITAFHGGAMMRSYENHVRDVPGVTLGLVGPDGREGMIQNAEEFAAGGIPFIFDPGQALPLFNGPELRSFIEQADYVVVNDYESNLLQTRTGWNEQDIVSRVQAYITTQGSAGALVHTPEKTYDIPPAHTRRVVDPTGCGDAFRAGLIYGIQHNYDWLTIGRMGNLMGALKVEHPGTQNQRFDFAEFNDQFKQYFGYAL

SEQ ID NO: 1063 - DNA, 969 bp, synthetic construct
  misc_feature 1..969: note = Variant of adenosine kinase
  source 1..969: mol_type = other DNA
atgcaccatcatcaccatcacgggggctccggcatgagtgcactgatttgcggttctttagcgtatgataccatcatggtgtttccggaccagttcaagaaccatattctgcccgatcgtgttcaccgcctcaatgtcagctttcttgtaccacgcatgcgtcgtgaatttggaggctgtgccggcaacattgcgtacaatctgcatctgttgggtggtgctccgatcgtaatggctacggtgggccaagatttcggtccgtatcgcgagcacttcgaaactctgggcattgacttatcccgcgtcaagatcatcgatgatctgagtacaccgcaggccttcattaccaccgacatggatcataaccagattacggcgtttcatggcggcgcaatgatgcgttcgtacgaaaatcacgttcgtgatgtgccgggtgttaccttgggcctcgtaggtcctgatggacgcgagggcatgatccaaaatgccgaagaatttgctgctggtggcattccgttcatttttgacccaggtcaggcactgccgctgttcaacggccccgaactgcgcgagtttatcgaacaggcggactatgtggtggtcaacgattacgaaagcaatcttcttcaaattcgtactggctggaacgagcaggacattgtttcacgcgtgcaggcgtatatcaccacgcaaggttcggctggagccctggtacatacaccggagaagacctacgatattccgccggctcacacccgtcgtgtcgttgatccaactggttgcggcgacgcgtttcgcgccggcctgatctatggtattcagcataattatgattggttgaccattggccgcatgggaaacttaatgggtgcgctgaaagtggaacaccctggcacccaaaatcagcgtttcgattttgccgaattcaacgaccagttcaaacaatattttggctacgcgctctaatga

SEQ ID NO: 1064 - protein, 321 aa, synthetic construct
  REGION 1..321: note = Variant of adenosine kinase
MHHHHHHGGSGMSALICGSLAYDTIMVFPDQFKNHILPDRVHRLNVSFLVPRMRREFGGCAGNIAYNLHLLGGAPIVMATVGQDFGPYREHFETLGIDLSRVKIIDDLSTPQAFITTDMDHNQITAFHGGAMMRSYENHVRDVPGVTLGLVGPDGREGMIQNAEEFAAGGIPFIFDPGQALPLFNGPELREFIEQADYVVVNDYESNLLQIRTGWNEQDIVSRVQAYITTQGSAGALVHTPEKTYDIPPAHTRRVVDPTGCGDAFRAGLIYGIQHNYDWLTIGRMGNLMGALKVEHPGTQNQRFDFAEFNDQFKQYFGYAL

SEQ ID NO: 1065 - DNA, 969 bp, synthetic construct
  misc_feature 1..969: note = Variant of adenosine kinase
  source 1..969: mol_type = other DNA
atgcaccatcatcaccatcacgggggctccggcatgagtgcactgatttgcggttctttagcgtatgataccatcatggtgtttccggaccagttcaagaactcgattctgcccgatcgtgttcaccgcctcaatgtcagctttcttgtaccacgcatgcgtcgtgaatttggaggctgtgccggcaacattgcgtacaatctgcatctgttgggtggtgctccgatcgtaatggctacggtgggccaagatttcggtccgtatcgcgagcacttcgaaactctgggcattgacttatcccgcgtcaagatcatcgatgatctgagtacaccgcaggccttcattaccaccgacatggatcataaccagattacggcgtttcatggcggcgcaatgatgcgttcgtacgaaaatcacgttcgtgatgtgccgggtgttaccttgggcctcgtaggtcctgatggacgcgagggcatgatccaaaatgccgaagaatttgctgctggtggcattccgttcatttttgacccaggtcaggcactgccgctgttcaacggccccgaactgcgcgagtttatcgaacaggcggactatgtggtggtcaacgattacgaaagcaatcttcttcaaacgcgtactggctggaacgagcaggacattgtttcacgcgtgcaggcgtatatcaccacgcaaggttcggctggagccctggtacatacaccggagaagacctacgatattccgccggctcacacccgtcgtgtcgttgatccaactggttgcggcgacgcgtttcgcgccggcctgatctatggtattcagcataattatgattggttgaccattggccgcatgggaaacttaatgggtgcgctgaaagtggaacaccctggcacccaaaatcagcgtttcgattttgccgaattcaacgaccagttcaaacaatattttggctacgcgctctaatga

SEQ ID NO: 1066 - protein, 321 aa, synthetic construct
  REGION 1..321: note = Variant of adenosine kinase
MHHHHHHGGSGMSALICGSLAYDTIMVFPDQFKNSILPDRVHRLNVSFLVPRMRREFGGCAGNIAYNLHLLGGAPIVMATVGQDFGPYREHFETLGIDLSRVKIIDDLSTPQAFITTDMDHNQITAFHGGAMMRSYENHVRDVPGVTLGLVGPDGREGMIQNAEEFAAGGIPFIFDPGQALPLFNGPELREFIEQADYVVVNDYESNLLQTRTGWNEQDIVSRVQAYITTQGSAGALVHTPEKTYDIPPAHTRRVVDPTGCGDAFRAGLIYGIQHNYDWLTIGRMGNLMGALKVEHPGTQNQRFDFAEFNDQFKQYFGYAL

SEQ ID NO: 1067 - DNA, 969 bp, synthetic construct
  misc_feature 1..969: note = Variant of adenosine kinase
  source 1..969: mol_type = other DNA
atgcaccatcatcaccatcacgggggctccggcatgagtgcactgatttgcggttctttagcgtatgataccatcatggtgtttccggaccagttcaagaaccatattctgcccgatcgtgttcaccgcctcaatgtcagctttcttgtaccacgcatgcgtcgtgaatttggaggctgtgccggcaacattgcgtacaatctgcatctgttgggtggtgctccgatcgtaatggctacggtgggccaagatttcggtccgtatcgcgagcacttcgaaactctgggcattgacttatcccgcgtcaagatcatcgatgatctgagtacaccgcaggccttcattaccaccgacatggatcataaccagattacggcgtttcatggcggcgcaatgatgcgttcgtacgaaaatcacgttcgtgatgtgccgggtgttaccttgggcctcgtaggtcctgatggacgcgagggcatgatccaaaatgccgaagaatttgctgctggtggcattccgttcatttttgacccaggtcaggcactgccgctgttcaacggccccgaactgattgagtttatcgaacaggcggactatgtggtggtcaacgattacgaaagcaatcttcttcaaacgcgtactggctggaacgagcaggacattgtttcacgcgtgcaggcgtatatcaccacgcaaggttcggctggagccctggtacatacaccggagaagacctacgatattccgccggctcacacccgtcgtgtcgttgatccaactggttgcggcgacgcgtttcgcgccggcctgatctatggtattcagcataattatgattggttgaccattggccgcatgggaaacttaatgggtgcgctgaaagtggaacaccctggcacccaaaatcagcgtttcgattttgccgaattcaacgaccagttcaaacaatattttggctacgcgctctaatga

SEQ ID NO: 1068 - protein, 321 aa, synthetic construct
  REGION 1..321: note = Variant of adenosine kinase
MHHHHHHGGSGMSALICGSLAYDTIMVFPDQFKNHILPDRVHRLNVSFLVPRMRREFGGCAGNIAYNLHLLGGAPIVMATVGQDFGPYREHFETLGIDLSRVKIIDDLSTPQAFITTDMDHNQITAFHGGAMMRSYENHVRDVPGVTLGLVGPDGREGMIQNAEEFAAGGIPFIFDPGQALPLFNGPELIEFIEQADYVVVNDYESNLLQTRTGWNEQDIVSRVQAYITTQGSAGALVHTPEKTYDIPPAHTRRVVDPTGCGDAFRAGLIYGIQHNYDWLTIGRMGNLMGALKVEHPGTQNQRFDFAEFNDQFKQYFGYAL

SEQ ID NO: 1069 - DNA, 969 bp, synthetic construct
  misc_feature 1..969: note = Variant of adenosine kinase
  source 1..969: mol_type = other DNA
atgcaccatcatcaccatcacgggggctccggcatgagtgcactgatttgcggttctttagcgtatgataccatcatggtgtttccggaccagttcaagaaccatattctgcccgatcgtgttcaccgcctcaatgtcagctttcttgtaccacgcatgcgtcgtgaatttggaggctgtgccggcaacattgcgtacaatctgcatctgttgggtggtgctccgatcgtaatggctacggtgggccaagatttcggtccgtatcgcgagcacttcgaaactctgggcattgacttatcccgcgtcaagatcatcgatgatctgagtacaccgcaggccttcattaccaccgacatggatcataaccagattacggcgtttcatggcggcgcaatgatgcgttcgtacgaaaatcacgttcgtgatgtgccgggtgttaccttgggcctcgtaggtcctgatggacgcgagggcatgatccaaaatgccaaggaatttgctgctggtggcattccgttcatttttgacccaggtcaggcactgccgctgttcaacggccccgaactgcgcgagtttatcgaacaggcggactatgtggtggtcaacgattacgaaagcaatcttcttcaaacgcgtactggctggaacgagcaggacattgtttcacgcgtgcaggcgtatatcaccacgcaaggttcggctggagccctggtacatacaccggagaagacctacgatattccgccggctcacacccgtcgtgtcgttgatccaactggttgcggcgacgcgtttcgcgccggcctgatctatggtattcagcataattatgattggttgaccattggccgcatgggaaacttaatgggtgcgctgaaagtggaacaccctggcacccaaaatcagcgtttcgattttgccgaattcaacgaccagttcaaacaatattttggctacgcgctctaatga

SEQ ID NO: 1070 - protein, 321 aa, synthetic construct
  REGION 1..321: note = Variant of adenosine kinase
MHHHHHHGGSGMSALICGSLAYDTIMVFPDQFKNHILPDRVHRLNVSFLVPRMRREFGGCAGNIAYNLHLLGGAPIVMATVGQDFGPYREHFETLGIDLSRVKIIDDLSTPQAFITTDMDHNQITAFHGGAMMRSYENHVRDVPGVTLGLVGPDGREGMIQNAKEFAAGGIPFIFDPGQALPLFNGPELREFIEQADYVVVNDYESNLLQTRTGWNEQDIVSRVQAYITTQGSAGALVHTPEKTYDIPPAHTRRVVDPTGCGDAFRAGLIYGIQHNYDWLTIGRMGNLMGALKVEHPGTQNQRFDFAEFNDQFKQYFGYAL

SEQ ID NO: 1071 - DNA, 969 bp, synthetic construct
  misc_feature 1..969: note = Variant of adenosine kinase
  source 1..969: mol_type = other DNA
atgcaccatcatcaccatcacgggggctccggcatgagtgcactgatttgcggttctttagcgtatgataccatcatggtgtttccggaccagttcaagaaccatattctgcccgatcgtgttcaccgcctcaatgtcagctttcttgtaccacgcatgcgtcgtgaatttggaggctgtgccggcaacattgcgtacaatctgcatctgttgggtggtgctccgatcgtaatggctacggtgggccaagatttcggtccgtatcgcgagcacttcgaaactctgggcattgacttatcccgcgtcaagatcatcgatgatctgagtacaccgcaggccttcattaccaccgacatggatcataaccagattacggcgtttcatggcggcgcaatgatgcgttcgtacgaaaatcacgttcgtgatgtgccgggtgttaccttgggcctcgtaggtcctgatggacgcgagggcatgatccaaaatgccgaagaatttgctgctggtggctgtccgttcatttttgacccaggtcaggcactgccgctgttcaacggccccgaactgcgcgagtttatcgaacaggcggactatgtggtggtcaacgattacgaaagcaatcttcttcaaacgcgtactggctggaacgagcaggacattgtttcacgcgtgcaggcgtatatcaccacgcaaggttcggctggagccctggtacatacaccggagaagacctacgatattccgccggctcacacccgtcgtgtcgttgatccaactggttgcggcgacgcgtttcgcgccggcctgatctatggtattcagcataattatgattggttgaccattggccgcatgggaaacttaatgggtgcgctgaaagtggaacaccctggcacccaaaatcagcgtttcgattttgccgaattcaacgaccagttcaaacaatattttggctacgcgctctaatga

SEQ ID NO: 1072 - protein, 321 aa, synthetic construct
  REGION 1..321: note = Variant of adenosine kinase
MHHHHHHGGSGMSALICGSLAYDTIMVFPDQFKNHILPDRVHRLNVSFLVPRMRREFGGCAGNIAYNLHLLGGAPIVMATVGQDFGPYREHFETLGIDLSRVKIIDDLSTPQAFITTDMDHNQITAFHGGAMMRSYENHVRDVPGVTLGLVGPDGREGMIQNAEEFAAGGCPFIFDPGQALPLFNGPELREFIEQADYVVVNDYESNLLQTRTGWNEQDIVSRVQAYITTQGSAGALVHTPEKTYDIPPAHTRRVVDPTGCGDAFRAGLIYGIQHNYDWLTIGRMGNLMGALKVEHPGTQNQRFDFAEFNDQFKQYFGYAL

SEQ ID NO: 1073 - DNA, 969 bp, synthetic construct
  misc_feature 1..969: note = Variant of adenosine kinase
  source 1..969: mol_type = other DNA
atgcaccatcatcaccatcacgggggctccggcatgagtgcactgatttgcggttctttagcgtatgataccatcatggtgtttccggaccagttcaagaaccatattctgcccgatcgtgttcaccgcctcaatgtcagctttcttgtaccacgcatgcgtcgtgaatttggaggctgtgccggcaacattgcgtacaatctgcatctgttgggtggtgctccgatcgtaatggctacggtgggccaagatttcggtccgtatcgcgagcacttcgaaactctgggcattgacttatcccgcgtcaagatcatcgatgatctgagtacaccgcaggccttcattaccaccgacatggatcataaccagattacggcgtttcatggcggcgcaatgatgcgttcgtacgaaaatcacgttcgtgatgtgccgggtgttaccttgggcctcgtaggtcctgatggacgcgagggcatgatccaaaatgccgaagaatttgctgctggtggcattccgttcatttttgacccaggtcaggcactgccgctgttcaacggccccgaactgcgcgagtttatcgaacaggcggactatgtggtggtcaacgattacgaaagcaatcttcttcaatttcgtactggctggaacgagcaggacattgtttcacgcgtgcaggcgtatatcaccacgcaaggttcggctggagccctggtacatacaccggagaagacctacgatattccgccggctcacacccgtcgtgtcgttgatccaactggttgcggcgacgcgtttcgcgccggcctgatctatggtattcagcataattatgattggttgaccattggccgcatgggaaacttaatgggtgcgctgaaagtggaacaccctggcacccaaaatcagcgtttcgattttgccgaattcaacgaccagttcaaacaatattttggctacgcgctctaatga

SEQ ID NO: 1074 - protein, 321 aa, synthetic construct
  REGION 1..321: note = Variant of adenosine kinase
MHHHHHHGGSGMSALICGSLAYDTIMVFPDQFKNHILPDRVHRLNVSFLVPRMRREFGGCAGNIAYNLHLLGGAPIVMATVGQDFGPYREHFETLGIDLSRVKIIDDLSTPQAFITTDMDHNQITAFHGGAMMRSYENHVRDVPGVTLGLVGPDGREGMIQNAEEFAAGGIPFIFDPGQALPLFNGPELREFIEQADYVVVNDYESNLLQFRTGWNEQDIVSRVQAYITTQGSAGALVHTPEKTYDIPPAHTRRVVDPTGCGDAFRAGLIYGIQHNYDWLTIGRMGNLMGALKVEHPGTQNQRFDFAEFNDQFKQYFGYAL

SEQ ID NO: 1075 - DNA, 969 bp, synthetic construct
  misc_feature 1..969: note = Variant of adenosine kinase
  source 1..969: mol_type = other DNA
atgcaccatcatcaccatcacgggggctccggcatgagtgcactgatttgcggttctttagcgtatgataccatcatggtgtttccggaccagttcaagaaccatattctgcccgatcgtgttcaccgcctcaatgtcagctttcttgtaccacgcatgcgtcgtgaatttggaggctgtgccggcaacattgcgtacaatctgcatctgttgggtggtgctccgatcgtaatggctacggtgggccaagatttcggtccgtatcgcgagcacttcgaaactctgggcattgacttatcccgcgtcaagatcatcgatgatctgagtacaccgcaggccttcattaccaccgacatggatcataaccagattacggcgtttcatggcggcgcaatgatgcgttcgtacgaaaatcacgttcgtgatgtgccgggtgttaccttgggcctcgtaggtcctgatggacgcgagggcatgatccaaaatgccgaagaatttgctgctggtggcattccgttcatttttgacccaggtcaggcactgccgctgttcaacggccccgaactgcgcgagtttatcgaacaggcggactatgtggtggtcaacgattacgaaagcaatcttcttcaactgcgtactggctggaacgagcaggacattgtttcacgcgtgcaggcgtatatcaccacgcaaggttcggctggagccctggtacatacaccggagaagacctacgatattccgccggctcacacccgtcgtgtcgttgatccaactggttgcggcgacgcgtttcgcgccggcctgatctatggtattcagcataattatgattggttgaccattggccgcatgggaaacttaatgggtgcgctgaaagtggaacaccctggcacccaaaatcagcgtttcgattttgccgaattcaacgaccagttcaaacaatattttggctacgcgctctaatga

SEQ ID NO: 1076 - protein, 321 aa, synthetic construct
  REGION 1..321: note = Variant of adenosine kinase
MHHHHHHGGSGMSALICGSLAYDTIMVFPDQFKNHILPDRVHRLNVSFLVPRMRREFGGCAGNIAYNLHLLGGAPIVMATVGQDFGPYREHFETLGIDLSRVKIIDDLSTPQAFITTDMDHNQITAFHGGAMMRSYENHVRDVPGVTLGLVGPDGREGMIQNAEEFAAGGIPFIFDPGQALPLFNGPELREFIEQADYVVVNDYESNLLQLRTGWNEQDIVSRVQAYITTQGSAGALVHTPEKTYDIPPAHTRRVVDPTGCGDAFRAGLIYGIQHNYDWLTIGRMGNLMGALKVEHPGTQNQRFDFAEFNDQFKQYFGYAL

SEQ ID NO: 1077 - DNA, 969 bp, synthetic construct
  misc_feature 1..969: note = Variant of adenosine kinase
  source 1..969: mol_type = other DNA
atgcaccatcatcaccatcacgggggctccggcatgagtgcactgatttgcggttctttagcgtatgataccatcatggtgtttccggaccagttcaagaaccatattctgcccgatcgtgttcaccgcctcaatgtcagctttcttgtaccacgcatgcgtcgtgaatttggaggctgtgccggcaacattgcgtacaatctgcatctgttgggtggtgctccgatcgtaatggctacggtgggccaagatttcggtccgtatcgcgagcacttcgaaactctgggcattgacttatcccgcgtcaagatcatcgatgatctgagtacaccgcaggccttcattaccaccgacatggatcataaccagattacggcgtttcatggcggcgcaatgatgcgttcgtacgaaaatcacgttcgtgatgtgccgggtgttaccttgggcctcgtaggtcctgatggacgcgagggcatgatccaaaatgccgaagaatttgctgctggtggcattccgttcatttttgacccaggtcaggcactgccgctgttcaacggccccgaactgcgcgagtttatcgaacaggcggactatgtggtggtcaacgattacgaaagcaatcttcttcaaacgcgtactggctggaacgagcaggacattgtttcacgcgtggaggcgtatatcaccacgcaaggttcggctggagccctggtacatacaccggagaagacctacgatattccgccggctcacacccgtcgtgtcgttgatccaactggttgcggcgacgcgtttcgcgccggcctgatctatggtattcagcataattatgattggttgaccattggccgcatgggaaacttaatgggtgcgctgaaagtggaacaccctggcacccaaaatcagcgtttcgattttgccgaattcaacgaccagttcaaacaatattttggctacgcgctctaatga

SEQ ID NO: 1078 - protein, 321 aa, synthetic construct
  REGION 1..321: note = Variant of adenosine kinase
MHHHHHHGGSGMSALICGSLAYDTIMVFPDQFKNHILPDRVHRLNVSFLVPRMRREFGGCAGNIAYNLHLLGGAPIVMATVGQDFGPYREHFETLGIDLSRVKIIDDLSTPQAFITTDMDHNQITAFHGGAMMRSYENHVRDVPGVTLGLVGPDGREGMIQNAEEFAAGGIPFIFDPGQALPLFNGPELREFIEQADYVVVNDYESNLLQTRTGWNEQDIVSRVEAYITTQGSAGALVHTPEKTYDIPPAHTRRVVDPTGCGDAFRAGLIYGIQHNYDWLTIGRMGNLMGALKVEHPGTQNQRFDFAEFNDQFKQYFGYAL

SEQ ID NO: 1079 - DNA, 969 bp, synthetic construct
  misc_feature 1..969: note = Variant of adenosine kinase
  source 1..969: mol_type = other DNA
atgcaccatcatcaccatcacgggggctccggcatgagtgcactgatttgcggttctttagcgtatgataccatcatggtgtttccggaccagttcaagaaccatattctgcccgatcgtgttcaccgcctcaatgtcagctttcttgtaccacgcatgcgtcgtgaatttggaggctgtgccggcaacattgcgtacaatctgcatctgttgggtggtgctccgatcgtaatggctacggtgggccaagatttcggtccgtatcgcgagcacttcgaaactctgggcattgacttatcccgcgtcaagatcatcgatgatctgagtacaccgcaggccttcattaccaccgacatggatcataaccagattacggcgtttcatggcggcgcaatgatgcgttcgtacgaaaatcacgttcgtgatgtgccgggtgttaccttgggcctcgtaggtcctgatggacgcgagggcatgatccaaaatgccgaagaatttgctgctggtggcattccgttcatttttgacccaggtcaggcactgccgctgttcaacggccccgaactgcgcgagtttatcgaaggtgcggactatgtggtggtcaacgattacgaaagcaatcttcttcaaacgcgtactggctggaacgagcaggacattgtttcacgcgtgcaggcgtatatcaccacgcaaggttcggctggagccctggtacatacaccggagaagacctacgatattccgccggctcacacccgtcgtgtcgttgatccaactggttgcggcgacgcgtttcgcgccggcctgatctatggtattcagcataattatgattggttgaccattggccgcatgggaaacttaatgggtgcgctgaaagtggaacaccctggcacccaaaatcagcgtttcgattttgccgaattcaacgaccagttcaaacaatattttggctacgcgctctaatga

SEQ ID NO: 1080 - protein, 321 aa, synthetic construct
  REGION 1..321: note = Variant of adenosine kinase
MHHHHHHGGSGMSALICGSLAYDTIMVFPDQFKNHILPDRVHRLNVSFLVPRMRREFGGCAGNIAYNLHLLGGAPIVMATVGQDFGPYREHFETLGIDLSRVKIIDDLSTPQAFITTDMDHNQITAFHGGAMMRSYENHVRDVPGVTLGLVGPDGREGMIQNAEEFAAGGIPFIFDPGQALPLFNGPELREFIEGADYVVVNDYESNLLQTRTGWNEQDIVSRVQAYITTQGSAGALVHTPEKTYDIPPAHTRRVVDPTGCGDAFRAGLIYGIQHNYDWLTIGRMGNLMGALKVEHPGTQNQRFDFAEFNDQFKQYFGYAL

SEQ ID NO: 1081 - DNA, 969 bp, synthetic construct
  misc_feature 1..969: note = Variant of adenosine kinase
  source 1..969: mol_type = other DNA
atgcaccatcatcaccatcacgggggctccggcatgagtgcactgatttgcggttctttagcgtatgataccatcatggtgtttccggaccagttcaagaaccatattctgcccgatcgtgttcaccgcctcaatgtcagctttcttgtaccacgcatgcgtcgtgaatttggaggctgtgccggcaacattgcgtacaatctgcatctgttgggtggtgctccgatcgtaatggctacggtgggccaagatttcggtccgtatcgcgagcacttcgaaactctgggcattgacttatcccgcgtcaagatcatcgatgatctgagtacaccgcaggccttcattaccaccgacatggatcataaccagattacggcgtttcatggcggcgcaatgatgcgttcgtacgaaaatcacgttcgtgatgtgccgggtgttaccttgggcctcgtaggtcctgatggacgcgagggcatgatccaaaatgccgaagaatttgctgctggtggcattccgttcatttttgacccaggtcaggcactgccgctgttcaacggccccgaactgcgcgagtttatcgaacaggcggactatgtggtggtcaacgattacgaaagcaatcttcttcaaacgcgtactggctggaacgagcaggacattgtttcacgcgtgcaggcgtatatcaccacgcaaggttcggctggagccctggtacatacaccggagaagacctacgatattccgccggctcacacccgtcgtgtcgttgatccaactggttgcggcgacgcgtttcgcgccggcctgatctatggtattcagcataattatgattggttgaccattggccgcatgggaaacttaatgggtgcgctgaaagtggaacaccctggcacccaaaatcagcgtttcgattttgccgaattcaacaggcagttcaaacaatattttggctacgcgctctaatga

SEQ ID NO: 1082 - protein, 321 aa, synthetic construct
  REGION 1..321: note = Variant of adenosine kinase
MHHHHHHGGSGMSALICGSLAYDTIMVFPDQFKNHILPDRVHRLNVSFLVPRMRREFGGCAGNIAYNLHLLGGAPIVMATVGQDFGPYREHFETLGIDLSRVKIIDDLSTPQAFITTDMDHNQITAFHGGAMMRSYENHVRDVPGVTLGLVGPDGREGMIQNAEEFAAGGIPFIFDPGQALPLFNGPELREFIEQADYVVVNDYESNLLQTRTGWNEQDIVSRVQAYITTQGSAGALVHTPEKTYDIPPAHTRRVVDPTGCGDAFRAGLIYGIQHNYDWLTIGRMGNLMGALKVEHPGTQNQRFDFAEFNRQFKQYFGYAL

SEQ ID NO: 1083 - DNA, 969 bp, synthetic construct
  misc_feature 1..969: note = Variant of adenosine kinase
  source 1..969: mol_type = other DNA
atgcaccatcatcaccatcacgggggctccggcatgagtgcactgatttgcggttctttagcgtatgataccatcatggtgtttccggaccagttcaagaaccatattctgcccgatcgtgttcaccgcctcaatgtcagctttcttgtaccacgcatgcgtcgtgaatttggaggctgtgccggcaacattgcgtacaatctgcatctgttgggtggtgctccgatcgtaatggctacggtgggccaagatttcggtccgtatcgcgagcacttcgaaactctgggcattgacttatcccgcgtcaagatcatcgatgatctgagtacaccgcaggccttcattaccaccgacatggatcataaccagattacggcgtttcatggcggcgcaatgatgcgttcgtacgaaaatcacgttcgtgatgtgccgggtgttaccttgggcctcgtaggtcctgatggacgcgagggcatgatccaaaatgccgaagaatttgtggctggtggcattccgttcatttttgacccaggtcaggcactgccgctgttcaacggccccgaactgcgcgagtttatcgaacaggcggactatgtggtggtcaacgattacgaaagcaatcttcttcaaacgcgtactggctggaacgagcaggacattgtttcacgcgtgcaggcgtatatcaccacgcaaggttcggctggagccctggtacatacaccggagaagacctacgatattccgccggctcacacccgtcgtgtcgttgatccaactggttgcggcgacgcgtttcgcgccggcctgatctatggtattcagcataattatgattggttgaccattggccgcatgggaaacttaatgggtgcgctgaaagtggaacaccctggcacccaaaatcagcgtttcgattttgccgaattcaacgaccagttcaaacaatattttggctacgcgctctaatga

SEQ ID NO: 1084 - protein, 321 aa, synthetic construct
  REGION 1..321: note = Variant of adenosine kinase
MHHHHHHGGSGMSALICGSLAYDTIMVFPDQFKNHILPDRVHRLNVSFLVPRMRREFGGCAGNIAYNLHLLGGAPIVMATVGQDFGPYREHFETLGIDLSRVKIIDDLSTPQAFITTDMDHNQITAFHGGAMMRSYENHVRDVPGVTLGLVGPDGREGMIQNAEEFVAGGIPFIFDPGQALPLFNGPELREFIEQADYVVVNDYESNLLQTRTGWNEQDIVSRVQAYITTQGSAGALVHTPEKTYDIPPAHTRRVVDPTGCGDAFRAGLIYGIQHNYDWLTIGRMGNLMGALKVEHPGTQNQRFDFAEFNDQFKQYFGYAL

SEQ ID NO: 1085 - DNA, 969 bp, synthetic construct
  misc_feature 1..969: note = Variant of adenosine kinase
  source 1..969: mol_type = other DNA
atgcaccatcatcaccatcacgggggctccggcatgagtgcactgatttgcggttctttagcgtatgataccatcatggtgtttccggaccagttcaagaaccatattctgcccgatcgtgttcaccgcctcaatgtcagctttcttgtaccacgcatgcgtcgtgaatttggaggctgtgccggcaacattgcgtacaatctgcatctgttgggtggtgctccgatcgtaatggctacggtgggccaagatttcggtccgtatcgcgagcacttcgaaactctgggcattgacttatcccgcgtcaagatcatcgatgatctgagtacaccgcaggccttcattaccaccgacatggatcataaccagattacggcgtttcatggcggcgcaatgatgcgttcgtacgaaaatcacgttcgtgatgtgccgggtgttaccttgggcctcgtaggtcctgatggacgcgagggcatgatccaaaatgccgaagaatttgctgctggtggcattccgttcatttttgacccaggtcaggcactgccgctgttcaacggccccgaactgcgcgagtttatcgaacaggcggactatgtggtggtcaacgattacgaaagcaatcttcttcaaacgcgtactggctggaacgagcaggacattgtttcacgcgtgcaggcgtatatcaccacgcaaggttcggctggagccctggtacatacaccggagaagacctacgatattccgccggctcacacccgtcgtgtcgttgatccaactggttgcggcgacgcgtttcgcgccggcctgatctatggtattcagcataattatgattggttgaccattggccgcatgggaaacttaatgggtgcgctgaaagtggaacaccctggcacccaaaatcagcgtttcgattttgccgaattcaacttgcagttcaaacaatattttggctacgcgctctaatga

SEQ ID NO: 1086 - protein, 321 aa, synthetic construct
  REGION 1..321: note = Variant of adenosine kinase
MHHHHHHGGSGMSALICGSLAYDTIMVFPDQFKNHILPDRVHRLNVSFLVPRMRREFGGCAGNIAYNLHLLGGAPIVMATVGQDFGPYREHFETLGIDLSRVKIIDDLSTPQAFITTDMDHNQITAFHGGAMMRSYENHVRDVPGVTLGLVGPDGREGMIQNAEEFAAGGIPFIFDPGQALPLFNGPELREFIEQADYVVVNDYESNLLQTRTGWNEQDIVSRVQAYITTQGSAGALVHTPEKTYDIPPAHTRRVVDPTGCGDAFRAGLIYGIQHNYDWLTIGRMGNLMGALKVEHPGTQNQRFDFAEFNLQFKQYFGYAL

SEQ ID NO: 1087 - DNA, 969 bp, synthetic construct
  misc_feature 1..969: note = Variant of adenosine kinase
  source 1..969: mol_type = other DNA
atgcaccatcatcaccatcacgggggctccggcatgagtgcactgatttgcggttctttagcgtatgataccatcatggtgtttccggaccagttcaagaaccatattctgcccgatcgtgttcaccgcctcaatgtcagctttcttgtaccacgcatgcgtcgtgaatttggaggctgtgccggcaacattgcgtacaatctgcatctgttgggtggtgctccgatcgtaatggctacggtgggccaagatttcggtccgtatcgcgagcacttcgaaactctgggcattgacttatcccgcgtcaagatcatcgatgatctgagtacaccgcaggccttcattaccaccgacatggatcataaccagattacggcgtttcatggcggcgcaatgatgcgttcgtacgaaaatcacgttcgtgatgtgccgggtgttaccttgggcctcgtaggtcctgatggacgcgagggcatgatccaaaatgccgaagaatttgctgttggtggcattccgttcatttttgacccaggtcaggcactgccgctgttcaacggccccgaactgcgcgagtttatcgaacaggcggactatgtggtggtcaacgattacgaaagcaatcttcttcaaacgcgtactggctggaacgagcaggacattgtttcacgcgtgcaggcgtatatcaccacgcaaggttcggctggagccctggtacatacaccggagaagacctacgatattccgccggctcacacccgtcgtgtcgttgatccaactggttgcggcgacgcgtttcgcgccggcctgatctatggtattcagcataattatgattggttgaccattggccgcatgggaaacttaatgggtgcgctgaaagtggaacaccctggcacccaaaatcagcgtttcgattttgccgaattcaacgaccagttcaaacaatattttggctacgcgctctaatga

SEQ ID NO: 1088 - protein, 321 aa, synthetic construct
  REGION 1..321: note = Variant of adenosine kinase
MHHHHHHGGSGMSALICGSLAYDTIMVFPDQFKNHILPDRVHRLNVSFLVPRMRREFGGCAGNIAYNLHLLGGAPIVMATVGQDFGPYREHFETLGIDLSRVKIIDDLSTPQAFITTDMDHNQITAFHGGAMMRSYENHVRDVPGVTLGLVGPDGREGMIQNAEEFAVGGIPFIFDPGQALPLFNGPELREFIEQADYVVVNDYESNLLQTRTGWNEQDIVSRVQAYITTQGSAGALVHTPEKTYDIPPAHTRRVVDPTGCGDAFRAGLIYGIQHNYDWLTIGRMGNLMGALKVEHPGTQNQRFDFAEFNDQFKQYFGYAL

SEQ ID NO: 1089 - DNA, 969 bp, synthetic construct
  misc_feature 1..969: note = Variant of adenosine kinase
  source 1..969: mol_type = other DNA
atgcaccatcatcaccatcacgggggctccggcatgagtgcactgatttgcggttctttagcgtatgataccatcatggtgtttccggaccagttcaagaaccatattctgcccgatcgtgttcaccgcctcaatgtcagctttcttgtaccacgcatgcgtcgtgaatttggaggctgtgccggcaacattgcgtacaatctgcatctgttgggtggtgctccgatcgtaatggctacggtgggccaagatttcggtccgtatcgcgagcacttcgaaactctgggcattgacttatcccgcgtcaagatcatcgatgatctgagtacaccgcaggccttcattaccaccgacatggatcataaccagattacggcgtttcatggcggcgcaatgatgcgttcgtacgaaaatcacgttcgtgatgtgccgggtgttaccttgggcctcgtaggtcctgatggacgcgagggcatgatccaaaatgccgaagaatttgctcggggtggcattccgttcatttttgacccaggtcaggcactgccgctgttcaacggccccgaactgcgcgagtttatcgaacaggcggactatgtggtggtcaacgattacgaaagcaatcttcttcaaacgcgtactggctggaacgagcaggacattgtttcacgcgtgcaggcgtatatcaccacgcaaggttcggctggagccctggtacatacaccggagaagacctacgatattccgccggctcacacccgtcgtgtcgttgatccaactggttgcggcgacgcgtttcgcgccggcctgatctatggtattcagcataattatgattggttgaccattggccgcatgggaaacttaatgggtgcgctgaaagtggaacaccctggcacccaaaatcagcgtttcgattttgccgaattcaacgaccagttcaaacaatattttggctacgcgctctaatga

SEQ ID NO: 1090 - protein, 321 aa, synthetic construct
  REGION 1..321: note = Variant of adenosine kinase
MHHHHHHGGSGMSALICGSLAYDTIMVFPDQFKNHILPDRVHRLNVSFLVPRMRREFGGCAGNIAYNLHLLGGAPIVMATVGQDFGPYREHFETLGIDLSRVKIIDDLSTPQAFITTDMDHNQITAFHGGAMMRSYENHVRDVPGVTLGLVGPDGREGMIQNAEEFARGGIPFIFDPGQALPLFNGPELREFIEQADYVVVNDYESNLLQTRTGWNEQDIVSRVQAYITTQGSAGALVHTPEKTYDIPPAHTRRVVDPTGCGDAFRAGLIYGIQHNYDWLTIGRMGNLMGALKVEHPGTQNQRFDFAEFNDQFKQYFGYAL

SEQ ID NO: 1091 - DNA, 969 bp, synthetic construct
  misc_feature 1..969: note = Variant of adenosine kinase
  source 1..969: mol_type = other DNA
atgcaccatcatcaccatcacgggggctccggcatgagtgcactgatttgcggttctttagcgtatgataccatcatggtgtttccggaccagttcaagaaccatattctgcccgatcgtgttcaccgcctcaatgtcagctttcttgtaccacgcatgcgtcgtgaatttggaggctgtgccggcaacattgcgtacaatctgcatctgttgggtggtgctccgatcgtaatggctacggtgggccaagatttcggtccgtatcgcgagcacttcgaaactctgggcattgacttatcccgcgtcaagatcatcgatgatctgagtacaccgcaggccttcattaccaccgacatggatcataaccagattacggcgtttcatggcggcgcaatgatgcgttcgtacgaaaatcacgttcgtgatgtgccgggtgttaccttgggcctcgtaggtcctgatggacgcgagggcatgatccaaaatgccgaagaatttgctgctggtggcattccgttcatttttgacccaggtcaggcactgccgctgttcaacggccccgaactgcgcgagtttatcgaacaggcggactatgtggtggtcaacgattacgaaagcaatcttcttcaatgtcgtactggctggaacgagcaggacattgtttcacgcgtgcaggcgtatatcaccacgcaaggttcggctggagccctggtacatacaccggagaagacctacgatattccgccggctcacacccgtcgtgtcgttgatccaactggttgcggcgacgcgtttcgcgccggcctgatctatggtattcagcataattatgattggttgaccattggccgcatgggaaacttaatgggtgcgctgaaagtggaacaccctggcacccaaaatcagcgtttcgattttgccgaattcaacgaccagttcaaacaatattttggctacgcgctctaatga

SEQ ID NO: 1092 - protein, 321 aa, synthetic construct
  REGION 1..321: note = Variant of adenosine kinase
MHHHHHHGGSGMSALICGSLAYDTIMVFPDQFKNHILPDRVHRLNVSFLVPRMRREFGGCAGNIAYNLHLLGGAPIVMATVGQDFGPYREHFETLGIDLSRVKIIDDLSTPQAFITTDMDHNQITAFHGGAMMRSYENHVRDVPGVTLGLVGPDGREGMIQNAEEFAAGGIPFIFDPGQALPLFNGPELREFIEQADYVVVNDYESNLLQCRTGWNEQDIVSRVQAYITTQGSAGALVHTPEKTYDIPPAHTRRVVDPTGCGDAFRAGLIYGIQHNYDWLTIGRMGNLMGALKVEHPGTQNQRFDFAEFNDQFKQYFGYAL

SEQ ID NO: 1093 - DNA, 969 bp, synthetic construct
  misc_feature 1..969: note = Variant of adenosine kinase
  source 1..969: mol_type = other DNA
atgcaccatcatcaccatcacgggggctccggcatgagtgcactgatttgcggttctttagcgtatgataccatcatggtgtttccggacctgttcaagaaccatattctgcccgatcgtgttcaccgcctcaatgtcagctttcttgtaccacgcatgcgtcgtgaatttggaggctgtgccggcaacattgcgtacaatctgcatctgttgggtggtgctccgatcgtaatggctacggtgggccaagatttcggtccgtatcgcgagcacttcgaaactctgggcattgacttatcccgcgtcaagatcatcgatgatctgagtacaccgcaggcgttcattaccaccgacatggatcataaccagattacggcgtttcatggcggcgcaatgatgcgttcgtacgaaaatcacgttcgtgatgtgccgggtgttaccttgggcctcgtaggtcctgatggacgcgagggcatgatccaaaatgccgaagaatttgctgctggtggcattccgttcatttttgacccaggtcaggcagtgccgctgttcaacggccccgaactgcgcgagtttatcgaacaggcggactatgtggtggtcaacgattacgaaagcaatcttcttcaagcccgtactggctggaacgagcaggacattgtttcacgcgtgcaggcgtatatcaccacgcaaggttcggctggagccctggtacatacaccggagaagacctacgatattccgccggctcacacccgtcgtgtcgttgatccaactggttgcggcgacgcgtttcgcgccggcctgatctatggtattcagcataattatgattggttgaccattggccgcatgggaaacttaatgggtgcgctgaaactggaacaccctggcacccaaaatcagcgtttcgattttgccgaattcaacgaccagttcaaacaatattttggctacgcgctctaatga

SEQ ID NO: 1094 - protein, 321 aa, synthetic construct
  REGION 1..321: note = Variant of adenosine kinase
MHHHHHHGGSGMSALICGSLAYDTIMVFPDLFKNHILPDRVHRLNVSFLVPRMRREFGGCAGNIAYNLHLLGGAPIVMATVGQDFGPYREHFETLGIDLSRVKIIDDLSTPQAFITTDMDHNQITAFHGGAMMRSYENHVRDVPGVTLGLVGPDGREGMIQNAEEFAAGGIPFIFDPGQAVPLFNGPELREFIEQADYVVVNDYESNLLQARTGWNEQDIVSRVQAYITTQGSAGALVHTPEKTYDIPPAHTRRVVDPTGCGDAFRAGLIYGIQHNYDWLTIGRMGNLMGALKLEHPGTQNQRFDFAEFNDQFKQYFGYAL

SEQ ID NO: 1095 - DNA, 969 bp, synthetic construct
  misc_feature 1..969: note = Variant of adenosine kinase
  source 1..969: mol_type = other DNA
atgcaccatcatcaccatcacgggggctccggcatgagtgcactgatttgcggttctttagcgtatgataccatcatggtgtttccggaccagttcaagaaccatattctgcccgatcgtgttcaccgcctcaatgtcagctttcttgtaccacgcatgcgtcgtgaatttggaggctgtgccggcaacattgcgtacaatctgcatctgttgggtatggctccgatcgtaatggctacggtgggccaagatttcggtccgtatcgcgagcacttcgaaactctgggcattgacttatcccgcgtcaagatcatcgatgatctgagtacaccgcaggccttcattaccaccgacatggatcataaccagattacggcgtttcatggcggcgcaatgatgcgttcgtacgaaaatcacgttcgtgatgtgccgggtgttaccttgggcctcgtaggtcctgatggacgcgagggcatgatccaaaatgccgaagaatttgctgctggtggcattccgttcatttttgacccaggtcaggcactgccgctgttcaacggccccgaactgcgcgagtttatcgaacaggcggactatgtggtggtcaacgattacgaaagcaatcttcttcaaacgcgtactggctggaacgagcaggacattgtttcacgcgtgcaggcgtatatcaccacgcaaggttcggctggagccctggtacatacaccggagaagacctacgatattccgccggctcacacccgtcgtgtcgttgatccaactggttgcggcgacgcgtttcgcgccggcctgatctatggtattcagcataattatgattggttgaccattggccgcatgggaaacttaatgggtgcgctgaaagtggaacaccctggcacccaaaatcagcgtttcgattttgccgaattcaacgaccagttcaaacaatattttggctacgcgctctaatga

SEQ ID NO: 1096 - protein, 321 aa, synthetic construct
  REGION 1..321: note = Variant of adenosine kinase
MHHHHHHGGSGMSALICGSLAYDTIMVFPDQFKNHILPDRVHRLNVSFLVPRMRREFGGCAGNIAYNLHLLGMAPIVMATVGQDFGPYREHFETLGIDLSRVKIIDDLSTPQAFITTDMDHNQITAFHGGAMMRSYENHVRDVPGVTLGLVGPDGREGMIQNAEEFAAGGIPFIFDPGQALPLFNGPELREFIEQADYVVVNDYESNLLQTRTGWNEQDIVSRVQAYITTQGSAGALVHTPEKTYDIPPAHTRRVVDPTGCGDAFRAGLIYGIQHNYDWLTIGRMGNLMGALKVEHPGTQNQRFDFAEFNDQFKQYFGYAL

SEQ ID NO: 1097 - DNA, 969 bp, synthetic construct
  misc_feature 1..969: note = Variant of adenosine kinase
  source 1..969: mol_type = other DNA
atgcaccatcatcaccatcacgggggctccggcatgagtgcactgatttgcggttctttagcgtatgataccatcatggtgtttccggaccagttcaagaaccatattctgcccgatcgtgttcaccgcctcaatgtcagctttcttgtaccacgcatgcgtcgtgaatttggaggctgtgccggcaacattgcgtacaatctgcatctgttgggtggtgctccgatcgtaatggctacggtgggccaagatttcggtccgtatcgcgagcacttcgaaactctgggcattgacttatcccgcgtcaagatcatcgatgatctgagtacaccgcaggccttcattaccaccgacatggatcataaccagattacggcgtttcatggcggcgcaatgatgcgttcgtacgaaaatcacgttcgtgatgtgccgggtgttaccttgggcctcgtaggtcctgatggacgcgagggcatgatccaaaatgccgaagaatttgctgctggtggcattccgttcatttttgacccaggtcaggcactgccgctgttcaacggccccgaactgcgcgagtttatcgaacaggcggactatgtggtggtcaacgattacgaaagcaatcttcttcaaacgcgtactggctggaacgagcaggacattgtttcacgcgtgcaggcgtatatcaccacgcaaggttcggctggagccctggtacatacaccggagaagacctacgatattccgccggctcacacccgtcgtgtcgttgatccaactggttgcggcgacgcgtttcgcgccggcctgatctatggtattcagcattcttatgattggttgaccattggccgcatgggaaacttaatgggtgcgctgaaagtggaacaccctggcacccaaaatcagcgtttcgattttgccgaattcaacgaccagttcaaacaatattttggctacgcgctctaatga

SEQ ID NO: 1098 - protein, 321 aa, synthetic construct
  REGION 1..321: note = Variant of adenosine kinase
MHHHHHHGGSGMSALICGSLAYDTIMVFPDQFKNHILPDRVHRLNVSFLVPRMRREFGGCAGNIAYNLHLLGGAPIVMATVGQDFGPYREHFETLGIDLSRVKIIDDLSTPQAFITTDMDHNQITAFHGGAMMRSYENHVRDVPGVTLGLVGPDGREGMIQNAEEFAAGGIPFIFDPGQALPLFNGPELREFIEQADYVVVNDYESNLLQTRTGWNEQDIVSRVQAYITTQGSAGALVHTPEKTYDIPPAHTRRVVDPTGCGDAFRAGLIYGIQHSYDWLTIGRMGNLMGALKVEHPGTQNQRFDFAEFNDQFKQYFGYAL

SEQ ID NO: 1099 - DNA, 969 bp, synthetic construct
  misc_feature 1..969: note = Variant of adenosine kinase
  source 1..969: mol_type = other DNA
atgcaccatcatcaccatcacgggggctccggcatgagtgcactgatttgcggttctttagcgtatgataccatcatggtgtttccggaccagttcaagaaccatattctgcccgatcgtgttcaccgcctcaatgtcagctttcttgtaccacgcatgcgtcgtgaatttggaggctgtgccggcaacattgcgtacaatctgcatctgttgggtggtgttccgatcgtaatggctacggtgggccaagatttcggtccgtatcgcgagcacttcgaaactctgggcattgacttatcccgcgtcaagatcatcgatgatctgagtacaccgcaggccttcattaccaccgacatggatcataaccagattacggcgtttcatggcggcgcaatgatgcgttcgtacgaaaatcacgttcgtgatgtgccgggtgttaccttgggcctcgtaggtcctgatggacgcgagggcatgatccaaaatgccgaagaatttgctgctggtggcattccgttcatttttgacccaggtcaggcactgccgctgttcaacggccccgaactgcgcgagtttatcgaacaggcggactatgtggtggtcaacgattacgaaagcaatcttcttcaaacgcgtactggctggaacgagcaggacattgtttcacgcgtgcaggcgtatatcaccacgcaaggttcggctggagccctggtacatacaccggagaagacctacgatattccgccggctcacacccgtcgtgtcgttgatccaactggttgcggcgacgcgtttcgcgccggcctgatctatggtattcagcataattatgattggttgaccattggccgcatgggaaacttaatgggtgcgctgaaagtggaacaccctggcacccaaaatcagcgtttcgattttgccgaattcaacgaccagttcaaacaatattttggctacgcgctctaatga

SEQ ID NO: 1100 - protein, 321 aa, synthetic construct
  REGION 1..321: note = Variant of adenosine kinase
MHHHHHHGGSGMSALICGSLAYDTIMVFPDQFKNHILPDRVHRLNVSFLVPRMRREFGGCAGNIAYNLHLLGGVPIVMATVGQDFGPYREHFETLGIDLSRVKIIDDLSTPQAFITTDMDHNQITAFHGGAMMRSYENHVRDVPGVTLGLVGPDGREGMIQNAEEFAAGGIPFIFDPGQALPLFNGPELREFIEQADYVVVNDYESNLLQTRTGWNEQDIVSRVQAYITTQGSAGALVHTPEKTYDIPPAHTRRVVDPTGCGDAFRAGLIYGIQHNYDWLTIGRMGNLMGALKVEHPGTQNQRFDFAEFNDQFKQYFGYAL

SEQ ID NO: 1101 - DNA, 969 bp, synthetic construct
  misc_feature 1..969: note = Variant of adenosine kinase
  source 1..969: mol_type = other DNA
atgcaccatcatcaccatcacgggggctccggcatgagtgcactgatttgcggttctttagcgtatgataccatcatggtgtttccggaccagttcaagaaccatattctgcccgatcgtgttcaccgcctcaatgtcagctttcttgtaccacgcatgcgtcgtgaatttggaggctgtgccggcaacattgcgtacaatctgcatctgttgggtggtgctccgatcgtaatggctacggtgggccaagatttcggtccgtatcgcgagcacttcgaaactctgggcattgacttatcccgcgtcaagatcatcgatgatctgagtacaccgcaggccttcattaccaccgacatggatcataaccagattacggcgtttcatggcggcgcaatgatgcgttcgtacgaaaatcacgttcgtgatgtgccgggtgttaccttgggcctcgtaggtcctgatggacgcgagggcatgatccaaaatgcctctgaatttgctgctggtggcattccgttcatttttgacccaggtcaggcactgccgctgttcaacggccccgaactgcgcgagtttatcgaacaggcggactatgtggtggtcaacgattacgaaagcaatcttcttcaaacgcgtactggctggaacgagcaggacattgtttcacgcgtgcaggcgtatatcaccacgcaaggttcggctggagccctggtacatacaccggagaagacctacgatattccgccggctcacacccgtcgtgtcgttgatccaactggttgcggcgacgcgtttcgcgccggcctgatctatggtattcagcataattatgattggttgaccattggccgcatgggaaacttaatgggtgcgctgaaagtggaacaccctggcacccaaaatcagcgtttcgattttgccgaattcaacgaccagttcaaacaatattttggctacgcgctctaatga

SEQ ID NO: 1102 - protein, 321 aa, synthetic construct
  REGION 1..321: note = Variant of adenosine kinase
MHHHHHHGGSGMSALICGSLAYDTIMVFPDQFKNHILPDRVHRLNVSFLVPRMRREFGGCAGNIAYNLHLLGGAPIVMATVGQDFGPYREHFETLGIDLSRVKIIDDLSTPQAFITTDMDHNQITAFHGGAMMRSYENHVRDVPGVTLGLVGPDGREGMIQNASEFAAGGIPFIFDPGQALPLFNGPELREFIEQADYVVVNDYESNLLQTRTGWNEQDIVSRVQAYITTQGSAGALVHTPEKTYDIPPAHTRRVVDPTGCGDAFRAGLIYGIQHNYDWLTIGRMGNLMGALKVEHPGTQNQRFDFAEFNDQFKQYFGYAL

SEQ ID NO: 1103 - DNA, 969 bp, synthetic construct
  misc_feature 1..969: note = Variant of adenosine kinase
  source 1..969: mol_type = other DNA
atgcaccatcatcaccatcacgggggctccggcatgagtgcactgatttgcggttctttagcgtatgataccatcatggtgtttccggacctgttcaagaaccatattctgcccgatcgtgttcaccgcctcaatgtcagctttcttgtaccacgcatgcgtcgtgaatttggaggctgtgccggcaacattgcgtacaatctgcatctgttgggtggtgctccgatcgtaatggctacggtgggccaagatttcggtccgtatcgcgagcacttcgaaactctgggcattgacttatcccgcgtcaagatcatcgatgatctgagtacaccgcaggccttcattaccaccgacatggatcataaccagattacggcgtttcacggcggcgcaatgatgcgttcgtacgaaaatcacgttcgtgatgtgccgggtgttaccttgggcctcgtaggtcctgatggacgcgagggcatgatccaaaatgccgaagaatttgctgctggtggcattccgttcatttttgacccaggtcaggcactgccgctgttcaacggccccgaactgcgcgagtttatcgaacaggcggactatgtggtggtcaacgattacgaaagcaatcttcttcaaacgcgtactggctggaacgagcaggacattgtttcacgcgtgcaggcgtatatcaccacgcaaggttcggctggagccctggtacatacaccggagaagacctacgatattccgccggctaaaacccgtcgtgtcgttgatccaactggttgcggcgacgcgtttcgcgccggcctgatctatggtattcagcataattatgattggttgaccattggccgcatgggaaacttaatgggtgcgctgaaagtggaacaccctggcacccaaaatcagcgtttcgattttgccgaattcaacgaccagttcaaacaatattttggctacgcgctctaatga

SEQ ID NO: 1104 - protein, 321 aa, synthetic construct
  REGION 1..321: note = Variant of adenosine kinase
MHHHHHHGGSGMSALICGSLAYDTIMVFPDLFKNHILPDRVHRLNVSFLVPRMRREFGGCAGNIAYNLHLLGGAPIVMATVGQDFGPYREHFETLGIDLSRVKIIDDLSTPQAFITTDMDHNQITAFHGGAMMRSYENHVRDVPGVTLGLVGPDGREGMIQNAEEFAAGGIPFIFDPGQALPLFNGPELREFIEQADYVVVNDYESNLLQTRTGWNEQDIVSRVQAYITTQGSAGALVHTPEKTYDIPPAKTRRVVDPTGCGDAFRAGLIYGIQHNYDWLTIGRMGNLMGALKVEHPGTQNQRFDFAEFNDQFKQYFGYAL

SEQ ID NO: 1105 - DNA, 969 bp, synthetic construct
  misc_feature 1..969: note = Variant of adenosine kinase
  source 1..969: mol_type = other DNA
atgcaccatcatcaccatcacgggggctccggcatgagtgcactgatttgcggttctttagcgtatgataccatcatggtgtttccggaccagttcaagaaccatattctgcccgatcgtgttcaccgcctcaatgtcagctttcttgtaccacgcatgcgtcgtgaatttggaggctgtgccggcaacattgcgtacaatctgcatctgttgggtggtgctccgatcgtaatggctacggtgggccaagatttcggtccgtatcgcgagcacttcgaaactctgggcattgacttatcccgcgtcaagatcatcgatgatctgagtacaccgcaggccttcattaccaccgacatggatcataaccagattacggcgtttcatggcggcgcaatgatgcgttcgtacgaaaatcacgttcgtgatgtgccgggtgttaccttgggcctcgtaggtcctgatggacgcgagggcatgatccaaaatgccgaagaatttgctgctagtggcattccgttcatttttgacccaggtcaggcactgccgctgttcaacggccccgaactgcgcgagtttatcgaacaggcggactatgtggtggtcaacgattacgaaagcaatcttcttcaaacgcgtactggctggaacgagcaggacattgtttcacgcgtgcaggcgtatatcaccacgcaaggttcggctggagccctggtacatacaccggagaagacctacgatattccgccggctcacacccgtcgtgtcgttgatccaactggttgcggcgacgcgtttcgcgccggcctgatctatggtattcagcataattatgattggttgaccattggccgcatgggaaacttaatgggtgcgctgaaagtggaacaccctggcacccaaaatcagcgtttcgattttgccgaattcaacgaccagttcaaacaatattttggctacgcgctctaatga

SEQ ID NO: 1106 - protein, 321 aa, synthetic construct
  REGION 1..321: note = Variant of adenosine kinase
MHHHHHHGGSGMSALICGSLAYDTIMVFPDQFKNHILPDRVHRLNVSFLVPRMRREFGGCAGNIAYNLHLLGGAPIVMATVGQDFGPYREHFETLGIDLSRVKIIDDLSTPQAFITTDMDHNQITAFHGGAMMRSYENHVRDVPGVTLGLVGPDGREGMIQNAEEFAASGIPFIFDPGQALPLFNGPELREFIEQADYVVVNDYESNLLQTRTGWNEQDIVSRVQAYITTQGSAGALVHTPEKTYDIPPAHTRRVVDPTGCGDAFRAGLIYGIQHNYDWLTIGRMGNLMGALKVEHPGTQNQRFDFAEFNDQFKQYFGYAL

SEQ ID NO: 1107 - DNA, 969 bp, synthetic construct
  misc_feature 1..969: note = Variant of adenosine kinase
  source 1..969: mol_type = other DNA
atgcaccatcatcaccatcacgggggctccggcatgagtgcactgatttgcggttctttagcgtatgataccatcatggtgtttccggacctgttcaagaaccatattctgcccgatcgtgttcaccgcctcaatgtcagctttcttgtaccacgcatgcgtcgtgaatttggaggctgtgccggcaacattgcgtacaatctgcatctgttgggtggtgctccgatcgtaatggctacggtgggccaagatttcggtccgtatcgcgagcacttcgaaactctgggcattgacttatcccgcgtcaagatcatcgatgatctgagtacaccgcaggccttcattaccaccgacatggatcataaccagattacggcgtttcatggcggcgcaatgatgcgttcgtacgaaaatcacgttcgtgatgtgccgggtgttaccttgggcctcgtaggtcctgatggacgcgagggcatgatccaaaatgccgaagaatttgctgctggtggcattccgttcatttttgacccaggtcaggcactgccgctgttcaacggccccgaactgcgcgagtttatcgaacaggcggactatgtggtggtcaacgattacgaaagcaatcttcttcaaacgcgtactggctggaacgagcaggacattgtttcacgcgtgcaggcgtatatcaccacgcaaggttcggctggagccctggtacatacaccggagaagacctacgatattccgccggctcacacccgtcgtgtcgttgatccaactggttgcggcgacgcgtttcgcgccggcctgatctatggtattcagcataattatgattggttgaccattggccgcatgggaaacttaatgggtgcgctgaaagtggaacaccctggcacccaaaatcagcgtttcgattttgccgaattcaacgaccagttcaaacaatattttggctacgcgctctaatga

SEQ ID NO: 1108 - protein, 321 aa, synthetic construct
  REGION 1..321: note = Variant of adenosine kinase
MHHHHHHGGSGMSALICGSLAYDTIMVFPDLFKNHILPDRVHRLNVSFLVPRMRREFGGCAGNIAYNLHLLGGAPIVMATVGQDFGPYREHFETLGIDLSRVKIIDDLSTPQAFITTDMDHNQITAFHGGAMMRSYENHVRDVPGVTLGLVGPDGREGMIQNAEEFAAGGIPFIFDPGQALPLFNGPELREFIEQADYVVVNDYESNLLQTRTGWNEQDIVSRVQAYITTQGSAGALVHTPEKTYDIPPAHTRRVVDPTGCGDAFRAGLIYGIQHNYDWLTIGRMGNLMGALKVEHPGTQNQRFDFAEFNDQFKQYFGYAL

SEQ ID NO: 1109 - DNA, 969 bp, synthetic construct
  misc_feature 1..969: note = Variant of adenosine kinase
  source 1..969: mol_type = other DNA
atgcaccatcatcaccatcacgggggctccggcatgagtgcactgatttgcggttctttagcgtatgataccatcatggtgtttccggaccagttcaagaaccatattctgcccgatcgtgttcaccgcctcaatgtcagctttcttgtaccacgcatgcgtcgtgaatttggaggctgtgccggcaacattgcgtacaatctgcatctgttgggtggtgctccgatcgtaatggctacggtgggccaagatttcggtccgtatcgcgagcacttcgaaactctgggcattgacttatcccgcgtcaagatcatcgatgatctgagtacaccgcaggccttcattaccaccgacatggatcataaccagattacggcgtttcatggcggcgcaatgatgcgttcgtacgaaaatcacgttcgtgatgtgccgggtgttaccttgggcctcgtaggtcctgatggacgcgagggcatgatccaaaatgccgaagaatttgctgctgatggcattccgttcatttttgacccaggtcaggcactgccgctgttcaacggccccgaactgcgcgagtttatcgaacaggcggactatgtggtggtcaacgattacgaaagcaatcttcttcaaacgcgtactggctggaacgagcaggacattgtttcacgcgtgcaggcgtatatcaccacgcaaggttcggctggagccctggtacatacaccggagaagacctacgatattccgccggctcacacccgtcgtgtcgttgatccaactggttgcggcgacgcgtttcgcgccggcctgatctatggtattcagcataattatgattggttgaccattggccgcatgggaaacttaatgggtgcgctgaaagtggaacaccctggcacccaaaatcagcgtttcgattttgccgaattcaacgaccagttcaaacaatattttggctacgcgctctaatga

SEQ ID NO: 1110 - protein, 321 aa, synthetic construct
  REGION 1..321: note = Variant of adenosine kinase
MHHHHHHGGSGMSALICGSLAYDTIMVFPDQFKNHILPDRVHRLNVSFLVPRMRREFGGCAGNIAYNLHLLGGAPIVMATVGQDFGPYREHFETLGIDLSRVKIIDDLSTPQAFITTDMDHNQITAFHGGAMMRSYENHVRDVPGVTLGLVGPDGREGMIQNAEEFAADGIPFIFDPGQALPLFNGPELREFIEQADYVVVNDYESNLLQTRTGWNEQDIVSRVQAYITTQGSAGALVHTPEKTYDIPPAHTRRVVDPTGCGDAFRAGLIYGIQHNYDWLTIGRMGNLMGALKVEHPGTQNQRFDFAEFNDQFKQYFGYAL

SEQ ID NO: 1111 - DNA, 969 bp, synthetic construct
  misc_feature 1..969: note = Variant of adenosine kinase
  source 1..969: mol_type = other DNA
atgcaccatcatcaccatcacgggggctccggcatgagtgcactgatttgcggttctttagcgtatgataccatcatggtgtttccggaccagttcaagaaccatattctgcccgatcgtgttcaccgcctcaatgtcagctttcttgtaccacgcatgcgtcgtgaatttggaggctgtgccggcaacattgcgtacaatctgcatctgttgggtggtgctccgatcgtaatggctacggtgggccaagatttcggtccgtatcgcgagcacttcgaaactctgggcattgacttatcccgcgtcaagatcatcgatgatctgagtacaccgcaggccttcattaccaccgacatggatcataaccagattacggcgtttcatggcggcgcaatgatgcgttcgtacgaaaatcacgttcgtgatgtgccgggtgttaccttgggcctcgtaggtcctgatggacgcgagggcatgatccaaaatgccgaagaatttgctgctggtggcattccgttcatttttgacccaggtcaggcactgccgctgttcaacggccccgaactgcgcgagtttatcgaacagagtgactatgtggtggtcaacgattacgaaagcaatcttcttcaaacgcgtactggctggaacgagcaggacattgtttcacgcgtgcaggcgtatatcaccacgcaaggttcggctggagccctggtacatacaccggagaagacctacgatattccgccggctcacacccgtcgtgtcgttgatccaactggttgcggcgacgcgtttcgcgccggcctgatctatggtattcagcataattatgattggttgaccattggccgcatgggaaacttaatgggtgcgctgaaagtggaacaccctggcacccaaaatcagcgtttcgattttgccgaattcaacgaccagttcaaacaatattttggctacgcgctctaatga

SEQ ID NO: 1112 - protein, 321 aa, synthetic construct
  REGION 1..321: note = Variant of adenosine kinase
MHHHHHHGGSGMSALICGSLAYDTIMVFPDQFKNHILPDRVHRLNVSFLVPRMRREFGGCAGNIAYNLHLLGGAPIVMATVGQDFGPYREHFETLGIDLSRVKIIDDLSTPQAFITTDMDHNQITAFHGGAMMRSYENHVRDVPGVTLGLVGPDGREGMIQNAEEFAAGGIPFIFDPGQALPLFNGPELREFIEQSDYVVVNDYESNLLQTRTGWNEQDIVSRVQAYITTQGSAGALVHTPEKTYDIPPAHTRRVVDPTGCGDAFRAGLIYGIQHNYDWLTIGRMGNLMGALKVEHPGTQNQRFDFAEFNDQFKQYFGYAL

SEQ ID NO: 1113 - DNA, 969 bp, synthetic construct
  misc_feature 1..969: note = Variant of adenosine kinase
  source 1..969: mol_type = other DNA
atgcaccatcatcaccatcacgggggctccggcatgagtgcactgatttgcggttctttagcgtatgataccatcatggtgtttccggaccagttcaagaaccatattctgcccgatcgtgttcaccgcctcaatgtcagctttcttgtaccatgtatgcgtcgtgaatttggaggctgtgccggcaacattgcgtacaatctgcatctgttgggtggtgctccgatcgtaatggctacggtgggccaagatttcggtccgtatcgcgagcacttcgaaactctgggcattgacttatcccgcgtcaagatcatcgatgatctgagtacaccgcaggccttcattaccaccgacatggatcataaccagattacggcgtttcatggcggcgcaatgatgcgttcgtacgaaaatcacgttcgtgatgtgccgggtgttaccttgggcctcgtaggtcctgatggacgcgagggcatgatccaaaatgccgaagaatttgctgctggtggcattccgttcatttttgacccaggtcaggcactgccgctgttcaacggccccgaactgcgcgagtttatcgaacaggcggactatgtggtggtcaacgattacgaaagcaatcttcttcaaacgcgtactggctggaacgagcaggacattgtttcacgcgtgcaggcgtatatcaccacgcaaggttcggctggagccctggtacatacaccggagaagacctacgatattccgccggctcacacccgtcgtgtcgttgatccaactggttgcggcgacgcgtttcgcgccggcctgatctatggtattcagcataattatgattggttgaccattggccgcatgggaaacttaatgggtgcgctgaaagtggaacaccctggcacccaaaatcagcgtttcgattttgccgaattcaacgaccagttcaaacaatattttggctacgcgctctaatga

SEQ ID NO: 1114 - protein, 321 aa, synthetic construct
  REGION 1..321: note = Variant of adenosine kinase
MHHHHHHGGSGMSALICGSLAYDTIMVFPDQFKNHILPDRVHRLNVSFLVPCMRREFGGCAGNIAYNLHLLGGAPIVMATVGQDFGPYREHFETLGIDLSRVKIIDDLSTPQAFITTDMDHNQITAFHGGAMMRSYENHVRDVPGVTLGLVGPDGREGMIQNAEEFAAGGIPFIFDPGQALPLFNGPELREFIEQADYVVVNDYESNLLQTRTGWNEQDIVSRVQAYITTQGSAGALVHTPEKTYDIPPAHTRRVVDPTGCGDAFRAGLIYGIQHNYDWLTIGRMGNLMGALKVEHPGTQNQRFDFAEFNDQFKQYFGYAL

SEQ ID NO: 1115 - DNA, 969 bp, synthetic construct
  misc_feature 1..969: note = Variant of adenosine kinase
  source 1..969: mol_type = other DNA
atgcaccatcatcaccatcacgggggctccggcatgagtgcactgatttgcggttctttagcgtatgataccatcatggtgtttccggaccagttcaagaaccatattctgcccgatcgtgttcaccgcctcaatgtcagctttcttgtaccacgcatgcgtcgtgaatttggaggctgtgccggcaacattgcgtacaatctgcatctgttgggtggtgctccgatcgtaatggctacggtgggccaagatttcggtccgtatcgcgagcacttcgaaactctgggcattgacttatcccgcgtcaagatcatcgatgatctgagtacaccgcaggccttcattaccaccgacatggatcataaccagattacggcgtttcatggcggcgcaatgatgcgttcgtacgaaaatcacgttcgtgatgtgccgggtgttaccttgggcctcgtaggtcctgatggacgcgagggcatgatccaaaatgccgaagaatttgctgctggtggcattccgttcatttttgacccaggtcaggcactgccgctgttcaacggccccgaactgcgcgagtttatcgaacaggcggactatgtggtggtcaacgattacgaaagcaatcttcttcaaacgcgtactggctggaacgagctggacattgtttcacgcgtgcaggcgtatatcaccacgcaaggttcggctggagccctggtacatacaccggagaagacctacgatattccgccggctcacacccgtcgtgtcgttgatccaactggttgcggcgacgcgtttcgcgccggcctgatctatggtattcagcataattatgattggttgaccattggccgcatgggaaacttaatgggtgcgctgaaagtggaacaccctggcacccaaaatcagcgtttcgattttgccgaattcaacgaccagttcaaacaatattttggctacgcgctctaatga

SEQ ID NO: 1116 - protein, 321 aa, synthetic construct
  REGION 1..321: note = Variant of adenosine kinase
MHHHHHHGGSGMSALICGSLAYDTIMVFPDQFKNHILPDRVHRLNVSFLVPRMRREFGGCAGNIAYNLHLLGGAPIVMATVGQDFGPYREHFETLGIDLSRVKIIDDLSTPQAFITTDMDHNQITAFHGGAMMRSYENHVRDVPGVTLGLVGPDGREGMIQNAEEFAAGGIPFIFDPGQALPLFNGPELREFIEQADYVVVNDYESNLLQTRTGWNELDIVSRVQAYITTQGSAGALVHTPEKTYDIPPAHTRRVVDPTGCGDAFRAGLIYGIQHNYDWLTIGRMGNLMGALKVEHPGTQNQRFDFAEFNDQFKQYFGYAL

SEQ ID NO: 1117 - DNA, 969 bp, synthetic construct
  misc_feature 1..969: note = Variant of adenosine kinase
  source 1..969: mol_type = other DNA
atgcaccatcatcaccatcacgggggctccggcatgagtgcactgatttgcggttctttagcgtatgataccatcatggtgtttccggaccagttcaagaaccatattctgcccgatcgtgttcaccgcctcaatgtcagctttcttgtaccacgcatgcgtcgtgaatttggaggctgtgccggcaacattgcgtacaatctgcatctgttgggtggtgctccgatcgtaatggctacggtgggccaagatttcggtccgtatcgcgagcacttcgaaactctgggcattgacttatcccgcgtcaagatcatcgatgatctgagtacaccgcaggccttcattaccaccgacatggatcataaccagattacggcgtttcatggcggcgcaatgatgcgttcgtacgaaaatcacgttcgtgatgtgccgggtgttaccttgggcctcgtaggtcctgatggacgcgagggcatgatccaaaatgccgaagaatttgctgcttgtggcattccgttcatttttgacccaggtcaggcactgccgctgttcaacggccccgaactgcgcgagtttatcgaacaggcggactatgtggtggtcaacgattacgaaagcaatcttcttcaaacgcgtactggctggaacgagcaggacattgtttcacgcgtgcaggcgtatatcaccacgcaaggttcggctggagccctggtacatacaccggagaagacctacgatattccgccggctcacacccgtcgtgtcgttgatccaactggttgcggcgacgcgtttcgcgccggcctgatctatggtattcagcataattatgattggttgaccattggccgcatgggaaacttaatgggtgcgctgaaagtggaacaccctggcacccaaaatcagcgtttcgattttgccgaattcaacgaccagttcaaacaatattttggctacgcgctctaatga

SEQ ID NO: 1118 - protein, 321 aa, synthetic construct
  REGION 1..321: note = Variant of adenosine kinase
MHHHHHHGGSGMSALICGSLAYDTIMVFPDQFKNHILPDRVHRLNVSFLVPRMRREFGGCAGNIAYNLHLLGGAPIVMATVGQDFGPYREHFETLGIDLSRVKIIDDLSTPQAFITTDMDHNQITAFHGGAMMRSYENHVRDVPGVTLGLVGPDGREGMIQNAEEFAACGIPFIFDPGQALPLFNGPELREFIEQADYVVVNDYESNLLQTRTGWNEQDIVSRVQAYITTQGSAGALVHTPEKTYDIPPAHTRRVVDPTGCGDAFRAGLIYGIQHNYDWLTIGRMGNLMGALKVEHPGTQNQRFDFAEFNDQFKQYFGYAL

SEQ ID NO: 1119 - DNA, 969 bp, synthetic construct
  misc_feature 1..969: note = Variant of adenosine kinase
  source 1..969: mol_type = other DNA
atgcaccatcatcaccatcacgggggctccggcatgagtgcactgatttgcggttctttagcgtatgataccatcatggtgtttccggaccagttcaagaaccatattctgcccgatcgtgttcaccgcctcaatgtcagctttcttgtaccacgcatgcgtcgtgaatttggaggctgtgccggcaacattgcgtacaatctgcatctgttgggtggtgctccgatcgtaatggctacggtgggccaagatttcggtccgtatggtgagcacttcgaaactctgggcattgacttatcccgcgtcaagatcatcgatgatctgagtacaccgcaggccttcattaccaccgacatggatcataaccagattacggcgtttcatggcggcgcaatgatgcgttcgtacgaaaatcacgttcgtgatgtgccgggtgttaccttgggcctcgtaggtcctgatggacgcgagggcatgatccaaaatgccgaagaatttgctgctggtggcattccgttcatttttgacccaggtcaggcactgccgctgttcaacggccccgaactgcgcgagtttatcgaacaggcggactatgtggtggtcaacgattacgaaagcaatcttcttcaaacgcgtactggctggaacgagcaggacattgtttcacgcgtgcaggcgtatatcaccacgcaaggttcggctggagccctggtacatacaccggagaagacctacgatattccgccggctcacacccgtcgtgtcgttgatccaactggttgcggcgacgcgtttcgcgccggcctgatctatggtattcagcataattatgattggttgaccattggccgcatgggaaacttaatgggtgcgctgaaagtggaacaccctggcacccaaaatcagcgtttcgattttgccgaattcaacgaccagttcaaacaatattttggctacgcgctctaatga

SEQ ID NO: 1120 - protein, 321 aa, synthetic construct
  REGION 1..321: note = Variant of adenosine kinase
MHHHHHHGGSGMSALICGSLAYDTIMVFPDQFKNHILPDRVHRLNVSFLVPRMRREFGGCAGNIAYNLHLLGGAPIVMATVGQDFGPYGEHFETLGIDLSRVKIIDDLSTPQAFITTDMDHNQITAFHGGAMMRSYENHVRDVPGVTLGLVGPDGREGMIQNAEEFAAGGIPFIFDPGQALPLFNGPELREFIEQADYVVVNDYESNLLQTRTGWNEQDIVSRVQAYITTQGSAGALVHTPEKTYDIPPAHTRRVVDPTGCGDAFRAGLIYGIQHNYDWLTIGRMGNLMGALKVEHPGTQNQRFDFAEFNDQFKQYFGYAL

SEQ ID NO: 1121 - DNA, 969 bp, synthetic construct
  misc_feature 1..969: note = Variant of adenosine kinase
  source 1..969: mol_type = other DNA
atgcaccatcatcaccatcacgggggctccggcatgagtgcactgatttgcggttctttagcgtatgataccatcatggtgtttccggaccagttcaagaaccatattctgcccgatcgtgttcaccgcctcaatgtcagctttcttgtaccacgcatgcgtcgtgaatttggaggctgtgccggcaacattgcgtacaatctgcatctgttgggtggtgctccgatcgtaatggctacggtgggccaagatttcggtccgtatcgccggcacttcgaaactctgggcattgacttatcccgcgtcaagatcatcgatgatctgagtacaccgcaggccttcattaccaccgacatggatcataaccagattacggcgtttcatggcggcgcaatgatgcgttcgtacgaaaatcacgttcgtgatgtgccgggtgttaccttgggcctcgtaggtcctgatggacgcgagggcatgatccaaaatgccgaagaatttgctgctggtggcattccgttcatttttgacccaggtcaggcactgccgctgttcaacggccccgaactgcgcgagtttatcgaacaggcggactatgtggtggtcaacgattacgaaagcaatcttcttcaaacgcgtactggctggaacgagcaggacattgtttcacgcgtgcaggcgtatatcaccacgcaaggttcggctggagccctggtacatacaccggagaagacctacgatattccgccggctcacacccgtcgtgtcgttgatccaactggttgcggcgacgcgtttcgcgccggcctgatctatggtattcagcataattatgattggttgaccattggccgcatgggaaacttaatgggtgcgctgaaagtggaacaccctggcacccaaaatcagcgtttcgattttgccgaattcaacgaccagttcaaacaatattttggctacgcgctctaatga

SEQ ID NO: 1122 - protein, 321 aa, synthetic construct
  REGION 1..321: note = Variant of adenosine kinase
MHHHHHHGGSGMSALICGSLAYDTIMVFPDQFKNHILPDRVHRLNVSFLVPRMRREFGGCAGNIAYNLHLLGGAPIVMATVGQDFGPYRRHFETLGIDLSRVKIIDDLSTPQAFITTDMDHNQITAFHGGAMMRSYENHVRDVPGVTLGLVGPDGREGMIQNAEEFAAGGIPFIFDPGQALPLFNGPELREFIEQADYVVVNDYESNLLQTRTGWNEQDIVSRVQAYITTQGSAGALVHTPEKTYDIPPAHTRRVVDPTGCGDAFRAGLIYGIQHNYDWLTIGRMGNLMGALKVEHPGTQNQRFDFAEFNDQFKQYFGYAL

SEQ ID NO: 1123 - DNA, 969 bp, synthetic construct
  misc_feature 1..969: note = Variant of adenosine kinase
  source 1..969: mol_type = other DNA
atgcaccatcatcaccatcacgggggctccggcatgagtgcactgatttgcggttctttagcgtatgataccatcatggtgtttccggaccagttcaagaaccatattctgcccgatcgtgttcaccgcctcaatgtcagctttcttgtaccacgcatgcgtcgtgaatttggaggctgtgccggcaacattgcgtacaatctgcatctgttgggtgaggctccgatcgtaatggctacggtgggccaagatttcggtccgtatcgcgagcacttcgaaactctgggcattgacttatcccgcgtcaagatcatcgatgatctgagtacaccgcaggccttcattaccaccgacatggatcataaccagattacggcgtttcatggcggcgcaatgatgcgttcgtacgaaaatcacgttcgtgatgtgccgggtgttaccttgggcctcgtaggtcctgatggacgcgagggcatgatccaaaatgccgaagaatttgctgctggtggcattccgttcatttttgacccaggtcaggcactgccgctgttcaacggccccgaactgcgcgagtttatcgaacaggcggactatgtggtggtcaacgattacgaaagcaatcttcttcaaacgcgtactggctggaacgagcaggacattgtttcacgcgtgcaggcgtatatcaccacgcaaggttcggctggagccctggtacatacaccggagaagacctacgatattccgccggctcacacccgtcgtgtcgttgatccaactggttgcggcgacgcgtttcgcgccggcctgatctatggtattcagcataattatgattggttgaccattggccgcatgggaaacttaatgggtgcgctgaaagtggaacaccctggcacccaaaatcagcgtttcgattttgccgaattcaacgaccagttcaaacaatattttggctacgcgctctaatga

SEQ ID NO: 1124 - protein, 321 aa, synthetic construct
  REGION 1..321: note = Variant of adenosine kinase
MHHHHHHGGSGMSALICGSLAYDTIMVFPDQFKNHILPDRVHRLNVSFLVPRMRREFGGCAGNIAYNLHLLGEAPIVMATVGQDFGPYREHFETLGIDLSRVKIIDDLSTPQAFITTDMDHNQITAFHGGAMMRSYENHVRDVPGVTLGLVGPDGREGMIQNAEEFAAGGIPFIFDPGQALPLFNGPELREFIEQADYVVVNDYESNLLQTRTGWNEQDIVSRVQAYITTQGSAGALVHTPEKTYDIPPAHTRRVVDPTGCGDAFRAGLIYGIQHNYDWLTIGRMGNLMGALKVEHPGTQNQRFDFAEFNDQFKQYFGYAL

SEQ ID NO: 1125 - DNA, 969 bp, synthetic construct
  misc_feature 1..969: note = Variant of adenosine kinase
  source 1..969: mol_type = other DNA
atgcaccatcatcaccatcacgggggctccggcatgagtgcactgatttgcggttctttagcgtatgataccatcatggtgtttccggaccagttcaagaaccatattctgcccgatcgtgttcaccgcctcaatgtcagctttcttgtaccacgcatgcgtcgtgaatttggaggctgtgccggcaacattgcgtacaatctgcatctgttgggtggtgctccgatcgtaatggctacggtgggccaagatttcggtccgtatcgcgagcacttcgaaactctgggcattgacttatcccgcgtcaagatcatcgatgatctgagtacaccgcaggccttcattaccaccgacatggatcataaccagattacggcgtttcatggcggcgcaatgatgcgttcgtacgaaaatcacgttcgtgatgtgccgggtgttaccttgggcctcgtaggtcctgatggacgcgagggcatgatccaaaatgccgaagaatttactgctggtggcattccgttcatttttgacccaggtcaggcactgccgctgttcaacggccccgaactgcgcgagtttatcgaacaggcggactatgtggtggtcaacgattacgaaagcaatcttcttcaaacgcgtactggctggaacgagcaggacattgtttcacgcgtgcaggcgtatatcaccacgcaaggttcggctggagccctggtacatacaccggagaagacctacgatattccgccggctcacacccgtcgtgtcgttgatccaactggttgcggcgacgcgtttcgcgccggcctgatctatggtattcagcataattatgattggttgaccattggccgcatgggaaacttaatgggtgcgctgaaagtggaacaccctggcacccaaaatcagcgtttcgattttgccgaattcaacgaccagttcaaacaatattttggctacgcgctctaatga

SEQ ID NO: 1126 - protein, 321 aa, synthetic construct
  REGION 1..321: note = Variant of adenosine kinase
MHHHHHHGGSGMSALICGSLAYDTIMVFPDQFKNHILPDRVHRLNVSFLVPRMRREFGGCAGNIAYNLHLLGGAPIVMATVGQDFGPYREHFETLGIDLSRVKIIDDLSTPQAFITTDMDHNQITAFHGGAMMRSYENHVRDVPGVTLGLVGPDGREGMIQNAEEFTAGGIPFIFDPGQALPLFNGPELREFIEQADYVVVNDYESNLLQTRTGWNEQDIVSRVQAYITTQGSAGALVHTPEKTYDIPPAHTRRVVDPTGCGDAFRAGLIYGIQHNYDWLTIGRMGNLMGALKVEHPGTQNQRFDFAEFNDQFKQYFGYAL

SEQ ID NO: 1127 - DNA, 969 bp, synthetic construct
  misc_feature 1..969: note = Variant of adenosine kinase
  source 1..969: mol_type = other DNA
atgcaccatcatcaccatcacgggggctccggcatgagtgcactgatttgcggttctttagcgtatgataccatcatggtgtttccggaccagttcaagaaccatattctgcccgatcgtgttcaccgcctcaatgtcagctttcttgtaccacgcatgcgtcgtgaatttggaggctgtgccggcaacattgcgtacaatctgcatctgttgggtggtgctccgatcgtaatggctacggtgggccaagatttcggtccgtatcgcgagcacttcgaaactctgggcattgacttatcccgcgtcaagatcatcgatgatctgagtacaccgcaggccttcattaccaccgacatggatcataaccagattacggcgtttcatggcggcgcaatgatgcgttcgtacgaaaatcacgttcgtgatgtgccgggtgttaccttgggcctcgtaggtcctgatggacgcgagggcatgatccaaaatgccgaagaatttgctgctggtggcattccgttcatttttgacccaggtcaggcactgccgctgttcaacggccccgaactgcgcgagtttatcgaacaggcgcgttatgtggtggtcaacgattacgaaagcaatcttcttcaaacgcgtactggctggaacgagcaggacattgtttcacgcgtgcaggcgtatatcaccacgcaaggttcggctggagccctggtacatacaccggagaagacctacgatattccgccggctcacacccgtcgtgtcgttgatccaactggttgcggcgacgcgtttcgcgccggcctgatctatggtattcagcataattatgattggttgaccattggccgcatgggaaacttaatgggtgcgctgaaagtggaacaccctggcacccaaaatcagcgtttcgattttgccgaattcaacgaccagttcaaacaatattttggctacgcgctctaatga

SEQ ID NO: 1128 - protein, 321 aa, synthetic construct
  REGION 1..321: note = Variant of adenosine kinase
MHHHHHHGGSGMSALICGSLAYDTIMVFPDQFKNHILPDRVHRLNVSFLVPRMRREFGGCAGNIAYNLHLLGGAPIVMATVGQDFGPYREHFETLGIDLSRVKIIDDLSTPQAFITTDMDHNQITAFHGGAMMRSYENHVRDVPGVTLGLVGPDGREGMIQNAEEFAAGGIPFIFDPGQALPLFNGPELREFIEQARYVVVNDYESNLLQTRTGWNEQDIVSRVQAYITTQGSAGALVHTPEKTYDIPPAHTRRVVDPTGCGDAFRAGLIYGIQHNYDWLTIGRMGNLMGALKVEHPGTQNQRFDFAEFNDQFKQYFGYAL

SEQ ID NO: 1129 - DNA, 969 bp, synthetic construct
  misc_feature 1..969: note = Variant of adenosine kinase
  source 1..969: mol_type = other DNA
atgcaccatcatcaccatcacgggggctccggcatgagtgcactgatttgcggttctttagcgtatgataccatcatggtgtttccggaccagttcaagaaccatattctgcccgatcgtgttcaccgcctcaatgtcagctttcttgtaccacgcatgcgtcgtgaatttggaggctgtgccggcaacattgcgtacaatctgcatctgttgggtggtgctccgatcgtaatggctacggtgggccaagatttcggtccgtatcgcgagcacttcgaaactctgggcattgacttatcccgcgtcaagatcatcgatgatctgagtacaccgcaggccttcattaccaccgacatggatcataaccagattacggcgtttcatggcggcgcaatgatgcgttcgtacgaaaatcacgttcgtgatgtgccgggtgttaccttgggcctcgtaggtcctgatggacgcgagggcatgatccaaaatgccgaagaatttgctgctggtggcattccgttcatttttgacccaggtcaggcactgccgctgttcaacggccccgaactgcgcgagtttatcgaacaggcggactatgtggtggtcaacgattacgaaagcaatcttcttcaaacgcgtactggctggaacgagcaggacattgtttcacgcgtgcaggcgtatatcaccacgcaaggttcggctggagccctggtacatacaccggataagacctacgatattccgccggctcacacccgtcgtgtcgttgatccaactggttgcggcgacgcgtttcgcgccggcctgatctatggtattcagcataattatgattggttgaccattggccgcatgggaaacttaatgggtgcgctgaaagtggaacaccctggcacccaaaatcagcgtttcgattttgccgaattcaacgaccagttcaaacaatattttggctacgcgctctaatga

SEQ ID NO: 1130 - protein, 321 aa, synthetic construct
  REGION 1..321: note = Variant of adenosine kinase
MHHHHHHGGSGMSALICGSLAYDTIMVFPDQFKNHILPDRVHRLNVSFLVPRMRREFGGCAGNIAYNLHLLGGAPIVMATVGQDFGPYREHFETLGIDLSRVKIIDDLSTPQAFITTDMDHNQITAFHGGAMMRSYENHVRDVPGVTLGLVGPDGREGMIQNAEEFAAGGIPFIFDPGQALPLFNGPELREFIEQADYVVVNDYESNLLQTRTGWNEQDIVSRVQAYITTQGSAGALVHTPDKTYDIPPAHTRRVVDPTGCGDAFRAGLIYGIQHNYDWLTIGRMGNLMGALKVEHPGTQNQRFDFAEFNDQFKQYFGYAL

SEQ ID NO: 1131 - DNA, 969 bp, synthetic construct
  misc_feature 1..969: note = Variant of adenosine kinase
  source 1..969: mol_type = other DNA
atgcaccatcatcaccatcacgggggctccggcatgagtgcactgatttgcggttctttagcgtatgataccatcatggtgtttccggaccagttcaagaaccatattctgcccgatcgtgttcaccgcctcaatgtcagctttcttgtaagtcgcatgcgtcgtgaatttggaggctgtgccggcaacattgcgtacaatctgcatctgttgggtggtgctccgatcgtaatggctacggtgggccaagatttcggtccgtatcgcgagcacttcgaaactctgggcattgacttatcccgcgtcaagatcatcgatgatctgagtacaccgcaggccttcattaccaccgacatggatcataaccagattacggcgtttcatggcggcgcaatgatgcgttcgtacgaaaatcacgttcgtgatgtgccgggtgttaccttgggcctcgtaggtcctgatggacgcgagggcatgatccaaaatgccgaagaatttgctgctggtggcattccgttcatttttgacccaggtcaggcactgccgctgttcaacggccccgaactgcgcgagtttatcgaacaggcggactatgtggtggtcaacgattacgaaagcaatcttcttcaaacgcgtactggctggaacgagcaggacattgtttcacgcgtgcaggcgtatatcaccacgcaaggttcggctggagccctggtacatacaccggagaagacctacgatattccgccggctcacacccgtcgtgtcgttgatccaactggttgcggcgacgcgtttcgcgccggcctgatctatggtattcagcataattatgattggttgaccattggccgcatgggaaacttaatgggtgcgctgaaagtggaacaccctggcacccaaaatcagcgtttcgattttgccgaattcaacgaccagttcaaacaatattttggctacgcgctctaatga

SEQ ID NO: 1132 - protein, 321 aa, synthetic construct
  REGION 1..321: note = Variant of adenosine kinase
MHHHHHHGGSGMSALICGSLAYDTIMVFPDQFKNHILPDRVHRLNVSFLVSRMRREFGGCAGNIAYNLHLLGGAPIVMATVGQDFGPYREHFETLGIDLSRVKIIDDLSTPQAFITTDMDHNQITAFHGGAMMRSYENHVRDVPGVTLGLVGPDGREGMIQNAEEFAAGGIPFIFDPGQALPLFNGPELREFIEQADYVVVNDYESNLLQTRTGWNEQDIVSRVQAYITTQGSAGALVHTPEKTYDIPPAHTRRVVDPTGCGDAFRAGLIYGIQHNYDWLTIGRMGNLMGALKVEHPGTQNQRFDFAEFNDQFKQYFGYAL

SEQ ID NO: 1133 - DNA, 969 bp, synthetic construct
  misc_feature 1..969: note = Variant of adenosine kinase
  source 1..969: mol_type = other DNA
atgcaccatcatcaccatcacgggggctccggcatgagtgcactgatttgcggttctttagcgtatgataccatcatggtgtttccggaccagttcaagaaccatattctgcccgatcgtgttcaccgcctcaatgtcagctttcttgtaccacgcatgcgtcgtgaatttggaggctgtgccggcaacattgcgtacaatctgcatctgttgggtggtgctccgatcgtaatggctacggtgggccaagatttcggtccgtatcgcgagcacttcgaaactctgggcattgacttatcccgcgtccttatcatcgatgatctgagtacaccgcaggccttcattaccaccgacatggatcataaccagattacggcgtttcatggcggcgcaatgatgcgttcgtacgaaaatcacgttcgtgatgtgccgggtgttaccttgggcctcgtaggtcctgatggacgcgagggcatgatccaaaatgccgaagaatttgctgctggtggcattccgttcatttttgacccaggtcaggcactgccgctgttcaacggccccgaactgcgcgagtttatcgaacaggcggactatgtggtggtcaacgattacgaaagcaatcttcttcaaacgcgtactggctggaacgagcaggacattgtttcacgcgtgcaggcgtatatcaccacgcaaggttcggctggagccctggtacatacaccggagaagacctacgatattccgccggctcacacccgtcgtgtcgttgatccaactggttgcggcgacgcgtttcgcgccggcctgatctatggtattcagcataattatgattggttgaccattggccgcatgggaaacttaatgggtgcgctgaaagtggaacaccctggcacccaaaatcagcgtttcgattttgccgaattcaacgaccagttcaaacaatattttggctacgcgctctaatga

SEQ ID NO: 1134 - protein, 321 aa, synthetic construct
  REGION 1..321: note = Variant of adenosine kinase
MHHHHHHGGSGMSALICGSLAYDTIMVFPDQFKNHILPDRVHRLNVSFLVPRMRREFGGCAGNIAYNLHLLGGAPIVMATVGQDFGPYREHFETLGIDLSRVLIIDDLSTPQAFITTDMDHNQITAFHGGAMMRSYENHVRDVPGVTLGLVGPDGREGMIQNAEEFAAGGIPFIFDPGQALPLFNGPELREFIEQADYVVVNDYESNLLQTRTGWNEQDIVSRVQAYITTQGSAGALVHTPEKTYDIPPAHTRRVVDPTGCGDAFRAGLIYGIQHNYDWLTIGRMGNLMGALKVEHPGTQNQRFDFAEFNDQFKQYFGYAL

SEQ ID NO: 1135 - DNA, 969 bp, synthetic construct
  misc_feature 1..969: note = Variant of adenosine kinase
  source 1..969: mol_type = other DNA
atgcaccatcatcaccatcacgggggctccggcatgagtgcactgatttgcggttctttagcgtatgataccatcatggtgtttccggaccagttcaagaaccatattctgcccgatcgtgttcaccgcctcaatgtcagctttcttgtaccacgcatgcgtcgtgaatttggaggctgtgccggcaacattgcgtacaatctgcatctgttgggtggtgctccgatcgtaatggctacggtgggccaagatttcggtccgtatcgcgagcacttcgaaactctgggcattgacttatcccgcgtcaagatcatcgatgatctgagtacaccgcaggccttcattaccaccgacatggatcataaccagattacggcgtttcatggcggcgcaatgatgcgttcgtacgaaaatcacgttcgtgatgtgccgggtgttaccttgggcctcgtaggtcctgatggacgcgagggcatgatccaaaatgccgaagaatttgctgctggtggcattccgttcatttttgacccaggtcaggcactgccgctgttcaacggccccgaactgcgcaggtttatcgaacaggcggactatgtggtggtcaacgattacgaaagcaatcttcttcaaacgcgtactggctggaacgagcaggacattgtttcacgcgtgcaggcgtatatcaccacgcaaggttcggctggagccctggtacatacaccggagaagacctacgatattccgccggctcacacccgtcgtgtcgttgatccaactggttgcggcgacgcgtttcgcgccggcctgatctatggtattcagcataattatgattggttgaccattggccgcatgggaaacttaatgggtgcgctgaaagtggaacaccctggcacccaaaatcagcgtttcgattttgccgaattcaacgaccagttcaaacaatattttggctacgcgctctaatga

SEQ ID NO: 1136 - protein, 321 aa, synthetic construct
  REGION 1..321: note = Variant of adenosine kinase
MHHHHHHGGSGMSALICGSLAYDTIMVFPDQFKNHILPDRVHRLNVSFLVPRMRREFGGCAGNIAYNLHLLGGAPIVMATVGQDFGPYREHFETLGIDLSRVKIIDDLSTPQAFITTDMDHNQITAFHGGAMMRSYENHVRDVPGVTLGLVGPDGREGMIQNAEEFAAGGIPFIFDPGQALPLFNGPELRRFIEQADYVVVNDYESNLLQTRTGWNEQDIVSRVQAYITTQGSAGALVHTPEKTYDIPPAHTRRVVDPTGCGDAFRAGLIYGIQHNYDWLTIGRMGNLMGALKVEHPGTQNQRFDFAEFNDQFKQYFGYAL

SEQ ID NO: 1137 - DNA, 969 bp, synthetic construct
  misc_feature 1..969: note = Variant of adenosine kinase
  source 1..969: mol_type = other DNA
atgcaccatcatcaccatcacgggggctccggcatgagtgcactgatttgcggttctttagcgtatgataccatcatggtgtttccggaccagttcaagaaccatattctgcccgatcgtgttcaccgcctcaatgtcagctttcttgtaccacgcatgcgtcgtgaatttggaggctgtgccggcaacattgcgtacaatctgcatctgttgggtggtgctccgatcgtaatggctacggtgggccaagatttcggtccgtatcgcgagcacttcgaaactctgggcattgacttatcctttgtcaagatcatcgatgatctgagtacaccgcaggccttcattaccaccgacatggatcataaccagattacggcgtttcatggcggcgcaatgatgcgttcgtacgaaaatcacgttcgtgatgtgccgggtgttaccttgggcctcgtaggtcctgatggacgcgagggcatgatccaaaatgccgaagaatttgctgctggtggcattccgttcatttttgacccaggtcaggcactgccgctgttcaacggccccgaactgcgcgagtttatcgaacaggcggactatgtggtggtcaacgattacgaaagcaatcttcttcaaacgcgtactggctggaacgagcaggacattgtttcacgcgtgcaggcgtatatcaccacgcaaggttcggctggagccctggtacatacaccggagaagacctacgatattccgccggctcacacccgtcgtgtcgttgatccaactggttgcggcgacgcgtttcgcgccggcctgatctatggtattcagcataattatgattggttgaccattggccgcatgggaaacttaatgggtgcgctgaaagtggaacaccctggcacccaaaatcagcgtttcgattttgccgaattcaacgaccagttcaaacaatattttggctacgcgctctaatga

SEQ ID NO: 1138 - protein, 321 aa, synthetic construct
  REGION 1..321: note = Variant of adenosine kinase
MHHHHHHGGSGMSALICGSLAYDTIMVFPDQFKNHILPDRVHRLNVSFLVPRMRREFGGCAGNIAYNLHLLGGAPIVMATVGQDFGPYREHFETLGIDLSFVKIIDDLSTPQAFITTDMDHNQITAFHGGAMMRSYENHVRDVPGVTLGLVGPDGREGMIQNAEEFAAGGIPFIFDPGQALPLFNGPELREFIEQADYVVVNDYESNLLQTRTGWNEQDIVSRVQAYITTQGSAGALVHTPEKTYDIPPAHTRRVVDPTGCGDAFRAGLIYGIQHNYDWLTIGRMGNLMGALKVEHPGTQNQRFDFAEFNDQFKQYFGYAL

SEQ ID NO: 1139 - DNA, 969 bp, synthetic construct
  misc_feature 1..969: note = Variant of adenosine kinase
  source 1..969: mol_type = other DNA
atgcaccatcatcaccatcacgggggctccggcatgagtgcactgatttgcggttctttagcgtatgataccatcatggtgtttccggaccagttcaagaaccatattctgcccgatcgtgttcaccgcctcaatgtcagctttcttgtaccacgcatgcgtcgtgaatttggaggctgtgccggcaacattgcgtacaatctgcatctgttgggtggtgctccgatcgtaatggctacggtgggcacggatttcggtccgtatcgcgagcacttcgaaactctgggcattgacttatcccgcgtcaagatcatcgatgatctgagtacaccgcaggccttcattaccaccgacatggatcataaccagattacggcgtttcatggcggcgcaatgatgcgttcgtacgaaaatcacgttcgtgatgtgccgggtgttaccttgggcctcgtaggtcctgatggacgcgagggcatgatccaaaatgccgaagaatttgctgctggtggcattccgttcatttttgacccaggtcaggcactgccgctgttcaacggccccgaactgcgcgagtttatcgaacaggcggactatgtggtggtcaacgattacgaaagcaatcttcttcaaacgcgtactggctggaacgagcaggacattgtttcacgcgtgcaggcgtatatcaccacgcaaggttcggctggagccctggtacatacaccggagaagacctacgatattccgccggctcacacccgtcgtgtcgttgatccaactggttgcggcgacgcgtttcgcgccggcctgatctatggtattcagcataattatgattggttgaccattggccgcatgggaaacttaatgggtgcgctgaaagtggaacaccctggcacccaaaatcagcgtttcgattttgccgaattcaacgaccagttcaaacaatattttggctacgcgctctaatga

SEQ ID NO: 1140 - protein, 321 aa, synthetic construct
  REGION 1..321: note = Variant of adenosine kinase
MHHHHHHGGSGMSALICGSLAYDTIMVFPDQFKNHILPDRVHRLNVSFLVPRMRREFGGCAGNIAYNLHLLGGAPIVMATVGTDFGPYREHFETLGIDLSRVKIIDDLSTPQAFITTDMDHNQITAFHGGAMMRSYENHVRDVPGVTLGLVGPDGREGMIQNAEEFAAGGIPFIFDPGQALPLFNGPELREFIEQADYVVVNDYESNLLQTRTGWNEQDIVSRVQAYITTQGSAGALVHTPEKTYDIPPAHTRRVVDPTGCGDAFRAGLIYGIQHNYDWLTIGRMGNLMGALKVEHPGTQNQRFDFAEFNDQFKQYFGYAL

SEQ ID NO: 1141 - DNA, 969 bp, synthetic construct
  misc_feature 1..969: note = Variant of adenosine kinase
  source 1..969: mol_type = other DNA
atgcaccatcatcaccatcacgggggctccggcatgagtgcactgatttgcggttctttagcgtatgataccatcatggtgtttccggaccagttcaagaaccatattctgcccgatcgtgttcaccgcctcaatgtcagctttcttgtaccatttatgcgtcgtgaatttggaggctgtgccggcaacattgcgtacaatctgcatctgttgggtggtgctccgatcgtaatggctacggtgggccaagatttcggtccgtatcgcgagcacttcgaaactctgggcattgacttatcccgcgtcaagatcatcgatgatctgagtacaccgcaggccttcattaccaccgacatggatcataaccagattacggcgtttcatggcggcgcaatgatgcgttcgtacgaaaatcacgttcgtgatgtgccgggtgttaccttgggcctcgtaggtcctgatggacgcgagggcatgatccaaaatgccgaagaatttgctgctggtggcattccgttcatttttgacccaggtcaggcactgccgctgttcaacggccccgaactgcgcgagtttatcgaacaggcggactatgtggtggtcaacgattacgaaagcaatcttcttcaaacgcgtactggctggaacgagcaggacattgtttcacgcgtgcaggcgtatatcaccacgcaaggttcggctggagccctggtacatacaccggagaagacctacgatattccgccggctcacacccgtcgtgtcgttgatccaactggttgcggcgacgcgtttcgcgccggcctgatctatggtattcagcataattatgattggttgaccattggccgcatgggaaacttaatgggtgcgctgaaagtggaacaccctggcacccaaaatcagcgtttcgattttgccgaattcaacgaccagttcaaacaatattttggctacgcgctctaatga

SEQ ID NO: 1142 - protein, 321 aa, synthetic construct
  REGION 1..321: note = Variant of adenosine kinase
MHHHHHHGGSGMSALICGSLAYDTIMVFPDQFKNHILPDRVHRLNVSFLVPFMRREFGGCAGNIAYNLHLLGGAPIVMATVGQDFGPYREHFETLGIDLSRVKIIDDLSTPQAFITTDMDHNQITAFHGGAMMRSYENHVRDVPGVTLGLVGPDGREGMIQNAEEFAAGGIPFIFDPGQALPLFNGPELREFIEQADYVVVNDYESNLLQTRTGWNEQDIVSRVQAYITTQGSAGALVHTPEKTYDIPPAHTRRVVDPTGCGDAFRAGLIYGIQHNYDWLTIGRMGNLMGALKVEHPGTQNQRFDFAEFNDQFKQYFGYAL

SEQ ID NO: 1143 - DNA, 969 bp, synthetic construct
  misc_feature 1..969: note = Variant of adenosine kinase
  source 1..969: mol_type = other DNA
atgcaccatcatcaccatcacgggggctccggcatgagtgcactgatttgcggttctttagcgtatgataccatcatggtgtttccggaccagttcaagaaccatattctgcccgatcgtgttcaccgcctcaatgtcagctttcttgtaccacgcatgcgtcgtgaatttggaggctgtgccggcaacattgcgtacaatctgcatctgttgggtggtgctccgatcgtaatggctacggtgggccaagatttcggtccgtatcgcgagcacttcgaaactctgggcattgacttatcccgcgtcaagatcatcgatgatctgagtacaccgcaggccttcattaccaccgacatggatcataaccagattacggcgtttcatggcggcgcaatgatgcgttcgtacgaaaatcacgttcgtgatgtgccgggtgttaccttgggcctcgtaggtcctgatggacgcgagggcatgatccaaaatgccggtgaatttgctgctggtggcattccgttcatttttgacccaggtcaggcactgccgctgttcaacggccccgaactgcgcgagtttatcgaacaggcggactatgtggtggtcaacgattacgaaagcaatcttcttcaaacgcgtactggctggaacgagcaggacattgtttcacgcgtgcaggcgtatatcaccacgcaaggttcggctggagccctggtacatacaccggagaagacctacgatattccgccggctcacacccgtcgtgtcgttgatccaactggttgcggcgacgcgtttcgcgccggcctgatctatggtattcagcataattatgattggttgaccattggccgcatgggaaacttaatgggtgcgctgaaagtggaacaccctggcacccaaaatcagcgtttcgattttgccgaattcaacgaccagttcaaacaatattttggctacgcgctctaatga

SEQ ID NO: 1144 - protein, 321 aa, synthetic construct
  REGION 1..321: note = Variant of adenosine kinase
MHHHHHHGGSGMSALICGSLAYDTIMVFPDQFKNHILPDRVHRLNVSFLVPRMRREFGGCAGNIAYNLHLLGGAPIVMATVGQDFGPYREHFETLGIDLSRVKIIDDLSTPQAFITTDMDHNQITAFHGGAMMRSYENHVRDVPGVTLGLVGPDGREGMIQNAGEFAAGGIPFIFDPGQALPLFNGPELREFIEQADYVVVNDYESNLLQTRTGWNEQDIVSRVQAYITTQGSAGALVHTPEKTYDIPPAHTRRVVDPTGCGDAFRAGLIYGIQHNYDWLTIGRMGNLMGALKVEHPGTQNQRFDFAEFNDQFKQYFGYAL

SEQ ID NO: 1145 - DNA, 969 bp, synthetic construct
  misc_feature 1..969: note = Variant of adenosine kinase
  source 1..969: mol_type = other DNA
atgcaccatcatcaccatcacgggggctccggcatgagtgcactgatttgcggttctttagcgtatgataccatcatggtgtttccggaccagttcaagaaccatattctgcccgatcgtgttcaccgcctcaatgtcagctttcttgtaccacgcatgcgtcgtgaatttggaggctgtgccggcaacattgcgtacaatctgcatctgttgggtggtgctccgatcgtaatggctacggtgggccaagatttcggtccgtatcgcgagcacttcgaaactctgggcattgacttatcccgcgtcaagatcatcgatgatctgagtacaccgcaggccttcattaccaccgacatggatcataaccagattacggcgtttcatggcggcgcaatgatgcgttcgtacgaaaatcacgttcgtgatgtgccgggtgttaccttgggcctcgtaggtcctgatggacgcgagggcatgatccaaaatgccgaagaatttgctgctggtggcattccgttcatttttgacccaggtcaggcactgccgctgttcaacggccccgaactgcgcgagtttatcgaaatggcggactatgtggtggtcaacgattacgaaagcaatcttcttcaaacgcgtactggctggaacgagcaggacattgtttcacgcgtgcaggcgtatatcaccacgcaaggttcggctggagccctggtacatacaccggagaagacctacgatattccgccggctcacacccgtcgtgtcgttgatccaactggttgcggcgacgcgtttcgcgccggcctgatctatggtattcagcataattatgattggttgaccattggccgcatgggaaacttaatgggtgcgctgaaagtggaacaccctggcacccaaaatcagcgtttcgattttgccgaattcaacgaccagttcaaacaatattttggctacgcgctctaatga

SEQ ID NO: 1146 - protein, 321 aa, synthetic construct
  REGION 1..321: note = Variant of adenosine kinase
MHHHHHHGGSGMSALICGSLAYDTIMVFPDQFKNHILPDRVHRLNVSFLVPRMRREFGGCAGNIAYNLHLLGGAPIVMATVGQDFGPYREHFETLGIDLSRVKIIDDLSTPQAFITTDMDHNQITAFHGGAMMRSYENHVRDVPGVTLGLVGPDGREGMIQNAEEFAAGGIPFIFDPGQALPLFNGPELREFIEMADYVVVNDYESNLLQTRTGWNEQDIVSRVQAYITTQGSAGALVHTPEKTYDIPPAHTRRVVDPTGCGDAFRAGLIYGIQHNYDWLTIGRMGNLMGALKVEHPGTQNQRFDFAEFNDQFKQYFGYAL

SEQ ID NO: 1147 - DNA, 969 bp, synthetic construct
  misc_feature 1..969: note = Variant of adenosine kinase
  source 1..969: mol_type = other DNA
atgcaccatcatcaccatcacgggggctccggcatgagtgcactgatttgcggttctttagcgtatgataccatcatggtgtttccggaccagttcaagaaccatattctgcccgatcgtgttcacaagctcaatgtcagctttcttgtaccacgcatgcgtcgtgaatttggaggctgtgccggcaacattgcgtacaatctgcatctgttgggtggtgctccgatcgtaatggctacggtgggccaagatttcggtccgtatcgcgagcacttcgaaactctgggcattgacttatcccgcgtcaagatcatcgatgatctgagtacaccgcaggccttcattaccaccgacatggatcataaccagattacggcgtttcatggcggcgcaatgatgcgttcgtacgaaaatcacgttcgtgatgtgccgggtgttaccttgggcctcgtaggtcctgatggacgcgagggcatgatccaaaatgccgaagaatttgctgctggtggcattccgttcatttttgacccaggtcaggcactgccgctgttcaacggccccgaactgcgcgagtttatcgaacaggcggactatgtggtggtcaacgattacgaaagcaatcttcttcaaacgcgtactggctggaacgagcaggacattgtttcacgcgtgcaggcgtatatcaccacgcaaggttcggctggagccctggtacatacaccggagaagacctacgatattccgccggctcacacccgtcgtgtcgttgatccaactggttgcggcgacgcgtttcgcgccggcctgatctatggtattcagcataattatgattggttgaccattggccgcatgggaaacttaatgggtgcgctgaaagtggaacaccctggcacccaaaatcagcgtttcgattttgccgaattcaacgaccagttcaaacaatattttggctacgcgctctaatga

SEQ ID NO: 1148 - protein, 321 aa, synthetic construct
  REGION 1..321: note = Variant of adenosine kinase
MHHHHHHGGSGMSALICGSLAYDTIMVFPDQFKNHILPDRVHKLNVSFLVPRMRREFGGCAGNIAYNLHLLGGAPIVMATVGQDFGPYREHFETLGIDLSRVKIIDDLSTPQAFITTDMDHNQITAFHGGAMMRSYENHVRDVPGVTLGLVGPDGREGMIQNAEEFAAGGIPFIFDPGQALPLFNGPELREFIEQADYVVVNDYESNLLQTRTGWNEQDIVSRVQAYITTQGSAGALVHTPEKTYDIPPAHTRRVVDPTGCGDAFRAGLIYGIQHNYDWLTIGRMGNLMGALKVEHPGTQNQRFDFAEFNDQFKQYFGYAL

SEQ ID NO: 1149 - DNA, 969 bp, synthetic construct
  misc_feature 1..969: note = Variant of adenosine kinase
  source 1..969: mol_type = other DNA
atgcaccatcatcaccatcacgggggctccggcatgagtgcactgatttgcggttctttagcgtatgataccatcatggtgtttccggaccagttcaagaaccatattctgcccgatcgtgttcaccgcctcaatgtcagctttcttgtaccacgcatgcgtcgtgaatttggaggctgtgccggcaacattgcgtacaatctgcatctgttgggtggtgctccgatcgtaatggctacggtgggccaagatttcggtccgtatcgcgagcacttcgaaactctgggcattgacttatcccgcgtcaagatcatcgatgatctgagtacaccgcaggccttcattaccaccgacatggatcataaccagattacggcgtttcatggcggcgcaatgatgcgttcgtacgaaaatcacgttcgtgatgtgccgggtgtttctttgggcctcgtaggtcctgatggacgcgagggcatgatccaaaatgccgaagaatttgctgctggtggcattccgttcatttttgacccaggtcaggcactgccgctgttcaacggccccgaactgcgcgagtttatcgaacaggcggactatgtggtggtcaacgattacgaaagcaatcttcttcaaacgcgtactggctggaacgagcaggacattgtttcacgcgtgcaggcgtatatcaccacgcaaggttcggctggagccctggtacatacaccggagaagacctacgatattccgccggctcacacccgtcgtgtcgttgatccaactggttgcggcgacgcgtttcgcgccggcctgatctatggtattcagcataattatgattggttgaccattggccgcatgggaaacttaatgggtgcgctgaaagtggaacaccctggcacccaaaatcagcgtttcgattttgccgaattcaacgaccagttcaaacaatattttggctacgcgctctaatga

SEQ ID NO: 1150 - protein, 321 aa, synthetic construct
  REGION 1..321: note = Variant of adenosine kinase
MHHHHHHGGSGMSALICGSLAYDTIMVFPDQFKNHILPDRVHRLNVSFLVPRMRREFGGCAGNIAYNLHLLGGAPIVMATVGQDFGPYREHFETLGIDLSRVKIIDDLSTPQAFITTDMDHNQITAFHGGAMMRSYENHVRDVPGVSLGLVGPDGREGMIQNAEEFAAGGIPFIFDPGQALPLFNGPELREFIEQADYVVVNDYESNLLQTRTGWNEQDIVSRVQAYITTQGSAGALVHTPEKTYDIPPAHTRRVVDPTGCGDAFRAGLIYGIQHNYDWLTIGRMGNLMGALKVEHPGTQNQRFDFAEFNDQFKQYFGYAL

SEQ ID NO: 1151 - DNA, 969 bp, synthetic construct
  misc_feature 1..969: note = Variant of adenosine kinase
  source 1..969: mol_type = other DNA
atgcaccatcatcaccatcacgggggctccggcatgagtgcactgatttgcggttctttagcgtatgataccatcatggtgtttccggaccagttcaagaaccatattctgcccgatcgtgttcaccgcctcaatgtcagctttcttgtaccacgcatgcgtcgtgaatttggaggctgtgccggcaacattgcgtacaatctgcatctgttgggtggtgctccgatcgtaatggctacggtgggccaagatttcggtccgtatcgcgagcacttcgaaactctgggcattgacttatcccgcgtcaagatcatcgatgatctgagtacaccgcaggccttcattaccaccgacatggatcataaccagattacggcgtttcatggcggcgcaatgatgcgttcgtacgaaaatcacgttcgtgatgtgccgggtgttaccttgggcctcgtaggtcctgatggacgcgagggcatgatccaaaatgccgaagaatttgctgctggtggcattccgttcatttttgacccaggtcaggcactgccgctgttcaacggccaggaactgcgcgagtttatcgaacaggcggactatgtggtggtcaacgattacgaaagcaatcttcttcaaacgcgtactggctggaacgagcaggacattgtttcacgcgtgcaggcgtatatcaccacgcaaggttcggctggagccctggtacatacaccggagaagacctacgatattccgccggctcacacccgtcgtgtcgttgatccaactggttgcggcgacgcgtttcgcgccggcctgatctatggtattcagcataattatgattggttgaccattggccgcatgggaaacttaatgggtgcgctgaaagtggaacaccctggcacccaaaatcagcgtttcgattttgccgaattcaacgaccagttcaaacaatattttggctacgcgctctaatga

SEQ ID NO: 1152 - protein, 321 aa, synthetic construct
  REGION 1..321: note = Variant of adenosine kinase
MHHHHHHGGSGMSALICGSLAYDTIMVFPDQFKNHILPDRVHRLNVSFLVPRMRREFGGCAGNIAYNLHLLGGAPIVMATVGQDFGPYREHFETLGIDLSRVKIIDDLSTPQAFITTDMDHNQITAFHGGAMMRSYENHVRDVPGVTLGLVGPDGREGMIQNAEEFAAGGIPFIFDPGQALPLFNGQELREFIEQADYVVVNDYESNLLQTRTGWNEQDIVSRVQAYITTQGSAGALVHTPEKTYDIPPAHTRRVVDPTGCGDAFRAGLIYGIQHNYDWLTIGRMGNLMGALKVEHPGTQNQRFDFAEFNDQFKQYFGYAL

SEQ ID NO: 1153 - DNA, 969 bp, synthetic construct
  misc_feature 1..969: note = Variant of adenosine kinase
  source 1..969: mol_type = other DNA
atgcaccatcatcaccatcacgggggctccggcatgagtgcactgatttgcggttctttagcgtatgataccatcatggtgtttccggaccagttcaagaaccatattctgcccgatcgtgttcaccgcctcaatgtcagctttcttgtaccacgcatgcgtcgtgaatttggaggctgtgccggcaacattgcgtacaatctgcatctgttgggtggtgctccgatcgtaatggctacggtgggccaagatttcggtccgtatcgcgagcacttcgaaactctgggcattgacttatcccgcgtcaagatcatcgatgatctgagtacaccgcaggccttcattaccaccgacatggatcataaccagattacggcgtttcatggcggcgcaatgatgcgttcgtacgaaaatcacgttcgtgatgtgccgggtgttaccttgggcctcgtaggtcctgatggacgcgagggcatgatccaaaatgccgaagaatttgctgctggtggcattccgttcatttttgacccaggtcaggcactgccgctgttcaacggccccgaactgcgcgagtttatcgaacaggcggactatgtggtggtcaacgattacgaaagcaatcttcttcaaacgcgtactggctggaacgagcaggacattgtttcacgcgtgcaggcgtatatcaccacgcaaggttcggctggagccctggtacatacaccggagaagacctacgatattccgccggctcacacccgtcgtgtcgttgatccaactggttgcggcgacgcgtttcgcgccggcctgatctatggtattcagcataattatgattggttgaccattggccgcatgggaaacttaatgggtgcgctgaaagtggaacaccctggcacccaaaatcagcgtttcgattttgccgaattcaacatgcagttcaaacaatattttggctacgcgctctaatga

SEQ ID NO: 1154 - protein, 321 aa, synthetic construct
  REGION 1..321: note = Variant of adenosine kinase
MHHHHHHGGSGMSALICGSLAYDTIMVFPDQFKNHILPDRVHRLNVSFLVPRMRREFGGCAGNIAYNLHLLGGAPIVMATVGQDFGPYREHFETLGIDLSRVKIIDDLSTPQAFITTDMDHNQITAFHGGAMMRSYENHVRDVPGVTLGLVGPDGREGMIQNAEEFAAGGIPFIFDPGQALPLFNGPELREFIEQADYVVVNDYESNLLQTRTGWNEQDIVSRVQAYITTQGSAGALVHTPEKTYDIPPAHTRRVVDPTGCGDAFRAGLIYGIQHNYDWLTIGRMGNLMGALKVEHPGTQNQRFDFAEFNMQFKQYFGYAL

SEQ ID NO: 1155 - DNA, 969 bp, synthetic construct
  misc_feature 1..969: note = Variant of adenosine kinase
  source 1..969: mol_type = other DNA
atgcaccatcatcaccatcacgggggctccggcatgagtgcactgatttgcggttctttagcgtatgataccatcatggtgtttccggaccagttcaagaaccatattctgcccgattgggttcaccgcctcaatgtcagctttcttgtaccacgcatgcgtcgtgaatttggaggctgtgccggcaacattgcgtacaatctgcatctgttgggtggtgctccgatcgtaatggctacggtgggccaagatttcggtccgtatcgcgagcacttcgaaactctgggcattgacttatcccgcgtcaagatcatcgatgatctgagtacaccgcaggccttcattaccaccgacatggatcataaccagattacggcgtttcatggcggcgcaatgatgcgttcgtacgaaaatcacgttcgtgatgtgccgggtgttaccttgggcctcgtaggtcctgatggacgcgagggcatgatccaaaatgccgaagaatttgctgctggtggcattccgttcatttttgacccaggtcaggcactgccgctgttcaacggccccgaactgcgcgagtttatcgaacaggcggactatgtggtggtcaacgattacgaaagcaatcttcttcaaacgcgtactggctggaacgagcaggacattgtttcacgcgtgcaggcgtatatcaccacgcaaggttcggctggagccctggtacatacaccggagaagacctacgatattccgccggctcacacccgtcgtgtcgttgatccaactggttgcggcgacgcgtttcgcgccggcctgatctatggtattcagcataattatgattggttgaccattggccgcatgggaaacttaatgggtgcgctgaaagtggaacaccctggcacccaaaatcagcgtttcgattttgccgaattcaacgaccagttcaaacaatattttggctacgcgctctaatga

SEQ ID NO: 1156 - protein, 321 aa, synthetic construct
  REGION 1..321: note = Variant of adenosine kinase
MHHHHHHGGSGMSALICGSLAYDTIMVFPDQFKNHILPDWVHRLNVSFLVPRMRREFGGCAGNIAYNLHLLGGAPIVMATVGQDFGPYREHFETLGIDLSRVKIIDDLSTPQAFITTDMDHNQITAFHGGAMMRSYENHVRDVPGVTLGLVGPDGREGMIQNAEEFAAGGIPFIFDPGQALPLFNGPELREFIEQADYVVVNDYESNLLQTRTGWNEQDIVSRVQAYITTQGSAGALVHTPEKTYDIPPAHTRRVVDPTGCGDAFRAGLIYGIQHNYDWLTIGRMGNLMGALKVEHPGTQNQRFDFAEFNDQFKQYFGYAL

SEQ ID NO: 1157 - DNA, 969 bp, synthetic construct
  misc_feature 1..969: note = Variant of adenosine kinase
  source 1..969: mol_type = other DNA
atgcaccatcatcaccatcacgggggctccggcatgagtgcactgatttgcggttctttagcgtatgataccatcatggtgtttccggaccagttcaagaaccatattctgcccgatcgtgttcaccgcctcaatgtcagctttcttgtaccacgcatgcgtcgtgaatttggaggctgtgccggcaacattgcgtacaatctgcatctgttgggtggtgctccgatcgtaatggctacggtgggccaagatttcggtccgtatcgcgagcacttcgaaactctgggcattgacttatcccgcgtcaagatcatcgatgatctgagtacaccgcaggccttcattaccaccgacatggatcataaccagattacggcgtttcatggcggcgcaatgatgcgttcgtacgaaaatcacgttcgtgatgtgccgggtgttaccttgggcctcgtaggtcctgatggacgcgagggcatgatccaaaatgccgaagaatttgctgctattggcattccgttcatttttgacccaggtcaggcactgccgctgttcaacggccccgaactgcgcgagtttatcgaacaggcggactatgtggtggtcaacgattacgaaagcaatcttcttcaaacgcgtactggctggaacgagcaggacattgtttcacgcgtgcaggcgtatatcaccacgcaaggttcggctggagccctggtacatacaccggagaagacctacgatattccgccggctcacacccgtcgtgtcgttgatccaactggttgcggcgacgcgtttcgcgccggcctgatctatggtattcagcataattatgattggttgaccattggccgcatgggaaacttaatgggtgcgctgaaagtggaacaccctggcacccaaaatcagcgtttcgattttgccgaattcaacgaccagttcaaacaatattttggctacgcgctctaatga

SEQ ID NO: 1158 - protein, 321 aa, synthetic construct
  REGION 1..321: note = Variant of adenosine kinase
MHHHHHHGGSGMSALICGSLAYDTIMVFPDQFKNHILPDRVHRLNVSFLVPRMRREFGGCAGNIAYNLHLLGGAPIVMATVGQDFGPYREHFETLGIDLSRVKIIDDLSTPQAFITTDMDHNQITAFHGGAMMRSYENHVRDVPGVTLGLVGPDGREGMIQNAEEFAAIGIPFIFDPGQALPLFNGPELREFIEQADYVVVNDYESNLLQTRTGWNEQDIVSRVQAYITTQGSAGALVHTPEKTYDIPPAHTRRVVDPTGCGDAFRAGLIYGIQHNYDWLTIGRMGNLMGALKVEHPGTQNQRFDFAEFNDQFKQYFGYAL

SEQ ID NO: 1159 - DNA, 969 bp, synthetic construct
  misc_feature 1..969: note = Variant of adenosine kinase
  source 1..969: mol_type = other DNA
atgcaccatcatcaccatcacgggggctccggcatgagtgcactgatttgcggttctttagcgtatgataccatcatggtgtttccggaccagttcaagaaccatattctgcccgatcgtgttcaccgcctcaatgtcagctttcttgtaccacgcatgcgtcgtgaatttggaggctgtgccggcaacattgcgtacaatctgcatctgttgggtggtgctccgatcgtaatggctacggtgggccaagatttcggtccgtatcgcgagcacttcgaaactctgggcattgacttatcccgcgtcaagatcatcgatgatctgagtacaccgcaggccttcattaccaccgacatggatcataaccagattacggcgtttcatggcggcgcaatgatgcgttcgtacgaaaatcacgttcgtgatgtgccgggtgttaccttgggcctcgtaggtcctgatggacgcgagggcatgatccaaaatgccgaagaatttgctgctggtggcattccgttcatttttgacccaggtcaggcactgccgctgttcaacggccccgaactgcgcgagtttatcgaacaggcggactatgtggtggtcaacgattacgaaagcaatcttcttcaaacgcgtactggctggaacgagcaggacattgtttcacgcgtgcaggcgtatatcaccacgcaaggttcggctggagccctggtacatacaccgactaagacctacgatattccgccggctcacacccgtcgtgtcgttgatccaactggttgcggcgacgcgtttcgcgccggcctgatctatggtattcagcataattatgattggttgaccattggccgcatgggaaacttaatgggtgcgctgaaagtggaacaccctggcacccaaaatcagcgtttcgattttgccgaattcaacgaccagttcaaacaatattttggctacgcgctctaatga

SEQ ID NO: 1160 - protein, 321 aa, synthetic construct
  REGION 1..321: note = Variant of adenosine kinase
MHHHHHHGGSGMSALICGSLAYDTIMVFPDQFKNHILPDRVHRLNVSFLVPRMRREFGGCAGNIAYNLHLLGGAPIVMATVGQDFGPYREHFETLGIDLSRVKIIDDLSTPQAFITTDMDHNQITAFHGGAMMRSYENHVRDVPGVTLGLVGPDGREGMIQNAEEFAAGGIPFIFDPGQALPLFNGPELREFIEQADYVVVNDYESNLLQTRTGWNEQDIVSRVQAYITTQGSAGALVHTPTKTYDIPPAHTRRVVDPTGCGDAFRAGLIYGIQHNYDWLTIGRMGNLMGALKVEHPGTQNQRFDFAEFNDQFKQYFGYAL

SEQ ID NO: 1161 - DNA, 969 bp, synthetic construct
  misc_feature 1..969: note = Variant of adenosine kinase
  source 1..969: mol_type = other DNA
atgcaccatcatcaccatcacgggggctccggcatgagtgcactgatttgcggttctttagcgtatgataccatcatggtgtttccggaccagttcaagaaccatattctgcccgatcgtgttcaccgcctcaatgtcagctttcttgtaccacgcatgcgtcgtgaatttggaggctgtgccggcaacattgcgtacaatctgcatctgttgggtggtgctccgatcgtaatggctacggtgggccaagatttcggtccgtatcgcgagcacttcgaaactctgggcattgacttatcctgggtcaagatcatcgatgatctgagtacaccgcaggccttcattaccaccgacatggatcataaccagattacggcgtttcatggcggcgcaatgatgcgttcgtacgaaaatcacgttcgtgatgtgccgggtgttaccttgggcctcgtaggtcctgatggacgcgagggcatgatccaaaatgccgaagaatttgctgctggtggcattccgttcatttttgacccaggtcaggcactgccgctgttcaacggccccgaactgcgcgagtttatcgaacaggcggactatgtggtggtcaacgattacgaaagcaatcttcttcaaacgcgtactggctggaacgagcaggacattgtttcacgcgtgcaggcgtatatcaccacgcaaggttcggctggagccctggtacatacaccggagaagacctacgatattccgccggctcacacccgtcgtgtcgttgatccaactggttgcggcgacgcgtttcgcgccggcctgatctatggtattcagcataattatgattggttgaccattggccgcatgggaaacttaatgggtgcgctgaaagtggaacaccctggcacccaaaatcagcgtttcgattttgccgaattcaacgaccagttcaaacaatattttggctacgcgctctaatga

SEQ ID NO: 1162 - protein, 321 aa, synthetic construct
  REGION 1..321: note = Variant of adenosine kinase
MHHHHHHGGSGMSALICGSLAYDTIMVFPDQFKNHILPDRVHRLNVSFLVPRMRREFGGCAGNIAYNLHLLGGAPIVMATVGQDFGPYREHFETLGIDLSWVKIIDDLSTPQAFITTDMDHNQITAFHGGAMMRSYENHVRDVPGVTLGLVGPDGREGMIQNAEEFAAGGIPFIFDPGQALPLFNGPELREFIEQADYVVVNDYESNLLQTRTGWNEQDIVSRVQAYITTQGSAGALVHTPEKTYDIPPAHTRRVVDPTGCGDAFRAGLIYGIQHNYDWLTIGRMGNLMGALKVEHPGTQNQRFDFAEFNDQFKQYFGYAL

SEQ ID NO: 1163 - DNA, 969 bp, synthetic construct
  misc_feature 1..969: note = Variant of adenosine kinase
  source 1..969: mol_type = other DNA
atgcaccatcatcaccatcacgggggctccggcatgagtgcactgatttgcggttctttagcgtatgataccatcatggtgtttccggaccagttcaagaaccatattctgcccgatcgtgttcaccgcctcaatgtcagctttcttgtaccacgcatgcgtcgtgaatttggaggctgtgccggcaacattgcgtacaatctgcatctgttgggtggtgctccgatcgtaatggctacggtgggcttggatttcggtccgtatcgcgagcacttcgaaactctgggcattgacttatcccgcgtcaagatcatcgatgatctgagtacaccgcaggccttcattaccaccgacatggatcataaccagattacggcgtttcatggcggcgcaatgatgcgttcgtacgaaaatcacgttcgtgatgtgccgggtgttaccttgggcctcgtaggtcctgatggacgcgagggcatgatccaaaatgccgaagaatttgctgctggtggcattccgttcatttttgacccaggtcaggcactgccgctgttcaacggccccgaactgcgcgagtttatcgaacaggcggactatgtggtggtcaacgattacgaaagcaatcttcttcaaacgcgtactggctggaacgagcaggacattgtttcacgcgtgcaggcgtatatcaccacgcaaggttcggctggagccctggtacatacaccggagaagacctacgatattccgccggctcacacccgtcgtgtcgttgatccaactggttgcggcgacgcgtttcgcgccggcctgatctatggtattcagcataattatgattggttgaccattggccgcatgggaaacttaatgggtgcgctgaaagtggaacaccctggcacccaaaatcagcgtttcgattttgccgaattcaacgaccagttcaaacaatattttggctacgcgctctaatga

SEQ ID NO: 1164 - protein, 321 aa, synthetic construct
  REGION 1..321: note = Variant of adenosine kinase
MHHHHHHGGSGMSALICGSLAYDTIMVFPDQFKNHILPDRVHRLNVSFLVPRMRREFGGCAGNIAYNLHLLGGAPIVMATVGLDFGPYREHFETLGIDLSRVKIIDDLSTPQAFITTDMDHNQITAFHGGAMMRSYENHVRDVPGVTLGLVGPDGREGMIQNAEEFAAGGIPFIFDPGQALPLFNGPELREFIEQADYVVVNDYESNLLQTRTGWNEQDIVSRVQAYITTQGSAGALVHTPEKTYDIPPAHTRRVVDPTGCGDAFRAGLIYGIQHNYDWLTIGRMGNLMGALKVEHPGTQNQRFDFAEFNDQFKQYFGYAL

SEQ ID NO: 1165 - DNA, 969 bp, synthetic construct
  misc_feature 1..969: note = Variant of adenosine kinase
  source 1..969: mol_type = other DNA
atgcaccatcatcaccatcacgggggctccggcatgagtgcactgatttgcggttctttagcgtatgataccatcatggtgtttccggaccagttcaagaaccatattctgcccgatcgtgttcaccgcctcaatgtcagctttcttgtaccacgcatgcgtcgtgaatttggaggctgtgccggcaacattgcgtacaatctgcatctgttgggtggtgctccgatcgtaatggctacggtgggccaagatttcggtccgtatcgcgagcacttcgaaactctgggcattgacttatcccgcgtcaagatcatcgatgatctgagtacaccgcaggccttcattaccaccgacatggatcataaccagattacggcgtttcatggcggcgcaatgatgcgttcgtacgaaaatcacgttcgtgatgtgccgggtgttaccttgggcctcgtaggtcctgatggacgcgagggcatgatccaaaatgccgaagaatttgctgctggtggcattccgttcatttttgacccaggtcaggcactgccgctgttcaacggccccgaactgcgcgagtttatcgaacaggcggactatgtggtggtcaacgattacgaaagcaatcttcttcaaacgcgtactggctggaacgagcaggacattgttatgcgcgtgcaggcgtatatcaccacgcaaggttcggctggagccctggtacatacaccggagaagacctacgatattccgccggctcacacccgtcgtgtcgttgatccaactggttgcggcgacgcgtttcgcgccggcctgatctatggtattcagcataattatgattggttgaccattggccgcatgggaaacttaatgggtgcgctgaaagtggaacaccctggcacccaaaatcagcgtttcgattttgccgaattcaacgaccagttcaaacaatattttggctacgcgctctaatga

SEQ ID NO: 1166 - protein, 321 aa, synthetic construct
  REGION 1..321: note = Variant of adenosine kinase
MHHHHHHGGSGMSALICGSLAYDTIMVFPDQFKNHILPDRVHRLNVSFLVPRMRREFGGCAGNIAYNLHLLGGAPIVMATVGQDFGPYREHFETLGIDLSRVKIIDDLSTPQAFITTDMDHNQITAFHGGAMMRSYENHVRDVPGVTLGLVGPDGREGMIQNAEEFAAGGIPFIFDPGQALPLFNGPELREFIEQADYVVVNDYESNLLQTRTGWNEQDIVMRVQAYITTQGSAGALVHTPEKTYDIPPAHTRRVVDPTGCGDAFRAGLIYGIQHNYDWLTIGRMGNLMGALKVEHPGTQNQRFDFAEFNDQFKQYFGYAL

SEQ ID NO: 1167 - DNA, 969 bp, synthetic construct
  misc_feature 1..969: note = Variant of adenosine kinase
  source 1..969: mol_type = other DNA
atgcaccatcatcaccatcacgggggctccggcatgagtgcactgatttgcggttctttagcgtatgataccatcatggtgtttccggaccagttcaagaaccatattctgcccgatcgtgttcaccgcctcaatgtcagctttcttgtaccacgcatgcgtcgtgaatttggaggctgtgccggcaacattgcgtacaatctgcatctgttgggtggtgctccgatcgtaatggctacggtgggccaagatttcggtccgtatcgcgagcacttcgaaactctgggcattgacttatcccgcgtcaagatcatcgatgatctgagtacaccgcaggccttcattaccaccgacatggatcataaccagattacggcgtttcatggcggcgcaatgatgcgttcgtacgaaaatcacgttcgtgatgtgccgggtgttaccttgggcctcgtaggtcctgatggacgcgagggcatgatccaaaatgccgaagaatttgctgctggtagtattccgttcatttttgacccaggtcaggcactgccgctgttcaacggccccgaactgcgcgagtttatcgaacaggcggactatgtggtggtcaacgattacgaaagcaatcttcttcaaacgcgtactggctggaacgagcaggacattgtttcacgcgtgcaggcgtatatcaccacgcaaggttcggctggagccctggtacatacaccggagaagacctacgatattccgccggctcacacccgtcgtgtcgttgatccaactggttgcggcgacgcgtttcgcgccggcctgatctatggtattcagcataattatgattggttgaccattggccgcatgggaaacttaatgggtgcgctgaaagtggaacaccctggcacccaaaatcagcgtttcgattttgccgaattcaacgaccagttcaaacaatattttggctacgcgctctaatga

SEQ ID NO: 1168 - protein, 321 aa, synthetic construct
  REGION 1..321: note = Variant of adenosine kinase
MHHHHHHGGSGMSALICGSLAYDTIMVFPDQFKNHILPDRVHRLNVSFLVPRMRREFGGCAGNIAYNLHLLGGAPIVMATVGQDFGPYREHFETLGIDLSRVKIIDDLSTPQAFITTDMDHNQITAFHGGAMMRSYENHVRDVPGVTLGLVGPDGREGMIQNAEEFAAGSIPFIFDPGQALPLFNGPELREFIEQADYVVVNDYESNLLQTRTGWNEQDIVSRVQAYITTQGSAGALVHTPEKTYDIPPAHTRRVVDPTGCGDAFRAGLIYGIQHNYDWLTIGRMGNLMGALKVEHPGTQNQRFDFAEFNDQFKQYFGYAL

SEQ ID NO: 1169 - DNA, 969 bp, synthetic construct
  misc_feature 1..969: note = Variant of adenosine kinase
  source 1..969: mol_type = other DNA
atgcaccatcatcaccatcacgggggctccggcatgagtgcactgatttgcggttctttagcgtatgataccatcatggtgtttccggaccagttcaagaaccatattctgcccgatcgtgttcaccgcctcaatgtcagctttcttgtaccacgcatgcgtcgtgaatttggaggctgtgccggcaacattgcgtacaatctgcatctgttgggtggtgctccgatcgtaatggctacggtgggccaagatttcggtccgtatcgcgagcacttcgaaactctgggcattgacttatcccgcgtcaagatcatcgatgatctgagtacaccgcaggccttcattaccaccgacatggatcataaccagattacggcgtttcatggcggcgcaatgatgcgttcgtacgaaaatcacgttcgtgatgtgccgggtgttaccttgggcctcgtaggtcctgatggacgcgagggcatgatccaaaatgccgaagaatttgctgctggtggcattccgttcatttttgacccaggtcaggcactgccgctgttcaacggccccgaactgcgcgagtttatcgaacaggcggactatgtggtggtcaacgattacgaaagcaatcttcttcaaacgcgtactggctggaacgagcaggacattgtttcacgcgtgcaggcgtatatcaccacgcaaggttcggctggagccctggtacatacaccggagaagacctacgatattccgccggctcacacccgtcgtgtcgttgatccaactggttgcggcgacgcgtttcgcgccggcctgatctatggtattcagcataattatgattggttgaccattggccgcatgggaaacttaatgggtgcgctgaaagtggaacaccctggcacccaaaatcagcgtttcgattttgccgaattcaactttcagttcaaacaatattttggctacgcgctctaatga

SEQ ID NO: 1170 - protein, 321 aa, synthetic construct
  REGION 1..321: note = Variant of adenosine kinase
MHHHHHHGGSGMSALICGSLAYDTIMVFPDQFKNHILPDRVHRLNVSFLVPRMRREFGGCAGNIAYNLHLLGGAPIVMATVGQDFGPYREHFETLGIDLSRVKIIDDLSTPQAFITTDMDHNQITAFHGGAMMRSYENHVRDVPGVTLGLVGPDGREGMIQNAEEFAAGGIPFIFDPGQALPLFNGPELREFIEQADYVVVNDYESNLLQTRTGWNEQDIVSRVQAYITTQGSAGALVHTPEKTYDIPPAHTRRVVDPTGCGDAFRAGLIYGIQHNYDWLTIGRMGNLMGALKVEHPGTQNQRFDFAEFNFQFKQYFGYAL

SEQ ID NO: 1171 - DNA, 969 bp, synthetic construct
  misc_feature 1..969: note = Variant of adenosine kinase
  source 1..969: mol_type = other DNA
atgcaccatcatcaccatcacgggggctccggcatgagtgcactgatttgcggttctttagcgtatgataccatcatggtgtttccggaccagttcaagaaccatattctgcccgatcgtgttcaccgcctcaatgtcagctttcttgtaccacgcatgcgtcgtgaatttggaggctgtgccggcaacattgcgtacaatctgcatctgttgggtggtgctccgatcgtaatggctacggtgggccaagatttcggtccgtatcgcgagcacttcgaaactctgggcattgacttatcccgcgtcaagatcatcgatgatctgagtacaccgcaggccttcattaccaccgacatggatcataaccagattacggcgtttcatggcggcgcaatgatgcgttcgtacgaaaatcacgttcgtgatgtgccgggtattaccttgggcctcgtaggtcctgatggacgcgagggcatgatccaaaatgccgaagaatttgctgctggtggcattccgttcatttttgacccaggtcaggcactgccgctgttcaacggccccgaactgcgcgagtttatcgaacaggcggactatgtggtggtcaacgattacgaaagcaatcttcttcaaacgcgtactggctggaacgagcaggacattgtttcacgcgtgcaggcgtatatcaccacgcaaggttcggctggagccctggtacatacaccggagaagacctacgatattccgccggctcacacccgtcgtgtcgttgatccaactggttgcggcgacgcgtttcgcgccggcctgatctatggtattcagcataattatgattggttgaccattggccgcatgggaaacttaatgggtgcgctgaaagtggaacaccctggcacccaaaatcagcgtttcgattttgccgaattcaacgaccagttcaaacaatattttggctacgcgctctaatga

SEQ ID NO: 1172 - protein, 321 aa, synthetic construct
  REGION 1..321: note = Variant of adenosine kinase
MHHHHHHGGSGMSALICGSLAYDTIMVFPDQFKNHILPDRVHRLNVSFLVPRMRREFGGCAGNIAYNLHLLGGAPIVMATVGQDFGPYREHFETLGIDLSRVKIIDDLSTPQAFITTDMDHNQITAFHGGAMMRSYENHVRDVPGITLGLVGPDGREGMIQNAEEFAAGGIPFIFDPGQALPLFNGPELREFIEQADYVVVNDYESNLLQTRTGWNEQDIVSRVQAYITTQGSAGALVHTPEKTYDIPPAHTRRVVDPTGCGDAFRAGLIYGIQHNYDWLTIGRMGNLMGALKVEHPGTQNQRFDFAEFNDQFKQYFGYAL

SEQ ID NO: 1173 - DNA, 969 bp, synthetic construct
  misc_feature 1..969: note = Variant of adenosine kinase
  source 1..969: mol_type = other DNA
atgcaccatcatcaccatcacgggggctccggcatgagtgcactgatttgcggttctttagcgtatgataccatcatggtgtttccggaccagttcaagaaccatattctgcccgatcgtgttcaccgcctcaatgtcagctttcttgtaccacgcatgcgtcgtgaatttggaggctgtgccggcaacattgcgtacaatctgcatctgttgggtggtgctccgatcgtaatggctacggtgggctcggatttcggtccgtatcgcgagcacttcgaaactctgggcattgacttatcccgcgtcaagatcatcgatgatctgagtacaccgcaggccttcattaccaccgacatggatcataaccagattacggcgtttcatggcggcgcaatgatgcgttcgtacgaaaatcacgttcgtgatgtgccgggtgttaccttgggcctcgtaggtcctgatggacgcgagggcatgatccaaaatgccgaagaatttgctgctggtggcattccgttcatttttgacccaggtcaggcactgccgctgttcaacggccccgaactgcgcgagtttatcgaacaggcggactatgtggtggtcaacgattacgaaagcaatcttcttcaaacgcgtactggctggaacgagcaggacattgtttcacgcgtgcaggcgtatatcaccacgcaaggttcggctggagccctggtacatacaccggagaagacctacgatattccgccggctcacacccgtcgtgtcgttgatccaactggttgcggcgacgcgtttcgcgccggcctgatctatggtattcagcataattatgattggttgaccattggccgcatgggaaacttaatgggtgcgctgaaagtggaacaccctggcacccaaaatcagcgtttcgattttgccgaattcaacgaccagttcaaacaatattttggctacgcgctctaatga

SEQ ID NO: 1174 - protein, 321 aa, synthetic construct
  REGION 1..321: note = Variant of adenosine kinase
MHHHHHHGGSGMSALICGSLAYDTIMVFPDQFKNHILPDRVHRLNVSFLVPRMRREFGGCAGNIAYNLHLLGGAPIVMATVGSDFGPYREHFETLGIDLSRVKIIDDLSTPQAFITTDMDHNQITAFHGGAMMRSYENHVRDVPGVTLGLVGPDGREGMIQNAEEFAAGGIPFIFDPGQALPLFNGPELREFIEQADYVVVNDYESNLLQTRTGWNEQDIVSRVQAYITTQGSAGALVHTPEKTYDIPPAHTRRVVDPTGCGDAFRAGLIYGIQHNYDWLTIGRMGNLMGALKVEHPGTQNQRFDFAEFNDQFKQYFGYAL

SEQ ID NO: 1175 - DNA, 969 bp, synthetic construct
  misc_feature 1..969: note = Variant of adenosine kinase
  source 1..969: mol_type = other DNA
atgcaccatcatcaccatcacgggggctccggcatgagtgcactgatttgcggttctttagcgtatgataccatcatggtgtttccggaccagttcaagaaccatattctgcccgatcgtgttcaccgcctcaatgtcagctttcttgtaccacgcatgcgtcgtgaatttggaggctgtgccggcaacattgcgtacaatctgcatctgttgggtggtgctccgatcgtaatggctacggtgggccaagatttcggtccgtatcgcgagcacttcgaaactctgggcattgacttatcccgcgtcaagatcatcgatgatctgagtacaccgcaggccttcattaccaccgacatggatcataaccagattacggcgtttcatggcggcgcaatgatgcgttcgtacgaaaatcacgttcgtgatgtgccgggtgttaccttgggcctcgtaggtcctgatggacgcgagggcatgatccaaaatgccgaagaatttgctgctggtggcattccgttcatttttgacccaggtcaggcactgccgctgttcaacggccccgaactgcgcgagtttatcgaacaggcggactatgtggtggtcaacgattacgaaagcaatcttcttcaaacgcgtactggctggaacgagcaggacattgtttcacgcgtgcaggcgtatatcaccacgcaaggttcggctggagccctggtacatacaccggagaggacctacgatattccgccggctcacacccgtcgtgtcgttgatccaactggttgcggcgacgcgtttcgcgccggcctgatctatggtattcagcataattatgattggttgaccattggccgcatgggaaacttaatgggtgcgctgaaagtggaacaccctggcacccaaaatcagcgtttcgattttgccgaattcaacgaccagttcaaacaatattttggctacgcgctctaatga

SEQ ID NO: 1176 - protein, 321 aa, synthetic construct
  REGION 1..321: note = Variant of adenosine kinase
MHHHHHHGGSGMSALICGSLAYDTIMVFPDQFKNHILPDRVHRLNVSFLVPRMRREFGGCAGNIAYNLHLLGGAPIVMATVGQDFGPYREHFETLGIDLSRVKIIDDLSTPQAFITTDMDHNQITAFHGGAMMRSYENHVRDVPGVTLGLVGPDGREGMIQNAEEFAAGGIPFIFDPGQALPLFNGPELREFIEQADYVVVNDYESNLLQTRTGWNEQDIVSRVQAYITTQGSAGALVHTPERTYDIPPAHTRRVVDPTGCGDAFRAGLIYGIQHNYDWLTIGRMGNLMGALKVEHPGTQNQRFDFAEFNDQFKQYFGYAL

SEQ ID NO: 1177 - DNA, 969 bp, synthetic construct
  misc_feature 1..969: note = Variant of adenosine kinase
  source 1..969: mol_type = other DNA
atgcaccatcatcaccatcacgggggctccggcatgagtgcactgatttgcggttctttagcgtatgataccatcatggtgtttccggaccagttcaagaaccatattctgcccgatcgtgttcaccgcctcaatgtcagctttcttgtaccacgcatgcgtcgtgaatttggaggctgtgccggcaacattgcgtacaatctgcatctgttgggtggtacgccgatcgtaatggctacggtgggccaagatttcggtccgtatcgcgagcacttcgaaactctgggcattgacttatcccgcgtcaagatcatcgatgatctgagtacaccgcaggccttcattaccaccgacatggatcataaccagattacggcgtttcatggcggcgcaatgatgcgttcgtacgaaaatcacgttcgtgatgtgccgggtgttaccttgggcctcgtaggtcctgatggacgcgagggcatgatccaaaatgccgaagaatttgctgctggtggcattccgttcatttttgacccaggtcaggcactgccgctgttcaacggccccgaactgcgcgagtttatcgaacaggcggactatgtggtggtcaacgattacgaaagcaatcttcttcaaacgcgtactggctggaacgagcaggacattgtttcacgcgtgcaggcgtatatcaccacgcaaggttcggctggagccctggtacatacaccggagaagacctacgatattccgccggctcacacccgtcgtgtcgttgatccaactggttgcggcgacgcgtttcgcgccggcctgatctatggtattcagcataattatgattggttgaccattggccgcatgggaaacttaatgggtgcgctgaaagtggaacaccctggcacccaaaatcagcgtttcgattttgccgaattcaacgaccagttcaaacaatattttggctacgcgctctaatga

SEQ ID NO: 1178 - protein, 321 aa, synthetic construct
  REGION 1..321: note = Variant of adenosine kinase
MHHHHHHGGSGMSALICGSLAYDTIMVFPDQFKNHILPDRVHRLNVSFLVPRMRREFGGCAGNIAYNLHLLGGTPIVMATVGQDFGPYREHFETLGIDLSRVKIIDDLSTPQAFITTDMDHNQITAFHGGAMMRSYENHVRDVPGVTLGLVGPDGREGMIQNAEEFAAGGIPFIFDPGQALPLFNGPELREFIEQADYVVVNDYESNLLQTRTGWNEQDIVSRVQAYITTQGSAGALVHTPEKTYDIPPAHTRRVVDPTGCGDAFRAGLIYGIQHNYDWLTIGRMGNLMGALKVEHPGTQNQRFDFAEFNDQFKQYFGYAL

SEQ ID NO: 1179 - DNA, 969 bp, synthetic construct
  misc_feature 1..969: note = Variant of adenosine kinase
  source 1..969: mol_type = other DNA
atgcaccatcatcaccatcacgggggctccggcatgagtgcactgatttgcggttctttagcgtatgataccatcatggtgtttccggaccagttcaagaaccatattctgcccgatcgtgttcaccgcctcaatgtcagctttcttgtaccacgcatgcgtcgtgaatttggaggctgtgccggcaacattgcgtacaatctgcatctgttgggtggtgctccgatcgtaatggctacggtgggccaagatttcggtccgtatcgcgagcacttcgaaactctgggcattgacttatcccgcgtcaagatcatcgatgatctgagtacaccgcaggccttcattaccaccgacatggatcataaccagattacggcgtttcatggcggcgcaatgatgcgttcgtacgaaaatcacgttcgtgatgtgccgggtgttaccttgggcctcgtaggtcctgatggacgcgagggcatgatccaaaatgccgaagaatttgctgctggtggcattccgttcatttttgacccaggtcaggcactgccgctgttcaacggccccgaactgcgcgagtttatcgaacaggcggactatgtggtggtcaacgattacgaaagcaatcttcttcaaacgcgtactggctggaacgagcaggacattgtttcacgcgtgcaggcgtatatcaccacgcaaggttcggctggagccctggtacatacaccggagaagacctacgatattccgccggctcacacccgtcgtgtcgttgatccaactggttgcggcgacgcgtttcgcgccggcctgatctatggtattcagcataattatgattggttgaccattggccgcatgggaaacttaatgggtgcgctgaaagtggaacaccctggcacccaaaatcagcgtttcgattttgccgaattcaacacgcagttcaaacaatattttggctacgcgctctaatga

SEQ ID NO: 1180 - protein, 321 aa, synthetic construct
  REGION 1..321: note = Variant of adenosine kinase
MHHHHHHGGSGMSALICGSLAYDTIMVFPDQFKNHILPDRVHRLNVSFLVPRMRREFGGCAGNIAYNLHLLGGAPIVMATVGQDFGPYREHFETLGIDLSRVKIIDDLSTPQAFITTDMDHNQITAFHGGAMMRSYENHVRDVPGVTLGLVGPDGREGMIQNAEEFAAGGIPFIFDPGQALPLFNGPELREFIEQADYVVVNDYESNLLQTRTGWNEQDIVSRVQAYITTQGSAGALVHTPEKTYDIPPAHTRRVVDPTGCGDAFRAGLIYGIQHNYDWLTIGRMGNLMGALKVEHPGTQNQRFDFAEFNTQFKQYFGYAL

SEQ ID NO: 1181 - DNA, 969 bp, synthetic construct
  misc_feature 1..969: note = Variant of adenosine kinase
  source 1..969: mol_type = other DNA
atgcaccatcatcaccatcacgggggctccggcatgagtgcactgatttgcggttctttagcgtatgataccatcatggtgtttccggaccagttcaagaaccatattctgcccgatcgtgttcaccgcctcaatgtcagctttcttgtaccacgcatgcgtcgtgaatttggaggctgtgccggcaacattgcgtacaatctgcatctgttgggtggtgctccgatcgtaatggctacggtgggccaagatttcggtccgtatcgcgagcacttcgaaactctgggcattgacttatcccgcgtcaagatcatcgatgatctgagtacaccgcaggccttcattaccaccgacatggatcataaccagattacggcgtttcatggcggcgcaatgatgcgttcgtacgaaaatcacgttcgtgatgtgccgggtgttaccttgggcctcgtaggtcctgatggacgcgagggcatgatccaaaatgccgaagaatttgctgctggtggcattccgttcatttttgacccaggtcaggcactgccgctgttcaacggccccgaactgcgcgagtttatcgaacaggcggactatgtggtggtcaacgattacgaaagcaatcttcttcaaacgcgtactggctggaacgagaatgacattgtttcacgcgtgcaggcgtatatcaccacgcaaggttcggctggagccctggtacatacaccggagaagacctacgatattccgccggctcacacccgtcgtgtcgttgatccaactggttgcggcgacgcgtttcgcgccggcctgatctatggtattcagcataattatgattggttgaccattggccgcatgggaaacttaatgggtgcgctgaaagtggaacaccctggcacccaaaatcagcgtttcgattttgccgaattcaacgaccagttcaaacaatattttggctacgcgctctaatga

SEQ ID NO: 1182 - protein, 321 aa, synthetic construct
  REGION 1..321: note = Variant of adenosine kinase
MHHHHHHGGSGMSALICGSLAYDTIMVFPDQFKNHILPDRVHRLNVSFLVPRMRREFGGCAGNIAYNLHLLGGAPIVMATVGQDFGPYREHFETLGIDLSRVKIIDDLSTPQAFITTDMDHNQITAFHGGAMMRSYENHVRDVPGVTLGLVGPDGREGMIQNAEEFAAGGIPFIFDPGQALPLFNGPELREFIEQADYVVVNDYESNLLQTRTGWNENDIVSRVQAYITTQGSAGALVHTPEKTYDIPPAHTRRVVDPTGCGDAFRAGLIYGIQHNYDWLTIGRMGNLMGALKVEHPGTQNQRFDFAEFNDQFKQYFGYAL

SEQ ID NO: 1183 - DNA, 969 bp, synthetic construct
  misc_feature 1..969: note = Variant of adenosine kinase
  source 1..969: mol_type = other DNA
atgcaccatcatcaccatcacgggggctccggcatgagtgcactgatttgcggttctttagcgtatgataccatcatggtgtttccggaccagttcaagaaccatattctgcccgatcgtgttcaccgcctcaatgtcagctttcttgtaccacgcatgcgtcgtgaatttggaggctgtgccggcaacattgcgtacaatctgcatctgttgggtggttttccgatcgtaatggctacggtgggccaagatttcggtccgtatcgcgagcacttcgaaactctgggcattgacttatcccgcgtcaagatcatcgatgatctgagtacaccgcaggccttcattaccaccgacatggatcataaccagattacggcgtttcatggcggcgcaatgatgcgttcgtacgaaaatcacgttcgtgatgtgccgggtgttaccttgggcctcgtaggtcctgatggacgcgagggcatgatccaaaatgccgaagaatttgctgctggtggcattccgttcatttttgacccaggtcaggcactgccgctgttcaacggccccgaactgcgcgagtttatcgaacaggcggactatgtggtggtcaacgattacgaaagcaatcttcttcaaacgcgtactggctggaacgagcaggacattgtttcacgcgtgcaggcgtatatcaccacgcaaggttcggctggagccctggtacatacaccggagaagacctacgatattccgccggctcacacccgtcgtgtcgttgatccaactggttgcggcgacgcgtttcgcgccggcctgatctatggtattcagcataattatgattggttgaccattggccgcatgggaaacttaatgggtgcgctgaaagtggaacaccctggcacccaaaatcagcgtttcgattttgccgaattcaacgaccagttcaaacaatattttggctacgcgctctaatga

SEQ ID NO: 1184 - protein, 321 aa, synthetic construct
  REGION 1..321: note = Variant of adenosine kinase
MHHHHHHGGSGMSALICGSLAYDTIMVFPDQFKNHILPDRVHRLNVSFLVPRMRREFGGCAGNIAYNLHLLGGFPIVMATVGQDFGPYREHFETLGIDLSRVKIIDDLSTPQAFITTDMDHNQITAFHGGAMMRSYENHVRDVPGVTLGLVGPDGREGMIQNAEEFAAGGIPFIFDPGQALPLFNGPELREFIEQADYVVVNDYESNLLQTRTGWNEQDIVSRVQAYITTQGSAGALVHTPEKTYDIPPAHTRRVVDPTGCGDAFRAGLIYGIQHNYDWLTIGRMGNLMGALKVEHPGTQNQRFDFAEFNDQFKQYFGYAL

SEQ ID NO: 1185 - DNA, 969 bp, synthetic construct
  misc_feature 1..969: note = Variant of adenosine kinase
  source 1..969: mol_type = other DNA
atgcaccatcatcaccatcacgggggctccggcatgagtgcactgatttgcggttctttagcgtatgataccatcatggtgtttccggaccagttcaagaaccatattctgcccgatcgtgttcaccgcctcaatgtcagctttcttgtaccacgcatgcgtcgtgaatttggaggctgtgccggcaacattgcgtacaatctgcatctgttgggtggtgctccgatcgtaatggctacggtgggccaagatttcggtccgtatcgcgagcacttcgaaactctgggcattgacttatcccgcgtcaagatcatcgatgatctgagtacaccgcaggccttcattaccaccgacatggatcataaccagattacggcgtttcatggcggcgcaatgatgcgttcgtacgaaaatcacgttcgtgatgtgccgggtgttaccttgggcctcgtaggtcctgatggacgcgagggcatgatccaaaatgccgaagaatttgctgctggtggcattccgttcatttttgacccaggtcaggcactgccgctgttcaacggccccgaactgcgcgagtttatcgaacaggcggactatgtggtggtcaacgattacgaaagcaatcttcttcaaacgcgtactggctggaacgagcaggacattgtttcacgcgtgcaggcgtatatcaccacgcaaggttcggctggagccctggtacatacaccggagaagacctacgatattccgccggctcacacccgtcgtgtcgttgatccaactggttgcggcgacgcgtttcgcgccggcctgatctatggtattcagcataattatgattggttgaccattggccgcatgggaaacttaatgggtgcgctgaaagtggaacaccctggcacgcaaaatcaggtgttcgattttgccgaattcaacgaccagttcaaacaatattttggctacgcgctctaatga

SEQ ID NO: 1186 - protein, 321 aa, synthetic construct
  REGION 1..321: note = Variant of adenosine kinase
MHHHHHHGGSGMSALICGSLAYDTIMVFPDQFKNHILPDRVHRLNVSFLVPRMRREFGGCAGNIAYNLHLLGGAPIVMATVGQDFGPYREHFETLGIDLSRVKIIDDLSTPQAFITTDMDHNQITAFHGGAMMRSYENHVRDVPGVTLGLVGPDGREGMIQNAEEFAAGGIPFIFDPGQALPLFNGPELREFIEQADYVVVNDYESNLLQTRTGWNEQDIVSRVQAYITTQGSAGALVHTPEKTYDIPPAHTRRVVDPTGCGDAFRAGLIYGIQHNYDWLTIGRMGNLMGALKVEHPGTQNQVFDFAEFNDQFKQYFGYAL

SEQ ID NO: 1187 - DNA, 969 bp, synthetic construct
  misc_feature 1..969: note = Variant of adenosine kinase
  source 1..969: mol_type = other DNA
atgcaccatcatcaccatcacgggggctccggcatgagtgcactgatttgcggttctttagcgtatgataccatcatggtgtttccggaccagttcaagaaccatattctgcccgatcgtgttcaccgcctcaatgtcagctttcttgtaccacgcatgcgtcgtgaatttggaggctgtgccggcaacattgcgtacaatctgcatctgttgggtggtgctccgatcgtaatggctacggtgggctttgatttcggtccgtatcgcgagcacttcgaaactctgggcattgacttatcccgcgtcaagatcatcgatgatctgagtacaccgcaggccttcattaccaccgacatggatcataaccagattacggcgtttcatggcggcgcaatgatgcgttcgtacgaaaatcacgttcgtgatgtgccgggtgttaccttgggcctcgtaggtcctgatggacgcgagggcatgatccaaaatgccgaagaatttgctgctggtggcattccgttcatttttgacccaggtcaggcactgccgctgttcaacggccccgaactgcgcgagtttatcgaacaggcggactatgtggtggtcaacgattacgaaagcaatcttcttcaaacgcgtactggctggaacgagcaggacattgtttcacgcgtgcaggcgtatatcaccacgcaaggttcggctggagccctggtacatacaccggagaagacctacgatattccgccggctcacacccgtcgtgtcgttgatccaactggttgcggcgacgcgtttcgcgccggcctgatctatggtattcagcataattatgattggttgaccattggccgcatgggaaacttaatgggtgcgctgaaagtggaacaccctggcacccaaaatcagcgtttcgattttgccgaattcaacgaccagttcaaacaatattttggctacgcgctctaatga

SEQ ID NO: 1188 - protein, 321 aa, synthetic construct
  REGION 1..321: note = Variant of adenosine kinase
MHHHHHHGGSGMSALICGSLAYDTIMVFPDQFKNHILPDRVHRLNVSFLVPRMRREFGGCAGNIAYNLHLLGGAPIVMATVGFDFGPYREHFETLGIDLSRVKIIDDLSTPQAFITTDMDHNQITAFHGGAMMRSYENHVRDVPGVTLGLVGPDGREGMIQNAEEFAAGGIPFIFDPGQALPLFNGPELREFIEQADYVVVNDYESNLLQTRTGWNEQDIVSRVQAYITTQGSAGALVHTPEKTYDIPPAHTRRVVDPTGCGDAFRAGLIYGIQHNYDWLTIGRMGNLMGALKVEHPGTQNQRFDFAEFNDQFKQYFGYAL

SEQ ID NO: 1189 - DNA, 969 bp, synthetic construct
  misc_feature 1..969: note = Variant of adenosine kinase
  source 1..969: mol_type = other DNA
atgcaccatcatcaccatcacgggggctccggcatgagtgcactgatttgcggttctttagcgtatgataccatcatggtgtttccggaccagttcaagaaccatattctgcccgatcgtgttcaccgcctcaatgtcagctttcttgtaccacgcatgcgtcgtgaatttggaggctgtgccggcaacattgcgtacaatctgcatctgttgggtggtgctccgatcgtaatggctacggtgggccaagatttcggtccgtatcgcgttcacttcgaaactctgggcattgacttatcccgcgtcaagatcatcgatgatctgagtacaccgcaggccttcattaccaccgacatggatcataaccagattacggcgtttcatggcggcgcaatgatgcgttcgtacgaaaatcacgttcgtgatgtgccgggtgttaccttgggcctcgtaggtcctgatggacgcgagggcatgatccaaaatgccgaagaatttgctgctggtggcattccgttcatttttgacccaggtcaggcactgccgctgttcaacggccccgaactgcgcgagtttatcgaacaggcggactatgtggtggtcaacgattacgaaagcaatcttcttcaaacgcgtactggctggaacgagcaggacattgtttcacgcgtgcaggcgtatatcaccacgcaaggttcggctggagccctggtacatacaccggagaagacctacgatattccgccggctcacacccgtcgtgtcgttgatccaactggttgcggcgacgcgtttcgcgccggcctgatctatggtattcagcataattatgattggttgaccattggccgcatgggaaacttaatgggtgcgctgaaagtggaacaccctggcacccaaaatcagcgtttcgattttgccgaattcaacgaccagttcaaacaatattttggctacgcgctctaatga

SEQ ID NO: 1190 - protein, 321 aa, synthetic construct
  REGION 1..321: note = Variant of adenosine kinase
MHHHHHHGGSGMSALICGSLAYDTIMVFPDQFKNHILPDRVHRLNVSFLVPRMRREFGGCAGNIAYNLHLLGGAPIVMATVGQDFGPYRVHFETLGIDLSRVKIIDDLSTPQAFITTDMDHNQITAFHGGAMMRSYENHVRDVPGVTLGLVGPDGREGMIQNAEEFAAGGIPFIFDPGQALPLFNGPELREFIEQADYVVVNDYESNLLQTRTGWNEQDIVSRVQAYITTQGSAGALVHTPEKTYDIPPAHTRRVVDPTGCGDAFRAGLIYGIQHNYDWLTIGRMGNLMGALKVEHPGTQNQRFDFAEFNDQFKQYFGYAL

SEQ ID NO: 1191 - DNA, 969 bp, synthetic construct
  misc_feature 1..969: note = Variant of adenosine kinase
  source 1..969: mol_type = other DNA
atgcaccatcatcaccatcacgggggctccggcatgagtgcactgatttgcggttctttagcgtatgataccatcatggtgtttccggaccagttcaagaaccatattctgcccgatcgtgttcaccgcctcaatgtcagctttcttgtaccacgcatgcgtcgtgaatttggaggctgtgccggcaacattgcgtacaatctgcatctgttgggtggtaagccgatcgtaatggctacggtgggccaagatttcggtccgtatcgcgagcacttcgaaactctgggcattgacttatcccgcgtcaagatcatcgatgatctgagtacaccgcaggccttcattaccaccgacatggatcataaccagattacggcgtttcatggcggcgcaatgatgcgttcgtacgaaaatcacgttcgtgatgtgccgggtgttaccttgggcctcgtaggtcctgatggacgcgagggcatgatccaaaatgccgaagaatttgctgctggtggcattccgttcatttttgacccaggtcaggcactgccgctgttcaacggccccgaactgcgcgagtttatcgaacaggcggactatgtggtggtcaacgattacgaaagcaatcttcttcaaacgcgtactggctggaacgagcaggacattgtttcacgcgtgcaggcgtatatcaccacgcaaggttcggctggagccctggtacatacaccggagaagacctacgatattccgccggctcacacccgtcgtgtcgttgatccaactggttgcggcgacgcgtttcgcgccggcctgatctatggtattcagcataattatgattggttgaccattggccgcatgggaaacttaatgggtgcgctgaaagtggaacaccctggcacccaaaatcagcgtttcgattttgccgaattcaacgaccagttcaaacaatattttggctacgcgctctaatga

SEQ ID NO: 1192 - protein, 321 aa, synthetic construct
  REGION 1..321: note = Variant of adenosine kinase
MHHHHHHGGSGMSALICGSLAYDTIMVFPDQFKNHILPDRVHRLNVSFLVPRMRREFGGCAGNIAYNLHLLGGKPIVMATVGQDFGPYREHFETLGIDLSRVKIIDDLSTPQAFITTDMDHNQITAFHGGAMMRSYENHVRDVPGVTLGLVGPDGREGMIQNAEEFAAGGIPFIFDPGQALPLFNGPELREFIEQADYVVVNDYESNLLQTRTGWNEQDIVSRVQAYITTQGSAGALVHTPEKTYDIPPAHTRRVVDPTGCGDAFRAGLIYGIQHNYDWLTIGRMGNLMGALKVEHPGTQNQRFDFAEFNDQFKQYFGYAL

SEQ ID NO: 1193 - DNA, 969 bp, synthetic construct
  misc_feature 1..969: note = Variant of adenosine kinase
  source 1..969: mol_type = other DNA
atgcaccatcatcaccatcacgggggctccggcatgagtgcactgatttgcggttctttagcgtatgataccatcatggtgtttccggaccagttcaagaaccatattctgcccgatcgtgttcaccgcctcaatgtcagctttcttgtaccacgcatgcgtcgtgaatttggaggctgtgccggcaacattgcgtacaatctgcatctgttgggtggtgctccgatcgtaatggctacggtgggccaagatttcggtccgtatcgcgagcacttcgaaactctgggcattgacttatcccgcgtcaagatcatcgatgatctgagtacaccgcaggccttcattaccaccgacatggatcataaccagattacggcgtttcatggcggcgcaatgatgcgttcgtacgaaaatcacgttcgtgatgtgccgggtgttaccttgggcctcgtaggtcctgatggacgcgagggcatgatccaaaatgccgaagaatttgctgctggtggcattccgttcatttttgacccaggtcaggcactgccgctgttcaacggccccgaactgcgcgagtttatcgaacaggcggactatgtggtggtcaacgattacgaaagcaatcttcttcaaacgcgtactggctggaacgagcaggacattgtttcacgcgtgcaggcgtatatcaccacgcaaggttcggctggagccctggtacatacaccggagaagacctacgatattccgccggctcacacccgtcgtgtcgttgatccaactggttgcggcgacgcgtttcgcgccggcctgatctatggtattcagcataattatgattggttgaccattggccgcatgggaaacttaatgggtgcgctgaaagtggaacaccctggcacgcaaaatcagtttttcgattttgccgaattcaacgaccagttcaaacaatattttggctacgcgctctaatga

SEQ ID NO: 1194 - protein, 321 aa, synthetic construct
  REGION 1..321: note = Variant of adenosine kinase
MHHHHHHGGSGMSALICGSLAYDTIMVFPDQFKNHILPDRVHRLNVSFLVPRMRREFGGCAGNIAYNLHLLGGAPIVMATVGQDFGPYREHFETLGIDLSRVKIIDDLSTPQAFITTDMDHNQITAFHGGAMMRSYENHVRDVPGVTLGLVGPDGREGMIQNAEEFAAGGIPFIFDPGQALPLFNGPELREFIEQADYVVVNDYESNLLQTRTGWNEQDIVSRVQAYITTQGSAGALVHTPEKTYDIPPAHTRRVVDPTGCGDAFRAGLIYGIQHNYDWLTIGRMGNLMGALKVEHPGTQNQFFDFAEFNDQFKQYFGYAL

SEQ ID NO: 1195 - DNA, 969 bp, synthetic construct
  misc_feature 1..969: note = Variant of adenosine kinase
  source 1..969: mol_type = other DNA
atgcaccatcatcaccatcacgggggctccggcatgagtgcactgatttgcggttctttagcgtatgataccatcatggtgtttccggaccagttcaagaaccatattctgcccgatcgtgttcaccgcctcaatgtcagctttcttgtaccacgcatgcgtcgtgaatttggaggctgtgccggcaacattgcgtacaatctgcatctgttgggtggtgctccgatcgtaatggctacggtgggccaagatttcggtccgtatcgcgagcacttcgaaactctgggcattgacttatcccgcgtcaagatcatcgatgatctgagtacaccgcaggccttcattaccaccgacatggatcataaccagattacggcgtttcatggcggcgcaatgatgcgttcgtacgaaaatcacgttcgtgatgtgccgggtgttaccttgggcctcgtaggtcctgatggacgcgagggcatgatccaaaatgccgaagaatttgctgctggtggcattccgttcatttttgacccaggtcaggcactgccgctgttcaacggccccgaactgcgcgagtttatcgaacaggcggactatgtggtggtcaacgattacgaaagcaatcttcttcaaacgcgtactggctggaacgagcaggacattgtttcacgcgtgcaggcgtatatcaccacgcaaggttcggctggagccctggtacatacaccggagaagacctacgatattccgccggctcacacccgtcgtgtcgttgatccaactggttgcggcgacgcgtttcgcgccggcctgatctatggtattcagcataattatgattggttgaccattggccgcatgggaaacttaatgggtgcgctgaaagtggaacaccctggcacccaaaatcagcgtttcgattttgccgaattcgcggaccagttcaaacaatattttggctacgcgctctaatga

SEQ ID NO: 1196 - protein, 321 aa, synthetic construct
  REGION 1..321: note = Variant of adenosine kinase
MHHHHHHGGSGMSALICGSLAYDTIMVFPDQFKNHILPDRVHRLNVSFLVPRMRREFGGCAGNIAYNLHLLGGAPIVMATVGQDFGPYREHFETLGIDLSRVKIIDDLSTPQAFITTDMDHNQITAFHGGAMMRSYENHVRDVPGVTLGLVGPDGREGMIQNAEEFAAGGIPFIFDPGQALPLFNGPELREFIEQADYVVVNDYESNLLQTRTGWNEQDIVSRVQAYITTQGSAGALVHTPEKTYDIPPAHTRRVVDPTGCGDAFRAGLIYGIQHNYDWLTIGRMGNLMGALKVEHPGTQNQRFDFAEFADQFKQYFGYAL

SEQ ID NO: 1197 - DNA, 969 bp, synthetic construct
  misc_feature 1..969: note = Variant of adenosine kinase
  source 1..969: mol_type = other DNA
atgcaccatcatcaccatcacgggggctccggcatgagtgcactgatttgcggttctttagcgtatgataccatcatggtgtttccggaccagttcaagaaccatattctgcccgatcgtgttcaccgcctcaatgtcagctttcttgtaccacgcatgcgtcgtgaatttggaggctgtgccggcaacattgcgtacaatctgcatctgttgggtggtgctccgatcgtaatggctacggtgggccaagatttcggtccgtatcgcgagcacttcgaaactctgggcattgacttatcccgcgtcaagatcatcgatgatctgagtacaccgcaggccttcattaccaccgacatggatcataaccagattacggcgtttcatggcggcgcaatgatgcgttcgtacgaaaatcacgttcgtgatgtgccgggtgttaccttgggcctcgtaggtcctgatggacgcgagggcatgatccaaaatgccgaagaatttgctgctggtggcattccgttcatttttgacccaggtcaggcactgccgctgttcaacggccccgaactgcgcgagtttatcgaacaggcggactatgtggtggtcaacgattacgaaagcaatcttcttcaaacgcgtactggctggaacgagcaggacattgtttcacgcgtgcaggcgtatatcaccacgcaaggttcggctggagccctggtacatacaccggagggtacctacgatattccgccggctcacacccgtcgtgtcgttgatccaactggttgcggcgacgcgtttcgcgccggcctgatctatggtattcagcataattatgattggttgaccattggccgcatgggaaacttaatgggtgcgctgaaagtggaacaccctggcacccaaaatcagcgtttcgattttgccgaattcaacgaccagttcaaacaatattttggctacgcgctctaatga

SEQ ID NO: 1198 - protein, 321 aa, synthetic construct
  REGION 1..321: note = Variant of adenosine kinase
MHHHHHHGGSGMSALICGSLAYDTIMVFPDQFKNHILPDRVHRLNVSFLVPRMRREFGGCAGNIAYNLHLLGGAPIVMATVGQDFGPYREHFETLGIDLSRVKIIDDLSTPQAFITTDMDHNQITAFHGGAMMRSYENHVRDVPGVTLGLVGPDGREGMIQNAEEFAAGGIPFIFDPGQALPLFNGPELREFIEQADYVVVNDYESNLLQTRTGWNEQDIVSRVQAYITTQGSAGALVHTPEGTYDIPPAHTRRVVDPTGCGDAFRAGLIYGIQHNYDWLTIGRMGNLMGALKVEHPGTQNQRFDFAEFNDQFKQYFGYAL

SEQ ID NO: 1199 - DNA, 969 bp, synthetic construct
  misc_feature 1..969: note = Variant of adenosine kinase
  source 1..969: mol_type = other DNA
atgcaccatcatcaccatcacgggggctccggcatgagtgcactgatttgcggttctttagcgtatgataccatcatggtgtttccggaccagttcaagaaccatattctgcccgatcgtgttcaccgcctcaatgtcagctttcttgtaccacgcatgcgtcgtgaatttggaggctgtgccggcaacattgcgtacaatctgcatctgttgggtggtgctccgatcgtaatggctacggtgggccaagatttcggtccgtatcgcgagcacttcgaaactctgggcattgacttatcccgcgtcaagatcatcgatgatctgagtacaccgcaggccttcattaccaccgacatggatcataaccagattacggcgtttcatggcggcgcaatgatgcgttcgtacgaaaatcacgttcgtgatgtgccgggtgttaccttgggcctcgtaggtcctgatggacgcgagggcatgatccaaaatgccgaagaatttgctgctggtggcattccgttcatttttgacccaggtcaggcactgccgctgttcaacggccccgaactgcgcgagtttatcgaacaggcggactatgtggtggtcaacgattacgaaagcaatcttcttcaaacgcgtactggctggaacgagcaggacattgttgcgcgcgtgcaggcgtatatcaccacgcaaggttcggctggagccctggtacatacaccggagaagacctacgatattccgccggctcacacccgtcgtgtcgttgatccaactggttgcggcgacgcgtttcgcgccggcctgatctatggtattcagcataattatgattggttgaccattggccgcatgggaaacttaatgggtgcgctgaaagtggaacaccctggcacccaaaatcagcgtttcgattttgccgaattcaacgaccagttcaaacaatattttggctacgcgctctaatga

SEQ ID NO: 1200 - protein, 321 aa, synthetic construct
  REGION 1..321: note = Variant of adenosine kinase
MHHHHHHGGSGMSALICGSLAYDTIMVFPDQFKNHILPDRVHRLNVSFLVPRMRREFGGCAGNIAYNLHLLGGAPIVMATVGQDFGPYREHFETLGIDLSRVKIIDDLSTPQAFITTDMDHNQITAFHGGAMMRSYENHVRDVPGVTLGLVGPDGREGMIQNAEEFAAGGIPFIFDPGQALPLFNGPELREFIEQADYVVVNDYESNLLQTRTGWNEQDIVARVQAYITTQGSAGALVHTPEKTYDIPPAHTRRVVDPTGCGDAFRAGLIYGIQHNYDWLTIGRMGNLMGALKVEHPGTQNQRFDFAEFNDQFKQYFGYAL

SEQ ID NO: 1201 - DNA, 969 bp, synthetic construct
  misc_feature 1..969: note = Variant of adenosine kinase
  source 1..969: mol_type = other DNA
atgcaccatcatcaccatcacgggggctccggcatgagtgcactgatttgcggttctttagcgtatgataccatcatggtgtttccggaccagttcaagaaccatattctgcccgatcgtgttcacagtctcaatgtcagctttcttgtaccacgcatgcgtcgtgaatttggaggctgtgccggcaacattgcgtacaatctgcatctgttgggtggtgctccgatcgtaatggctacggtgggccaagatttcggtccgtatcgcgagcacttcgaaactctgggcattgacttatcccgcgtcaagatcatcgatgatctgagtacaccgcaggccttcattaccaccgacatggatcataaccagattacggcgtttcatggcggcgcaatgatgcgttcgtacgaaaatcacgttcgtgatgtgccgggtgttaccttgggcctcgtaggtcctgatggacgcgagggcatgatccaaaatgccgaagaatttgctgctggtggcattccgttcatttttgacccaggtcaggcactgccgctgttcaacggccccgaactgcgcgagtttatcgaacaggcggactatgtggtggtcaacgattacgaaagcaatcttcttcaaacgcgtactggctggaacgagcaggacattgtttcacgcgtgcaggcgtatatcaccacgcaaggttcggctggagccctggtacatacaccggagaagacctacgatattccgccggctcacacccgtcgtgtcgttgatccaactggttgcggcgacgcgtttcgcgccggcctgatctatggtattcagcataattatgattggttgaccattggccgcatgggaaacttaatgggtgcgctgaaagtggaacaccctggcacccaaaatcagcgtttcgattttgccgaattcaacgaccagttcaaacaatattttggctacgcgctctaatga

SEQ ID NO: 1202 - protein, 321 aa, synthetic construct
  REGION 1..321: note = Variant of adenosine kinase
MHHHHHHGGSGMSALICGSLAYDTIMVFPDQFKNHILPDRVHSLNVSFLVPRMRREFGGCAGNIAYNLHLLGGAPIVMATVGQDFGPYREHFETLGIDLSRVKIIDDLSTPQAFITTDMDHNQITAFHGGAMMRSYENHVRDVPGVTLGLVGPDGREGMIQNAEEFAAGGIPFIFDPGQALPLFNGPELREFIEQADYVVVNDYESNLLQTRTGWNEQDIVSRVQAYITTQGSAGALVHTPEKTYDIPPAHTRRVVDPTGCGDAFRAGLIYGIQHNYDWLTIGRMGNLMGALKVEHPGTQNQRFDFAEFNDQFKQYFGYAL

SEQ ID NO: 1203 - DNA, 969 bp, synthetic construct
  misc_feature 1..969: note = Variant of adenosine kinase
  source 1..969: mol_type = other DNA
atgcaccatcatcaccatcacgggggctccggcatgagtgcactgatttgcggttctttagcgtatgataccatcatggtgtttccggaccagttcaagaaccatattctgcccgatcgtgttcaccgcctcaatgtcagctttcttgtaccacgcatgcgtcgtgaatttggaggctgtgccggcaacattgcgtacaatctgcatctgttgggtggtgctccgatcgtaatggctacggtgggccaagatttcggtccgtatcgcgagcacttcgaaactctgggcattgacttatcccgcgtcaagatcatcgatgatctgagtacaccgcaggccttcattaccaccgacatggatcataaccagattacggcgtttcatggcggcgcaatgatgcgttcgtacgaaaatcacgttcgtgatgtgccgggtgttaccttgggcctcgtaggtcctgatggacgcgagggcatgatccaaaatgccgaagaatttgctgctggtggcattccgttcatttttgacccaggtcaggcactgccgctgttcaacggccccgaactgcgcgagtttatcgaacaggcggactatgtggtggtcaacgattacgaaagcaatcttcttcaaacgcgtactggctggaacgagcaggacattgtttcacgcgtgcaggcgtatatcaccacgcaaggttcggctggagccctggtacatacaccggagaagacctacgatattccgccggctcacacccgtcgtgtcgttgatccaactggttgcggcgacgcgtttcgcgccggcctgatctatggtattcagcataattatgattggttgaccattggccgcatgggaaacttaatgggtgcgctgaaagtggaacaccctggcacgcaaaatcagtggttcgattttgccgaattcaacgaccagttcaaacaatattttggctacgcgctctaatga

SEQ ID NO: 1204 - protein, 321 aa, synthetic construct
  REGION 1..321: note = Variant of adenosine kinase
MHHHHHHGGSGMSALICGSLAYDTIMVFPDQFKNHILPDRVHRLNVSFLVPRMRREFGGCAGNIAYNLHLLGGAPIVMATVGQDFGPYREHFETLGIDLSRVKIIDDLSTPQAFITTDMDHNQITAFHGGAMMRSYENHVRDVPGVTLGLVGPDGREGMIQNAEEFAAGGIPFIFDPGQALPLFNGPELREFIEQADYVVVNDYESNLLQTRTGWNEQDIVSRVQAYITTQGSAGALVHTPEKTYDIPPAHTRRVVDPTGCGDAFRAGLIYGIQHNYDWLTIGRMGNLMGALKVEHPGTQNQWFDFAEFNDQFKQYFGYAL

SEQ ID NO: 1205 - DNA, 699 bp, synthetic construct
  misc_feature 1..699: note = Variant of adenylate kinase
  source 1..699: mol_type = other DNA
atgcaccatcatcaccatcacgggggctccggcatgatggcatatctggtgttcttaggtccgccgggcgcgggaaaaggtacccaatcgaaacgcattcaggaaaagactggcatcccacatattagcacgggcgatatcttccgtgacatcgtcaagaaagagaacgatgaactgggcaagaagattaaagaaatcatggagaaaggtgaactcgttccagatgaactggtgaatgaggtagtaaaacgccgcctgtcggagaaagactgcgaaaaaggctttattttggatggttatccgcgtaccgttgctcaagcggaattcctggacagttttcttgaatcccagaacaaacagttgacagccgccgtgctgttcaaagtccccgaagatgttgttgtgcaacgtttaacctctcgcctgatctgtccgaaatgcgggcgtatctacaatatgatttcactgccaccaaaagaagacgagctgtgtgacgattgcaaagtcaaattagtacagcgtgatgatgataaggaagaaacggttcgtcaccgcctgaaagtctaccttgagaagacccagccggtcattgactattatggcaagaaaggtattctcaaacgcgtagatgggtcgcaaggaatcgacaacgttgttgcagaagtcctgaagattattggttggagcgataagtaatga

SEQ ID NO: 1206 - protein, 231 aa, synthetic construct
  REGION 1..231: note = Variant of adenylate kinase
MHHHHHHGGSGMMAYLVFLGPPGAGKGTQSKRIQEKTGIPHISTGDIFRDIVKKENDELGKKIKEIMEKGELVPDELVNEVVKRRLSEKDCEKGFILDGYPRTVAQAEFLDSFLESQNKQLTAAVLFKVPEDVVVQRLTSRLICPKCGRIYNMISLPPKEDELCDDCKVKLVQRDDDKEETVRHRLKVYLEKTQPVIDYYGKKGILKRVDGSQGIDNVVAEVLKIIGWSDK

SEQ ID NO: 1207 - DNA, 699 bp, synthetic construct
  misc_feature 1..699: note = Variant of adenylate kinase
  source 1..699: mol_type = other DNA
atgcaccatcatcaccatcacgggggctccggcatgatggcatatctggtgctgttaggtccgccgggcgcgggaaaaggtacctacgccaaacgcattcaggaaaagactggcatcccacatattagcacgggcgatatcttccgtgacatcgtcaagaaagagaacgatgaactgggcaagaagattaaagaaatcatggagaaaggtgaactcgttccagatgaactggtgaatgaggtagtaaaacgccgcctgtcggagaaagactgcgaaaaaggctttattttggatggttatccgcgtaccgttgctcaagcggaattcctggacagttttcttgaatcccagaacaaacagttgacagccgccgtgctgttcgatgtccccgaagatgttgttgtgcaacgtttaacctctcgcctgatctgtccgaaatgcgggcgtatctacaatatgatttcactgccaccaaaagaagacgagctgtgtgacgattgcaaagtcaaattagtacagcgtgacgatgataaggaagaaacggttcgtcaccgctataaagtctaccttgagaagacccagccggtcattgactattatggcaagaaaggtattctcaaacgcgtagatgggtcgcaaggaatcgacaacgttgttgcagaagtcctgaagattattggttggagcgataagtaatga

SEQ ID NO: 1208 - protein, 231 aa, synthetic construct
  REGION 1..231: note = Variant of adenylate kinase
MHHHHHHGGSGMMAYLVLLGPPGAGKGTYAKRIQEKTGIPHISTGDIFRDIVKKENDELGKKIKEIMEKGELVPDELVNEVVKRRLSEKDCEKGFILDGYPRTVAQAEFLDSFLESQNKQLTAAVLFDVPEDVVVQRLTSRLICPKCGRIYNMISLPPKEDELCDDCKVKLVQRDDDKEETVRHRYKVYLEKTQPVIDYYGKKGILKRVDGSQGIDNVVAEVLKIIGWSDK

SEQ ID NO: 1209 - DNA, 699 bp, synthetic construct
  misc_feature 1..699: note = Variant of adenylate kinase
  source 1..699: mol_type = other DNA
atgcaccatcatcaccatcacgggggctccggcatgatggcatatctggtgtttttaggtccgccgggcgcgggaaaaggtacccaatcgaaacgcattcaggaaaagactggcatcccacatattagcacgggcgatatcttccgtgacatcgtcaagaaagagaacgatgaactgggcaagaagattaaagaaatcatggagaaaggtgaactcgttccagatgaactggtgaatgaggtagtaaaacgccgcctgtcggagaaagactgcgaaaaaggctttattttggatggttatccgcgtaccgttgctcaagcggaattcctggacagttttcttgaatcccagaacaaacagttgacagccgccgtgctgttcaaagtccccgaagatgttgttgtgcaacgtttaacctctcgcctgatctgtccgaaatgcgggcgtatctacaatatgatttcactgccaccaaaagaagacgagctgtgtgacgattgcaaagtcaaattagtacagcgtgatgatgataaggaagaaacggttcgtcaccgcctgaaagtctaccttgagaagacccagccggtcattgactattatggcaagaaaggtattctcaaacgcgtagatggcacgattggaatcgacaacgttgttgcagaagtcctgaagattattggttggagcgataagtaatga

SEQ ID NO: 1210 - protein, 231 aa, synthetic construct
  REGION 1..231: note = Variant of adenylate kinase
MHHHHHHGGSGMMAYLVFLGPPGAGKGTQSKRIQEKTGIPHISTGDIFRDIVKKENDELGKKIKEIMEKGELVPDELVNEVVKRRLSEKDCEKGFILDGYPRTVAQAEFLDSFLESQNKQLTAAVLFKVPEDVVVQRLTSRLICPKCGRIYNMISLPPKEDELCDDCKVKLVQRDDDKEETVRHRLKVYLEKTQPVIDYYGKKGILKRVDGTIGIDNVVAEVLKIIGWSDK

SEQ ID NO: 1211 - DNA, 699 bp, synthetic construct
  misc_feature 1..699: note = Variant of adenylate kinase
  source 1..699: mol_type = other DNA
atgcaccatcatcaccatcacgggggctccggcatgatggcatatctggtgtttttaggtccgccgggcgcgggaaaaggtacctacgccaaacgcattcaggaaaagactggcatctgtcatattagtacgggcgatatcttccgtgacatcgtcaagaaagagaacgatgaactgggcaagaagattaaagaaatcatggagaaaggtgaactcgttccagatgaactggtgaatgaggtagtaaaacgccgcctgtcggagaaagactgcgaaaaaggctttattttggatggttatccgcgtaccgttgctcaagcggaattcctggacagttttcttgaatcccagaacaaacagttgacagccgccgtgctgttcgatgtccccgaagatgttgttccacagcgtttaacctctcgccgcatctgtccgaaatgcgggcgtatctacaatatgatttcactgccaccaaaagaagacgagctgtgtgacgattgcaaagtcaaattagtacagcgtgatgatgataaggaagaaacggttcgtcaccgctataaagtctaccttgagaagacccagccggtcattgactattatggcaagaaaggtattctcaaacgcgtagatggcacgattccaatcgataacgttgttgcagaagtcctgaagattattggttggagcgataagtaatga

SEQ ID NO: 1212 - protein, 231 aa, synthetic construct
  REGION 1..231: note = Variant of adenylate kinase
MHHHHHHGGSGMMAYLVFLGPPGAGKGTYAKRIQEKTGICHISTGDIFRDIVKKENDELGKKIKEIMEKGELVPDELVNEVVKRRLSEKDCEKGFILDGYPRTVAQAEFLDSFLESQNKQLTAAVLFDVPEDVVPQRLTSRRICPKCGRIYNMISLPPKEDELCDDCKVKLVQRDDDKEETVRHRYKVYLEKTQPVIDYYGKKGILKRVDGTIPIDNVVAEVLKIIGWSDK

SEQ ID NO: 1213 - DNA, 699 bp, synthetic construct
  misc_feature 1..699: note = Variant of adenylate kinase
  source 1..699: mol_type = other DNA
atgcaccatcatcaccatcacgggggctccggcatgatggcatatctggtgctgttaggtccgccgggcgcgggaaaaggtacccaatcgaaacgcattcaggaaaagactggcatcccacatattagcacgggcgatatcttccgtgacatcgtcaagaaagagaacgatgaactgggcaagaagattaaagaaatcatggagaaaggtgaactcgttccagatgaactggtgaatgaggtagtaaaacgccgcctgtcggagaaagactgcgaaaaaggctttattttggatggttatccgcgtaccgttgctcaagcggaattcctggacagttttcttgaatcccagaacaaacagttgacagccgccgtgctgctggatgtccccgaagatgttgttgtgcaacgtttaacctctcgccgtatctgtccgaaatgcgggcgtagctacaatatgatttcactgccaccaaaagaagacgagctgtgtgacgattgcaaagtcaaattagtacagcgtgacgatgataaggaagaaacggttcgtcaccgctataaagtctaccttgagaagacccagccggtcattgactattatggcaagaaaggtattctcaaacgcgtagatggcacgattggaatcgacaacgttgttgcagaagttctgaagattattggttggagcgataagtaatga

SEQ ID NO: 1214 - protein, 231 aa, synthetic construct
  REGION 1..231: note = Variant of adenylate kinase
MHHHHHHGGSGMMAYLVLLGPPGAGKGTQSKRIQEKTGIPHISTGDIFRDIVKKENDELGKKIKEIMEKGELVPDELVNEVVKRRLSEKDCEKGFILDGYPRTVAQAEFLDSFLESQNKQLTAAVLLDVPEDVVVQRLTSRRICPKCGRSYNMISLPPKEDELCDDCKVKLVQRDDDKEETVRHRYKVYLEKTQPVIDYYGKKGILKRVDGTIGIDNVVAEVLKIIGWSDK

SEQ ID NO: 1215 - DNA, 699 bp, synthetic construct
  misc_feature 1..699: note = Variant of adenylate kinase
  source 1..699: mol_type = other DNA
atgcaccatcatcaccatcacgggggctccggcatgatggcatatctggtgtttttaggtccgccgggcgcgggaaaaggtacctacgccaaacgcattcaggaaaagactggcatcccacatattagcacgggcgatatcttccgtgacatcgtcaagaaagagaacgatgaactgggcaagaagattaaagaaatcatggagaaaggtgaactcgttccagatgaactggtgaatgaggtaatcaaacgccgcctgtcggagaaagactgcgaaaaaggctttattttggatggttatccgcgtaccgttgctcaagcggaattcctggacagttttcttgaatcccagaacaaacagttgacagccgccgtgctgttcgatgtccccgaagatgttgttgtgcaacgtttaacctctcgccgcatctgtccgaaatgcgggcgtatctacaatatgatttcactgccaccaaaagaagacgagctgtgtgacgattgcaaagtcaaattagtacagcgtgatgatgataaggaagaaacggttcgtcaccgctataaagtctaccttgagaagacccagccggtcattgactattatggcaagaaaggtattctcaaacgcgtagatggcacgattggaatcgacaacgttgttgcagaagtcctgaagattattggttggagcgataagtaatga

SEQ ID NO: 1216 - protein, 231 aa, synthetic construct
  REGION 1..231: note = Variant of adenylate kinase
MHHHHHHGGSGMMAYLVFLGPPGAGKGTYAKRIQEKTGIPHISTGDIFRDIVKKENDELGKKIKEIMEKGELVPDELVNEVIKRRLSEKDCEKGFILDGYPRTVAQAEFLDSFLESQNKQLTAAVLFDVPEDVVVQRLTSRRICPKCGRIYNMISLPPKEDELCDDCKVKLVQRDDDKEETVRHRYKVYLEKTQPVIDYYGKKGILKRVDGTIGIDNVVAEVLKIIGWSDK

SEQ ID NO: 1217 - DNA, 699 bp, synthetic construct
  misc_feature 1..699: note = Variant of adenylate kinase
  source 1..699: mol_type = other DNA
atgcaccatcatcaccatcacgggggctccggcatgatggcatatctggtgtttttaggtccgccgggcgcgggaaaaggtacctacgccaaacgcattcaggaaaagactggcatcccacatattagcacgggcgatatcttccgtgacatcgtcaagaaagagaacgatgaactgggcaagaagattaaagaaatcatggagcagggtgaactcgttccagatgaactggtgaatgaggtagtaaaacgccgcctgtcggagaaagactgcgaaaaaggctttattttggatggttatccgcgtaccgttgctcaagcggaattcctggacagttttcttgaatcccagaacaaacagttgacagccgccgtgctgttcgatgtccccgaagatgttgttgtgcaacgtttaacctctcgccgcatctgtccgaaatgcgggcgtatctacaatatgatttcactgccaccaaaagaagacgagctgtgtgacgattgcaaagtcaaattagtacagcgtgatgatgataaggaagaaacggttcgtcaccgctataaagtctaccttgagaagacccagccggtcattgactattatggcaagaaaggtattctcaaacgcgtagatggcacgattggaatcgacaacgttgttgcagaagtcctgaagattattggttggagcgataagtaatga

SEQ ID NO: 1218 - protein, 231 aa, synthetic construct
  REGION 1..231: note = Variant of adenylate kinase
MHHHHHHGGSGMMAYLVFLGPPGAGKGTYAKRIQEKTGIPHISTGDIFRDIVKKENDELGKKIKEIMEQGELVPDELVNEVVKRRLSEKDCEKGFILDGYPRTVAQAEFLDSFLESQNKQLTAAVLFDVPEDVVVQRLTSRRICPKCGRIYNMISLPPKEDELCDDCKVKLVQRDDDKEETVRHRYKVYLEKTQPVIDYYGKKGILKRVDGTIGIDNVVAEVLKIIGWSDK

SEQ ID NO: 1219 - DNA, 699 bp, synthetic construct
  misc_feature 1..699: note = Variant of adenylate kinase
  source 1..699: mol_type = other DNA
atgcaccatcatcaccatcacgggggctccggcatgatggcatatctggtgtttttaggtccgccgggcgcgggaaaaggtacctacgccaaacgcattcaggaaaagactggcatcccacatattagcacgggcgatatcttccgtgacatcgtcaagaaagagaacgatgaactgggcaagaagattaaagaaatcatggagaaaggtgaactcgttccagatgaactggtgaatgaggtagtaaaacgccgcctgtcggagaaagactgcgaaaaaggctttattttggatggttatccgcgtaccgttgctcaagcggaattcctggacagttttcttgaatcccaggggaaacagttgacagccgccgtgctgttcgatgtccccgaagatgttgttgtgcaacgtttaacctctcgccgcatctgtccgaaatgcgggcgtatctacaatatgatttcactgccaccaaaagaagacgagctgtgtgacgattgcaaagtcaaattagtacagcgtgatgatgataaggaagaaacggttcgtcaccgctataaagtctaccttgagaagacccagccggtcattgactattatggcaagaaaggtattctcaaacgcgtagatggcacgattggaatcgacaacgttgttgcagaagtcctgaagattattggttggagcgataagtaatga

SEQ ID NO: 1220 - protein, 231 aa, synthetic construct
  REGION 1..231: note = Variant of adenylate kinase
MHHHHHHGGSGMMAYLVFLGPPGAGKGTYAKRIQEKTGIPHISTGDIFRDIVKKENDELGKKIKEIMEKGELVPDELVNEVVKRRLSEKDCEKGFILDGYPRTVAQAEFLDSFLESQGKQLTAAVLFDVPEDVVVQRLTSRRICPKCGRIYNMISLPPKEDELCDDCKVKLVQRDDDKEETVRHRYKVYLEKTQPVIDYYGKKGILKRVDGTIGIDNVVAEVLKIIGWSDK

SEQ ID NO: 1221 - DNA, 699 bp, synthetic construct
  misc_feature 1..699: note = Variant of adenylate kinase
  source 1..699: mol_type = other DNA
atgcaccatcatcaccatcacgggggctccggcatgatggcatatctggtgttcttaggtccgccgggcgcgggaaaaggtacccaatcgaaacgcattcaggaaaagactggcatcccacatattagcacgggcgatatcttccgtgacatcgtcaagaaagagaacgatgaactgggcaagaagattaaagaaatcatggagaaaggtgaactcgttccagatgaactggtgaatgaggtagtaaaacgccgcctgtcggagaaagactgcgaaaaaggctttattttggatggttatccgcgtaccgttgctcaagcggaattcctggacagttttcttgaatcccagaacaaacagttgacagccgccgtgctgttcgatgtccccgaagatgttgttgtgcaacgtttaacctctcgccgcatctgtccgaaatgcgggcgtatctacaatatgatttcactgccaccaaaagaagacgagctgtgtgacgattgcaaagtcaaattagtacagcgtgatgatgataaggaagaaacggttcgtcaccgctataaagtctaccttgagaagacccagccggtcattgactattatggcaagaaaggtattctcaaacgcgtagatggcacgattggaatcgacaacgttgttgcagaagtcctgaagattattggttggagcgataagtaatga

SEQ ID NO: 1222 - protein, 231 aa, synthetic construct
  REGION 1..231: note = Variant of adenylate kinase
MHHHHHHGGSGMMAYLVFLGPPGAGKGTQSKRIQEKTGIPHISTGDIFRDIVKKENDELGKKIKEIMEKGELVPDELVNEVVKRRLSEKDCEKGFILDGYPRTVAQAEFLDSFLESQNKQLTAAVLFDVPEDVVVQRLTSRRICPKCGRIYNMISLPPKEDELCDDCKVKLVQRDDDKEETVRHRYKVYLEKTQPVIDYYGKKGILKRVDGTIGIDNVVAEVLKIIGWSDK

SEQ ID NO: 1223 - DNA, 699 bp, synthetic construct
  misc_feature 1..699: note = Variant of adenylate kinase
  source 1..699: mol_type = other DNA
atgcaccatcatcaccatcacgggggctccggcatgatggcatatctggtgtttttaggtccgccgggcgcgggaaaaggtacctacgccaaacgcattcaggaaaagactggcatcccacatattagcacgggcgatatcttccgtgacatcgtcaagaaagagaacgatgaactgggcaagaagattaaagaaatcatggagaaaggtgaactcgttccagatgaactggtgaatgaggtagtaaaacgccgcctgtcggagaaagactgcgaaaaaggctttattttggatggttatccgcgtaccgttgctcaagcggaattcctggacagttttcttgaatcccagaacaaacagttgacagccgccgtgctgttcgatgtccccgaagatgttgttgtgcaacgtttaacctctcgccgcatctgtccgaaatgcgggcgtatctacaatatgatttcactgccaccaaaagaagacgagctgtgtgacgattgcaaagtcaaattagtacagcgtgatgatgataaggaagaaacggttcgtcaccgctataaagtctaccttgagaagacccagccggtcattgactattatggcaagaaaggtatttggaaacgcgtagatggcacgattggaatcgacaacgttgttgcagaagtcctgaagattattggttggagcgataagtaatga

SEQ ID NO: 1224 - protein, 231 aa, synthetic construct
  REGION 1..231: note = Variant of adenylate kinase
MHHHHHHGGSGMMAYLVFLGPPGAGKGTYAKRIQEKTGIPHISTGDIFRDIVKKENDELGKKIKEIMEKGELVPDELVNEVVKRRLSEKDCEKGFILDGYPRTVAQAEFLDSFLESQNKQLTAAVLFDVPEDVVVQRLTSRRICPKCGRIYNMISLPPKEDELCDDCKVKLVQRDDDKEETVRHRYKVYLEKTQPVIDYYGKKGIWKRVDGTIGIDNVVAEVLKIIGWSDK

SEQ ID NO: 1225 - DNA, 699 bp, synthetic construct
  misc_feature 1..699: note = Variant of adenylate kinase
  source 1..699: mol_type = other DNA
atgcaccatcatcaccatcacgggggctccggcatgatggcatatctggtgtttttaggtccgccgggcgcgggaaaaggtacctacgccaaaaacattcaggaaaagactggcatcccacatattagcacgggcgatatcttccgtgacatcgtcaagaaagagaacgatgaactgggcaagaagattaaagaaatcatggagaaaggtgaactcgttccagatgaactggtgaatgaggtagtaaaacgccgcctgtcggagaaagactgcgaaaaaggctttattttggatggttatccgcgtaccgttgctcaagcggaattcctggacagttttcttgaatcccagaacaaacagttgacagccgccgtgctgttcgatgtccccgaagatgttgttgtgcaacgtttaacctctcgccgcatctgtccgaaatgcgggcgtatctacaatatgatttcactgccaccaaaagaagacgagctgtgtgacgattgcaaagtcaaattagtacagcgtgatgatgataaggaagaaacggttcgtcaccgctataaagtctaccttgagaagacccagccggtcattgactattatggcaagaaaggtattctcaaacgcgtagatggcacgattggaatcgacaacgttgttgcagaagtcctgaagattattggttggagcgataagtaatga

SEQ ID NO: 1226 - protein, 231 aa, synthetic construct
  REGION 1..231: note = Variant of adenylate kinase
MHHHHHHGGSGMMAYLVFLGPPGAGKGTYAKNIQEKTGIPHISTGDIFRDIVKKENDELGKKIKEIMEKGELVPDELVNEVVKRRLSEKDCEKGFILDGYPRTVAQAEFLDSFLESQNKQLTAAVLFDVPEDVVVQRLTSRRICPKCGRIYNMISLPPKEDELCDDCKVKLVQRDDDKEETVRHRYKVYLEKTQPVIDYYGKKGILKRVDGTIGIDNVVAEVLKIIGWSDK

SEQ ID NO: 1227 - DNA, 699 bp, synthetic construct
  misc_feature 1..699: note = Variant of adenylate kinase
  source 1..699: mol_type = other DNA
atgcaccatcatcaccatcacgggggctccggcatgatggcatatatggtgtttttaggtccgccgggcgcgggaaaaggtacctacgccaaacgcattcaggaaaagactggcatcccacatattagcacgggcgatatcttccgtgacatcgtcaagaaagagaacgatgaactgggcaagaagattaaagaaatcatggagaaaggtgaactcgttccagatgaactggtgaatgaggtagtaaaacgccgcctgtcggagaaagactgcgaaaaaggctttattttggatggttatccgcgtaccgttgctcaagcggaattcctggacagttttcttgaatcccagaacaaacagttgacagccgccgtgctgttcgatgtccccgaagatgttgttgtgcaacgtttaacctctcgccgcatctgtccgaaatgcgggcgtatctacaatatgatttcactgccaccaaaagaagacgagctgtgtgacgattgcaaagtcaaattagtacagcgtgatgatgataaggaagaaacggttcgtcaccgctataaagtctaccttgagaagacccagccggtcattgactattatggcaagaaaggtattctcaaacgcgtagatggcacgattggaatcgacaacgttgttgcagaagtcctgaagattattggttggagcgataagtaatga

SEQ ID NO: 1228 - protein, 231 aa, synthetic construct
  REGION 1..231: note = Variant of adenylate kinase
MHHHHHHGGSGMMAYMVFLGPPGAGKGTYAKRIQEKTGIPHISTGDIFRDIVKKENDELGKKIKEIMEKGELVPDELVNEVVKRRLSEKDCEKGFILDGYPRTVAQAEFLDSFLESQNKQLTAAVLFDVPEDVVVQRLTSRRICPKCGRIYNMISLPPKEDELCDDCKVKLVQRDDDKEETVRHRYKVYLEKTQPVIDYYGKKGILKRVDGTIGIDNVVAEVLKIIGWSDK

SEQ ID NO: 1229 - DNA, 699 bp, synthetic construct
  misc_feature 1..699: note = Variant of adenylate kinase
  source 1..699: mol_type = other DNA
atgcaccatcatcaccatcacgggggctccggcatgatggcatatctggtgtttttaggtccgccgggcgcgggaaaaggtacctacgccaaacgcattcaggaaaagactggcatcccacatattagcacgggcgatatcttccgtgacatcgtcaagaaagagaacgatgaactgggcaagaagattaaagaaatcatggagaaaggtgaactcgttccagatgaactggtgaatgaggtagtaaaacgccgcctgtcggagaaagactgcgaaaaaggctttattttggatggttatccgcgtaccatcgctcaagcggaattcctggacagttttcttgaatcccagaacaaacagttgacagccgccgtgctgttcgatgtccccgaagatgttgttgtgcaacgtttaacctctcgccgcatctgtccgaaatgcgggcgtatctacaatatgatttcactgccaccaaaagaagacgagctgtgtgacgattgcaaagtcaaattagtacagcgtgatgatgataaggaagaaacggttcgtcaccgctataaagtctaccttgagaagacccagccggtcattgactattatggcaagaaaggtattctcaaacgcgtagatggcacgattggaatcgacaacgttgttgcagaagtcctgaagattattggttggagcgataagtaatga

SEQ ID NO: 1230 - protein, 231 aa, synthetic construct
  REGION 1..231: note = Variant of adenylate kinase
MHHHHHHGGSGMMAYLVFLGPPGAGKGTYAKRIQEKTGIPHISTGDIFRDIVKKENDELGKKIKEIMEKGELVPDELVNEVVKRRLSEKDCEKGFILDGYPRTIAQAEFLDSFLESQNKQLTAAVLFDVPEDVVVQRLTSRRICPKCGRIYNMISLPPKEDELCDDCKVKLVQRDDDKEETVRHRYKVYLEKTQPVIDYYGKKGILKRVDGTIGIDNVVAEVLKIIGWSDK

SEQ ID NO: 1231 - DNA, 699 bp, synthetic construct
  misc_feature 1..699: note = Variant of adenylate kinase
  source 1..699: mol_type = other DNA
atgcaccatcatcaccatcacgggggctccggcatgatggcatatctggtgtttttaggtccgccgggcgcgggaaaaggtacctacgccaaacgtattcaggaaaagactggcatcccacatattagcacgggcgatatcttccgtgacatcgtcaagaaagagaacgatgaactgggcaagaagattaaagaaatcatggagaaaggtgaactcgttccagatgaactggtgaatgaggtagtaaaacgccgcctgtcggagaaagactgcgaaaaaggctttattttggatggttatccgcgtaccgttgctcaagcggaattcctggaaagttttcttgaatcccagaacaaacagttgacagccgccgtgctgttcgatgtccccgaagatgttgttccagcccgtttaacctctcgccgcatctgtccgaaatgcgggcgtatctacaatatgatttcactgccaccaaaagaagacgagctgtgtgacgattgcaaagtcaaattagtacagcgtgatgatgataaggaagaaacggttcgtcaccgctataaagtctaccttgagaagacccagccggtcattgactattatggcaagaaaggtattctcaaacgcgtagatggcacgattccaatcgataacgttgttgcagaagtcctgaagattattggttggagcgataagtaatga

SEQ ID NO: 1232 - protein, 231 aa, synthetic construct
  REGION 1..231: note = Variant of adenylate kinase
MHHHHHHGGSGMMAYLVFLGPPGAGKGTYAKRIQEKTGIPHISTGDIFRDIVKKENDELGKKIKEIMEKGELVPDELVNEVVKRRLSEKDCEKGFILDGYPRTVAQAEFLESFLESQNKQLTAAVLFDVPEDVVPARLTSRRICPKCGRIYNMISLPPKEDELCDDCKVKLVQRDDDKEETVRHRYKVYLEKTQPVIDYYGKKGILKRVDGTIPIDNVVAEVLKIIGWSDK

SEQ ID NO: 1233 - DNA, 699 bp, synthetic construct
  misc_feature 1..699: note = Variant of adenylate kinase
  source 1..699: mol_type = other DNA
atgcaccatcatcaccatcacgggggctccggcatgatggcatatctggtgttcttaggtccgccgggcgcgggaaaaggtacccaagcgaaacgcattcaggaaaagactggcatcccacatattagcacgggcgatatcttccgtgacatcgtcaagaaagagaacgatgaactgggcaagaagattaaagaaatcatggagaaaggtgaactcgttccagatgaactggtgaatgaggtagtaaaacgccgcctgtcggagaaagactgcgaaaaaggctttattttggatggttatccgcgtaccgttgctcaagcggaattcctggacagttttcttgaatcccagaacaaacagttgacagccgccgtgctgttcaaagtccccgaagatgttgttgtgcaacgtttaacctctcgccgtatctgtccgaaatgcgggcgtatctacaatatgatttcactgccaccaaaagaagacgagctgtgtgacgattgcaaagtcaaattagtacagcgttcggatgataaggaagaaacggttcgtcaccgctataaagtctaccttgagaagacccagccggtcattgactattatggcaagaaaggtattctcaaacgcgtagatggcacgattggaatcgacaacgttgttgcagaagtcctgaagattattggttggagcgataagtaatga

SEQ ID NO: 1234 - protein, 231 aa, synthetic construct
  REGION 1..231: note = Variant of adenylate kinase
MHHHHHHGGSGMMAYLVFLGPPGAGKGTQAKRIQEKTGIPHISTGDIFRDIVKKENDELGKKIKEIMEKGELVPDELVNEVVKRRLSEKDCEKGFILDGYPRTVAQAEFLDSFLESQNKQLTAAVLFKVPEDVVVQRLTSRRICPKCGRIYNMISLPPKEDELCDDCKVKLVQRSDDKEETVRHRYKVYLEKTQPVIDYYGKKGILKRVDGTIGIDNVVAEVLKIIGWSDK

SEQ ID NO: 1235 - DNA, 699 bp, synthetic construct
  misc_feature 1..699: note = Variant of adenylate kinase
  source 1..699: mol_type = other DNA
atgcaccatcatcaccatcacgggggctccggcatgatggcatatctggtgtttttaggtccgccgggcgcgggaaaaggtacctacgccaaacgcattcaggaaaagactggcatcccacatattagcacgggcgatatcttccgtgacatcgtcaagaaagagaacgatgaactgggcaagaagattaaagaaatcatggagaaaggtgaactcgttccagatgaactggtgaatgaggtagtaaaacgccgcctgtcggagaaagactgcgaaaaaggctttattttggatggttatccgcgtaccgttgctcaagcggaattcctggacagttttcttgaatcccagaacaaacagttgacagccgccgtgctgttcgatgtccccgaagatgttgttgtgcaacgtttaacctctcgccgcatctgtccgaaatgcgggcgtatctacaatatgatttcactgccaccaaaagaagacgagctgtgtgacgattgcaaagtcaaattagtacagcgtgatgatgataacgaagaaacggttcgtcaccgctataaagtctaccttgagaagacccagccggtcattgactattatggcaagaaaggtattctcaaacgcgtagatggcacgattggaatcgacaacgttgttgcagaagtcctgaagattattggttggagcgataagtaatga

SEQ ID NO: 1236 - protein, 231 aa, synthetic construct
  REGION 1..231: note = Variant of adenylate kinase
MHHHHHHGGSGMMAYLVFLGPPGAGKGTYAKRIQEKTGIPHISTGDIFRDIVKKENDELGKKIKEIMEKGELVPDELVNEVVKRRLSEKDCEKGFILDGYPRTVAQAEFLDSFLESQNKQLTAAVLFDVPEDVVVQRLTSRRICPKCGRIYNMISLPPKEDELCDDCKVKLVQRDDDNEETVRHRYKVYLEKTQPVIDYYGKKGILKRVDGTIGIDNVVAEVLKIIGWSDK

SEQ ID NO: 1237 - DNA, 699 bp, synthetic construct
  misc_feature 1..699: note = Variant of adenylate kinase
  source 1..699: mol_type = other DNA
atgcaccatcatcaccatcacgggggctccggcatgatggcatatctggtgctgttaggtccgccgggcgcgggaaaaggtacctacgccaaacgcattcaggaaaagactggcatcccacatattagcacgggcgatatcttccgtgacatcgtcaagaaagagaacgatgaactgggcaagaagattaaagaaatcatggagaaaggtgaactcgttccagatgaactggtgaatgaggtagtaaaacgccgcctgtcggagaaagactgcgaaaaaggctttattttggatggttatccgcgtaccgttgctcaagcggaattcctggacagttttcttgaatcccagaacaaacagttgacagccgccgtgctgttcaaagtccccgaagatgttgttgtgcaacgtttaacctctcgcctgatctgtccgaaatgcgggcgtatctacaatatgatttcactgccaccaaaagaagacgagctgtgtgacgattgcaaagtcaaattagtacagcgtgatgatgataaggaagaaacggttcgtcaccgctataaagtctaccttgagaagacccagccggtcattgactattatggcaagaaaggtattctcaaacgcgtagatgggacgatcggaatcgacaacgttgttgcagaagtcctgaagattattggttggagcgataagtaatga

SEQ ID NO: 1238 - protein, 231 aa, synthetic construct
  REGION 1..231: note = Variant of adenylate kinase
MHHHHHHGGSGMMAYLVLLGPPGAGKGTYAKRIQEKTGIPHISTGDIFRDIVKKENDELGKKIKEIMEKGELVPDELVNEVVKRRLSEKDCEKGFILDGYPRTVAQAEFLDSFLESQNKQLTAAVLFKVPEDVVVQRLTSRLICPKCGRIYNMISLPPKEDELCDDCKVKLVQRDDDKEETVRHRYKVYLEKTQPVIDYYGKKGILKRVDGTIGIDNVVAEVLKIIGWSDK

SEQ ID NO: 1239 - DNA, 699 bp, synthetic construct
  misc_feature 1..699: note = Variant of adenylate kinase
  source 1..699: mol_type = other DNA
atgcaccatcatcaccatcacgggggctccggcatgatggcatatctggtgtttttaggtccgccgggcgcgggaaaaggtacctacgccaaaaacattcaggaaaagactggcatcccacatattagtacgggcgatatcttccgtgacatcgtcaagaaagagaacgatgaactgggcaagaagattaaagaaatcatggagaaaggtgaactcgttccagatgaactggtgaatgaggtagtaaaacgccgcctgtcggagaaagactgcgaaaaaggctttattttggatggttatccgcgtaccgttgctcaagcgatgttcctggaaagttttcttgaatcccagaacaaacagttgacagccgccgtgctgttcgatgtccccgaagatgtggtggtgcaacgtttaacctctcgccgcatctgtccgaaatgcgggcgtatctacaatatgatttcgaacccaccaaaagaagacgagctgtgtgacgattgcaaagtcaaattagtacagcgtgatgatgataaggaagaaacggttcgtcaccgctataaagtctaccttaagaagacccagccggtcattgactattatggcaagaagggtattctcaaacgcgtagatggcacgattggcatcgataacgttgttgcagaagtcctgaagattattggttggagcgataagtaatga

SEQ ID NO: 1240 - protein, 231 aa, synthetic construct
  REGION 1..231: note = Variant of adenylate kinase
MHHHHHHGGSGMMAYLVFLGPPGAGKGTYAKNIQEKTGIPHISTGDIFRDIVKKENDELGKKIKEIMEKGELVPDELVNEVVKRRLSEKDCEKGFILDGYPRTVAQAMFLESFLESQNKQLTAAVLFDVPEDVVVQRLTSRRICPKCGRIYNMISNPPKEDELCDDCKVKLVQRDDDKEETVRHRYKVYLKKTQPVIDYYGKKGILKRVDGTIGIDNVVAEVLKIIGWSDK

SEQ ID NO: 1241 - DNA, 699 bp, synthetic construct
  misc_feature 1..699: note = Variant of adenylate kinase
  source 1..699: mol_type = other DNA
atgcaccatcatcaccatcacgggggctccggcatgatggcatatctggtgctgttaggtccgccgggcgcgggaaaaggtacccaagcgaaacgcattcaggaaaagactggcatcccacatattagcacgggcgatatcttccgtgacatcgtcaagaaagagaacgatgaactgggcaagaagattaaagaaatcatggagaaaggtgaactcgttccagatgaactggtgaatgaggtagtaaaacgccgcctgtcggagaaagactgcgaaaaaggctttattttggatggttatccgcgtaccgttgctcaagcggaattcctggacagttttcttgaatcccagaacaaacagttgacagccgccgtgctgttcaaaatccccgaagatgttgttgtgcaacgtttaacctctcgcctgatctgtccgaaatgcgggcgtatctacaatatgatttcactgccaccaaaagaagacgagctgtgtgacgattgcaaagtcaaattagtacagcgtgatgatgataaggaagaaacggttcgtcaccgcctgaaagtctaccttgagaagacccagccggtcattgactattatggcaagaaaggtattctcaaacgcgtagatgggacgatcggaatcgacaacgttgttgcagaagtcctgaagattattggttggagcgataagtaatga

SEQ ID NO: 1242 - protein, 231 aa, synthetic construct
  REGION 1..231: note = Variant of adenylate kinase
MHHHHHHGGSGMMAYLVLLGPPGAGKGTQAKRIQEKTGIPHISTGDIFRDIVKKENDELGKKIKEIMEKGELVPDELVNEVVKRRLSEKDCEKGFILDGYPRTVAQAEFLDSFLESQNKQLTAAVLFKIPEDVVVQRLTSRLICPKCGRIYNMISLPPKEDELCDDCKVKLVQRDDDKEETVRHRLKVYLEKTQPVIDYYGKKGILKRVDGTIGIDNVVAEVLKIIGWSDK

SEQ ID NO: 1243 - DNA, 699 bp, synthetic construct
  misc_feature 1..699: note = Variant of adenylate kinase
  source 1..699: mol_type = other DNA
atgcaccatcatcaccatcacgggggctccggcatgatggcatatctggtgtttttaggtccgccgggcgcgggaaaaggtacctacgccaaaaacattcaggaaaagactggcatcccacatattagcacgggcgatatcttccgtgacatcgtcaagaaagagaacgatgaactgggcaagaagattaaagaaatcatggagaaaggtgaactcgttccagatgaactggtgaatgaggtagtaaaacgccgcctgtcggagaaagactgcgaaaaaggctttattttggatggttatccgcgtaccgttgctcaagcggaattcctggacagttttcttgaatcccagaacaaacagttgacagccgccgtgctgttcgatgtccccgaagatctggtggtgcaacgtttaacctctcgccgcatctgtccgaaatgcgggcgtatctacaatatgatttcactgccaccaaaagaagacgagctgtgtgacgattgcaaagtcaaattagtacagcgtgatgatgataaggaagaaacggttcgtcaccgctataaagtctaccttgagaagacccagccggtcattgactattatggcaagaaaggtattctcaaacgcgtagatggcacgattggaatcgacaacgttgttgcagaagtcctgaagattattggttggagcgataagtaatga

SEQ ID NO: 1244 - protein, 231 aa, synthetic construct
  REGION 1..231: note = Variant of adenylate kinase
MHHHHHHGGSGMMAYLVFLGPPGAGKGTYAKNIQEKTGIPHISTGDIFRDIVKKENDELGKKIKEIMEKGELVPDELVNEVVKRRLSEKDCEKGFILDGYPRTVAQAEFLDSFLESQNKQLTAAVLFDVPEDLVVQRLTSRRICPKCGRIYNMISLPPKEDELCDDCKVKLVQRDDDKEETVRHRYKVYLEKTQPVIDYYGKKGILKRVDGTIGIDNVVAEVLKIIGWSDK

SEQ ID NO: 1245 - DNA, 699 bp, synthetic construct
  misc_feature 1..699: note = Variant of adenylate kinase
  source 1..699: mol_type = other DNA
atgcaccatcatcaccatcacgggggctccggcatgatggcatatctggtgctgttaggtccgccgggcgcgggaaaaggtacccaatcgaaacgcattcaggaaaagactggcatcccacatattagcacgggcgatatcttccgtgacatcgtcaagaaagagaacgatgaactgggcaagaagattaaagaaatcatggagaaaggtgaactcgttccagatgaactggtgaatgaggtagtaaaacgccgcctgtcggagaaagactgcgaaaaaggctttattttggatggttatccgcgtaccgttgctcaagcggaattcctggacagttttcttgaatcccagaacaaacagttgacagccgccgtgctgttcgatgtccccgaagatgttgttgtgcaacgtttaacctctcgccgtatctgtccgaaatgcgggcgtatctacaatatgatttcactgccaccaaaagaagacgagctgtgtgacgattgcaaagtcaaattagtacagcgtgatgatgataaggaagaaacggttcgtcaccgctataaagtctaccttgagaagacccagccggtcattgactattatggcaagaaaggtattctcaaacgcgtagatgggtcgcaaggaatcgacaacgttgttgcagaaattctgaagattattggttggagcgataagtaatga

SEQ ID NO: 1246 - protein, 231 aa, synthetic construct
  REGION 1..231: note = Variant of adenylate kinase
MHHHHHHGGSGMMAYLVLLGPPGAGKGTQSKRIQEKTGIPHISTGDIFRDIVKKENDELGKKIKEIMEKGELVPDELVNEVVKRRLSEKDCEKGFILDGYPRTVAQAEFLDSFLESQNKQLTAAVLFDVPEDVVVQRLTSRRICPKCGRIYNMISLPPKEDELCDDCKVKLVQRDDDKEETVRHRYKVYLEKTQPVIDYYGKKGILKRVDGSQGIDNVVAEILKIIGWSDK

SEQ ID NO: 1247 - DNA, 699 bp, synthetic construct
  misc_feature 1..699: note = Variant of adenylate kinase
  source 1..699: mol_type = other DNA
atgcaccatcatcaccatcacgggggctccggcatgatggcatatctggtgtttttaggtccgccgggcgcgggaaaaggtacccaagcgaaacgcattcaggaaaagactggcatcccacatattagcacgggcgatatcttccgtgacatcgtcaagaaagagaacgatgaactgggcaagaagattaaaaaaatcatggagaaaggtgaactcgttccagatgaactggtgaatgaggtagtaaaacgccgcctgtcggagaaagactgcgaaaaaggctttattttggatggttatccgcgtaccgttgctcaagcggaattcctggacagttttcttgaatcccagaacaaacagttgacagccgccgtgctgctggatgtccccgaagatgttgttgtgcaacgtttaacctctcgccgcatctgtccgaaatgcgggcgtatctacaatatgatttcactgccaccaaaagaagacgagctgtgtgacgattgcaaagtcaaattagtacagcgtgatgatgataaggaagaaacggttcgtcaccgctataaagtctaccttgagaagacccagccggtcattgactattatggcaagaaaggtattctcaaacgcgtagatggcacgattggaatcgacaacgttgttgcagaagtcctgaagattattggttggagcgataagtaatga

SEQ ID NO: 1248 - protein, 231 aa, synthetic construct
  REGION 1..231: note = Variant of adenylate kinase
MHHHHHHGGSGMMAYLVFLGPPGAGKGTQAKRIQEKTGIPHISTGDIFRDIVKKENDELGKKIKKIMEKGELVPDELVNEVVKRRLSEKDCEKGFILDGYPRTVAQAEFLDSFLESQNKQLTAAVLLDVPEDVVVQRLTSRRICPKCGRIYNMISLPPKEDELCDDCKVKLVQRDDDKEETVRHRYKVYLEKTQPVIDYYGKKGILKRVDGTIGIDNVVAEVLKIIGWSDK

SEQ ID NO: 1249 - DNA, 699 bp, synthetic construct
  misc_feature 1..699: note = Variant of adenylate kinase
  source 1..699: mol_type = other DNA
atgcaccatcatcaccatcacgggggctccggcatgatggcatatctggtgtttttaggtccgccgggcgcgggaaaaggtacctacgccaaaaacattcaggaaaagactggcatctgtcatattggtacgggcgatatcttccgtgacatccataagaaagagaacgatgaactgggcaagaagattaaagaaatcatggagaaaggtgaactcgttccagatgaactggtgaatgaggtagtaaaacgccgcctgtcggagaaagactgcgaaaaaggctttattttggatggttatccgcgtaccgttgctcaagcggaattcctggacagttttcttgaatcccagaacaaacagttgacagccgccgtgctgttcgatgtccccgaagatgttgttgtgcaacgtttaacctctcgccgcatctgtccgaaatgcgggcgtatctacaatatgatttttaacccaccaaaagaagacgagctgtgtgacgattgcaaagtcaaattagtacagcgtgatgatgataaggaagaaacggttcgtcaccgctataaagtctaccttgagaagacccagccggtcattgactattatggcaagaagggtattctcaaacgcgtagatggcacgattggaatcgacaccgttgtggcagaagtcctgaagattattggttggagcgataagtaatga

SEQ ID NO: 1250 - protein, 231 aa, synthetic construct
  REGION 1..231: note = Variant of adenylate kinase
MHHHHHHGGSGMMAYLVFLGPPGAGKGTYAKNIQEKTGICHIGTGDIFRDIHKKENDELGKKIKEIMEKGELVPDELVNEVVKRRLSEKDCEKGFILDGYPRTVAQAEFLDSFLESQNKQLTAAVLFDVPEDVVVQRLTSRRICPKCGRIYNMIFNPPKEDELCDDCKVKLVQRDDDKEETVRHRYKVYLEKTQPVIDYYGKKGILKRVDGTIGIDTVVAEVLKIIGWSDK

SEQ ID NO: 1251 - DNA, 699 bp, synthetic construct
  misc_feature 1..699: note = Variant of adenylate kinase
  source 1..699: mol_type = other DNA
atgcaccatcatcaccatcacgggggctccggcatgatggcatatctggtgctgttaggtccgccgggcgcgggaaaaggtacccaagcgaaacgcattcaggaaaagactggcatcccacatattagcacgggcgatatcttccgtgacatcgtcaagaaagagaacgatgaactgggcaagaagattaaagaaatcatggagaaaggtgaactcgttccagatgaactggtgaatgaggtagtaaaacgccgcctgtcggagaaagactgcgaaaaaggctttattttggatggttatccgcgtaccgttgctcaagcggaattcctggacagttttcttgaatcccagaacaaacagttgacagccgccgtgctgttcaaaatccccgaagatgttgttgtgcaacgtttaacctctcgccgtatctgtccgaaatgcgggcgtatctacaatatgatttcactgccaccaaaagaagacgagctgtgtgacgattgcaaagtcaaattagtacagcgtgacgatgataaggaagaaacggttcgtcaccgctataaagtctaccttgagaagacccagccggtcattgactattatggcaagaaaggtattctcaaacgcgtagatgggacgatcggaatcgacaacgttgttgcagaagtcctgaagattattggttggagcgataagtaatga

SEQ ID NO: 1252 - protein, 231 aa, synthetic construct
  REGION 1..231: note = Variant of adenylate kinase
MHHHHHHGGSGMMAYLVLLGPPGAGKGTQAKRIQEKTGIPHISTGDIFRDIVKKENDELGKKIKEIMEKGELVPDELVNEVVKRRLSEKDCEKGFILDGYPRTVAQAEFLDSFLESQNKQLTAAVLFKIPEDVVVQRLTSRRICPKCGRIYNMISLPPKEDELCDDCKVKLVQRDDDKEETVRHRYKVYLEKTQPVIDYYGKKGILKRVDGTIGIDNVVAEVLKIIGWSDK

SEQ ID NO: 1253 - DNA, 699 bp, synthetic construct
  misc_feature 1..699: note = Variant of adenylate kinase
  source 1..699: mol_type = other DNA
atgcaccatcatcaccatcacgggggctccggcatgatggcatatctggtgtttttaggtccgccgggcgcgggaaaaggtacctacgccaaacgcattcaggaaaagactggcatcccacatattagcacgggcgatatcttccgtgacatcgtcaagaaagagaacgatgaactgggcaagaagattaaagaaatcatggagaaaggtgaactcgttccagatgaactggtgaataatgtagtaaaacgccgcctgtcggagaaagactgcgaaaaaggctttattttggatggttatccgcgtaccgttgctcaagcggaattcctggacagttttcttgaatcccagaacaaacagttgacagccgccgtgctgttcgatgtccccgaagatgttgttgtgcaacgtttaacctctcgccgcatctgtccgaaatgcgggcgtatctacaatatgatttcactgccaccaaaagaagacgagctgtgtgacgattgcaaagtcaaattagtacagcgtgatgatgataaggaagaaacggttcgtcaccgctataaagtctaccttgagaagacccagccggtcattgactattatggcaagaaaggtattctcaaacgcgtagatggcacgattggaatcgacaacgttgttgcagaagtcctgaagattattggttggagcgataagtaatga

SEQ ID NO: 1254 - protein, 231 aa, synthetic construct
  REGION 1..231: note = Variant of adenylate kinase
MHHHHHHGGSGMMAYLVFLGPPGAGKGTYAKRIQEKTGIPHISTGDIFRDIVKKENDELGKKIKEIMEKGELVPDELVNNVVKRRLSEKDCEKGFILDGYPRTVAQAEFLDSFLESQNKQLTAAVLFDVPEDVVVQRLTSRRICPKCGRIYNMISLPPKEDELCDDCKVKLVQRDDDKEETVRHRYKVYLEKTQPVIDYYGKKGILKRVDGTIGIDNVVAEVLKIIGWSDK

SEQ ID NO: 1255 - DNA, 699 bp, synthetic construct
  misc_feature 1..699: note = Variant of adenylate kinase
  source 1..699: mol_type = other DNA
atgcaccatcatcaccatcacgggggctccggcatgatggcatatctggtgtttttaggtccgccgggcgcgggaaaaggtacctacgccaaaaacattcaggaaaagactggcatcccacatattggtacgggcgatatcttccgtgacatcgtcaagaaagagaacgatgaactgggcaagaagattaaagaaatcatggagaaaggtgaactcgttccagatgaactggtgaatgaggtagtaaaacgccgcctgtcggagaaagactgcgaaaaaggctttattttggatggttatccgcgtaccgttgctcaagcggaattcctggacagttttcttgaatcccagaacaaacagttgacagccgccgtgctgttcgatgtccccgaagatgttgttgtgcaacgtatcaccagtcgccgcatctgtccgaaatgcgggcgtatctaccacatgatttcactgccaccaaaagaagacgagctgtgtgacgattgcaaagtcaaattagtacagcgtgatgatgataaggaagaaacggttcgtcaccgctataaagtctaccttaagaagacccagccggtcattgactattatggcaagaaaggtattctcaaacgcgtagatggcacgattccagtcgataacgttgttgcagaagtcctgaagattattggttggagcgataagtaatga

SEQ ID NO: 1256 - protein, 231 aa, synthetic construct
  REGION 1..231: note = Variant of adenylate kinase
MHHHHHHGGSGMMAYLVFLGPPGAGKGTYAKNIQEKTGIPHIGTGDIFRDIVKKENDELGKKIKEIMEKGELVPDELVNEVVKRRLSEKDCEKGFILDGYPRTVAQAEFLDSFLESQNKQLTAAVLFDVPEDVVVQRITSRRICPKCGRIYHMISLPPKEDELCDDCKVKLVQRDDDKEETVRHRYKVYLKKTQPVIDYYGKKGILKRVDGTIPVDNVVAEVLKIIGWSDK

SEQ ID NO: 1257 - DNA, 699 bp, synthetic construct
  misc_feature 1..699: note = Variant of adenylate kinase
  source 1..699: mol_type = other DNA
atgcaccatcatcaccatcacgggggctccggcatgatggcatatctggtgtttttaggtccgccgggcgcgggaaaaggtacctacgccaaacgcattcaggaaaagactggcatcccacatattagcacgggcgatatcttccgtgacatcgtcaagaaagagaacgatgaactgggcaagaagattaaagaaatcatggagaaaggtgaactcgttccagatgaactggtgaatgaggtagtaaaacgccgcctgtcggagaaagactgcgaaaaaggctttattttggatggttatccgcgtaccgttgctcaagcggaattcctggacagttttcttgaatcccagaacaaacagttgacagccgccgtgctgttcgatgtccccgaagatgttgttgtgcaacgtttaacctctcgccgcatctgtccgaaatgcgggcgtatctacaatatgatttcactgccaccaaaagaagacgagctgtgtgacgattgcaaagtcaaattagtacagcgtgatgatgataaggaagaaacggttcaacaccgctataaagtctaccttgagaagacccagccggtcattgactattatggcaagaaaggtattctcaaacgcgtagatggcacgattggaatcgacaacgttgttgcagaagtcctgaagattattggttggagcgataagtaatga

SEQ ID NO: 1258 - protein, 231 aa, synthetic construct
  REGION 1..231: note = Variant of adenylate kinase
MHHHHHHGGSGMMAYLVFLGPPGAGKGTYAKRIQEKTGIPHISTGDIFRDIVKKENDELGKKIKEIMEKGELVPDELVNEVVKRRLSEKDCEKGFILDGYPRTVAQAEFLDSFLESQNKQLTAAVLFDVPEDVVVQRLTSRRICPKCGRIYNMISLPPKEDELCDDCKVKLVQRDDDKEETVQHRYKVYLEKTQPVIDYYGKKGILKRVDGTIGIDNVVAEVLKIIGWSDK

SEQ ID NO: 1259 - DNA, 699 bp, synthetic construct
  misc_feature 1..699: note = Variant of adenylate kinase
  source 1..699: mol_type = other DNA
atgcaccatcatcaccatcacgggggctccggcatgatggcatatctggtgctgttaggtccgccgggcgcgggaaaaggtacctatgcgaaacgcattcaggaaaagactggcatcccacatattagcacgggcgatatcttccgtgacatcgtcaagaaagagaacgatgaactgggcaagaagattaaagaaatcatggagaaaggtgaactcgttccagatgaactggtgaatgaggtagtaaaacgccgcctgtcggagaaagactgcgaaaaaggctttattttggatggttatccgcgtaccgttgctcaagcggaattcctggacagttttcttgaatcccagaacaaacagttgacagccgccgtgctgttcgacgtccccgaagatgttgttgtgcaacgtttaacctctcgccgtatctgtccgaaatgcgggcgtatctacaatatgatttcactgccaccaaaagaagacgagctgtgtgacgattgcaaagtcaaattagtacagcgttcggatgataaggaagaaacggttcgtcaccgcctgaaagtctaccttgagaagacccagccggtcattgactattatggcaagaaaggtattctcaaacgcgtagatgggtcgcaaggaatcgacaacgttgttgcagaagtcctgaagattattggttggagcgataagtaatga

SEQ ID NO: 1260 - protein, 231 aa, synthetic construct
  REGION 1..231: note = Variant of adenylate kinase
MHHHHHHGGSGMMAYLVLLGPPGAGKGTYAKRIQEKTGIPHISTGDIFRDIVKKENDELGKKIKEIMEKGELVPDELVNEVVKRRLSEKDCEKGFILDGYPRTVAQAEFLDSFLESQNKQLTAAVLFDVPEDVVVQRLTSRRICPKCGRIYNMISLPPKEDELCDDCKVKLVQRSDDKEETVRHRLKVYLEKTQPVIDYYGKKGILKRVDGSQGIDNVVAEVLKIIGWSDK

SEQ ID NO: 1261 - DNA, 699 bp, synthetic construct
  misc_feature 1..699: note = Variant of adenylate kinase
  source 1..699: mol_type = other DNA
atgcaccatcatcaccatcacgggggctccggcatgatggcatatctggtgttcttaggtccgccgggcgcgggaaaaggtacctacgccaaacgcattcaggaaaagactggcatcccacatattagcacgggcgatatcttccgtgacatcgtcaagaaagagaacgatgaactgggcaagaagattaaagaaatcatggagaaaggtgaactcgttccagatgaactggtgaatgaggtagtaaaacgccgcctgtcggagaaagactgcgaaaaaggctttattttggatggttatccgcgtaccgttgctcaagcggaattcctggacagttttcttgaatcccagaacaaacagttgacagccgccgtgctgttcgacatccccgaagatgttgttgtgcaacgtttaacctctcgccgcatctgtccgaaatgcgggcgtatctacaatatgatttcactgccaccaaaagaagacgagctgtgtgacgattgcaaagtcaaattagtacagcgtgatgatgataaggaagaaacggttcgtcaccgctataaagtctaccttgagaagacccagccggtcattgactattatggcaagaaaggtattctcaaacgcgtagatggcacgattggaatcgacaacgttgttgcagaagtcctgaagattattggttggagcgataagtaatga

SEQ ID NO: 1262 - protein, 231 aa, synthetic construct
  REGION 1..231: note = Variant of adenylate kinase
MHHHHHHGGSGMMAYLVFLGPPGAGKGTYAKRIQEKTGIPHISTGDIFRDIVKKENDELGKKIKEIMEKGELVPDELVNEVVKRRLSEKDCEKGFILDGYPRTVAQAEFLDSFLESQNKQLTAAVLFDIPEDVVVQRLTSRRICPKCGRIYNMISLPPKEDELCDDCKVKLVQRDDDKEETVRHRYKVYLEKTQPVIDYYGKKGILKRVDGTIGIDNVVAEVLKIIGWSDK

SEQ ID NO: 1263 - DNA, 699 bp, synthetic construct
  misc_feature 1..699: note = Variant of adenylate kinase
  source 1..699: mol_type = other DNA
atgcaccatcatcaccatcacgggggctccggcatgatggcatatctggtgctgttaggtccgccgggcgcgggaaaaggtacccaatcgaaacgcattcaggaaaagactggcatcccacatattagcacgggcgatatcttccgtgacatcgtcaagaaagagaacgatgaactgggcaagaagattaaaaaaatcatggagaaaggtgaactcgttccagatgaactggtgaatgaggtagtaaaacgccgcctgtcggagaaagactgcgaaaaaggctttattttggatggttatccgcgtaccgttgctcaagcggaattcctggacagttttcttgaatcccagaacaaacagttgacagccgccgtgctgttcgacatccccgaagatgttgttgtgcaacgtttaacctctcgcctgatctgtccgaaatgcgggcgtagctacaatatgatttcactgccaccaaaagaagacgagctgtgtgacgattgcaaagtcaaattagtacagcgtgatgatgataaggaagaaacggttcgtcaccgcctgaaagtctaccttgagaagacccagccggtcattgactattatggcaagaaaggtattctcaaacgcgtagatggcacgattggaatcgacaacgttgttgcagaagtcctgaagattattggttggagcgataagtaatga

SEQ ID NO: 1264 - protein, 231 aa, synthetic construct
  REGION 1..231: note = Variant of adenylate kinase
MHHHHHHGGSGMMAYLVLLGPPGAGKGTQSKRIQEKTGIPHISTGDIFRDIVKKENDELGKKIKKIMEKGELVPDELVNEVVKRRLSEKDCEKGFILDGYPRTVAQAEFLDSFLESQNKQLTAAVLFDIPEDVVVQRLTSRLICPKCGRSYNMISLPPKEDELCDDCKVKLVQRDDDKEETVRHRLKVYLEKTQPVIDYYGKKGILKRVDGTIGIDNVVAEVLKIIGWSDK

SEQ ID NO: 1265 - DNA, 699 bp, synthetic construct
  misc_feature 1..699: note = Variant of adenylate kinase
  source 1..699: mol_type = other DNA
atgcaccatcatcaccatcacgggggctccggcatgatggcatatctggtgttcttaggtccgccgggcgcgggaaaaggtacctatgcgaaacgcattcaggaaaagactggcatcccacatattagcacgggcgatatcttccgtgacatcgtcaagaaagagaacgatgaactgggcaagaagattaaagaaatcatggagaaaggtgaactcgttccagatgaactggtgaatgaggtagtaaaacgccgcctgtcggagaaagactgcgaaaaaggctttattttggatggttatccgcgtaccgttgctcaagcggaattcctggacagttttcttgaatcccagaacaaacagttgacagccgccgtgctgctggatgtccccgaagatgttgttgtgcaacgtttaacctctcgcctgatctgtccgaaatgcgggcgtatctacaatatgatttcactgccaccaaaagaagacgagctgtgtgacgattgcaaagtcaaattagtacagcgtgatgatgataaggaagaaacggttcgtcaccgctataaagtctaccttgagaagacccagccggtcattgactattatggcaagaaaggtattctcaaacgcgtagatgggtcgcaaggaatcgacaacgttgttgcagaagtcctgaagattattggttggagcgataagtaatga

SEQ ID NO: 1266 - protein, 231 aa, synthetic construct
  REGION 1..231: note = Variant of adenylate kinase
MHHHHHHGGSGMMAYLVFLGPPGAGKGTYAKRIQEKTGIPHISTGDIFRDIVKKENDELGKKIKEIMEKGELVPDELVNEVVKRRLSEKDCEKGFILDGYPRTVAQAEFLDSFLESQNKQLTAAVLLDVPEDVVVQRLTSRLICPKCGRIYNMISLPPKEDELCDDCKVKLVQRDDDKEETVRHRYKVYLEKTQPVIDYYGKKGILKRVDGSQGIDNVVAEVLKIIGWSDK

SEQ ID NO: 1267 - DNA, 699 bp, synthetic construct
  misc_feature 1..699: note = Variant of adenylate kinase
  source 1..699: mol_type = other DNA
atgcaccatcatcaccatcacgggggctccggcatgatggcatatctggtgttcttaggtccgccgggcgcgggaaaaggtacctattcgaaacgcattcaggaaaagactggcatcccacatattagcacgggcgatatcttccgtgacatcgtcaagaaagagaacgatgaactgggcaagaagattaaaaaaatcatggagaaaggtgaactcgttccagatgaactggtgaatgaggtagtaaaacgccgcctgtcggagaaagactgcgaaaaaggctttattttggatggttatccgcgtaccgttgctcaagcggaattcctggacagttttcttgaatcccagaacaaacagttgacagccgccgtgctgttcgatgtccccgaagatgttgttgtgcaacgtttaacctctcgcctgatctgtccgaaatgcgggcgtatctacaatatgatttcactgccaccaaaagaagacgagctgtgtgacgattgcaaagtcaaattagtacagcgtgacgatgataaggaagaaacggttcgtcaccgctataaagtctaccttgagaagacccagccggtcattgactattatggcaagaaaggtattctcaaacgcgtagatggcacgattggaatcgacaacgttgttgcagaaattctgaagattattggttggagcgataagtaatga

SEQ ID NO: 1268 - protein, 231 aa, synthetic construct
  REGION 1..231: note = Variant of adenylate kinase
MHHHHHHGGSGMMAYLVFLGPPGAGKGTYSKRIQEKTGIPHISTGDIFRDIVKKENDELGKKIKKIMEKGELVPDELVNEVVKRRLSEKDCEKGFILDGYPRTVAQAEFLDSFLESQNKQLTAAVLFDVPEDVVVQRLTSRLICPKCGRIYNMISLPPKEDELCDDCKVKLVQRDDDKEETVRHRYKVYLEKTQPVIDYYGKKGILKRVDGTIGIDNVVAEILKIIGWSDK

SEQ ID NO: 1269 - DNA, 699 bp, synthetic construct
  misc_feature 1..699: note = Variant of adenylate kinase
  source 1..699: mol_type = other DNA
atgcaccatcatcaccatcacgggggctccggcatgatggcatatctggtgtttttaggtccgccgggcgcgggaaaaggtacctacgccaaacgcattcaggaaaagactggcatctgtcatattggtacgggcgatatcttccgtgacatcgtaaagaaagagaacgatgaactgggcaagaagattaaagaaatcatggagaaaggtgaactcgttccagatgaactggtgaatgaggtagtaaaacgccgcctgtcggagaaagactgcgaaaaaggctttattttggatggttatccgcgtaccgttgctcaagcggaattcctggacagttttcttgaatcccagaacaaacagttgacagccgccgtgctgttcgatgtccccgaagatgtggtggtgcaacgtttaacctctcgccgcatctgtccgaaatgcgggcgtatctacaatatgatttcactgccaccaaaagaagacgagctgtgtgacgattgcaaagtcaaattagtacagcgtgatgatgataaggaagaaacggttcgtcaccgctataaagtctaccttgagaagacccagccggtcattgactattatggcaagaaaggtattctcaaacgcgtagatggcacgattggcgtcgataacgttgttgcagaagtcctgaagattattggttggagcgataagtaatga

SEQ ID NO: 1270 - protein, 231 aa, synthetic construct
  REGION 1..231: note = Variant of adenylate kinase
MHHHHHHGGSGMMAYLVFLGPPGAGKGTYAKRIQEKTGICHIGTGDIFRDIVKKENDELGKKIKEIMEKGELVPDELVNEVVKRRLSEKDCEKGFILDGYPRTVAQAEFLDSFLESQNKQLTAAVLFDVPEDVVVQRLTSRRICPKCGRIYNMISLPPKEDELCDDCKVKLVQRDDDKEETVRHRYKVYLEKTQPVIDYYGKKGILKRVDGTIGVDNVVAEVLKIIGWSDK

SEQ ID NO: 1271 - DNA, 699 bp, synthetic construct
  misc_feature 1..699: note = Variant of adenylate kinase
  source 1..699: mol_type = other DNA
atgcaccatcatcaccatcacgggggctccggcatgatggcatatctggtgtttttaggtccgccgggcgcgggaaaaggtacctacgccaaacgcattcaggaaaagactggcatcccacatattagtacgggcgatatcttccgtgacatcgtcaagaaagagaacgatgaactgggcaagaagattaaagaaatcatggagaaaggtgaactcgttccagatgaactggtgaatgaggtagtaaaacgccgcctgtcggagaaagactgcgaaaaaggctttattttggatggttatccgcgtaccgttgctcaagcggaattcctggacagttttcttgaatcccagaacaaacagttgacagccgccgtgctgttcgatgtccccgaagatgttgttgttgcccgtttaacctctcgccgcatctgtccgaaatgcgggcgtatctacaatatgatttcactgccaccaaaagaagacgagctgtgtgacgattgcaaagtcaaattagtacagcgtgatgatgataaggaagaaacggttcgtcaccgctataaagtctaccttgagaagacccagccggtcattgactattatggcaagaaaggtattctcaaacgcgtagatggcacgattggaatcgacaacgttgttgcagaagtcctgaagattattggttggagcgataagtaatga

SEQ ID NO: 1272 - protein, 231 aa, synthetic construct
  REGION 1..231: note = Variant of adenylate kinase
MHHHHHHGGSGMMAYLVFLGPPGAGKGTYAKRIQEKTGIPHISTGDIFRDIVKKENDELGKKIKEIMEKGELVPDELVNEVVKRRLSEKDCEKGFILDGYPRTVAQAEFLDSFLESQNKQLTAAVLFDVPEDVVVARLTSRRICPKCGRIYNMISLPPKEDELCDDCKVKLVQRDDDKEETVRHRYKVYLEKTQPVIDYYGKKGILKRVDGTIGIDNVVAEVLKIIGWSDK

SEQ ID NO: 1273 - DNA, 699 bp, synthetic construct
  misc_feature 1..699: note = Variant of adenylate kinase
  source 1..699: mol_type = other DNA
atgcaccatcatcaccatcacgggggctccggcatgatggcatatctggtgttcttaggtccgccgggcgcgggaaaaggtacccaagcgaaacgcattcaggaaaagactggcatcccacatattagcacgggcgatatcttccgtgacatcgtcaagaaagagaacgatgaactgggcaagaagattaaagaaatcatggagaaaggtgaactcgttccagatgaactggtgaatgaggtagtaaaacgccgcctgtcggagaaagactgcgaaaaaggctttattttggatggttatccgcgtaccgttgctcaagcggaattcctggacagttttcttgaatcccagaacaaacagttgacagccgccgtgctgttcgacgtccccgaagatgttgttgtgcaacgtttaacctctcgccgtatctgtccgaaatgcgggcgtagctacaatatgatttcactgccaccaaaagaagacgagctgtgtgacgattgcaaagtcaaattagtacagcgtgatgatgataaggaagaaacggttcgtcaccgctataaagtctaccttgagaagacccagccggtcattgactattatggcaagaaaggtattctcaaacgcgtagatgcgtcgcaaggaatcgacaacgttgttgcagatgttctgaagattattggttggagcgataagtaatga

SEQ ID NO: 1274 - protein, 231 aa, synthetic construct
  REGION 1..231: note = Variant of adenylate kinase
MHHHHHHGGSGMMAYLVFLGPPGAGKGTQAKRIQEKTGIPHISTGDIFRDIVKKENDELGKKIKEIMEKGELVPDELVNEVVKRRLSEKDCEKGFILDGYPRTVAQAEFLDSFLESQNKQLTAAVLFDVPEDVVVQRLTSRRICPKCGRSYNMISLPPKEDELCDDCKVKLVQRDDDKEETVRHRYKVYLEKTQPVIDYYGKKGILKRVDASQGIDNVVADVLKIIGWSDK

SEQ ID NO: 1275 - DNA, 699 bp, synthetic construct
  misc_feature 1..699: note = Variant of adenylate kinase
  source 1..699: mol_type = other DNA
atgcaccatcatcaccatcacgggggctccggcatgatggcatatctggtgtttttaggtccgccgggcgcgggaaaaggtacctacgccaaacgtattcaggaaaagactggcatcccacatattggtacgggcgatatcttccgtgacatcgtaaagaaagagaacgatgaactgggcaagaagattaaagaaatcatggagaaaggtgaactcgttccagatgaactggtgaatgaggtagtaaaacgccgcctgtcggagaaagactgcgaaaaaggctttattttggatggttatccgcgtaccgttgctcaagcggaattcctggaaagttttcttgaatcccagaacaaacagttgacagccgccgtgctgttcgatgtccccgaagatgttgttgttgcccgtttaacctctcgccgcatctgtccgaaatgcgggcgtatctacaatatgatttcactgccaccaaaagaagacgagctgtgtgacgattgcaaagtcaaattagtacagcgtgatgatgataaggaagaaacggttcgtcaccgctataaagtctaccttgagaagacccagccggtcattgactattatggcaagaaaggtattctcaaacgcgtagatggcacgattggaatcgacaacgtttgggcagaagtcctgaagattattggttggagcgataagtaatga

SEQ ID NO: 1276 - protein, 231 aa, synthetic construct
  REGION 1..231: note = Variant of adenylate kinase
MHHHHHHGGSGMMAYLVFLGPPGAGKGTYAKRIQEKTGIPHIGTGDIFRDIVKKENDELGKKIKEIMEKGELVPDELVNEVVKRRLSEKDCEKGFILDGYPRTVAQAEFLESFLESQNKQLTAAVLFDVPEDVVVARLTSRRICPKCGRIYNMISLPPKEDELCDDCKVKLVQRDDDKEETVRHRYKVYLEKTQPVIDYYGKKGILKRVDGTIGIDNVWAEVLKIIGWSDK

SEQ ID NO: 1277 - DNA, 699 bp, synthetic construct
  misc_feature 1..699: note = Variant of adenylate kinase
  source 1..699: mol_type = other DNA
atgcaccatcatcaccatcacgggggctccggcatgatggcatatctggtgtttttaggtccgccgggcgcgggaaaaggtacctacgccaaacgcattcaggaaaagactggcatcccacatattagcacgggcgatatcttccgtgacatcgtcaagaaagagaacgatgaactgggcaagaagattaaagaaatcatggagaaaggtgaactcgttccagatgaactggtgaatgaggtagtaaaacgccgcctgtcggagaaagactgcgaaaaaggctttattttggatggttatccgcgtaccgttgctcaagcggaattcctggacagttttcttgaatcccagaacaaacagttgacagccgccgtgctgttcgatgtccccgaagatgttgttgtgcaacgtttaacctctcgccgcatctgtccgaaatgcgggcgtatctacaatatgatttcactgccaccaaaagaagacgagctgtgtgacgattgcaaagtcaaattagtacagcgtgatgatgataaggaagaaacggttcgtcaccgctataaagtctaccttgagaagacccagccggtcattgactattatggcaagaaaggtattctcaaacgcgtagatggcacgattggaatcgacaacgttgttgcagaagtcctgaagattctgggttggagcgataagtaatga

SEQ ID NO: 1278 - protein, 231 aa, synthetic construct
  REGION 1..231: note = Variant of adenylate kinase
MHHHHHHGGSGMMAYLVFLGPPGAGKGTYAKRIQEKTGIPHISTGDIFRDIVKKENDELGKKIKEIMEKGELVPDELVNEVVKRRLSEKDCEKGFILDGYPRTVAQAEFLDSFLESQNKQLTAAVLFDVPEDVVVQRLTSRRICPKCGRIYNMISLPPKEDELCDDCKVKLVQRDDDKEETVRHRYKVYLEKTQPVIDYYGKKGILKRVDGTIGIDNVVAEVLKILGWSDK

SEQ ID NO: 1279 - DNA, 699 bp, synthetic construct
  misc_feature 1..699: note = Variant of adenylate kinase
  source 1..699: mol_type = other DNA
atgcaccatcatcaccatcacgggggctccggcatgatggcatatctggtgtttttaggtccgccgggcgcgggaaaaggtacctacgccaaacgcattcaggaaaagactggcatcccacatattagcacgggcgatatcttccgtgacatcgtcaagaaagagaacgatgaactgggcaagaagattaaagaaatcatggagaaaggtgaactcgttccagatgaactggtgaatgaggtagtaaaacgccgcctgtcgaacaaagactgcgaaaaaggctttattttggatggttatccgcgtaccgttgctcaagcggaattcctggacagttttcttgaatcccagaacaaacagttgacagccgccgtgctgttcgatgtccccgaagatgttgttgtgcaacgtttaacctctcgccgcatctgtccgaaatgcgggcgtatctacaatatgatttcactgccaccaaaagaagacgagctgtgtgacgattgcaaagtcaaattagtacagcgtgatgatgataaggaagaaacggttcgtcaccgctataaagtctaccttgagaagacccagccggtcattgactattatggcaagaaaggtattctcaaacgcgtagatggcacgattggaatcgacaacgttgttgcagaagtcctgaagattattggttggagcgataagtaatga

SEQ ID NO: 1280 - protein, 231 aa, synthetic construct
  REGION 1..231: note = Variant of adenylate kinase
MHHHHHHGGSGMMAYLVFLGPPGAGKGTYAKRIQEKTGIPHISTGDIFRDIVKKENDELGKKIKEIMEKGELVPDELVNEVVKRRLSNKDCEKGFILDGYPRTVAQAEFLDSFLESQNKQLTAAVLFDVPEDVVVQRLTSRRICPKCGRIYNMISLPPKEDELCDDCKVKLVQRDDDKEETVRHRYKVYLEKTQPVIDYYGKKGILKRVDGTIGIDNVVAEVLKIIGWSDK

SEQ ID NO: 1281 - DNA, 699 bp, synthetic construct
  misc_feature 1..699: note = Variant of adenylate kinase
  source 1..699: mol_type = other DNA
atgcaccatcatcaccatcacgggggctccggcatgatggcatatctggtgtttttaggtccgccgggcgcgggaaaaggtacctacgccaaacgcattcaggaaaagactggcatcccacatattagcacgggcgatatcttccgtgacatcgtcaagaaagagaacgatgaactgggcaagaagattaaagaaatcatggagaaaggtgaactcgttccagatgaactggtgaatgaggtagtaaaacgccgcctgtcggagaaagactgcgaaaaaggctttattttggatggttatccgcgtaccgttgctcaagcggaattcctggacagttttcttgaatcccagaacaaacagttgacagccgccgtgctgttcgatgtccccgaagatgttgttgtgcaacgtctgaccggtcgccgcatctgtccgaaatgcgggcgtatctacaatatgatttcactgccaccaaaagaagacgagctgtgtgacgattgcaaagtcaaattagtacagcgtgatgatgataaggaagaaacggttcgtcaccgctataaagtctaccttgagaagacccagccggtcattgactattatggcaagaaaggtattctcaaacgcgtagatggcacgattggcgtcgctaacgttgttgcagaagtcctgaagattattggttggagcgataagtaatga

SEQ ID NO: 1282 - protein, 231 aa, synthetic construct
  REGION 1..231: note = Variant of adenylate kinase
MHHHHHHGGSGMMAYLVFLGPPGAGKGTYAKRIQEKTGIPHISTGDIFRDIVKKENDELGKKIKEIMEKGELVPDELVNEVVKRRLSEKDCEKGFILDGYPRTVAQAEFLDSFLESQNKQLTAAVLFDVPEDVVVQRLTGRRICPKCGRIYNMISLPPKEDELCDDCKVKLVQRDDDKEETVRHRYKVYLEKTQPVIDYYGKKGILKRVDGTIGVANVVAEVLKIIGWSDK

SEQ ID NO: 1283 - DNA, 699 bp, synthetic construct
  misc_feature 1..699: note = Variant of adenylate kinase
  source 1..699: mol_type = other DNA
atgcaccatcatcaccatcacgggggctccggcatgatggcatatctggtgtttttaggtccgccgggcgcgggaaaaggtacctacgccaaaaacattcaggaaaagactggcatcccacatattagcacgggcgatatcttccgtgacatcgtcaagaaagagaacgatgaactgggcaagaagattaaagaaatcatggagaaaggtgaactcgttccagatgaactggtgaatgaggtagtaaaacgccgcctgtcggagaaagactgcgaaaaaggctttattttggatggttatccgcgtaccgttgctcaagcggaattcctggacagttttcttgaatcccagaacaaacagttgacagccgccgtgctgttcgatgtccccgaagatctgctggtgcaacgtttaacctctcgccgcatctgtccgaaatgcgggcgtatctacaacatgatttcactgccaccaaaagaagacgagctgtgtgacgattgcaaagtcaaattagtacagcgtgatgatgataaggaagaaacggttcgtcaccgctataaagtctaccttgagaagacccagccggtcattgactattatggcaagaaaggtattctcaaacgcgtagatggcacgattggaatcgacaacgttgttgcagaagtcctgaagattattggttggagcgataagtaatga

SEQ ID NO: 1284 - protein, 231 aa, synthetic construct
  REGION 1..231: note = Variant of adenylate kinase
MHHHHHHGGSGMMAYLVFLGPPGAGKGTYAKNIQEKTGIPHISTGDIFRDIVKKENDELGKKIKEIMEKGELVPDELVNEVVKRRLSEKDCEKGFILDGYPRTVAQAEFLDSFLESQNKQLTAAVLFDVPEDLLVQRLTSRRICPKCGRIYNMISLPPKEDELCDDCKVKLVQRDDDKEETVRHRYKVYLEKTQPVIDYYGKKGILKRVDGTIGIDNVVAEVLKIIGWSDK

SEQ ID NO: 1285 - DNA, 699 bp, synthetic construct
  misc_feature 1..699: note = Variant of adenylate kinase
  source 1..699: mol_type = other DNA
atgcaccatcatcaccatcacgggggctccggcatgatggcatatctggtgctgttaggtccgccgggcgcgggaaaaggtacccaagcgaaacgcattcaggaaaagactggcatcccacatattagcacgggcgatatcttccgtgacatcgtcaagaaagagaacgatgaactgggcaagaagattaaagaaatcatggagaaaggtgaactcgttccagatgaactggtgaatgaggtagtaaaacgccgcctgtcggagaaagactgcgaaaaaggctttattttggatggttatccgcgtaccgttgctcaagcggaattcctggacagttttcttgaatcccagaacaaacagttgacagccgccgtgctgttcaaagtccccgaagatgttgttgtgcaacgtttaacctctcgccgcatctgtccgaaatgcgggcgtatctacaatatgatttcactgccaccaaaagaagacgagctgtgtgacgattgcaaagtcaaattagtacagcgtgatgatgataaggaagaaacggttcgtcaccgcctgaaagtctaccttgagaagacccagccggtcattgactattatggcaagaaaggtattctcaaacgcgtagatggcacgattggaatcgacaacgttgttgcagaagtcctgaagattattggttggagcgataagtaatga

SEQ ID NO: 1286 - protein, 231 aa, synthetic construct
  REGION 1..231: note = Variant of adenylate kinase
MHHHHHHGGSGMMAYLVLLGPPGAGKGTQAKRIQEKTGIPHISTGDIFRDIVKKENDELGKKIKEIMEKGELVPDELVNEVVKRRLSEKDCEKGFILDGYPRTVAQAEFLDSFLESQNKQLTAAVLFKVPEDVVVQRLTSRRICPKCGRIYNMISLPPKEDELCDDCKVKLVQRDDDKEETVRHRLKVYLEKTQPVIDYYGKKGILKRVDGTIGIDNVVAEVLKIIGWSDK

SEQ ID NO: 1287 - DNA, 696 bp, synthetic construct
  misc_feature 1..696: note = Variant of adenylate kinase
  source 1..696: mol_type = other DNA
atgcaccatcatcaccatcacgggggctccggcatgatggcatatctggtgttcttaggtccgccgggcgcgggaaaaggtacccaatcgaaacgcattcaggaaaagactggcatcccacatattagcacgggcgatatcttccgtgacatcgtcaagaaagagaacgatgaactgggcaagaagattaaagaaatcatggagaaaggtgaactcgttccagatgaactggtgaatgaggtagtaaaacgccgcctgtcggagaaagactgcgaaaaaggctttattttggatggtgttcgtaccgttgctcaagcggaattcctggacagttttcttgaatcccagaacaaacagttgacagccgccgtgctgttcaaagtccccgaagatgttgttgtgcaacgtttaacctctcgcctgatctgtccgaaatgcgggcgtatctacaatatgatttcactgccaccaaaagaagacgagctgtgtgacgattgcaaagtcaaattagtacagcgtgatgatgataaggaagaaacggttcgtcaccgcctgaaagtctaccttgagaagacccagccggtcattgactattatggcaagaaaggtattctcaaacgcgtagatgggtcgcaaggaatcgacaacgttgttgcagaagtcctgaagattattggttggagcgataagtaatga

SEQ ID NO: 1288 - protein, 230 aa, synthetic construct
  REGION 1..230: note = Variant of adenylate kinase
MHHHHHHGGSGMMAYLVFLGPPGAGKGTQSKRIQEKTGIPHISTGDIFRDIVKKENDELGKKIKEIMEKGELVPDELVNEVVKRRLSEKDCEKGFILDGVRTVAQAEFLDSFLESQNKQLTAAVLFKVPEDVVVQRLTSRLICPKCGRIYNMISLPPKEDELCDDCKVKLVQRDDDKEETVRHRLKVYLEKTQPVIDYYGKKGILKRVDGSQGIDNVVAEVLKIIGWSDK

SEQ ID NO: 1289 - DNA, 699 bp, synthetic construct
  misc_feature 1..699: note = Variant of adenylate kinase
  source 1..699: mol_type = other DNA
atgcaccatcatcaccatcacgggggctccggcatgatggcatatctggtgttcttaggtccgccgggcgcgggaaaaggtacccaatcgaaacgcattcaggaaaagactggcatcccacatattagcacgggcgatatcttccgtgacatcgtcaagaaagagaacgatgaactgggcaagaagattaaagaaatcatggagaaaggtgaactcgttccagatgaactggtgaatgaggtagtaaaacgccgcctgtcggagaaagactgcgaaaaatcgtttattttggatggttatccgcgtaccgttgctcaagcggaattcctggacagttttcttgaatcccagaacaaacagttgacagccgccgtgctgttcaaagtccccgaagatgttgttgtgcaacgtttaacctctcgcctgatctgtccgaaatgcgggcgtatctacaatatgatttcactgccaccaaaagaagacgagctgtgtgacgattgcaaagtcaaattagtacagcgtgatgatgataaggaagaaacggttcgtcaccgcctgaaagtctaccttgagaagacccagccggtcattgactattatggcaagaaaggtattctcaaacgcgtagatgggtcgcaaggaatcgacaacgttgttgcagaagtcctgaagattattggttggagcgataagtaatga

SEQ ID NO: 1290 - protein, 231 aa, synthetic construct
  REGION 1..231: note = Variant of adenylate kinase
MHHHHHHGGSGMMAYLVFLGPPGAGKGTQSKRIQEKTGIPHISTGDIFRDIVKKENDELGKKIKEIMEKGELVPDELVNEVVKRRLSEKDCEKSFILDGYPRTVAQAEFLDSFLESQNKQLTAAVLFKVPEDVVVQRLTSRLICPKCGRIYNMISLPPKEDELCDDCKVKLVQRDDDKEETVRHRLKVYLEKTQPVIDYYGKKGILKRVDGSQGIDNVVAEVLKIIGWSDK

SEQ ID NO: 1291 - DNA, 699 bp, synthetic construct
  misc_feature 1..699: note = Variant of adenylate kinase
  source 1..699: mol_type = other DNA
atgcaccatcatcaccatcacgggggctccggcatgatggcatatctggtgttcttaggtccgccgggcgcgggaaaaggtacccaatcgaaacgcattcaggaaaagactggcatcccacatattagcacgggcgatatcttccgtgacatcgtcaagaaagagaacgatgaactgggcaagaagattaaagaaatcatggagaaaggtgaactcgttccagatgaactggtgaatgaggtagtaaaacgccgcctgtcggagaaagactgcgaaaaaggctttattttggatggttatccgcgtaccgttgctcaagcggaattcctggacagttttcttgaatcccagaacaaacagttgacagccgccgtgctgttcaaagtccccgaagatgttgttgtgcaacgtttaacctctcgcctgatctgtccgaaatgcgggcgtatctacaatatgatttcactgccaccaaaagaagacgagctgtgtgacgattgcaaagtcaaattagtacagcgtgatgatgataagctggaaacggttcgtcaccgcctgaaagtctaccttgagaagacccagccggtcattgactattatggcaagaaaggtattctcaaacgcgtagatgggtcgcaaggaatcgacaacgttgttgcagaagtcctgaagattattggttggagcgataagtaatga

SEQ ID NO: 1292 - protein, 231 aa, synthetic construct
  REGION 1..231: note = Variant of adenylate kinase
MHHHHHHGGSGMMAYLVFLGPPGAGKGTQSKRIQEKTGIPHISTGDIFRDIVKKENDELGKKIKEIMEKGELVPDELVNEVVKRRLSEKDCEKGFILDGYPRTVAQAEFLDSFLESQNKQLTAAVLFKVPEDVVVQRLTSRLICPKCGRIYNMISLPPKEDELCDDCKVKLVQRDDDKLETVRHRLKVYLEKTQPVIDYYGKKGILKRVDGSQGIDNVVAEVLKIIGWSDK

SEQ ID NO: 1293 - DNA, 699 bp, synthetic construct
  misc_feature 1..699: note = Variant of adenylate kinase
  source 1..699: mol_type = other DNA
atgcaccatcatcaccatcacgggggctccggcatgatggcatatctggtgttcttaggtccgccgggcgcgggaaaaggtacccaatcgaaacgcattcaggaaaagactggcatcccacatattagcacgggcgatatcttccgtgacatcgtcaagaaagagaacgatgaactgggcaagaagattaaagaaatcatggagaaaggtgaactcgttccagatgaactggtgaatgaggtagtaaaacgccgcctgtcggagaaagactgcgaaaaaggctttattttggatggttatccgcgtaccgttgctcaagcggaattcctggacagttttcttgaatcccagaacaaacagttgacagccgccgtgctgttcaaagtccccgaagatgttgttgtgcaacgtttaacctctcgcctgatctgtccgaaatgcgggcgtatctacaatatgatttcactgccaccaaaagaagacgagctgtgtgacgattgcaaagtcaaattagtacagcgtgatgatgataaggaagaaacggttcgtcaccgcctgaaagtctaccttgagaagacccagccggtcattgggtattatggcaagaaaggtattctcaaacgcgtagatgggtcgcaaggaatcgacaacgttgttgcagaagtcctgaagattattggttggagcgataagtaatga

SEQ ID NO: 1294 - protein, 231 aa, synthetic construct
  REGION 1..231: note = Variant of adenylate kinase
MHHHHHHGGSGMMAYLVFLGPPGAGKGTQSKRIQEKTGIPHISTGDIFRDIVKKENDELGKKIKEIMEKGELVPDELVNEVVKRRLSEKDCEKGFILDGYPRTVAQAEFLDSFLESQNKQLTAAVLFKVPEDVVVQRLTSRLICPKCGRIYNMISLPPKEDELCDDCKVKLVQRDDDKEETVRHRLKVYLEKTQPVIGYYGKKGILKRVDGSQGIDNVVAEVLKIIGWSDK

SEQ ID NO: 1295 - DNA, 699 bp, synthetic construct
  misc_feature 1..699: note = Variant of adenylate kinase
  source 1..699: mol_type = other DNA
atgcaccatcatcaccatcacgggggctccggcatgatggcatatctggtgttcttaggtccgccgggcgcgggaaaaggtacccaatcgaaacgcattcaggaaaagactggcatcccacatattagcacgggcgatatcttccgtgacatcgtcaagaaagagaacccggaactgggcaagaagattaaagaaatcatggagaaaggtgaactcgttccagatgaactggtgaatgaggtagtaaaacgccgcctgtcggagaaagactgcgaaaaaggctttattttggatggttatccgcgtaccgttgctcaagcggaattcctggacagttttcttgaatcccagaacaaacagttgacagccgccgtgctgttcaaagtccccgaagatgttgttgtgcaacgtttaacctctcgcctgatctgtccgaaatgcgggcgtatctacaatatgatttcactgccaccaaaagaagacgagctgtgtgacgattgcaaagtcaaattagtacagcgtgatgatgataaggaagaaacggttcgtcaccgcctgaaagtctaccttgagaagacccagccggtcattgactattatggcaagaaaggtattctcaaacgcgtagatgggtcgcaaggaatcgacaacgttgttgcagaagtcctgaagattattggttggagcgataagtaatga

SEQ ID NO: 1296 - protein, 231 aa, synthetic construct
  REGION 1..231: note = Variant of adenylate kinase
MHHHHHHGGSGMMAYLVFLGPPGAGKGTQSKRIQEKTGIPHISTGDIFRDIVKKENPELGKKIKEIMEKGELVPDELVNEVVKRRLSEKDCEKGFILDGYPRTVAQAEFLDSFLESQNKQLTAAVLFKVPEDVVVQRLTSRLICPKCGRIYNMISLPPKEDELCDDCKVKLVQRDDDKEETVRHRLKVYLEKTQPVIDYYGKKGILKRVDGSQGIDNVVAEVLKIIGWSDK

SEQ ID NO: 1297 - DNA, 699 bp, synthetic construct
  misc_feature 1..699: note = Variant of adenylate kinase
  source 1..699: mol_type = other DNA
atgcaccatcatcaccatcacgggggctccggcatgatggcatatctggtgttcttaggtccgccgggcgcgggaaaaggtacccaatcgaaacgcattcaggaaaagactggcatcccacatattagcacgggcgatatcttccgtgacatcgtcaagaaagagaacgatgaactgggcaagaagattaaagaaatcatggagaaaggtgaactcgttccagatgaactggggaatgaggtagtaaaacgccgcctgtcggagaaagactgcgaaaaaggctttattttggatggttatccgcgtaccgttgctcaagcggaattcctggacagttttcttgaatcccagaacaaacagttgacagccgccgtgctgttcaaagtccccgaagatgttgttgtgcaacgtttaacctctcgcctgatctgtccgaaatgcgggcgtatctacaatatgatttcactgccaccaaaagaagacgagctgtgtgacgattgcaaagtcaaattagtacagcgtgatgatgataaggaagaaacggttcgtcaccgcctgaaagtctaccttgagaagacccagccggtcattgactattatggcaagaaaggtattctcaaacgcgtagatgggtcgcaaggaatcgacaacgttgttgcagaagtcctgaagattattggttggagcgataagtaatga

SEQ ID NO: 1298 - protein, 231 aa, synthetic construct
  REGION 1..231: note = Variant of adenylate kinase
MHHHHHHGGSGMMAYLVFLGPPGAGKGTQSKRIQEKTGIPHISTGDIFRDIVKKENDELGKKIKEIMEKGELVPDELGNEVVKRRLSEKDCEKGFILDGYPRTVAQAEFLDSFLESQNKQLTAAVLFKVPEDVVVQRLTSRLICPKCGRIYNMISLPPKEDELCDDCKVKLVQRDDDKEETVRHRLKVYLEKTQPVIDYYGKKGILKRVDGSQGIDNVVAEVLKIIGWSDK

SEQ ID NO: 1299 - DNA, 699 bp, synthetic construct
  misc_feature 1..699: note = Variant of adenylate kinase
  source 1..699: mol_type = other DNA
atgcaccatcatcaccatcacgggggctccggcatgatggcatatctggtgttcttaggtccgccgggcgcgggaaaaggtacccaatcgaaacgcattcaggaaaagactggcatcccacatattagcacgggcgatatcttccgtgacatcgtcaagaaagagaacgatgaactgggcaagaagattaaagaaatcatgcgtaaaggtgaactcgttccagatgaactggtgaatgaggtagtaaaacgccgcctgtcggagaaagactgcgaaaaaggctttattttggatggttatccgcgtaccgttgctcaagcggaattcctggacagttttcttgaatcccagaacaaacagttgacagccgccgtgctgttcaaagtccccgaagatgttgttgtgcaacgtttaacctctcgcctgatctgtccgaaatgcgggcgtatctacaatatgatttcactgccaccaaaagaagacgagctgtgtgacgattgcaaagtcaaattagtacagcgtgatgatgataaggaagaaacggttcgtcaccgcctgaaagtctaccttgagaagacccagccggtcattgactattatggcaagaaaggtattctcaaacgcgtagatgggtcgcaaggaatcgacaacgttgttgcagaagtcctgaagattattggttggagcgataagtaatga

SEQ ID NO: 1300 - protein, 231 aa, synthetic construct
  REGION 1..231: note = Variant of adenylate kinase
MHHHHHHGGSGMMAYLVFLGPPGAGKGTQSKRIQEKTGIPHISTGDIFRDIVKKENDELGKKIKEIMRKGELVPDELVNEVVKRRLSEKDCEKGFILDGYPRTVAQAEFLDSFLESQNKQLTAAVLFKVPEDVVVQRLTSRLICPKCGRIYNMISLPPKEDELCDDCKVKLVQRDDDKEETVRHRLKVYLEKTQPVIDYYGKKGILKRVDGSQGIDNVVAEVLKIIGWSDK

SEQ ID NO: 1301 - DNA, 699 bp, synthetic construct
  misc_feature 1..699: note = Variant of adenylate kinase
  source 1..699: mol_type = other DNA
atgcaccatcatcaccatcacgggggctccggcatgatggcatatctggtgttcttaggtccgccgggcgcgggaaaaggtacccaatcgaaacgcattcaggaaaagactggcatcccacatattagcacgggcgatatcttccgtgacatcgtcaagaaagagaacgatgaactgggcaagaagattaaagaaatcatggagaaaggtgaactcgttccagatgaactggtgaatgaggtagtaaaacgccgcctgtcggagaaagactgcgaagtgggctttattttggatggttatccgcgtaccgttgctcaagcggaattcctggacagttttcttgaatcccagaacaaacagttgacagccgccgtgctgttcaaagtccccgaagatgttgttgtgcaacgtttaacctctcgcctgatctgtccgaaatgcgggcgtatctacaatatgatttcactgccaccaaaagaagacgagctgtgtgacgattgcaaagtcaaattagtacagcgtgatgatgataaggaagaaacggttcgtcaccgcctgaaagtctaccttgagaagacccagccggtcattgactattatggcaagaaaggtattctcaaacgcgtagatgggtcgcaaggaatcgacaacgttgttgcagaagtcctgaagattattggttggagcgataagtaatga

SEQ ID NO: 1302 - protein, 231 aa, synthetic construct
  REGION 1..231: note = Variant of adenylate kinase
MHHHHHHGGSGMMAYLVFLGPPGAGKGTQSKRIQEKTGIPHISTGDIFRDIVKKENDELGKKIKEIMEKGELVPDELVNEVVKRRLSEKDCEVGFILDGYPRTVAQAEFLDSFLESQNKQLTAAVLFKVPEDVVVQRLTSRLICPKCGRIYNMISLPPKEDELCDDCKVKLVQRDDDKEETVRHRLKVYLEKTQPVIDYYGKKGILKRVDGSQGIDNVVAEVLKIIGWSDK

SEQ ID NO: 1303 - DNA, 699 bp, synthetic construct
  misc_feature 1..699: note = Variant of adenylate kinase
  source 1..699: mol_type = other DNA
atgcaccatcatcaccatcacgggggctccggcatgatggcatatctggtgttcttaggtccgccgggcgcgggaaaaggtacccaatcgaaacgcattcaggaaaagactggcatcccacatattagcacgggcgatatcttccgtgacatcgtcaagaaagagaacgatgaactgggcaagaagattaaagaaatcatggagaaaggtgaactcgttccagatgaatcggtgaatgaggtagtaaaacgccgcctgtcggagaaagactgcgaaaaaggctttattttggatggttatccgcgtaccgttgctcaagcggaattcctggacagttttcttgaatcccagaacaaacagttgacagccgccgtgctgttcaaagtccccgaagatgttgttgtgcaacgtttaacctctcgcctgatctgtccgaaatgcgggcgtatctacaatatgatttcactgccaccaaaagaagacgagctgtgtgacgattgcaaagtcaaattagtacagcgtgatgatgataaggaagaaacggttcgtcaccgcctgaaagtctaccttgagaagacccagccggtcattgactattatggcaagaaaggtattctcaaacgcgtagatgggtcgcaaggaatcgacaacgttgttgcagaagtcctgaagattattggttggagcgataagtaatga

SEQ ID NO: 1304 - protein, 231 aa, synthetic construct
  REGION 1..231: note = Variant of adenylate kinase
MHHHHHHGGSGMMAYLVFLGPPGAGKGTQSKRIQEKTGIPHISTGDIFRDIVKKENDELGKKIKEIMEKGELVPDESVNEVVKRRLSEKDCEKGFILDGYPRTVAQAEFLDSFLESQNKQLTAAVLFKVPEDVVVQRLTSRLICPKCGRIYNMISLPPKEDELCDDCKVKLVQRDDDKEETVRHRLKVYLEKTQPVIDYYGKKGILKRVDGSQGIDNVVAEVLKIIGWSDK

SEQ ID NO: 1305 - DNA, 699 bp, synthetic construct
  misc_feature 1..699: note = Variant of adenylate kinase
  source 1..699: mol_type = other DNA
atgcaccatcatcaccatcacgggggctccggcatgatggcatatctggtgttcttaggtccgccgggcgcgggaaaaggtacccaatcgaaacgcattcaggaaaagactggcatcccacatattagcacgggcgatatcttccgtgacatcgtcaagaaagagaacgatgaactgggcaagctgattaaagaaatcatggagaaaggtgaactcgttccagatgaactggtgaatgaggtagtaaaacgccgcctgtcggagaaagactgcgaaaaaggctttattttggatggttatccgcgtaccgttgctcaagcggaattcctggacagttttcttgaatcccagaacaaacagttgacagccgccgtgctgttcaaagtccccgaagatgttgttgtgcaacgtttaacctctcgcctgatctgtccgaaatgcgggcgtatctacaatatgatttcactgccaccaaaagaagacgagctgtgtgacgattgcaaagtcaaattagtacagcgtgatgatgataaggaagaaacggttcgtcaccgcctgaaagtctaccttgagaagacccagccggtcattgactattatggcaagaaaggtattctcaaacgcgtagatgggtcgcaaggaatcgacaacgttgttgcagaagtcctgaagattattggttggagcgataagtaatga

SEQ ID NO: 1306 - protein, 231 aa, synthetic construct
  REGION 1..231: note = Variant of adenylate kinase
MHHHHHHGGSGMMAYLVFLGPPGAGKGTQSKRIQEKTGIPHISTGDIFRDIVKKENDELGKLIKEIMEKGELVPDELVNEVVKRRLSEKDCEKGFILDGYPRTVAQAEFLDSFLESQNKQLTAAVLFKVPEDVVVQRLTSRLICPKCGRIYNMISLPPKEDELCDDCKVKLVQRDDDKEETVRHRLKVYLEKTQPVIDYYGKKGILKRVDGSQGIDNVVAEVLKIIGWSDK

SEQ ID NO: 1307 - DNA, 699 bp, synthetic construct
  misc_feature 1..699: note = Variant of adenylate kinase
  source 1..699: mol_type = other DNA
atgcaccatcatcaccatcacgggggctccggcatgatgtgttatctggtgttcttaggtccgccgggcgcgggaaaaggtacccaatcgaaacgcattcaggaaaagactggcatcccacatattagcacgggcgatatcttccgtgacatcgtcaagaaagagaacgatgaactgggcaagaagattaaagaaatcatggagaaaggtgaactcgttccagatgaactggtgaatgaggtagtaaaacgccgcctgtcggagaaagactgcgaaaaaggctttattttggatggttatccgcgtaccgttgctcaagcggaattcctggacagttttcttgaatcccagaacaaacagttgacagccgccgtgctgttcaaagtccccgaagatgttgttgtgcaacgtttaacctctcgcctgatctgtccgaaatgcgggcgtatctacaatatgatttcactgccaccaaaagaagacgagctgtgtgacgattgcaaagtcaaattagtacagcgtgatgatgataaggaagaaacggttcgtcaccgcctgaaagtctaccttgagaagacccagccggtcattgactattatggcaagaaaggtattctcaaacgcgtagatgggtcgcaaggaatcgacaacgttgttgcagaagtcctgaagattattggttggagcgataagtaatga

SEQ ID NO: 1308 - protein, 231 aa, synthetic construct
  REGION 1..231: note = Variant of adenylate kinase
MHHHHHHGGSGMMCYLVFLGPPGAGKGTQSKRIQEKTGIPHISTGDIFRDIVKKENDELGKKIKEIMEKGELVPDELVNEVVKRRLSEKDCEKGFILDGYPRTVAQAEFLDSFLESQNKQLTAAVLFKVPEDVVVQRLTSRLICPKCGRIYNMISLPPKEDELCDDCKVKLVQRDDDKEETVRHRLKVYLEKTQPVIDYYGKKGILKRVDGSQGIDNVVAEVLKIIGWSDK

SEQ ID NO: 1309 - DNA, 699 bp, synthetic construct
  misc_feature 1..699: note = Variant of adenylate kinase
  source 1..699: mol_type = other DNA
atgcaccatcatcaccatcacgggggctccggcatgatggcatatctggtgttcttaggtcctccgggcgcgggaaaaggtacccaatcgaaacgcattcaggaaaagactggcatcccacatattagcacgggcgatatcttccgtgaccgtgtcaagaaagagaacgatgaactgggcaagaagattaaagaaatcatggagaaaggtgaactcgttccagatgaactggtgaatgaggtagtaaaacgccgcctgtcggagaaagactgcgaaaaaggctttattttggatggttatccgcgtaccgttgctcaagcggaattcctggacagttttcttgaatcccagaacaaacagttgacagccgccgtgctgttcaaagtccccgaagatgttgttgtgcaacgtttaacctctcgcctgatctgtccgaaatgcgggcgtatctacaatatgatttcactgccaccaaaagaagacgagctgtgtgacgattgcaaagtcaaattagtacagcgtgatgatgataaggaagaaacggttcgtcaccgcctgaaagtctaccttgagaagacccagccggtcattgactattatggcaagaaaggtattctcaaacgcgtagatgggtcgcaaggaatcgacaacgttgttgcagaagtcctgaagattattggttggagcgataagtaatga

SEQ ID NO: 1310 - protein, 231 aa, synthetic construct
  REGION 1..231: note = Variant of adenylate kinase
MHHHHHHGGSGMMAYLVFLGPPGAGKGTQSKRIQEKTGIPHISTGDIFRDRVKKENDELGKKIKEIMEKGELVPDELVNEVVKRRLSEKDCEKGFILDGYPRTVAQAEFLDSFLESQNKQLTAAVLFKVPEDVVVQRLTSRLICPKCGRIYNMISLPPKEDELCDDCKVKLVQRDDDKEETVRHRLKVYLEKTQPVIDYYGKKGILKRVDGSQGIDNVVAEVLKIIGWSDK

SEQ ID NO: 1311 - DNA, 699 bp, synthetic construct
  misc_feature 1..699: note = Variant of adenylate kinase
  source 1..699: mol_type = other DNA
atgcaccatcatcaccatcacgggggctccggcatgatggcatatctggtgttcttaggtccgccgggcgcgggaaaaggtacccaatcgaaacgcattcaggaaaagactggcatcccacatattagcacgggcgatatcttccgtgacatcgtcaagaaagagaacgatgaactgggcaagaagattaaagaaatcatggagaaaggtgaactcgttccagatgaactggtgaatgaggtagtaaaacgccgcctgtcggagaaagactgcgaaaaaggctttattttggatggttatccgcgtaccgttgctcaagcggaattcctggacagttttcttgaatcccagcgtaaacagttgacagccgccgtgctgttcaaagtccccgaagatgttgttgtgcaacgtttaacctctcgcctgatctgtccgaaatgcgggcgtatctacaatatgatttcactgccaccaaaagaagacgagctgtgtgacgattgcaaagtcaaattagtacagcgtgatgatgataaggaagaaacggttcgtcaccgcctgaaagtctaccttgagaagacccagccggtcattgactattatggcaagaaaggtattctcaaacgcgtagatgggtcgcaaggaatcgacaacgttgttgcagaagtcctgaagattattggttggagcgataagtaatga

SEQ ID NO: 1312 - protein, 231 aa, synthetic construct
  REGION 1..231: note = Variant of adenylate kinase
MHHHHHHGGSGMMAYLVFLGPPGAGKGTQSKRIQEKTGIPHISTGDIFRDIVKKENDELGKKIKEIMEKGELVPDELVNEVVKRRLSEKDCEKGFILDGYPRTVAQAEFLDSFLESQRKQLTAAVLFKVPEDVVVQRLTSRLICPKCGRIYNMISLPPKEDELCDDCKVKLVQRDDDKEETVRHRLKVYLEKTQPVIDYYGKKGILKRVDGSQGIDNVVAEVLKIIGWSDK

SEQ ID NO: 1313 - DNA, 699 bp, synthetic construct
  misc_feature 1..699: note = Variant of adenylate kinase
  source 1..699: mol_type = other DNA
atgcaccatcatcaccatcacgggggctccggcatgatggcatatctggtgttcttaggtccgccgggcgcgggaaaaggtacccaatcgaaacgcattcaggaaaagactggcatcccacatattagcacgggcgatatcttccgtgacatcgtcaagaaagagaacgatgaactgggcaagaagattaaagaaatcatggagaaaggtgaactcgttccagatgaactggtgaatgaggtagtaaaacgccgcctgtcggagaaagactttgaaaaaggctttattttggatggttatccgcgtaccgttgctcaagcggaattcctggacagttttcttgaatcccagaacaaacagttgacagccgccgtgctgttcaaagtccccgaagatgttgttgtgcaacgtttaacctctcgcctgatctgtccgaaatgcgggcgtatctacaatatgatttcactgccaccaaaagaagacgagctgtgtgacgattgcaaagtcaaattagtacagcgtgatgatgataaggaagaaacggttcgtcaccgcctgaaagtctaccttgagaagacccagccggtcattgactattatggcaagaaaggtattctcaaacgcgtagatgggtcgcaaggaatcgacaacgttgttgcagaagtcctgaagattattggttggagcgataagtaatga

SEQ ID NO: 1314 - protein, 231 aa, synthetic construct
  REGION 1..231: note = Variant of adenylate kinase
MHHHHHHGGSGMMAYLVFLGPPGAGKGTQSKRIQEKTGIPHISTGDIFRDIVKKENDELGKKIKEIMEKGELVPDELVNEVVKRRLSEKDFEKGFILDGYPRTVAQAEFLDSFLESQNKQLTAAVLFKVPEDVVVQRLTSRLICPKCGRIYNMISLPPKEDELCDDCKVKLVQRDDDKEETVRHRLKVYLEKTQPVIDYYGKKGILKRVDGSQGIDNVVAEVLKIIGWSDK

SEQ ID NO: 1315 - DNA, 699 bp, synthetic construct
  misc_feature 1..699: note = Variant of adenylate kinase
  source 1..699: mol_type = other DNA
atgcaccatcatcaccatcacgggggctccggcatgatggcatatctggtgttcttaggtccgccgggcgcgggaaaaggtacccaatcgaaacgcattcaggaaaagactggcatcccacatattagcacgggcgatatcttccgtgacatcgtcaagaaagagaacgatgaactgggcaagaagattaaagaaatcatggagaaaggtgaactcgttccagatgaactggtgaatgaggtagtaaaacgccgcctgtcggagaaagactgcgaaaaaggctttattttggatggttatccgcgtaccgttgctcaagcggaattcctggacagttttcttgaatcccagaacaaacagttgacagccgccgtgctgttcaaagtccccgaagatgttgttgtgcaacgtttaacctctcgcctgatctgtccgaaatgcgggcgtatctacaatatgatttcactgccaccaaaagaagacgaggggtgtgacgattgcaaagtcaaattagtacagcgtgatgatgataaggaagaaacggttcgtcaccgcctgaaagtctaccttgagaagacccagccggtcattgactattatggcaagaaaggtattctcaaacgcgtagatgggtcgcaaggaatcgacaacgttgttgcagaagtcctgaagattattggttggagcgataagtaatga

SEQ ID NO: 1316 - protein, 231 aa, synthetic construct
  REGION 1..231: note = Variant of adenylate kinase
MHHHHHHGGSGMMAYLVFLGPPGAGKGTQSKRIQEKTGIPHISTGDIFRDIVKKENDELGKKIKEIMEKGELVPDELVNEVVKRRLSEKDCEKGFILDGYPRTVAQAEFLDSFLESQNKQLTAAVLFKVPEDVVVQRLTSRLICPKCGRIYNMISLPPKEDEGCDDCKVKLVQRDDDKEETVRHRLKVYLEKTQPVIDYYGKKGILKRVDGSQGIDNVVAEVLKIIGWSDK

SEQ ID NO: 1317 - DNA, 699 bp, synthetic construct
  misc_feature 1..699: note = Variant of adenylate kinase
  source 1..699: mol_type = other DNA
atgcaccatcatcaccatcacgggggctccggcatgatggcatatctggtgttcttaggtccgccgggcgcgggaaaaggtacccaatcgaaacgcattcaggaaaagactggcatcccacatattagcacgggcgatatcttccgtgacatcgtcaagaaagagaacgatgaactgggcaagaagattaaaccgatcatggagaaaggtgaactcgttccagatgaactggtgaatgaggtagtaaaacgccgcctgtcggagaaagactgcgaaaaaggctttattttggatggttatccgcgtaccgttgctcaagcggaattcctggacagttttcttgaatcccagaacaaacagttgacagccgccgtgctgttcaaagtccccgaagatgttgttgtgcaacgtttaacctctcgcctgatctgtccgaaatgcgggcgtatctacaatatgatttcactgccaccaaaagaagacgagctgtgtgacgattgcaaagtcaaattagtacagcgtgatgatgataaggaagaaacggttcgtcaccgcctgaaagtctaccttgagaagacccagccggtcattgactattatggcaagaaaggtattctcaaacgcgtagatgggtcgcaaggaatcgacaacgttgttgcagaagtcctgaagattattggttggagcgataagtaatga

SEQ ID NO: 1318 - protein, 231 aa, synthetic construct
  REGION 1..231: note = Variant of adenylate kinase
MHHHHHHGGSGMMAYLVFLGPPGAGKGTQSKRIQEKTGIPHISTGDIFRDIVKKENDELGKKIKPIMEKGELVPDELVNEVVKRRLSEKDCEKGFILDGYPRTVAQAEFLDSFLESQNKQLTAAVLFKVPEDVVVQRLTSRLICPKCGRIYNMISLPPKEDELCDDCKVKLVQRDDDKEETVRHRLKVYLEKTQPVIDYYGKKGILKRVDGSQGIDNVVAEVLKIIGWSDK

SEQ ID NO: 1319 - DNA, 699 bp, synthetic construct
  misc_feature 1..699: note = Variant of adenylate kinase
  source 1..699: mol_type = other DNA
atgcaccatcatcaccatcacgggggctccggcatgatggcatatctggtgttcttaggtccgccgggcgcgggaaaaggtacccaatcgaaacgcattcaggaaaagactggcatcccacatattagcacgggcgatatcttccgtgacatcgtcaagaaagagaacgatgaactgggcaagaagattaaagaaatcatggagaaaggtgaactcgttccagatgaactggtgaatgaggtagtaaaacgccgcctgtcggagaaagactgcgaaaaaggctttattttggatggttatccgcgtaccgttgctcaagcggaattcctggacagttttcttgaatcccagaacaaacagttgacagccgccgtgctgttcaaagtccccgaagatgttgttgtgcaacgtttaacctctcgcctgatctgtccgaaatgcgggcgtatctacaatatgatttcactgccaccaaaagaagacgagctgtgtgacgattgcaaagtcaaattagtacgtcgtgatgatgataaggaagaaacggttcgtcaccgcctgaaagtctaccttgagaagacccagccggtcattgactattatggcaagaaaggtattctcaaacgcgtagatgggtcgcaaggaatcgacaacgttgttgcagaagtcctgaagattattggttggagcgataagtaatga

SEQ ID NO: 1320 - protein, 231 aa, synthetic construct
  REGION 1..231: note = Variant of adenylate kinase
MHHHHHHGGSGMMAYLVFLGPPGAGKGTQSKRIQEKTGIPHISTGDIFRDIVKKENDELGKKIKEIMEKGELVPDELVNEVVKRRLSEKDCEKGFILDGYPRTVAQAEFLDSFLESQNKQLTAAVLFKVPEDVVVQRLTSRLICPKCGRIYNMISLPPKEDELCDDCKVKLVRRDDDKEETVRHRLKVYLEKTQPVIDYYGKKGILKRVDGSQGIDNVVAEVLKIIGWSDK

SEQ ID NO: 1321 - DNA, 699 bp, synthetic construct
  misc_feature 1..699: note = Variant of adenylate kinase
  source 1..699: mol_type = other DNA
atgcaccatcatcaccatcacgggggctccggcatgatggcatatctggtgttcttaggtccgccgggcgcgggaaaaggtacccaatcgaaacgcattcaggaaaagactggcatcccacatattagcacgggcgatatcttccgtgacatcgtcaagaaagagaacgatgaactgggcaagaagattaaagaaatcatggagaaaggtgaactcgttccagatgaactggtgaatgaggtagtaaaacgccgcctgtcggagaaagactgcgaaaaaggctttattttggatggttatccgcgtaccgttgctcaagcggaattcctggacagttttcttgaatcccagaacaaacagttgacagccgccgtgctgttcaaagtccccgaagatgttgttgtgcaacgtttaacctctcgcctgatctgtccgaaatgcgggcgtatctacaatatgatttcactgccaccaaaagaagacgagctgtgtgacgattgcaaagtcaaattagtacagcgtgatgatgataaggaagaaacggttcgtcaccgcctgaaagtctaccttgagaagacccagccggtcattgactattatggcaagaaaggtattctcaaacgcgtagatgggtcgcaaggaatcgacaacgttgttgcagaagtcctgggtattattggttggagcgataagtaatga

SEQ ID NO: 1322 - protein, 231 aa, synthetic construct
  REGION 1..231: note = Variant of adenylate kinase
MHHHHHHGGSGMMAYLVFLGPPGAGKGTQSKRIQEKTGIPHISTGDIFRDIVKKENDELGKKIKEIMEKGELVPDELVNEVVKRRLSEKDCEKGFILDGYPRTVAQAEFLDSFLESQNKQLTAAVLFKVPEDVVVQRLTSRLICPKCGRIYNMISLPPKEDELCDDCKVKLVQRDDDKEETVRHRLKVYLEKTQPVIDYYGKKGILKRVDGSQGIDNVVAEVLGIIGWSDK

SEQ ID NO: 1323 - DNA, 699 bp, synthetic construct
  misc_feature 1..699: note = Variant of adenylate kinase
  source 1..699: mol_type = other DNA
atgcaccatcatcaccatcacgggggctccggcatgatggcatatctggtgttcttaggtccgccgggcgcgggaaaaggtacccaatcgaaacgcattcaggaaaagactggcatcccacatattagcacgggcgatatcttccgtgacatcgtcaagaaagagaacgatgaactgggcaagaagattaaagaagagatggagaaaggtgaactcgttccagatgaactggtgaatgaggtagtaaaacgccgcctgtcggagaaagactgcgaaaaaggctttattttggatggttatccgcgtaccgttgctcaagcggaattcctggacagttttcttgaatcccagaacaaacagttgacagccgccgtgctgttcaaagtccccgaagatgttgttgtgcaacgtttaacctctcgcctgatctgtccgaaatgcgggcgtatctacaatatgatttcactgccaccaaaagaagacgagctgtgtgacgattgcaaagtcaaattagtacagcgtgatgatgataaggaagaaacggttcgtcaccgcctgaaagtctaccttgagaagacccagccggtcattgactattatggcaagaaaggtattctcaaacgcgtagatgggtcgcaaggaatcgacaacgttgttgcagaagtcctgaagattattggttggagcgataagtaatga

SEQ ID NO: 1324 - protein, 231 aa, synthetic construct
  REGION 1..231: note = Variant of adenylate kinase
MHHHHHHGGSGMMAYLVFLGPPGAGKGTQSKRIQEKTGIPHISTGDIFRDIVKKENDELGKKIKEEMEKGELVPDELVNEVVKRRLSEKDCEKGFILDGYPRTVAQAEFLDSFLESQNKQLTAAVLFKVPEDVVVQRLTSRLICPKCGRIYNMISLPPKEDELCDDCKVKLVQRDDDKEETVRHRLKVYLEKTQPVIDYYGKKGILKRVDGSQGIDNVVAEVLKIIGWSDK

SEQ ID NO: 1325 - DNA, 699 bp, synthetic construct
  misc_feature 1..699: note = Variant of adenylate kinase
  source 1..699: mol_type = other DNA
atgcaccatcatcaccatcacgggggctccggcatgatggcatatctggtgttcttaggtccgccgggcgcgggaaaaggtacccaatcgaaacgcattcaggaaaagactggcatcccacatattagcacgggcgatatcttccgtgacatcgtcaagaaagagaacgatgaactgggcaagaagattaaagaaatcatggagaaaggtgaactcgttccagatgaactggtgaatgaggtagtaaaacgccgcctgtcggagaaagactgcgaaaaaggctttattttggatggttatccgcgtaccgttgctcaagcggaagagctggacagttttcttgaatcccagaacaaacagttgacagccgccgtgctgttcaaagtccccgaagatgttgttgtgcaacgtttaacctctcgcctgatctgtccgaaatgcgggcgtatctacaatatgatttcactgccaccaaaagaagacgagctgtgtgacgattgcaaagtcaaattagtacagcgtgatgatgataaggaagaaacggttcgtcaccgcctgaaagtctaccttgagaagacccagccggtcattgactattatggcaagaaaggtattctcaaacgcgtagatgggtcgcaaggaatcgacaacgttgttgcagaagtcctgaagattattggttggagcgataagtaatga

SEQ ID NO: 1326 - protein, 231 aa, synthetic construct
  REGION 1..231: note = Variant of adenylate kinase
MHHHHHHGGSGMMAYLVFLGPPGAGKGTQSKRIQEKTGIPHISTGDIFRDIVKKENDELGKKIKEIMEKGELVPDELVNEVVKRRLSEKDCEKGFILDGYPRTVAQAEELDSFLESQNKQLTAAVLFKVPEDVVVQRLTSRLICPKCGRIYNMISLPPKEDELCDDCKVKLVQRDDDKEETVRHRLKVYLEKTQPVIDYYGKKGILKRVDGSQGIDNVVAEVLKIIGWSDK

SEQ ID NO: 1327 - DNA, 699 bp, synthetic construct
  misc_feature 1..699: note = Variant of adenylate kinase
  source 1..699: mol_type = other DNA
atgcaccatcatcaccatcacgggggctccggcatgatggcatatctggtgttcttaggtccgccgggcgcgggaaaaggtacccaatcgaaacgcattcaggaaaagactggcatcccacatattagcacgggcgatatcttccgtgacatcgtcaagaaagagaacgatgaactgtctaagaagattaaagaaatcatggagaaaggtgaactcgttccagatgaactggtgaatgaggtagtaaaacgccgcctgtcggagaaagactgcgaaaaaggctttattttggatggttatccgcgtaccgttgctcaagcggaattcctggacagttttcttgaatcccagaacaaacagttgacagccgccgtgctgttcaaagtccccgaagatgttgttgtgcaacgtttaacctctcgcctgatctgtccgaaatgcgggcgtatctacaatatgatttcactgccaccaaaagaagacgagctgtgtgacgattgcaaagtcaaattagtacagcgtgatgatgataaggaagaaacggttcgtcaccgcctgaaagtctaccttgagaagacccagccggtcattgactattatggcaagaaaggtattctcaaacgcgtagatgggtcgcaaggaatcgacaacgttgttgcagaagtcctgaagattattggttggagcgataagtaatga

SEQ ID NO: 1328 - protein, 231 aa, synthetic construct
  REGION 1..231: note = Variant of adenylate kinase
MHHHHHHGGSGMMAYLVFLGPPGAGKGTQSKRIQEKTGIPHISTGDIFRDIVKKENDELSKKIKEIMEKGELVPDELVNEVVKRRLSEKDCEKGFILDGYPRTVAQAEFLDSFLESQNKQLTAAVLFKVPEDVVVQRLTSRLICPKCGRIYNMISLPPKEDELCDDCKVKLVQRDDDKEETVRHRLKVYLEKTQPVIDYYGKKGILKRVDGSQGIDNVVAEVLKIIGWSDK

SEQ ID NO: 1329 - DNA, 699 bp, synthetic construct
  misc_feature 1..699: note = Variant of adenylate kinase
  source 1..699: mol_type = other DNA
atgcaccatcatcaccatcacgggggctccggcatgatggcatatctggtgttcttaggtccgccgggcgcgggaaaaggtacccaatcgaaacgcattcaggaaaagactggcatctgccatattagtacgggcgatatcttccgtgacatcgtcaagaaagagaacgatgaactgggcaagaagattaaagaaatcatggagaaaggtgaactcgttccagatgaactggtgaatgaggtagtaaaacgccgcctgtcgaacaaagactgcgaaaaaggctttattttggatggttatccgcgtaccgttgctcaagcggaattcctggacagttttcttgaatcccagaacaaacagttgacagccgccgtgctgttcaaagtccccgaagatgttgttgtgcaacgtttaacctctcgcctgatctgtccgaaatgcgggcgtatctacaatatgatttcactgccaccaaaagaagacgagctgtgtgacgattgcaaagtcaaattagtacagcgtgatgatgataaggaagaaacggttcgtcaccgcctgaaagtctaccttgagaagacccagccggtcattgactattatggcaagaaaggtattctcaaacgcgtagatgggtcgcaaggaatcgacaacgttgttgcagaagtcctgaagattattggttggagcgataagtaatga

SEQ ID NO: 1330 - protein, 231 aa, synthetic construct
  REGION 1..231: note = Variant of adenylate kinase
MHHHHHHGGSGMMAYLVFLGPPGAGKGTQSKRIQEKTGICHISTGDIFRDIVKKENDELGKKIKEIMEKGELVPDELVNEVVKRRLSNKDCEKGFILDGYPRTVAQAEFLDSFLESQNKQLTAAVLFKVPEDVVVQRLTSRLICPKCGRIYNMISLPPKEDELCDDCKVKLVQRDDDKEETVRHRLKVYLEKTQPVIDYYGKKGILKRVDGSQGIDNVVAEVLKIIGWSDK

SEQ ID NO: 1331 - DNA, 699 bp, synthetic construct
  misc_feature 1..699: note = Variant of adenylate kinase
  source 1..699: mol_type = other DNA
atgcaccatcatcaccatcacgggggctccggcatgatggcatatctggtgttcttaggtccgccgggcgcgggaaaaggtacccaatcgaaacgcattcaggaaaagactggcatcccacatattagcacgggcgatatcttccgtgacatcgtcaagaaagagaacgatgaactgggcaagaagattaaagaaatcatggagaaaggtgaactcgttccagatgaactggtgaatgaggtagtaaaacgccgcctgtcggagaaagactgcgaaaaaggctttattttggatggttatccgcgtaccgttgctcaagcggaattcctggacagttttcttgaatcccagaacaaacagttgacagccgccgtgctgttcaaagtccccgaagatgttgttgtgcaacgtttaacctctcgcctgatctgtccgaaatgcgggcgtatctacaatatgatttcactgccaccaaaagaagacgagctgtgtgacgattgcaaagtcaaattagtacagcgtgatgatgataaggaagaaacggttcgtcaccgcctgaaagtctaccttgataagacccagccggtcattgactattatggcaagaaaggtattctcaaacgcgtagatgggtcgcaaggaatcgacaacgttgttgcagaagtcctgaagattattggttggagcgataagtaatga

SEQ ID NO: 1332 - protein, 231 aa, synthetic construct
  REGION 1..231: note = Variant of adenylate kinase
MHHHHHHGGSGMMAYLVFLGPPGAGKGTQSKRIQEKTGIPHISTGDIFRDIVKKENDELGKKIKEIMEKGELVPDELVNEVVKRRLSEKDCEKGFILDGYPRTVAQAEFLDSFLESQNKQLTAAVLFKVPEDVVVQRLTSRLICPKCGRIYNMISLPPKEDELCDDCKVKLVQRDDDKEETVRHRLKVYLDKTQPVIDYYGKKGILKRVDGSQGIDNVVAEVLKIIGWSDK

SEQ ID NO: 1333 - DNA, 699 bp, synthetic construct
  misc_feature 1..699: note = Variant of adenylate kinase
  source 1..699: mol_type = other DNA
atgcaccatcatcaccatcacgggggctccggcatgatggcatatctggtgttcttaggtccgccgggcgcgggaaaaggtacccaatcgaaacgcattcaggaaaagactggcatcccacatattagcacgggcgatatcttccgtgacatcgtcaagaaagagaacgatgaactgggcaagaagtcgaaagaaatcatggagaaaggtgaactcgttccagatgaactggtgaatgaggtagtaaaacgccgcctgtcggagaaagactgcgaaaaaggctttattttggatggttatccgcgtaccgttgctcaagcggaattcctggacagttttcttgaatcccagaacaaacagttgacagccgccgtgctgttcaaagtccccgaagatgttgttgtgcaacgtttaacctctcgcctgatctgtccgaaatgcgggcgtatctacaatatgatttcactgccaccaaaagaagacgagctgtgtgacgattgcaaagtcaaattagtacagcgtgatgatgataaggaagaaacggttcgtcaccgcctgaaagtctaccttgagaagacccagccggtcattgactattatggcaagaaaggtattctcaaacgcgtagatgggtcgcaaggaatcgacaacgttgttgcagaagtcctgaagattattggttggagcgataagtaatga

SEQ ID NO: 1334 - protein, 231 aa, synthetic construct
  REGION 1..231: note = Variant of adenylate kinase
MHHHHHHGGSGMMAYLVFLGPPGAGKGTQSKRIQEKTGIPHISTGDIFRDIVKKENDELGKKSKEIMEKGELVPDELVNEVVKRRLSEKDCEKGFILDGYPRTVAQAEFLDSFLESQNKQLTAAVLFKVPEDVVVQRLTSRLICPKCGRIYNMISLPPKEDELCDDCKVKLVQRDDDKEETVRHRLKVYLEKTQPVIDYYGKKGILKRVDGSQGIDNVVAEVLKIIGWSDK

SEQ ID NO: 1335 - DNA, 699 bp, synthetic construct
  misc_feature 1..699: note = Variant of adenylate kinase
  source 1..699: mol_type = other DNA
atgcaccatcatcaccatcacgggggctccggcatgatggcatatctggtgttcttaggtccgccgggcgcgggaaaaggtacccaatcgaaacgcattcaggaaaagactggcatcccacatattagcacgggcgatatcttccgtgacatcgtcaagaaagagaacgatgaactgggcaagaagattaaagaaatcatggataaaggtgaactcgttccagatgaactggtgaatgaggtagtaaaacgccgcctgtcggagaaagactgcgaaaaaggctttattttggatggttatccgcgtaccgttgctcaagcggaattcctggacagttttcttgaatcccagaacaaacagttgacagccgccgtgctgttcaaagtccccgaagatgttgttgtgcaacgtttaacctctcgcctgatctgtccgaaatgcgggcgtatctacaatatgatttcactgccaccaaaagaagacgagctgtgtgacgattgcaaagtccctttagtacagcgtgatgatgataaggaagaaacggttcgtcaccgcctgaaagtctaccttgagaagacccagccggtcattgactattatggcaagaaaggtattctcaaacgcgtagatgggtcgcaaggaatcgacaacgttgttgcagaagtcctgaagattattggttggagcgataagtaatga

SEQ ID NO: 1336 - protein, 231 aa, synthetic construct
  REGION 1..231: note = Variant of adenylate kinase
MHHHHHHGGSGMMAYLVFLGPPGAGKGTQSKRIQEKTGIPHISTGDIFRDIVKKENDELGKKIKEIMDKGELVPDELVNEVVKRRLSEKDCEKGFILDGYPRTVAQAEFLDSFLESQNKQLTAAVLFKVPEDVVVQRLTSRLICPKCGRIYNMISLPPKEDELCDDCKVPLVQRDDDKEETVRHRLKVYLEKTQPVIDYYGKKGILKRVDGSQGIDNVVAEVLKIIGWSDK

SEQ ID NO: 1337 - DNA, 699 bp, synthetic construct
  misc_feature 1..699: note = Variant of adenylate kinase
  source 1..699: mol_type = other DNA
atgcaccatcatcaccatcacgggggctccggcatgatggcatatctggtgttcttaggtccgccgggcgcgggaaaaggtacccaatcgaaacgcattcaggaaaagactggcatcccacatattagcacgggcgatatcttccgtgacatcgtcaagaaagagaacgatgaactgggcaagaagattaaagaaatcatggagaaaggtgaactcgttccagatgaactggtgaatgaggtagtaaaacgccgcctgtcggagaaagactgcgaaaaaggctttattttggatggttctccgcgtaccgttgctcaagcggaattcctggacagttttcttgaatcccagaacaaacagttgacagccgccgtgctgttcaaagtccccgaagatgttgttgtgcaacgtttaacctctcgcctgatctgtccgaaatgcgggcgtatctacaatatgatttcactgccaccaaaagaagacgagctgtgtgacgattgcaaagtcaaattagtacagcgtgatgatgataaggaagaaacggttcgtcaccgcctgaaagtctaccttgagaagacccagccggtcattgactattatggcaagaaaggtattctcaaacgcgtagatgggtcgcaaggaatcgacaacgttgttgcagaagtcctgaagattattggttggagcgataagtaatga

SEQ ID NO: 1338 - protein, 231 aa, synthetic construct
  REGION 1..231: note = Variant of adenylate kinase
MHHHHHHGGSGMMAYLVFLGPPGAGKGTQSKRIQEKTGIPHISTGDIFRDIVKKENDELGKKIKEIMEKGELVPDELVNEVVKRRLSEKDCEKGFILDGSPRTVAQAEFLDSFLESQNKQLTAAVLFKVPEDVVVQRLTSRLICPKCGRIYNMISLPPKEDELCDDCKVKLVQRDDDKEETVRHRLKVYLEKTQPVIDYYGKKGILKRVDGSQGIDNVVAEVLKIIGWSDK

SEQ ID NO: 1339 - DNA, 699 bp, synthetic construct
  misc_feature 1..699: note = Variant of adenylate kinase
  source 1..699: mol_type = other DNA
atgcaccatcatcaccatcacgggggctccggcatgatggcatatctggtgttcttaggtccgccgggcgcgggaaaaggtacccaatcgaaacgcattcaggaaaagactggcatcccacatattagcacgggcgatatcttccgtgacatggtcaagaaagagaacgatgaactgggcaagaagattaaagaaatcatggagaaaggtgaactcgttccagatgaactggtgaatgaggtagtaaaacgccgcctgtcggagaaagactgcgaaaaaggctttattttggatggttatccgcgtaccgttgctcaagcggaattcctggacagttttcttgaatcccagaacaaacagttgacagccgccgtgctgttcaaagtccccgaagatgttgttgtgcaacgtttaacctctcgcctgatctgtccgaaatgcgggcgtatctacaatatgatttcactgccaccaaaagaagacgagctgtgtgacgattgcaaagtcaaattagtacagcgtgatgatgataaggaagaaacggttcgtcaccgcctgaaagtctaccttgagaagacccagccggtcattgactattatggcaagaaaggtattctcaaacgcgtagatgggtcgcaaggaatcgacaacgttgttgcagaagtcctgaagattattggttggagcgataagtaatga

SEQ ID NO: 1340 - protein, 231 aa, synthetic construct
  REGION 1..231: note = Variant of adenylate kinase
MHHHHHHGGSGMMAYLVFLGPPGAGKGTQSKRIQEKTGIPHISTGDIFRDMVKKENDELGKKIKEIMEKGELVPDELVNEVVKRRLSEKDCEKGFILDGYPRTVAQAEFLDSFLESQNKQLTAAVLFKVPEDVVVQRLTSRLICPKCGRIYNMISLPPKEDELCDDCKVKLVQRDDDKEETVRHRLKVYLEKTQPVIDYYGKKGILKRVDGSQGIDNVVAEVLKIIGWSDK

SEQ ID NO: 1341 - DNA, 699 bp, synthetic construct
  misc_feature 1..699: note = Variant of adenylate kinase
  source 1..699: mol_type = other DNA
atgcaccatcatcaccatcacgggggctccggcatgatggcatatctggtgttcttaggtccgccgggcgcgggaaaaggtacccaatcgaaacgcattcaggaaaagactggcatcccacatattagcacgggcgatatcttccgtgacatcgtcaagaaagagaacgatgaactgggcaagaagattaaagaaatcatggagaaaggtgaactcgttccagatgaactggtgaatgaggtagtaaaacgccgcctgtcggagaaagactgcgaaaaaggctttattttggatggttatccgcgtaccgttgctcaagcgagtttcctggacagttttcttgaatcccagaacaaacagttgacagccgccgtgctgttcaaagtccccgaagatgttgttgtgcaacgtttaacctctcgcctgatctgtccgaaatgcgggcgtatctacaatatgatttcactgccaccaaaagaagacgagctgtgtgacgattgcaaagtcaaattagtacagcgtgatgatgataaggaagaaacggttcgtcaccgcctgaaagtctaccttgagaagacccagccggtcattgactattatggcaagaaaggtattctcaaacgcgtagatgggtcgcaaggaatcgacaacgttgttgcagaagtcctgaagattattggttggagcgataagtaatga

SEQ ID NO: 1342 - protein, 231 aa, synthetic construct
  REGION 1..231: note = Variant of adenylate kinase
MHHHHHHGGSGMMAYLVFLGPPGAGKGTQSKRIQEKTGIPHISTGDIFRDIVKKENDELGKKIKEIMEKGELVPDELVNEVVKRRLSEKDCEKGFILDGYPRTVAQASFLDSFLESQNKQLTAAVLFKVPEDVVVQRLTSRLICPKCGRIYNMISLPPKEDELCDDCKVKLVQRDDDKEETVRHRLKVYLEKTQPVIDYYGKKGILKRVDGSQGIDNVVAEVLKIIGWSDK

SEQ ID NO: 1343 - DNA, 699 bp, synthetic construct
  misc_feature 1..699: note = Variant of adenylate kinase
  source 1..699: mol_type = other DNA
atgcaccatcatcaccatcacgggggctccggcatgatggcatatctggtgttcttaggtccgccgggcgcgggaaaaggtacccaatcgaaacgcattcaggaaaagactggcatcccacatattagcacgggcgatatcttccgtgacatcgtcaagaaagagaacgatggtctgggcaagaagattaaagaaatcatggagaaaggtgaactcgttccagatgaactggtgaatgaggtagtaaaacgccgcctgtcggagaaagactgcgaaaaaggctttattttggatggttatccgcgtaccgttgctcaagcggaattcctggacagttttcttgaatcccagaacaaacagttgacagccgccgtgctgttcaaagtccccgaagatgttgttgtgcaacgtttaacctctcgcctgatctgtccgaaatgcgggcgtatctacaatatgatttcactgccaccaaaagaagacgagctgtgtgacgattgcaaagtcaaattagtacagcgtgatgatgataaggaagaaacggttcgtcaccgcctgaaagtctaccttgagaagacccagccggtcattgactattatggcaagaaaggtattctcaaacgcgtagatgggtcgcaaggaatcgacaacgttgttgcagaagtcctgaagattattggttggagcgataagtaatga

SEQ ID NO: 1344 - protein, 231 aa, synthetic construct
  REGION 1..231: note = Variant of adenylate kinase
MHHHHHHGGSGMMAYLVFLGPPGAGKGTQSKRIQEKTGIPHISTGDIFRDIVKKENDGLGKKIKEIMEKGELVPDELVNEVVKRRLSEKDCEKGFILDGYPRTVAQAEFLDSFLESQNKQLTAAVLFKVPEDVVVQRLTSRLICPKCGRIYNMISLPPKEDELCDDCKVKLVQRDDDKEETVRHRLKVYLEKTQPVIDYYGKKGILKRVDGSQGIDNVVAEVLKIIGWSDK

SEQ ID NO: 1345 - DNA, 699 bp, synthetic construct
  misc_feature 1..699: note = Variant of adenylate kinase
  source 1..699: mol_type = other DNA
atgcaccatcatcaccatcacgggggctccggcatgatggcatatctggtgttcttaggtccgccgggcgcgggaaaaggtacccaatcgaaacgcattcaggaaaagactggcatcccacatattagcacgggcgatatcttccgtgacatcgtcaagaaagagaaccatgaactgggcaagaagattaaagaaatcatggagaaaggtgaactcgttccagatgaactggtgaatgaggtagtaaaacgccgcctgtcggagaaagactgcgaaaaaggctttattttggatggttatccgcgtaccgttgctcaagcggaattcctggacagttttcttgaatcccagaacaaacagttgacagccgccgtgctgttcaaagtccccgaagatgttgttgtgcaacgtttaacctctcgcctgatctgtccgaaatgcgggcgtatctacaatatgatttcactgccaccaaaagaagacgagctgtgtgacgattgcaaagtcaaattagtacagcgtgatgatgataaggaagaaacggttcgtcaccgcctgaaagtctaccttgagaagacccagccggtcattgactattatggcaagaaaggtattctcaaacgcgtagatgggtcgcaaggaatcgacaacgttgttgcagaagtcctgaagattattggttggagcgataagtaatga

SEQ ID NO: 1346 - protein, 231 aa, synthetic construct
  REGION 1..231: note = Variant of adenylate kinase
MHHHHHHGGSGMMAYLVFLGPPGAGKGTQSKRIQEKTGIPHISTGDIFRDIVKKENHELGKKIKEIMEKGELVPDELVNEVVKRRLSEKDCEKGFILDGYPRTVAQAEFLDSFLESQNKQLTAAVLFKVPEDVVVQRLTSRLICPKCGRIYNMISLPPKEDELCDDCKVKLVQRDDDKEETVRHRLKVYLEKTQPVIDYYGKKGILKRVDGSQGIDNVVAEVLKIIGWSDK

SEQ ID NO: 1347 - DNA, 699 bp, synthetic construct
  misc_feature 1..699: note = Variant of adenylate kinase
  source 1..699: mol_type = other DNA
atgcaccatcatcaccatcacgggggctccggcatgatggcatatctggtgttcttaggtccgccgggcgcgggaaaaggtacccaatcgaaacgcattcaggaaaagactggcatcccacatattagcacgggcgatatcttccgtgacatcgtcaagaaagagaacgatgaactgggcaagaagattaaagaaatcatggagaaaggtgaactcgttccagatgaactggtgaatgaggtagtaaaacgccgcctgtcggagaaagactgcgaaaaaggctttattttggatggttatccgcgtaccgttgctcaagcggaattcctggacagttttcttgaatcccagaacaaacagttgacagccgccgtgctgttcaaagtccccgaagatgttgttgtgcaacgtttaacctctcgcctgatctgtccgaaatgcgggcgtatctacaatatgatttcactgccaccaaaagaagacgagctgtgtgacgattgcaaagtcaaattagtacagcgtgatgatgataaggaaggtacggttcgtcaccgcctgaaagtctaccttgagaagacccagccggtcattgactattatggcaagaaaggtattctcaaacgcgtagatgggtcgcaaggaatcgacaacgttgttgcagaagtcctgaagattattggttggagcgataagtaatga

SEQ ID NO: 1348 - protein, 231 aa, synthetic construct
  REGION 1..231: note = Variant of adenylate kinase
MHHHHHHGGSGMMAYLVFLGPPGAGKGTQSKRIQEKTGIPHISTGDIFRDIVKKENDELGKKIKEIMEKGELVPDELVNEVVKRRLSEKDCEKGFILDGYPRTVAQAEFLDSFLESQNKQLTAAVLFKVPEDVVVQRLTSRLICPKCGRIYNMISLPPKEDELCDDCKVKLVQRDDDKEGTVRHRLKVYLEKTQPVIDYYGKKGILKRVDGSQGIDNVVAEVLKIIGWSDK

SEQ ID NO: 1349 - DNA, 699 bp, synthetic construct
  misc_feature 1..699: note = Variant of adenylate kinase
  source 1..699: mol_type = other DNA
atgcaccatcatcaccatcacgggggctccggcatgatggcatatctggtgttcttaggtccgccgggcgcgggaaaaggtacccaatcgaaacgcattcaggaaaagactggcatcccacatattagcacgggcgatatcttccgtgacatcgtcaagaaagagaacgatgaactgggcaagaagattaaagaaatcatggagaaaggtgaactcgttccagatgaactggtgaatgaggtagtaaaacgccgcctgtcggagaaagactgcgaaaaaggctttattttggatggttatccgcgtaccgttgctcaagcggaattcctggacagttttcttgaatcccagaacaaacagttgacagccgccgtgctgttcaaagtccccgaagatgttgttgtgcaacgtttaacctctcgcctgatctgtccgaaatgcgggcgtatctacaatatgatttcactgccaccaaaagaagacgagctgtgtgacgattgcaaagtcaaattagtacagcgtgatgatgatcgtgaagaaacggttcgtcaccgcctgaaagtctaccttgagaagacccagccggtcattgactattatggcaagaaaggtattctcaaacgcgtagatgggtcgcaaggaatcgacaacgttgttgcagaagtcctgaagattattggttggagcgataagtaatga

SEQ ID NO: 1350 - protein, 231 aa, synthetic construct
  REGION 1..231: note = Variant of adenylate kinase
MHHHHHHGGSGMMAYLVFLGPPGAGKGTQSKRIQEKTGIPHISTGDIFRDIVKKENDELGKKIKEIMEKGELVPDELVNEVVKRRLSEKDCEKGFILDGYPRTVAQAEFLDSFLESQNKQLTAAVLFKVPEDVVVQRLTSRLICPKCGRIYNMISLPPKEDELCDDCKVKLVQRDDDREETVRHRLKVYLEKTQPVIDYYGKKGILKRVDGSQGIDNVVAEVLKIIGWSDK

SEQ ID NO: 1351 - DNA, 699 bp, synthetic construct
  misc_feature 1..699: note = Variant of adenylate kinase
  source 1..699: mol_type = other DNA
atgcaccatcatcaccatcacgggggctccggcatgatggcatatctggtgttcttaggtccgccgggcgcgggaaaaggtacccaatcgaaacgcattcaggaaaagactggcatcccacatattagcacgggcgatatcttccgtgacatcgtcaagaaagagaacgatgaactgggcaagaagattaaagaaatcatggagaaaggtgaactcgttccagatgaactggtgaatgaggtagtaaaacgccgcctgtcggagaaagactgcgaaaaaggctttattttggatggttatccgcgtaccgttgctcaagcggaattcctggacagttttcttgaatcccagaacaaacagttgacagccgccgtgctgttcaaagtccccgaagatgttgttgtgcaacgtttaacctctcgcctgatctgtccgaaatgcgggcgtatctacaatatgatttcactgccaccaaaagaagacgagctgtgtgacgattgcaaagtcaaattagtacagcgtgatgatgataaggaagaaacggttcgtcaccgcctgaaagtctaccttgagaagacccagccggtcattgaccggtatggcaagaaaggtattctcaaacgcgtagatgggtcgcaaggaatcgacaacgttgttgcagaagtcctgaagattattggttggagcgataagtaatga

SEQ ID NO: 1352 - protein, 231 aa, synthetic construct
  REGION 1..231: note = Variant of adenylate kinase
MHHHHHHGGSGMMAYLVFLGPPGAGKGTQSKRIQEKTGIPHISTGDIFRDIVKKENDELGKKIKEIMEKGELVPDELVNEVVKRRLSEKDCEKGFILDGYPRTVAQAEFLDSFLESQNKQLTAAVLFKVPEDVVVQRLTSRLICPKCGRIYNMISLPPKEDELCDDCKVKLVQRDDDKEETVRHRLKVYLEKTQPVIDRYGKKGILKRVDGSQGIDNVVAEVLKIIGWSDK

SEQ ID NO: 1353 - DNA, 699 bp, synthetic construct
  misc_feature 1..699: note = Variant of adenylate kinase
  source 1..699: mol_type = other DNA
atgcaccatcatcaccatcacgggggctccggcatgatggcatatctggtgttcttaggtccgccgggcgcgggaaaaggtacccaatcgaaacgcattcaggaaaagactggcatctgccatattagtacgggcgatatcttccgtgacatcgtcaagaaagagaacgatgaactgggcaagaagattaaagaaatcatggagaaaggtgaactcgttccagatgaactggtgaatgaggtagtaaaacgccgcctgtcggagaaagactgcgaaaaaggctttattttggatggttatccgcgtaccgttgctcaagcggaattcctggacagttttcttgaatcccagaacaaacagttgacagccgccgtgctgttcaaagtccccgaagatgttgttgtgcaacgtttaacctctcgcctgatctgtccgaaatgcgggcgtatctacaatatgatttcactgccaccaaaagaagacgagctgtgtgacgattgcaaagtcaaattagtacagcgtgatgatgataaggaagaaacggttcgtcaccgcctgaaagtctaccttgagaagacccagccggtcattgactattatggcaagaaaggtattctcaaacgcgtagatgggtcgcaaggaatcgacaacgttgttgcagaagtcctgaagattattggttggagcgataagtaatga

SEQ ID NO: 1354 - protein, 231 aa, synthetic construct
  REGION 1..231: note = Variant of adenylate kinase
MHHHHHHGGSGMMAYLVFLGPPGAGKGTQSKRIQEKTGICHISTGDIFRDIVKKENDELGKKIKEIMEKGELVPDELVNEVVKRRLSEKDCEKGFILDGYPRTVAQAEFLDSFLESQNKQLTAAVLFKVPEDVVVQRLTSRLICPKCGRIYNMISLPPKEDELCDDCKVKLVQRDDDKEETVRHRLKVYLEKTQPVIDYYGKKGILKRVDGSQGIDNVVAEVLKIIGWSDK

SEQ ID NO: 1355 - DNA, 699 bp, synthetic construct
  misc_feature 1..699: note = Variant of adenylate kinase
  source 1..699: mol_type = other DNA
atgcaccatcatcaccatcacgggggctccggcatgatggcatatctggtgttcttaggtccgccgggcgcgggaaaaggtacccaatcgaaacgcattcaggaaaagactggcatcccacatattagcacgggcgatatcttccgtgacatcgtcaagaaagagaacgatgaactgggcaagaagattaaagaaatcatggagaaaggtgaactcgttccagatgaactggtgaatgaggtagtaaaacgccgcctgtcggagaaagactgcgaaaaacagtttattttggatggttatccgcgtaccgttgctcaagcggaattcctggacagttttcttgaatcccagaacaaacagttgacagccgccgtgctgttcaaagtccccgaagatgttgttgtgcaacgtttaacctctcgcctgatctgtccgaaatgcgggcgtatctacaatatgatttcactgccaccaaaagaagacgagctgtgtgacgattgcaaagtcaaattagtacagcgtgatgatgataaggaagaaacggttcgtcaccgcctgaaagtctaccttgagaagacccagccggtcattgactattatggcaagaaaggtattctcaaacgcgtagatgggtcgcaaggaatcgacaacgttgttgcagaagtcctgaagattattggttggagcgataagtaatga

SEQ ID NO: 1356 - protein, 231 aa, synthetic construct
  REGION 1..231: note = Variant of adenylate kinase
MHHHHHHGGSGMMAYLVFLGPPGAGKGTQSKRIQEKTGIPHISTGDIFRDIVKKENDELGKKIKEIMEKGELVPDELVNEVVKRRLSEKDCEKQFILDGYPRTVAQAEFLDSFLESQNKQLTAAVLFKVPEDVVVQRLTSRLICPKCGRIYNMISLPPKEDELCDDCKVKLVQRDDDKEETVRHRLKVYLEKTQPVIDYYGKKGILKRVDGSQGIDNVVAEVLKIIGWSDK

SEQ ID NO: 1357 - DNA, 699 bp, synthetic construct
  misc_feature 1..699: note = Variant of adenylate kinase
  source 1..699: mol_type = other DNA
atgcaccatcatcaccatcacgggggctccggcatgatggcatatctggtgttcttaggtccgccgggcgcgggaaaaggtacccaatcgaaacgcattcaggaaaagactggcatcccacatattagcacgggcgatatcttccgtgacatcgtcaagaaagagaacgatgaactgggcaagaagattaaagaaatcatggagaaaggtgaactcgttccagatgaactggtgaataacgtagttaaacgccgcctgtcggagaaagactgcgaaaaaggctttattttggatggttatccgcgtaccgttgctcaagcggaattcctggacagttttcttgaatcccagaacaaacagttgacagccgccgtgctgttcaaagtccccgaagatgttgttgtgcaacgtttaacctctcgcctgatctgtccgaaatgcgggcgtatctacaatatgatttcactgccaccaaaagaagacgagctgtgtgacgattgcaaagtcaaattagtacagcgtgatgatgataaggaagaaacggttcgtcaccgcctgaaagtctaccttgagaagacccagccggtcattgactattatggcaaggccggtattctgaaacgcgtagatgggtcgcaaggaatcgacaacgttgttgcagaagtcctgaagattattggttggagcgataagtaatga

SEQ ID NO: 1358 - protein, 231 aa, synthetic construct
  REGION 1..231: note = Variant of adenylate kinase
MHHHHHHGGSGMMAYLVFLGPPGAGKGTQSKRIQEKTGIPHISTGDIFRDIVKKENDELGKKIKEIMEKGELVPDELVNNVVKRRLSEKDCEKGFILDGYPRTVAQAEFLDSFLESQNKQLTAAVLFKVPEDVVVQRLTSRLICPKCGRIYNMISLPPKEDELCDDCKVKLVQRDDDKEETVRHRLKVYLEKTQPVIDYYGKAGILKRVDGSQGIDNVVAEVLKIIGWSDK

SEQ ID NO: 1359 - DNA, 699 bp, synthetic construct
  misc_feature 1..699: note = Variant of adenylate kinase
  source 1..699: mol_type = other DNA
atgcaccatcatcaccatcacgggggctccggcatgatggcatatctggtgttcttaggtccgccgggcgcgggaaaaggtacccaatcgaaacgcattcaggaaaagactggcatctgccatattggtacgggcgatatcttccgtgacatcgtcaagaaagagaacgatgaactgggcaagaagattaaagaaatcatggagaaaggtgaactcgttccagatgaactggtgaatgaggtagtaaaacgccgcctgtcggagaaagactgcgaaaaaggctttattttggatggttatccgcgtaccgttgctcaagcggaattcctggacagttttcttgaatcccagaacaaacagttgacagccgccgtgctgttcaaagtccccgaagatgttgttgtgcaacgtttaacctctcgcctgatctgtccgaaatgcgggcgtatctacaatatgatttcactgccaccaaaagaagacgagctgtgtgacgattgcaaagtcaaattagtacagcgtgatgatgataaggaagaaacggttcgtcaccgcctgaaagtctaccttgagaagacccagccggtcattgactattatggcaagaaaggtattctcaaacgcgtagatgggtcgcaaggaatcgacaacgttgttgcagaagtcctgaagattattggttggagcgataagtaatga

SEQ ID NO: 1360 - protein, 231 aa, synthetic construct
  REGION 1..231: note = Variant of adenylate kinase
MHHHHHHGGSGMMAYLVFLGPPGAGKGTQSKRIQEKTGICHIGTGDIFRDIVKKENDELGKKIKEIMEKGELVPDELVNEVVKRRLSEKDCEKGFILDGYPRTVAQAEFLDSFLESQNKQLTAAVLFKVPEDVVVQRLTSRLICPKCGRIYNMISLPPKEDELCDDCKVKLVQRDDDKEETVRHRLKVYLEKTQPVIDYYGKKGILKRVDGSQGIDNVVAEVLKIIGWSDK

SEQ ID NO: 1361 - DNA, 699 bp, synthetic construct
  misc_feature 1..699: note = Variant of adenylate kinase
  source 1..699: mol_type = other DNA
atgcaccatcatcaccatcacgggggctccggcatgatggcatatctggtgttcttaggtccgccgggcgcgggaaaaggtacccaatcgaaacgcattcaggaaaagactggcacgccacatattagcacgggcgatatcttccgtgacatcgtcaagaaagagaacgatgaactgggcaagaagattaaagaaatcatggagaaaggtgaactcgttccagatgaactggtgaatgaggtagtaaaacgccgcctgtcggagaaagactgcgaaaaaggctttattttggatggttatccgcgtaccgttgctcaagcggaattcctggacagttttcttgaatcccagaacaaacagttgacagccgccgtgctgttcaaagtccccgaagatgttgttgtgcaacgtttaacctctcgcctgatctgtccgaaatgcgggcgtatctacaatatgatttcactgccaccaaaagaagacgagctgtgtgacgattgcaaagtcaaattagtacagcgtgatgatgataaggaagaaacggttcgtcaccgcctgaaagtctaccttgagaagacccagccggtcattgactattatggcaagaaaggtattctcaaacgcgtagatgggtcgcaaggaatcgacaacgttgttgcagaagtcctgaagattattggttggagcgataagtaatga

SEQ ID NO: 1362 - protein, 231 aa, synthetic construct
  REGION 1..231: note = Variant of adenylate kinase
MHHHHHHGGSGMMAYLVFLGPPGAGKGTQSKRIQEKTGTPHISTGDIFRDIVKKENDELGKKIKEIMEKGELVPDELVNEVVKRRLSEKDCEKGFILDGYPRTVAQAEFLDSFLESQNKQLTAAVLFKVPEDVVVQRLTSRLICPKCGRIYNMISLPPKEDELCDDCKVKLVQRDDDKEETVRHRLKVYLEKTQPVIDYYGKKGILKRVDGSQGIDNVVAEVLKIIGWSDK

SEQ ID NO: 1363 - DNA, 699 bp, synthetic construct
  misc_feature 1..699: note = Variant of adenylate kinase
  source 1..699: mol_type = other DNA
atgcaccatcatcaccatcacgggggctccggcatgatggcatatctggtgttcttaggtccgccgggcgcgggaaaaggtacccaatcgaaacgcattcaggaaaagactggcatcccacatattagcacgggcgatatcttccgtgacatcgtcaagaaagagaacgatgaactgggcaagagtattaaagaaatcatggagaaaggtgaactcgttccagatgaactggtgaatgaggtagtaaaacgccgcctgtcggagaaagactgcgaaaaaggctttattttggatggttatccgcgtaccgttgctcaagcggaattcctggacagttttcttgaatcccagaacaaacagttgacagccgccgtgctgttcaaagtccccgaagatgttgttgtgcaacgtttaacctctcgcctgatctgtccgaaatgcgggcgtatctacaatatgatttcactgccaccaaaagaagacgagctgtgtgacgattgcaaagtcaaattagtacagcgtgatgatgataaggaagaaacggttcgtcaccgcctgaaagtctaccttgagaagacccagccggtcattgactattatggcaagaaaggtattctcaaacgcgtagatgggtcgcaaggaatcgacaacgttgttgcagaagtcctgaagattattggttggagcgataagtaatga

SEQ ID NO: 1364 - protein, 231 aa, synthetic construct
  REGION 1..231: note = Variant of adenylate kinase
MHHHHHHGGSGMMAYLVFLGPPGAGKGTQSKRIQEKTGIPHISTGDIFRDIVKKENDELGKSIKEIMEKGELVPDELVNEVVKRRLSEKDCEKGFILDGYPRTVAQAEFLDSFLESQNKQLTAAVLFKVPEDVVVQRLTSRLICPKCGRIYNMISLPPKEDELCDDCKVKLVQRDDDKEETVRHRLKVYLEKTQPVIDYYGKKGILKRVDGSQGIDNVVAEVLKIIGWSDK

SEQ ID NO: 1365 - DNA, 699 bp, synthetic construct
  misc_feature 1..699: note = Variant of adenylate kinase
  source 1..699: mol_type = other DNA
atgcaccatcatcaccatcacgggggctccggcatgatggcatatctggtgttcttaggtccgccgggcgcgggaaaaggtacccaatcgaaacgcattcaggaaaagactggcatcttgcatattagcacgggcgatatcttccgtgacatcgtcaagaaagagaacgatgaactgggcaagaagattaaagaaatcatggagaaaggtgaactcgttccagatgaactggtgaatgaggtagtaaaacgccgcctgtcggagaaagactgcgaaaaaggctttattttggatggttatccgcgtaccgttgctcaagcggaattcctggacagttttcttgaatcccagaacaaacagttgacagccgccgtgctgttcaaagtccccgaagatgttgttgtgcaacgtttaacctctcgcctgatctgtccgaaatgcgggcgtatctacaatatgatttcactgccaccaaaagaagacgagctgtgtgacgattgcaaagtcaaattagtacagcgtgatgatgataaggaagaaacggttcgtcaccgcctgaaagtctaccttgagaagacccagccggtcattgactattatggcaagaaaggtattctcaaacgcgtagatgggtcgcaaggaatcgacaacgttgttgcagaagtcctgaagattattggttggagcgataagtaatga

SEQ ID NO: 1366 - protein, 231 aa, synthetic construct
  REGION 1..231: note = Variant of adenylate kinase
MHHHHHHGGSGMMAYLVFLGPPGAGKGTQSKRIQEKTGILHISTGDIFRDIVKKENDELGKKIKEIMEKGELVPDELVNEVVKRRLSEKDCEKGFILDGYPRTVAQAEFLDSFLESQNKQLTAAVLFKVPEDVVVQRLTSRLICPKCGRIYNMISLPPKEDELCDDCKVKLVQRDDDKEETVRHRLKVYLEKTQPVIDYYGKKGILKRVDGSQGIDNVVAEVLKIIGWSDK

SEQ ID NO: 1367 - DNA, 699 bp, synthetic construct
  misc_feature 1..699: note = Variant of adenylate kinase
  source 1..699: mol_type = other DNA
atgcaccatcatcaccatcacgggggctccggcatgatggcatatctggtgttcttaggtccgccgggcgcgggaaaaggtacccaatcgaaacgcattcaggaaaagactggcatcccacatattagcacgggcgatatcttccgtgacatcgtcaagaaacagaacgatgaactgggcaagaagattaaagaaatcatggagaaaggtgaactcgttccagatgaactggtgaatgaggtagtaaaacgccgcctgtcggagaaagactgcgaaaaaggctttattttggatggttatccgcgtaccgttgctcaagcggaattcctggacagttttcttgaatcccagaacaaacagttgacagccgccgtgctgttcaaagtccccgaagatgttgttgtgcaacgtttaacctctcgcctgatctgtccgaaatgcgggcgtatctacaatatgatttcactgccaccaaaagaagacgagctgtgtgacgattgcaaagtcaaattagtacagcgtgatgatgataaggaagaaacggttcgtcaccgcctgaaagtctaccttgagaagacccagccggtcattgactattatggcaagaaaggtattctcaaacgcgtagatgggtcgcaaggaatcgacaacgttgttgcagaagtcctgaagattattggttggagcgataagtaatga

SEQ ID NO: 1368 - protein, 231 aa, synthetic construct
  REGION 1..231: note = Variant of adenylate kinase
MHHHHHHGGSGMMAYLVFLGPPGAGKGTQSKRIQEKTGIPHISTGDIFRDIVKKQNDELGKKIKEIMEKGELVPDELVNEVVKRRLSEKDCEKGFILDGYPRTVAQAEFLDSFLESQNKQLTAAVLFKVPEDVVVQRLTSRLICPKCGRIYNMISLPPKEDELCDDCKVKLVQRDDDKEETVRHRLKVYLEKTQPVIDYYGKKGILKRVDGSQGIDNVVAEVLKIIGWSDK

SEQ ID NO: 1369 - DNA, 699 bp, synthetic construct
  misc_feature 1..699: note = Variant of adenylate kinase
  source 1..699: mol_type = other DNA
atgcaccatcatcaccatcacgggggctccggcatgatggcatatctggtgttcttaggtccgccgggcgcgggaaaaggtacccaatcgaaacgcattcaggaaaagactggcatcccacatattagcacgggcgatatcttccgtgacatcgtcaagaaagagaacgatgaactgggcaagaagattaaagaaatcatggagaaaggtgaactcgttccagatgaactggtgaatgaggtagtaaaacgccgcctgtcggagaaagactgcgaaaaaggctttattttggatggttatccgcgtaccgttgctcaagcggaattctgtgacagttttcttgaatcccagaacaaacagttgacagccgccgtgctgttcaaagtccccgaagatgttgttgtgcaacgtttaacctctcgcctgatctgtccgaaatgcgggcgtatctacaatatgatttcactgccaccaaaagaagacgagctgtgtgacgattgcaaagtcaaattagtacagcgtgatgatgataaggaagaaacggttcgtcaccgcctgaaagtctaccttgagaagacccagccggtcattgactattatggcaagaaaggtattctcaaacgcgtagatgggtcgcaaggaatcgacaacgttgttgcagaagtcctgaagattattggttggagcgataagtaatga

SEQ ID NO: 1370 - protein, 231 aa, synthetic construct
  REGION 1..231: note = Variant of adenylate kinase
MHHHHHHGGSGMMAYLVFLGPPGAGKGTQSKRIQEKTGIPHISTGDIFRDIVKKENDELGKKIKEIMEKGELVPDELVNEVVKRRLSEKDCEKGFILDGYPRTVAQAEFCDSFLESQNKQLTAAVLFKVPEDVVVQRLTSRLICPKCGRIYNMISLPPKEDELCDDCKVKLVQRDDDKEETVRHRLKVYLEKTQPVIDYYGKKGILKRVDGSQGIDNVVAEVLKIIGWSDK

SEQ ID NO: 1371 - DNA, 699 bp, synthetic construct
  misc_feature 1..699: note = Variant of adenylate kinase
  source 1..699: mol_type = other DNA
atgcaccatcatcaccatcacgggggctccggcatgatggcatatctggtgttcttaggtccgccgggcgcgggaaaaggtacccaatcgaaacgcattcaggaaaagactggcatcccacatattagcacgggcgatatcttccgtgacagggtcaagaaagagaacgatgaacggggcaagaagattaaagaaatcatggagaaaggtgaactcgttccagatgaactggtgaatgaggtagtaaaacgccgcctgtcggagaaagactgcgaaaaaggctttattttggatggttatccgcgtaccgttgctcaagcggaattcctggacagttttcttgaatcccagaacaaacagttgacagccgccgtgctgttcaaagtccccgaagatgttgttgtgcaacgtttaacctctcgcctgatctgtccgaaatgcgggcgtatctacaatatgatttcactgccaccaaaagaagacgagctgtgtgacgattgcaaagtcaaattagtacagcgtgatgatgataaggaagaaacggttcgtcaccgcctgaaagtctaccttgagaagacccagccggtcattgactattatggcaagaaaggtattctcaaacgcgtagatgggtcgcaaggaatcgacaacgttgttgcagaagtcctgaagattattggttggagcgataagtaatga

SEQ ID NO: 1372 - protein, 231 aa, synthetic construct
  REGION 1..231: note = Variant of adenylate kinase
MHHHHHHGGSGMMAYLVFLGPPGAGKGTQSKRIQEKTGIPHISTGDIFRDRVKKENDERGKKIKEIMEKGELVPDELVNEVVKRRLSEKDCEKGFILDGYPRTVAQAEFLDSFLESQNKQLTAAVLFKVPEDVVVQRLTSRLICPKCGRIYNMISLPPKEDELCDDCKVKLVQRDDDKEETVRHRLKVYLEKTQPVIDYYGKKGILKRVDGSQGIDNVVAEVLKIIGWSDK

SEQ ID NO: 1373 - DNA, 699 bp, synthetic construct
  misc_feature 1..699: note = Variant of adenylate kinase
  source 1..699: mol_type = other DNA
atgcaccatcatcaccatcacgggggctccggcatgatggcatatctggtgttcttaggtccgccgggcgcgggaaaaggtacccaatcgaaacgcattcaggaaaagactggcatcccacatattagcacgggcgatatcttccgtgacatcgttaagaaagagaacgatgaactgggcaagaagattaaagaaatcatggagaaaggtgaactcgttccagatgaactggtgaatgaggtagtaaaacgccgcctgtcggagaaagactgcgaaaaaggctttattttggatggttatccgcgtaccgttgctcaagcggaattcctggatagttttcttgaatcccagaacaaacagttgacagccgccgtgctgttcaaagtccccgaagatgttgttgtgcaacgtttaacctctcgcctgatctgtccgaaatgcgggcgtatctacaacatgatttttctgccaccaaaagaagacgagctgtgtgacgattgcaaagtcaaattagtacagcgtgatgatgataaggaagaaacggttcgtcaccgcctgaaagtctaccttgagaagacccagccggtcattgactattatggcaagaaaggtattctcaaacgcgtagatgggtcgcaaggaatcgacaacgttgttgcagaagtcctgaagattctgggttggagcgataagtaatga

SEQ ID NO: 1374 - protein, 231 aa, synthetic construct
  REGION 1..231: note = Variant of adenylate kinase
MHHHHHHGGSGMMAYLVFLGPPGAGKGTQSKRIQEKTGIPHISTGDIFRDIVKKENDELGKKIKEIMEKGELVPDELVNEVVKRRLSEKDCEKGFILDGYPRTVAQAEFLDSFLESQNKQLTAAVLFKVPEDVVVQRLTSRLICPKCGRIYNMIFLPPKEDELCDDCKVKLVQRDDDKEETVRHRLKVYLEKTQPVIDYYGKKGILKRVDGSQGIDNVVAEVLKILGWSDK

SEQ ID NO: 1375 - DNA, 699 bp, synthetic construct
  misc_feature 1..699: note = Variant of adenylate kinase
  source 1..699: mol_type = other DNA
atgcaccatcatcaccatcacgggggctccggcatgatggcatatctggtgttcttaggtccgccgggcgcgggaaaaggtacccaatcgaaacgcattcaggaaaagactggcatcccacatattagcacgggcgatatcttccgtgacatcgtcaagaaagagaacgatgaactgggcaagaagattaaagaaatcatggagaaaggtgaactcgttccagatgaactggtgaataacgtagttaaacgccgcctgtcggagaaagactgcgaaaaaggctttattttggatggttatccgcgtaccgttgctcaagcggaattcctggacagttttcttgaatcccagaacaaacagttgacagccgccgtgctgttcaaagtccccgaagatgttgttgtgcaacgtttaacctctcgcctgatctgtccgaaatgcgggcgtatctacaatatgatttcactgccaccaaaagaagacgagctgtgtgacgattgcaaagtcaaattagtacagcgtgatgatgataaggaagaaacggttcgtcaccgcctgaaagtctaccttgagaagacccagccggtcattgactattatggcaagaaaggtattctgaaacgcgtagatgggtcgcaaggaatcgacaacgttgttgcagaagtcctgaagattattggttggagcgataagtaatga

SEQ ID NO: 1376 - protein, 231 aa, synthetic construct
  REGION 1..231: note = Variant of adenylate kinase
MHHHHHHGGSGMMAYLVFLGPPGAGKGTQSKRIQEKTGIPHISTGDIFRDIVKKENDELGKKIKEIMEKGELVPDELVNNVVKRRLSEKDCEKGFILDGYPRTVAQAEFLDSFLESQNKQLTAAVLFKVPEDVVVQRLTSRLICPKCGRIYNMISLPPKEDELCDDCKVKLVQRDDDKEETVRHRLKVYLEKTQPVIDYYGKKGILKRVDGSQGIDNVVAEVLKIIGWSDK

SEQ ID NO: 1377 - DNA, 699 bp, synthetic construct
  misc_feature 1..699: note = Variant of adenylate kinase
  source 1..699: mol_type = other DNA
atgcaccatcatcaccatcacgggggctccggcatgatggcatatctggtgttcttaggtccgccgggcgcgggaaaaggtacccaatcgaaacgcattcaggaaaagactggcatcccacatattagcacgggcgatatcttccgtgacatcgtcaagaaagagaacgatgaactgggcaagaagattaaagaaatcatggagaaaggtgaactcgttccagatgaactggtgaatgaggtagtaaaacgccgcctgtcggagaaagactgcgaaaaaggctttattttggatggttatccgcgtaccgttgctcaagcggaattcctggacagttttcttgaatcccagaacaaacagttgacagccgccgtgctgttcaaagtccccgaagatgttgttgtgcaacgtttaacctctcgcctgatctgtccgaaatgcgggcgtatctacaatatgatttcactgccaccaaaagaagacgagctgtgtgacgattgcaaagtcaaattagtacagcgtgatgatgataaggaagaaacggttcgtcaccgcctgaaagtctaccttgagaagacccagccggtcattgactattatggcaagaaaggtattctcaaacgcgtagatgggtcgcaaggaatcgacaacgttacggcagaagtcctgaagattattggttggagcgataagtaatga

SEQ ID NO: 1378 - protein, 231 aa, synthetic construct
  REGION 1..231: note = Variant of adenylate kinase
MHHHHHHGGSGMMAYLVFLGPPGAGKGTQSKRIQEKTGIPHISTGDIFRDIVKKENDELGKKIKEIMEKGELVPDELVNEVVKRRLSEKDCEKGFILDGYPRTVAQAEFLDSFLESQNKQLTAAVLFKVPEDVVVQRLTSRLICPKCGRIYNMISLPPKEDELCDDCKVKLVQRDDDKEETVRHRLKVYLEKTQPVIDYYGKKGILKRVDGSQGIDNVTAEVLKIIGWSDK

SEQ ID NO: 1379 - DNA, 699 bp, synthetic construct
  misc_feature 1..699: note = Variant of adenylate kinase
  source 1..699: mol_type = other DNA
atgcaccatcatcaccatcacgggggctccggcatgatggcatatctggtgttcttaggtccgccgggcgcgggaaaaggtacccaatcgaaacgcattcaggaaaagactggcatcccacatattagcacgggcgatatcttccgtgacatcgtcaagaaagagaacgatgaactgggcaagaagattaaagaaatcatggagaaaggtgaactcgttccagatgaactggtgaatgaggtagtaaaacgccgcctgtcggagaaagactgcgaaaaaggctttattttggatggttatccgcgtaccgttgctcaagcggaattcctggacagttttcttgaatcccagaacaaacagttgacagccgccgtgctgttcaaagtccccgaagatgttgttgtgcaacgtttaacctctcgcctgatctgtccgaaatgcgggcgtatctacaatatgatttcactgccaccaaaagaagacgagctgtgtgacccgtgcaaagtcaaattagtacagcgtgatgatgataaggaagaaacggttcgtcaccgcctgaaagtctaccttgagaagacccagccggtcattgactattatggcaagaaaggtattctcaaacgcgtagatgggtcgcaaggaatcgacaacgttgttgcagaagtcctgaagattattggttggagcgataagtaatga

SEQ ID NO: 1380 - protein, 231 aa, synthetic construct
  REGION 1..231: note = Variant of adenylate kinase
MHHHHHHGGSGMMAYLVFLGPPGAGKGTQSKRIQEKTGIPHISTGDIFRDIVKKENDELGKKIKEIMEKGELVPDELVNEVVKRRLSEKDCEKGFILDGYPRTVAQAEFLDSFLESQNKQLTAAVLFKVPEDVVVQRLTSRLICPKCGRIYNMISLPPKEDELCDPCKVKLVQRDDDKEETVRHRLKVYLEKTQPVIDYYGKKGILKRVDGSQGIDNVVAEVLKIIGWSDK

SEQ ID NO: 1381 - DNA, 699 bp, synthetic construct
  misc_feature 1..699: note = Variant of adenylate kinase
  source 1..699: mol_type = other DNA
atgcaccatcatcaccatcacgggggctccggcatgatggcatatctggtgttcttaggtccgccgggcgcgggaaaaggtacccaatcgaaacgcattcaggaaaagactggcatcccacatattagcacgggcgatatcttccgtgacatcgtcaagaaagagaacgatgaactgcctaagaagattaaagaaatcatggagaaaggtgaactcgttccagatgaactggtgaatgaggtagtaaaacgccgcctgtcggagaaagactgcgaaaaaggctttattttggatggttatccgcgtaccgttgctcaagcggaattcctggacagttttcttgaatcccagaacaaacagttgacagccgccgtgctgttcaaagtccccgaagatgttgttgtgcaacgtttaacctctcgcctgatctgtccgaaatgcgggcgtatctacaatatgatttcactgccaccaaaagaagacgagctgtgtgacgattgcaaagtcaaattagtacagcgtgatgatgataaggaagaaacggttcgtcaccgcctgaaagtctaccttgagaagacccagccggtcattgactattatggcaagaaaggtattctcaaacgcgtagatgggtcgcaaggaatcgacaacgttgttgcagaagtcctgaagattattggttggagcgataagtaatga

SEQ ID NO: 1382 - protein, 231 aa, synthetic construct
  REGION 1..231: note = Variant of adenylate kinase
MHHHHHHGGSGMMAYLVFLGPPGAGKGTQSKRIQEKTGIPHISTGDIFRDIVKKENDELPKKIKEIMEKGELVPDELVNEVVKRRLSEKDCEKGFILDGYPRTVAQAEFLDSFLESQNKQLTAAVLFKVPEDVVVQRLTSRLICPKCGRIYNMISLPPKEDELCDDCKVKLVQRDDDKEETVRHRLKVYLEKTQPVIDYYGKKGILKRVDGSQGIDNVVAEVLKIIGWSDK

SEQ ID NO: 1383 - DNA, 699 bp, synthetic construct
  misc_feature 1..699: note = Variant of adenylate kinase
  source 1..699: mol_type = other DNA
atgcaccatcatcaccatcacgggggctccggcatgatggcatatctggtgttcttaggtccgccgggcgcgggaaaaggtacccaatcgaaacgcattcaggaaaagactggcatcccacatattagcacgggcgatatcttccgtgacatcgtcaagaaagagaacgatgaactgggcaagaagattaaagaaatcatggagaaaggtgaactcgttccagatgaactggtgaatgaggtagtaaaacgccgcctgtcggagaaagactgcgaaaaaggctttattttggatggttatccgcgtaccgttgctcaagcggaattcctggacagttttcttgaatcccagaacaaacagttgacagccgccgtgctgttcaaagtccccgaagatgttgttgtgcaacgtttaacctctcgcctgatctgtccgaaatgcgggcgtatctacaatatgatttcactgccaccaaaagaagacgagctgtgtgacgattgcaaagtcaaattagtacagcgtgatgatgataaggaagaaacggttcgtcaccgcctgaaagtctaccttgagaagacccagccggtcattgactattatggctctaaaggtattctcaaacgcgtagatgggtcgcaaggaatcgacaacgttgttgcagaagtcctgaagattattggttggagcgataagtaatga

SEQ ID NO: 1384 - protein, 231 aa, synthetic construct
  REGION 1..231: note = Variant of adenylate kinase
MHHHHHHGGSGMMAYLVFLGPPGAGKGTQSKRIQEKTGIPHISTGDIFRDIVKKENDELGKKIKEIMEKGELVPDELVNEVVKRRLSEKDCEKGFILDGYPRTVAQAEFLDSFLESQNKQLTAAVLFKVPEDVVVQRLTSRLICPKCGRIYNMISLPPKEDELCDDCKVKLVQRDDDKEETVRHRLKVYLEKTQPVIDYYGSKGILKRVDGSQGIDNVVAEVLKIIGWSDK

SEQ ID NO: 1385 - DNA, 699 bp, synthetic construct
  misc_feature 1..699: note = Variant of adenylate kinase
  source 1..699: mol_type = other DNA
atgcaccatcatcaccatcacgggggctccggcatgatggcatatctggtgttcttaggtccgccgggcgcgggaaaaggtacccaatcgaaacgcattcaggaaaagactggcatcccacatattagcacgggcgatatcttccgtgacatcgtcaagaaagagaacgatgaaactggcaagaagattaaagaaatcatggagaaaggtgaactcgttccagatgaactggtgaatgaggtagtaaaacgccgcctgtcggagaaagactgcgaaaaaggctttattttggatggttatccgcgtaccgttgctcaagcggaattcctggacagttttcttgaatcccagaacaaacagttgacagccgccgtgctgttcaaagtccccgaagatgttgttgtgcaacgtttaacctctcgcctgatctgtccgaaatgcgggcgtatctacaatatgatttcactgccaccaaaagaagacgagctgtgtgacgattgcaaagtcaaattagtacagcgtgatgatgataaggaagaaacggttcgtcaccgcctgaaagtctaccttgagaagacccagccggtcattgactattatggcaagaaaggtattctcaaacgcgtagatgggtcgcaaggaatcgacaacgttgttgcagaagtcctgaagattattggttggagcgataagtaatga

SEQ ID NO: 1386 - protein, 231 aa, synthetic construct
  REGION 1..231: note = Variant of adenylate kinase
MHHHHHHGGSGMMAYLVFLGPPGAGKGTQSKRIQEKTGIPHISTGDIFRDIVKKENDETGKKIKEIMEKGELVPDELVNEVVKRRLSEKDCEKGFILDGYPRTVAQAEFLDSFLESQNKQLTAAVLFKVPEDVVVQRLTSRLICPKCGRIYNMISLPPKEDELCDDCKVKLVQRDDDKEETVRHRLKVYLEKTQPVIDYYGKKGILKRVDGSQGIDNVVAEVLKIIGWSDK

SEQ ID NO: 1387 - DNA, 699 bp, synthetic construct
  misc_feature 1..699: note = Variant of adenylate kinase
  source 1..699: mol_type = other DNA
atgcaccatcatcaccatcacgggggctccggcatgatggcatatctggtgttcttaggtccgccgggcgcgggaaaaggtacccaatcgaaacgcattcaggaaaagactggcatcccacatattagcacgggcgatatcttccgtgacatcgtcaagaaagagaacgatgaactgggcaagaagattaaagaaatcatggagaaaggtgaactcgttccagatgaactggtgaatgctgtagtaaaacgccgcctgtcggagaaagactgcgaaaaaggctttattttggatggttatccgcgtaccgttgctcaagcggaattcctggacagttttcttgaatcccagaacaaacagttgacagccgccgtgctgttcaaagtccccgaagatgttgttgtgcaacgtttaacctctcgcctgatctgtccgaaatgcgggcgtatctacaatatgatttcactgccaccaaaagaagacgagctgtgtgacgattgcaaagtcaaattagtacagcgtgatgatgataaggaagaaacggttcgtcaccgcctgaaagtctaccttgagaagacccagccggtcattgactattatggcaagaaaggtattctcaaacgcgtagatgggtcgcaaggaatcgacaacgttgttgcagaagtcctgaagattattggttggagcgataagtaatga

SEQ ID NO: 1388 - protein, 231 aa, synthetic construct
  REGION 1..231: note = Variant of adenylate kinase
MHHHHHHGGSGMMAYLVFLGPPGAGKGTQSKRIQEKTGIPHISTGDIFRDIVKKENDELGKKIKEIMEKGELVPDELVNAVVKRRLSEKDCEKGFILDGYPRTVAQAEFLDSFLESQNKQLTAAVLFKVPEDVVVQRLTSRLICPKCGRIYNMISLPPKEDELCDDCKVKLVQRDDDKEETVRHRLKVYLEKTQPVIDYYGKKGILKRVDGSQGIDNVVAEVLKIIGWSDK

SEQ ID NO: 1389 - DNA, 699 bp, synthetic construct
  misc_feature 1..699: note = Variant of adenylate kinase
  source 1..699: mol_type = other DNA
atgcaccatcatcaccatcacgggggctccggcatgatggcatatctggtgttcttaggtccgccgggcgcgggaaaaggtacccaatcgaaacgcattcaggaaaagactcttatcccacatattagcacgggcgatatcttccgtgacatcgtcaagaaagagaacgatgaactgggcaagaagattaaagaaatcatggagaaaggtgaactcgttccagatgaactggtgaatgaggtagtaaaacgccgcctgtcggagaaagactgcgaaaaaggctttattttggatggttatccgcgtaccgttgctcaagcggaattcctggacagttttcttgaatcccagaacaaacagttgacagccgccgtgctgttcaaagtccccgaagatgttgttgtgcaacgtttaacctctcgcctgatctgtccgaaatgcgggcgtatctacaatatgatttcactgccaccaaaagaagacgagctgtgtgacgattgcaaagtcaaattagtacagcgtgatgatgataaggaagaaacggttcgtcaccgcctgaaagtctaccttgagaagacccagccggtcattgactattatggcaagaaaggtattctcaaacgcgtagatgggtcgcaaggaatcgacaacgttgttgcagaagtcctgaagattattggttggagcgataagtaatga

SEQ ID NO: 1390 - protein, 231 aa, synthetic construct
  REGION 1..231: note = Variant of adenylate kinase
MHHHHHHGGSGMMAYLVFLGPPGAGKGTQSKRIQEKTLIPHISTGDIFRDIVKKENDELGKKIKEIMEKGELVPDELVNEVVKRRLSEKDCEKGFILDGYPRTVAQAEFLDSFLESQNKQLTAAVLFKVPEDVVVQRLTSRLICPKCGRIYNMISLPPKEDELCDDCKVKLVQRDDDKEETVRHRLKVYLEKTQPVIDYYGKKGILKRVDGSQGIDNVVAEVLKIIGWSDK

SEQ ID NO: 1391 - DNA, 699 bp, synthetic construct
  misc_feature 1..699: note = Variant of adenylate kinase
  source 1..699: mol_type = other DNA
atgcaccatcatcaccatcacgggggctccggcatgatggcatatctggtgttcttaggtccgccgggcgcgggaaaaggtacccaatcgaaacgcattcaggaaaagactggcatcccacatattagcacgggcgatatcttccgtgacatcgtcaagaaagagaacgatgaactgggcaagaagattaaagaaatcatggagaaaggtgaactcgttccagatgaactggtgaatgaggtagtaaaacgccgcctgtcggagaaagactgcgaaaaatgttttattttggatggttatccgcgtaccgttgctcaagcggaattcctggacagttttcttgaatcccagaacaaacagttgacagccgccgtgctgttcaaagtccccgaagatgttgttgtgcaacgtttaacctctcgcctgatctgtccgaaatgcgggcgtatctacaatatgatttcactgccaccaaaagaagacgagctgtgtgacgattgcaaagtcaaattagtacagcgtgatgatgataaggaagaaacggttcgtcaccgcctgaaagtctaccttgagaagacccagccggtcattgactattatggcaagaaaggtattctcaaacgcgtagatgggtcgcaaggaatcgacaacgttgttgcagaagtcctgaagattattggttggagcgataagtaatga

SEQ ID NO: 1392 - protein, 231 aa, synthetic construct
  REGION 1..231: note = Variant of adenylate kinase
MHHHHHHGGSGMMAYLVFLGPPGAGKGTQSKRIQEKTGIPHISTGDIFRDIVKKENDELGKKIKEIMEKGELVPDELVNEVVKRRLSEKDCEKCFILDGYPRTVAQAEFLDSFLESQNKQLTAAVLFKVPEDVVVQRLTSRLICPKCGRIYNMISLPPKEDELCDDCKVKLVQRDDDKEETVRHRLKVYLEKTQPVIDYYGKKGILKRVDGSQGIDNVVAEVLKIIGWSDK

SEQ ID NO: 1393 - DNA, 699 bp, synthetic construct
  misc_feature 1..699: note = Variant of adenylate kinase
  source 1..699: mol_type = other DNA
atgcaccatcatcaccatcacgggggctccggcatgatggcatatctggtgttcttaggtccgccgggcgcgggaaaaggtacccaatcgaaacgcattcaggaaaagactggcatcccacatattagcacgggcgatatcttccgtgacatcgtcaagaaagagaacgatgaactgggcaaggcgattaaagaaatcatggagaaaggtgaactcgttccagatgaactggtgaatgaggtagtaaaacgccgcctgtcggagaaagactgcgaaaaaggctttattttggatggttatccgcgtaccgttgctcaagcggaattcctggacagttttcttgaatcccagaacaaacagttgacagccgccgtgctgttcaaagtccccgaagatgttgttgtgcaacgtttaacctctcgcctgatctgtccgaaatgcgggcgtatctacaatatgatttcactgccaccaaaagaagacgagctgtgtgacgattgcaaagtcaaattagtacagcgtgatgatgataaggaagaaacggttcgtcaccgcctgaaagtctaccttgagaagacccagccggtcattgactattatggcaagaaaggtattctcaaacgcgtagatgggtcgcaaggaatcgacaacgttgttgcagaagtcctgaagattattggttggagcgataagtaatga

SEQ ID NO: 1394 - protein, 231 aa, synthetic construct
  REGION 1..231: note = Variant of adenylate kinase
MHHHHHHGGSGMMAYLVFLGPPGAGKGTQSKRIQEKTGIPHISTGDIFRDIVKKENDELGKAIKEIMEKGELVPDELVNEVVKRRLSEKDCEKGFILDGYPRTVAQAEFLDSFLESQNKQLTAAVLFKVPEDVVVQRLTSRLICPKCGRIYNMISLPPKEDELCDDCKVKLVQRDDDKEETVRHRLKVYLEKTQPVIDYYGKKGILKRVDGSQGIDNVVAEVLKIIGWSDK

SEQ ID NO: 1395 - DNA, 699 bp, synthetic construct
  misc_feature 1..699: note = Variant of adenylate kinase
  source 1..699: mol_type = other DNA
atgcaccatcatcaccatcacgggggctccggcatgatggcatatctggtgttcttaggtccgccgggcgcgggaaaaggtacccaatcgaaacgcattcaggaaaagactggcatcccacatattagcacgggcgatatcttccgtgacaaggtcaagaaagagaacgatgaactgggcaagaagattaaagaaatcatggagaaaggtgaactcgttccagatgaactggtgaatgaggtagtaaaacgccgcctgtcggagaaagactgcgaaaaaggctttattttggatggttatccgcgtaccgttgctcaagcggaattcctggacagttttcttgaatcccagaacaaacagttgacagccgccgtgctgttcaaagtccccgaagatgttgttgtgcaacgtttaacctctcgcctgatctgtccgaaatgcgggcgtatctacaatatgatttcactgccaccaaaagaagacgagctgtgtgacgattgcaaagtcaaattagtacagcgtgatgatgataaggaagaaacggttcgtcaccgcctgaaagtctaccttgagaagacccagccggtcattgactattatggcaagaaaggtattctcaaacgcgtagatgggtcgcaaggaatcgacaacgttgttgcagaagtcctgaagattattggttggagcgataagtaatga

SEQ ID NO: 1396 - protein, 231 aa, synthetic construct
  REGION 1..231: note = Variant of adenylate kinase
MHHHHHHGGSGMMAYLVFLGPPGAGKGTQSKRIQEKTGIPHISTGDIFRDKVKKENDELGKKIKEIMEKGELVPDELVNEVVKRRLSEKDCEKGFILDGYPRTVAQAEFLDSFLESQNKQLTAAVLFKVPEDVVVQRLTSRLICPKCGRIYNMISLPPKEDELCDDCKVKLVQRDDDKEETVRHRLKVYLEKTQPVIDYYGKKGILKRVDGSQGIDNVVAEVLKIIGWSDK

SEQ ID NO: 1397 - DNA, 699 bp, synthetic construct
  misc_feature 1..699: note = Variant of adenylate kinase
  source 1..699: mol_type = other DNA
atgcaccatcatcaccatcacgggggctccggcatgatggcatatctggtgttcttaggtccgccgggcgcgggaaaaggtacccaatcgaaacgcattcaggaaaagactggcatcccacatattagcacgggcgatatcttccgtgacatcgtcaagaaagagaacgatgaactgggcaagaagattaaagaaatcatggagaaaggtgaactcgttccagatgaactggtgaatgaggtagtaaaacgccgcctgtcggagaaagagtgcgaaaaaggctttattttggatggttatccgcgtaccgttgctcaagcggaattcctggacagttttcttgaatcccagaacaaacagttgacagccgccgtgctgttcaaagtccccgaagatgttgttgtgcaacgtttaacctctcgcctgatctgtccgaaatgcgggcgtatctacaatatgatttcactgccaccaaaagaagacgagctgtgtgacgattgcaaagtcaaattagtacagcgtgatgatgataaggaagaaacggttcgtcaccgcctgaaagtctaccttgagaagacccagccggtcattgactattatggcaagaaaggtattctcaaacgcgtagatgggtcgcaaggaatcgacaacgttgttgcagaagtcctgaagattattggttggagcgataagtaatga

SEQ ID NO: 1398 - protein, 231 aa, synthetic construct
  REGION 1..231: note = Variant of adenylate kinase
MHHHHHHGGSGMMAYLVFLGPPGAGKGTQSKRIQEKTGIPHISTGDIFRDIVKKENDELGKKIKEIMEKGELVPDELVNEVVKRRLSEKECEKGFILDGYPRTVAQAEFLDSFLESQNKQLTAAVLFKVPEDVVVQRLTSRLICPKCGRIYNMISLPPKEDELCDDCKVKLVQRDDDKEETVRHRLKVYLEKTQPVIDYYGKKGILKRVDGSQGIDNVVAEVLKIIGWSDK

SEQ ID NO: 1399 - DNA, 699 bp, synthetic construct
  misc_feature 1..699: note = Variant of adenylate kinase
  source 1..699: mol_type = other DNA
atgcaccatcatcaccatcacgggggctccggcatgatggcatatctggtgttcttaggtccgccgggcgcgggaaaaggtacccaatcgaaacgcattcaggaaaagactggcatcccacatattagcacgggcgatatcttccgtgacatcgtcaagaaagagaacgatgaaatgggcaagaagattaaagaaatcatggagaaaggtgaactcgttccagatgaactggtgaatgaggtagtaaaacgccgcctgtcggagaaagactgcgaaaaaggctttattttggatggttatccgcgtaccgttgctcaagcggaattcctggacagttttcttgaatcccagaacaaacagttgacagccgccgtgctgttcaaagtccccgaagatgttgttgtgcaacgtttaacctctcgcctgatctgtccgaaatgcgggcgtatctacaatatgatttcactgccaccaaaagaagacgagctgtgtgacgattgcaaagtcaaattagtacagcgtgatgatgataaggaagaaacggttcgtcaccgcctgaaagtctaccttgagaagacccagccggtcattgactattatggcaagaaaggtattctcaaacgcgtagatgggtcgcaaggaatcgacaacgttgttgcagaagtcctgaagattattggttggagcgataagtaatga

SEQ ID NO: 1400 - protein, 231 aa, synthetic construct
  REGION 1..231: note = Variant of adenylate kinase
MHHHHHHGGSGMMAYLVFLGPPGAGKGTQSKRIQEKTGIPHISTGDIFRDIVKKENDEMGKKIKEIMEKGELVPDELVNEVVKRRLSEKDCEKGFILDGYPRTVAQAEFLDSFLESQNKQLTAAVLFKVPEDVVVQRLTSRLICPKCGRIYNMISLPPKEDELCDDCKVKLVQRDDDKEETVRHRLKVYLEKTQPVIDYYGKKGILKRVDGSQGIDNVVAEVLKIIGWSDK

SEQ ID NO: 1401 - DNA, 699 bp, synthetic construct
  misc_feature 1..699: note = Variant of adenylate kinase
  source 1..699: mol_type = other DNA
atgcaccatcatcaccatcacgggggctccggcatgatggcatatctggtgttcttaggtccgccgggcgcgggaaaaggtacccaatcgaaacgcattcaggaaaagactggcatcccacatattagcacgggcgatatcttccgtgacatcgtcaagaaagagaacgatgaactgggcaagaagattaaagaaatcatggagaaaggtgaactcgttccagatgaactggtgaataacgtagttaaacgccgcctgtcggagaaagactgcgaaaaaggctttattttggatggttatccgcgtaccgttgctcaagcggaattcctggacagttttcttgaatcccagaacaaacagttgacagccgccgtgctgttcaaagtccccgaagatgttgttgtgcaacgtttaacctctcgcctgatctgtccgaaatgcgggcgtatctacaatatgatttcactgccaccaaaagaagacgagctgtgtgacgattgcaaagtcaaattagtacagcgtgatgatgataaggaagaaacggttcgtaaacgcctgaaagtctaccttgagaagacccagccggtcattgactattatggcaaggccggtattctgaaacgcgtagatgggtcgcaaggcatcgacaacgttgttgcagaagtcctgaagattattggttggagcgataagtaatga

SEQ ID NO: 1402 - protein, 231 aa, synthetic construct
  REGION 1..231: note = Variant of adenylate kinase
MHHHHHHGGSGMMAYLVFLGPPGAGKGTQSKRIQEKTGIPHISTGDIFRDIVKKENDELGKKIKEIMEKGELVPDELVNNVVKRRLSEKDCEKGFILDGYPRTVAQAEFLDSFLESQNKQLTAAVLFKVPEDVVVQRLTSRLICPKCGRIYNMISLPPKEDELCDDCKVKLVQRDDDKEETVRKRLKVYLEKTQPVIDYYGKAGILKRVDGSQGIDNVVAEVLKIIGWSDK

SEQ ID NO: 1403 - DNA, 699 bp, synthetic construct
  misc_feature 1..699: note = Variant of adenylate kinase
  source 1..699: mol_type = other DNA
atgcaccatcatcaccatcacgggggctccggcatgatggcatatctggtgttcttaggtccgccgggcgcgggaaaaggtacccaatcgaaacgcattcagtctaagactggcatcccacatattagcacgggcgatatcttccgtgacatcgtcaagaaagagaacgatgaactgggcaagaagattaaagaaatcatggagaaaggtgaactcgttccagatgaactggtgaatgaggtagtaaaacgccgcctgtcggagaaagactgcgaaaaaggctttattttggatggttatccgcgtaccgttgctcaagcggaattcctggacagttttcttgaatcccagaacaaacagttgacagccgccgtgctgttcaaagtccccgaagatgttgttgtgcaacgtttaacctctcgcctgatctgtccgaaatgcgggcgtatctacaatatgatttcactgccaccaaaagaagacgagctgtgtgacgattgcaaagtcaaattagtacagcgtgatgatgataaggaagaaacggttcgtcaccgcctgaaagtctaccttgagaagacccagccggtcattgactattatggcaagaaaggtattctcaaacgcgtagatgggtcgcaaggaatcgacaacgttgttgcagaagtcctgaagattattggttggagcgataagtaatga

SEQ ID NO: 1404 - protein, 231 aa, synthetic construct
  REGION 1..231: note = Variant of adenylate kinase
MHHHHHHGGSGMMAYLVFLGPPGAGKGTQSKRIQSKTGIPHISTGDIFRDIVKKENDELGKKIKEIMEKGELVPDELVNEVVKRRLSEKDCEKGFILDGYPRTVAQAEFLDSFLESQNKQLTAAVLFKVPEDVVVQRLTSRLICPKCGRIYNMISLPPKEDELCDDCKVKLVQRDDDKEETVRHRLKVYLEKTQPVIDYYGKKGILKRVDGSQGIDNVVAEVLKIIGWSDK

SEQ ID NO: 1405 - DNA, 699 bp, synthetic construct
  misc_feature 1..699: note = Variant of adenylate kinase
  source 1..699: mol_type = other DNA
atgcaccatcatcaccatcacgggggctccggcatgatggcatatctggtgttcttaggtccgccgggcgcgggaaaaggtacccaatcgaaacgcattcaggaaaagactggcatcccacatattagcacgggcgatatcttccgtgacatcgtcaagaaagagaacgatgaactgggcaagaagattaaagaaatcatggagaaaggtgaactcgttccagatgaactggtgaatgaggtagtaaaacgccgcctgtcggagaaagactgcgaaaaaggctttattttggatggttatccgcgtaccgttgctcaagcggaattcctggacagttttcttgaatcccagaacaaacagttgacagccgccgtgctgttcaaagtccccgaagatgttgttgtgcaacgtttaacctctcgcctgatctgtccgaaatgcgggcgtatctacaatatgatttcactgccaccaaaagaagacgagctgtgtgacgattgcaaagtcaaattagtacagcgtgatgatgataaggaagaaacggttcgtcaccgcctgaaagtctaccttgagaagacccagccggtcattgactattatggcaagaaaggtattctcaaacgcgtagatgggtcgcaaggaatcgacaacgttgttgcagaaactctgaagattattggttggagcgataagtaatga

SEQ ID NO: 1406 - protein, 231 aa, synthetic construct
  REGION 1..231: note = Variant of adenylate kinase
MHHHHHHGGSGMMAYLVFLGPPGAGKGTQSKRIQEKTGIPHISTGDIFRDIVKKENDELGKKIKEIMEKGELVPDELVNEVVKRRLSEKDCEKGFILDGYPRTVAQAEFLDSFLESQNKQLTAAVLFKVPEDVVVQRLTSRLICPKCGRIYNMISLPPKEDELCDDCKVKLVQRDDDKEETVRHRLKVYLEKTQPVIDYYGKKGILKRVDGSQGIDNVVAETLKIIGWSDK

SEQ ID NO: 1407 - DNA, 699 bp, synthetic construct
  misc_feature 1..699: note = Variant of adenylate kinase
  source 1..699: mol_type = other DNA
atgcaccatcatcaccatcacgggggctccggcatgatggcatatctggtgttcttaggtccgccgggcgcgggaaaaggtacccaatcgaaacgcattcaggaaaagactggcatcccacatattagcacgggcgatatcttccgtgacatcgtcaagaaagagaacgatgaactgggcaagaagattaaagaaatcatggagaaaggtgaactcgttccagatgaactggtgaatgaggtagtaaaacgccgcctgtcggagaaagactgcgaaaaaggctttattttggatggttatccgcgtaccgttgctcaagcggaattcctggacagttttcttgaatcccagaacaaacagttgacagccgccgtgctgttcaaagtccccgaagatgttgttgtgcaacgtttaacctctcgcctgatctgtccgaaatgcgggcgtatctacaatatgatttcactgccaccaaaagaagacgagctgtgtgacgattgcaaagtcaaattagtacagcgtgatgatgatggggaagaaacggttcgtcaccgcctgaaagtctaccttgagaagacccagccggtcattgactattatggcaagaaaggtattctcaaacgcgtagatgggtcgcaaggaatcgacaacgttgttgcagaagtcctgaagattattggttggagcgataagtaatga

SEQ ID NO: 1408 - protein, 231 aa, synthetic construct
  REGION 1..231: note = Variant of adenylate kinase
MHHHHHHGGSGMMAYLVFLGPPGAGKGTQSKRIQEKTGIPHISTGDIFRDIVKKENDELGKKIKEIMEKGELVPDELVNEVVKRRLSEKDCEKGFILDGYPRTVAQAEFLDSFLESQNKQLTAAVLFKVPEDVVVQRLTSRLICPKCGRIYNMISLPPKEDELCDDCKVKLVQRDDDGEETVRHRLKVYLEKTQPVIDYYGKKGILKRVDGSQGIDNVVAEVLKIIGWSDK

SEQ ID NO: 1409 - DNA, 699 bp, synthetic construct
  misc_feature 1..699: note = Variant of adenylate kinase
  source 1..699: mol_type = other DNA
atgcaccatcatcaccatcacgggggctccggcatgatggcatatctggtgttcttaggtccgccgggcgcgggaaaaggtacccaatcgaaacgcattcaggaaaagactggcatcacgcatattagcacgggcgatatcttccgtgacatcgtcaagaaagagaacgatgaactgggcaagaagattaaagaaatcatggagaaaggtgaactcgttccagatgaactggtgaatgaggtagtaaaacgccgcctgtcggagaaagactgcgaaaaaggctttattttggatggttatccgcgtaccgttgctcaagcggaattcctggacagttttcttgaatcccagaacaaacagttgacagccgccgtgctgttcaaagtccccgaagatgttgttgtgcaacgtttaacctctcgcctgatctgtccgaaatgcgggcgtatctacaatatgatttcactgccaccaaaagaagacgagctgtgtgacgattgcaaagtcaaattagtacagcgtgatgatgataaggaagaaacggttcgtcaccgcctgaaagtctaccttgagaagacccagccggtcattgactattatggcaagaaaggtattctcaaacgcgtagatgggtcgcaaggaatcgacaacgttgttgcagaagtcctgaagattattggttggagcgataagtaatga

SEQ ID NO: 1410 - protein, 231 aa, synthetic construct
  REGION 1..231: note = Variant of adenylate kinase
MHHHHHHGGSGMMAYLVFLGPPGAGKGTQSKRIQEKTGITHISTGDIFRDIVKKENDELGKKIKEIMEKGELVPDELVNEVVKRRLSEKDCEKGFILDGYPRTVAQAEFLDSFLESQNKQLTAAVLFKVPEDVVVQRLTSRLICPKCGRIYNMISLPPKEDELCDDCKVKLVQRDDDKEETVRHRLKVYLEKTQPVIDYYGKKGILKRVDGSQGIDNVVAEVLKIIGWSDK

SEQ ID NO: 1411 - DNA, 699 bp, synthetic construct
  misc_feature 1..699: note = Variant of adenylate kinase
  source 1..699: mol_type = other DNA
atgcaccatcatcaccatcacgggggctccggcatgatggcatatctggtgttcttaggtccgccgggcgcgggaaaaggtacccaatcgaaacgcattcaggaaaagactggcatcccacatattagcacgggcgatatcttccgtgacatcgtcaagatggagaacgatgaactgggcaagaagattaaagaaatcatggagaaaggtgaactcgttccagatgaactggtgaatgaggtagtaaaacgccgcctgtcggagaaagactgcgaaaaaggctttattttggatggttatccgcgtaccgttgctcaagcggaattcctggacagttttcttgaatcccagaacaaacagttgacagccgccgtgctgttcaaagtccccgaagatgttgttgtgcaacgtttaacctctcgcctgatctgtccgaaatgcgggcgtatctacaatatgatttcactgccaccaaaagaagacgagctgtgtgacgattgcaaagtcaaattagtacagcgtgatgatgataaggaagaaacggttcgtcaccgcctgaaagtctaccttgagaagacccagccggtcattgactattatggcaagaaaggtattctcaaacgcgtagatgggtcgcaaggaatcgacaacgttgttgcagaagtcctgaagattattggttggagcgataagtaatga

SEQ ID NO: 1412 - protein, 231 aa, synthetic construct
  REGION 1..231: note = Variant of adenylate kinase
MHHHHHHGGSGMMAYLVFLGPPGAGKGTQSKRIQEKTGIPHISTGDIFRDIVKMENDELGKKIKEIMEKGELVPDELVNEVVKRRLSEKDCEKGFILDGYPRTVAQAEFLDSFLESQNKQLTAAVLFKVPEDVVVQRLTSRLICPKCGRIYNMISLPPKEDELCDDCKVKLVQRDDDKEETVRHRLKVYLEKTQPVIDYYGKKGILKRVDGSQGIDNVVAEVLKIIGWSDK

SEQ ID NO: 1413 - DNA, 699 bp, synthetic construct
  misc_feature 1..699: note = Variant of adenylate kinase
  source 1..699: mol_type = other DNA
atgcaccatcatcaccatcacgggggctccggcatgatggcatatctggtgttcttaggtccgccgggcgcgggaaaaggtacccaatcgaaacgcattcaggaaaagactggcatcccacatattagcacgggcgatatcttccgtgacatcgtcaagaaagagaacgatgaactgggcaagaagattaaagaaatcatggagaaaggtgaactcgttccagatgaactggtgaatgaggtagtaaaacgccgcctgtcggagaaagactgcgaaaaaggctttattttggatggttatccgcgtaccgttgctcaagcggaattcctggagagttttcttgaatcccagaacaaacagttgacagccgccgtgctgttcaaagtccccgaagatgttgttgtgcaacgtttaacctctcgcctgatctgtccgaaatgcgggcgtatctacaacaagatttttctgccaccaaaagaagacgagctgtgtgacgattgcaaagtcaaattagtacagcgtgatgatgataaggaagaaacggttcgtcaccgcctgaaagtctaccttgagaagacccagccggtcattgactattatggcaagaaaggtattctcaaacgcgtagatgggtcgcaaggaatcgacaacgttgttgcagaagtcctgaagattattggttggagcgataagtaatga

SEQ ID NO: 1414 - protein, 231 aa, synthetic construct
  REGION 1..231: note = Variant of adenylate kinase
MHHHHHHGGSGMMAYLVFLGPPGAGKGTQSKRIQEKTGIPHISTGDIFRDIVKKENDELGKKIKEIMEKGELVPDELVNEVVKRRLSEKDCEKGFILDGYPRTVAQAEFLESFLESQNKQLTAAVLFKVPEDVVVQRLTSRLICPKCGRIYNKIFLPPKEDELCDDCKVKLVQRDDDKEETVRHRLKVYLEKTQPVIDYYGKKGILKRVDGSQGIDNVVAEVLKIIGWSDK

SEQ ID NO: 1415 - DNA, 699 bp, synthetic construct
  misc_feature 1..699: note = Variant of adenylate kinase
  source 1..699: mol_type = other DNA
atgcaccatcatcaccatcacgggggctccggcatgatggcatatctggtgttcttaggtccgccgggcgcgggaaaaggtacccaatcgaaacgcattcaggaaaagactggcatcccacatattagcacgggcgatatcttccgtgacatcgtcaagaaagagaacgatgaactgggcaagattattaaagaaatcatggagaaaggtgaactcgttccagatgaactggtgaatgaggtagtaaaacgccgcctgtcggagaaagactgcgaaaaaggctttattttggatggttatccgcgtaccgttgctcaagcggaattcctggacagttttcttgaatcccagaacaaacagttgacagccgccgtgctgttcaaagtccccgaagatgttgttgtgcaacgtttaacctctcgcctgatctgtccgaaatgcgggcgtatctacaatatgatttcactgccaccaaaagaagacgagctgtgtgacgattgcaaagtcaaattagtacagcgtgatgatgataaggaagaaacggttcgtcaccgcctgaaagtctaccttgagaagacccagccggtcattgactattatggcaagaaaggtattctcaaacgcgtagatgggtcgcaaggaatcgacaacgttgttgcagaagtcctgaagattattggttggagcgataagtaatga

SEQ ID NO: 1416 - protein, 231 aa, synthetic construct
  REGION 1..231: note = Variant of adenylate kinase
MHHHHHHGGSGMMAYLVFLGPPGAGKGTQSKRIQEKTGIPHISTGDIFRDIVKKENDELGKIIKEIMEKGELVPDELVNEVVKRRLSEKDCEKGFILDGYPRTVAQAEFLDSFLESQNKQLTAAVLFKVPEDVVVQRLTSRLICPKCGRIYNMISLPPKEDELCDDCKVKLVQRDDDKEETVRHRLKVYLEKTQPVIDYYGKKGILKRVDGSQGIDNVVAEVLKIIGWSDK

SEQ ID NO: 1417 - DNA, 699 bp, synthetic construct
  misc_feature 1..699: note = Variant of adenylate kinase
  source 1..699: mol_type = other DNA
atgcaccatcatcaccatcacgggggctccggcatgatggcatatctggtgttcttaggtccgccgggcgcgggaaaaggtacccaatcgaaacgcattcaggaaaagactggcatcccacatattagcacgggcgatatcttccgtgacatcgtcaagaaagagaacgatgaactgggcaagaagattaaagaaatcatggagaaaggtgaactcgttccagatgaactggtgaatggggtagtaaaacgccgcctgtcggagaaagactgcgaaaaaggctttattttggatggttatccgcgtaccgttgctcaagcggaattcctggacagttttcttgaatcccagaacaaacagttgacagccgccgtgctgttcaaagtccccgaagatgttgttgtgcaacgtttaacctctcgcctgatctgtccgaaatgcgggcgtatctacaatatgatttcactgccaccaaaagaagacgagctgtgtgacgattgcaaagtcaaattagtacagcgtgatgatgataaggaagaaacggttcgtcaccgcctgaaagtctaccttgagaagacccagccggtcattgactattatggcaagaaaggtattctcaaacgcgtagatgggtcgcaaggaatcgacaacgttgttgcagaagtcctgaagattattggttggagcgataagtaatga

SEQ ID NO: 1418 - protein, 231 aa, synthetic construct
  REGION 1..231: note = Variant of adenylate kinase
MHHHHHHGGSGMMAYLVFLGPPGAGKGTQSKRIQEKTGIPHISTGDIFRDIVKKENDELGKKIKEIMEKGELVPDELVNGVVKRRLSEKDCEKGFILDGYPRTVAQAEFLDSFLESQNKQLTAAVLFKVPEDVVVQRLTSRLICPKCGRIYNMISLPPKEDELCDDCKVKLVQRDDDKEETVRHRLKVYLEKTQPVIDYYGKKGILKRVDGSQGIDNVVAEVLKIIGWSDK

SEQ ID NO: 1419 - DNA, 699 bp, synthetic construct
  misc_feature 1..699: note = Variant of adenylate kinase
  source 1..699: mol_type = other DNA
atgcaccatcatcaccatcacgggggctccggcatgatggcatatctggtgttcttaggtccgccgggcgcgggaaaaggtacccaatcgaaacgcattcaggaaaagactggcatcccacatattagcacgggcgatatcttccgtgacatcgtcaagaaagagaacgatgaactgggcaagaagattaaagaaatcatggagaaaggtgaactcgttccagatgaactggtgaatgaggtagtaaaacgccgcctgtcggagaaagactgcgaaaaaggctttattttggatggttatccgcgtaccgttgctcaagcggaattcctggacatgtttcttgaatcccagaacaaacagttgacagccgccgtgctgttcaaagtccccgaagatgttgttgtgcaacgtttaacctctcgcctgatctgtccgaaatgcgggcgtatctacaatatgatttcactgccaccaaaagaagacgagctgtgtgacgattgcaaagtcaaattagtacagcgtgatgatgataaggaagaaacggttcgtcaccgcctgaaagtctaccttgagaagacccagccggtcattgactattatggcaagaaaggtattctcaaacgcgtagatgggtcgcaaggaatcgacaacgttgttgcagaagtcctgaagattattggttggagcgataagtaatga

SEQ ID NO: 1420 - protein, 231 aa, synthetic construct
  REGION 1..231: note = Variant of adenylate kinase
MHHHHHHGGSGMMAYLVFLGPPGAGKGTQSKRIQEKTGIPHISTGDIFRDIVKKENDELGKKIKEIMEKGELVPDELVNEVVKRRLSEKDCEKGFILDGYPRTVAQAEFLDMFLESQNKQLTAAVLFKVPEDVVVQRLTSRLICPKCGRIYNMISLPPKEDELCDDCKVKLVQRDDDKEETVRHRLKVYLEKTQPVIDYYGKKGILKRVDGSQGIDNVVAEVLKIIGWSDK

SEQ ID NO: 1421 - DNA, 699 bp, synthetic construct
  misc_feature 1..699: note = Variant of adenylate kinase
  source 1..699: mol_type = other DNA
atgcaccatcatcaccatcacgggggctccggcatgatggcatatctggtgttcttaggtccgccgggcgcgggaaaaggtacccaatcgaaacgcattcaggaaaagactggcatcccacatattagcacgggcgatatcttccgtgacatcgtcaagaaagagaacgatgaactgggcaagaagattaaagaaatcatggagaaaggtgaactcgttccagatgaactggtgaatgaggtagtaaaacgccgcctgtcggagaaagactgcgaaaaaggctttattttggatggttatccgcgtaccgttgctcaagcggaattcctggacagttttcttgaatcccagaacaaacagttgacagccgccgtgctgttcaaagtccccgaagatgttgttgtgcaacgtttaacctctcgcctgatctgtccgaaatgcgggcgtatctacaatatgatttcactgccaccaaaagaagacgagctgtgtgacgattgcaaagtcaaattagtacagcgttctgatgataaggaagaaacggttcgtcaccgcctgaaagtctaccttgagaagacccagccggtcattgactattatggcaagaaaggtattctcaaacgcgtagatgggtcgcaaggaatcgacaacgttgttgcagaagtcctgaagattattggttggagcgataagtaatga

SEQ ID NO: 1422 - protein, 231 aa, synthetic construct
  REGION 1..231: note = Variant of adenylate kinase
MHHHHHHGGSGMMAYLVFLGPPGAGKGTQSKRIQEKTGIPHISTGDIFRDIVKKENDELGKKIKEIMEKGELVPDELVNEVVKRRLSEKDCEKGFILDGYPRTVAQAEFLDSFLESQNKQLTAAVLFKVPEDVVVQRLTSRLICPKCGRIYNMISLPPKEDELCDDCKVKLVQRSDDKEETVRHRLKVYLEKTQPVIDYYGKKGILKRVDGSQGIDNVVAEVLKIIGWSDK

SEQ ID NO: 1423 - DNA, 699 bp, synthetic construct
  misc_feature 1..699: note = Variant of adenylate kinase
  source 1..699: mol_type = other DNA
atgcaccatcatcaccatcacgggggctccggcatgatggcatatctggtgttcttaggtccgccgggcgcgggaaaaggtacccaatcgaaacgcattcaggaaaagactggcatcccacatattagcacgggcgatatcttccgtgacatcgtcaagaaagagaacgatgaactgggcaagaagattaaagaaatcatggagaaaggtgaactcgtttctgatgaactggtgaatgaggtagtaaaacgccgcctgtcggagaaagactgcgaaaaaggctttattttggatggttatccgcgtaccgttgctcaagcggaattcctggacagttttcttgaatcccagaacaaacagttgacagccgccgtgctgttcaaagtccccgaagatgttgttgtgcaacgtttaacctctcgcctgatctgtccgaaatgcgggcgtatctacaatatgatttcactgccaccaaaagaagacgagctgtgtgacgattgcaaagtcaaattagtacagcgtgatgatgataaggaagaaacggttcgtcaccgcctgaaagtctaccttgagaagacccagccggtcattgactattatggcaagaaaggtattctcaaacgcgtagatgggtcgcaaggaatcgacaacgttgttgcagaagtcctgaagattattggttggagcgataagtaatga

SEQ ID NO: 1424 - protein, 231 aa, synthetic construct
  REGION 1..231: note = Variant of adenylate kinase
MHHHHHHGGSGMMAYLVFLGPPGAGKGTQSKRIQEKTGIPHISTGDIFRDIVKKENDELGKKIKEIMEKGELVSDELVNEVVKRRLSEKDCEKGFILDGYPRTVAQAEFLDSFLESQNKQLTAAVLFKVPEDVVVQRLTSRLICPKCGRIYNMISLPPKEDELCDDCKVKLVQRDDDKEETVRHRLKVYLEKTQPVIDYYGKKGILKRVDGSQGIDNVVAEVLKIIGWSDK

SEQ ID NO: 1425 - DNA, 699 bp, synthetic construct
  misc_feature 1..699: note = Variant of adenylate kinase
  source 1..699: mol_type = other DNA
atgcaccatcatcaccatcacgggggctccggcatgatggagtatctggtgttcttaggtccgccgggcgcgggaaaaggtacccaatcgaaacgcattcaggaaaagactggcatcccacatattagcacgggcgatatcttccgtgacatcgtcaagaaagagaacgatgaactgggcaagaagattaaagaaatcatggagaaaggtgaactcgttccagatgaactggtgaatgaggtagtaaaacgccgcctgtcggagaaagactgcgaaaaaggctttattttggatggttatccgcgtaccgttgctcaagcggaattcctggacagttttcttgaatcccagaacaaacagttgacagccgccgtgctgttcaaagtccccgaagatgttgttgtgcaacgtttaacctctcgcctgatctgtccgaaatgcgggcgtatctacaatatgatttcactgccaccaaaagaagacgagctgtgtgacgattgcaaagtcaaattagtacagcgtgatgatgataaggaagaaacggttcgtcaccgcctgaaagtctaccttgagaagacccagccggtcattgactattatggcaagaaaggtattctcaaacgcgtagatgggtcgcaaggaatcgacaacgttgttgcagaagtcctgaagattattggttggagcgataagtaatga

SEQ ID NO: 1426 - protein, 231 aa, synthetic construct
  REGION 1..231: note = Variant of adenylate kinase
MHHHHHHGGSGMMEYLVFLGPPGAGKGTQSKRIQEKTGIPHISTGDIFRDIVKKENDELGKKIKEIMEKGELVPDELVNEVVKRRLSEKDCEKGFILDGYPRTVAQAEFLDSFLESQNKQLTAAVLFKVPEDVVVQRLTSRLICPKCGRIYNMISLPPKEDELCDDCKVKLVQRDDDKEETVRHRLKVYLEKTQPVIDYYGKKGILKRVDGSQGIDNVVAEVLKIIGWSDK

SEQ ID NO: 1427 - DNA, 699 bp, synthetic construct
  misc_feature 1..699: note = Variant of adenylate kinase
  source 1..699: mol_type = other DNA
atgcaccatcatcaccatcacgggggctccggcatgatggcatatctggtgttcttaggtccgccgggcgcgggaaaaggtacccaatcgaaacgcattcaggaaaagactggcatcccacatattagcacgggcgatatcttccgtgacatcgtcaagaaagagaacttggaactgggcaagaagattaaagaaatcatggagaaaggtgaactcgttccagatgaactggtgaatgaggtagtaaaacgccgcctgtcggagaaagactgcgaaaaaggctttattttggatggttatccgcgtaccgttgctcaagcggaattcctggacagttttcttgaatcccagaacaaacagttgacagccgccgtgctgttcaaagtccccgaagatgttgttgtgcaacgtttaacctctcgcctgatctgtccgaaatgcgggcgtatctacaatatgatttcactgccaccaaaagaagacgagctgtgtgacgattgcaaagtcaaattagtacagcgtgatgatgataaggaagaaacggttcgtcaccgcctgaaagtctaccttgagaagacccagccggtcattgactattatggcaagaaaggtattctcaaacgcgtagatgggtcgcaaggaatcgacaacgttgttgcagaagtcctgaagattattggttggagcgataagtaatga

SEQ ID NO: 1428 - protein, 231 aa, synthetic construct
  REGION 1..231: note = Variant of adenylate kinase
MHHHHHHGGSGMMAYLVFLGPPGAGKGTQSKRIQEKTGIPHISTGDIFRDIVKKENLELGKKIKEIMEKGELVPDELVNEVVKRRLSEKDCEKGFILDGYPRTVAQAEFLDSFLESQNKQLTAAVLFKVPEDVVVQRLTSRLICPKCGRIYNMISLPPKEDELCDDCKVKLVQRDDDKEETVRHRLKVYLEKTQPVIDYYGKKGILKRVDGSQGIDNVVAEVLKIIGWSDK

SEQ ID NO: 1429 - DNA, 699 bp, synthetic construct
  misc_feature 1..699: note = Variant of adenylate kinase
  source 1..699: mol_type = other DNA
atgcaccatcatcaccatcacgggggctccggcatgatggcatatctggtgttcttaggtccgccgggcgcgggaaaaggtacccaatcgaaacgcattcaggaaaagactggcatcccacatattagcacgggcgatatcttccgtgacggggtcaagaaagagaacgatgaactgggcaagaagattaaagaaatcatggagaaaggtgaactcgttccagatgaactggtgaatgaggtagtaaaacgccgcctgtcggagaaagactgcgaaaaaggctttattttggatggttatccgcgtaccgttgctcaagcggaattcctggacagttttcttgaatcccagaacaaacagttgacagccgccgtgctgttcaaagtccccgaagatgttgttgtgcaacgtttaacctctcgcctgatctgtccgaaatgcgggcgtatctacaatatgatttcactgccaccaaaagaagacgagctgtgtgacgattgcaaagtcaaattagtacagcgtgatgatgataaggaagaaacggttcgtcaccgcctgaaagtctaccttgagaagacccagccggtcattgactattatggcaagaaaggtattctcaaacgcgtagatgggtcgcaaggaatcgacaacgttgttgcagaagtcctgaagattattggttggagcgataagtaatga

SEQ ID NO: 1430 - protein, 231 aa, synthetic construct
  REGION 1..231: note = Variant of adenylate kinase
MHHHHHHGGSGMMAYLVFLGPPGAGKGTQSKRIQEKTGIPHISTGDIFRDGVKKENDELGKKIKEIMEKGELVPDELVNEVVKRRLSEKDCEKGFILDGYPRTVAQAEFLDSFLESQNKQLTAAVLFKVPEDVVVQRLTSRLICPKCGRIYNMISLPPKEDELCDDCKVKLVQRDDDKEETVRHRLKVYLEKTQPVIDYYGKKGILKRVDGSQGIDNVVAEVLKIIGWSDK

SEQ ID NO: 1431 - DNA, 699 bp, synthetic construct
  misc_feature 1..699: note = Variant of adenylate kinase
  source 1..699: mol_type = other DNA
atgcaccatcatcaccatcacgggggctccggcatgatggcatatctggtgttcttaggtccgccgggcgcgggaaaaggtacccaatcgaaacgcattcaggaaaagactggcatcccacatattagcacgggcgatatcttccgtgacatcgtcaagaaagagaacgatgaactgggcaagaagattaaagaaatcatggagaaaggtgaactcgttccagatgaactggtgaatgaggtagtaaaacgccgcctgtcggagaaagactgcgaaaaattttttattttggatggttatccgcgtaccgttgctcaagcggaattcctggacagttttcttgaatcccagaacaaacagttgacagccgccgtgctgttcaaagtccccgaagatgttgttgtgcaacgtttaacctctcgcctgatctgtccgaaatgcgggcgtatctacaatatgatttcactgccaccaaaagaagacgagctgtgtgacgattgcaaagtcaaattagtacagcgtgatgatgataaggaagaaacggttcgtcaccgcctgaaagtctaccttgagaagacccagccggtcattgactattatggcaagaaaggtattctcaaacgcgtagatgggtcgcaaggaatcgacaacgttgttgcagaagtcctgaagattattggttggagcgataagtaatga

SEQ ID NO: 1432 - protein, 231 aa, synthetic construct
  REGION 1..231: note = Variant of adenylate kinase
MHHHHHHGGSGMMAYLVFLGPPGAGKGTQSKRIQEKTGIPHISTGDIFRDIVKKENDELGKKIKEIMEKGELVPDELVNEVVKRRLSEKDCEKFFILDGYPRTVAQAEFLDSFLESQNKQLTAAVLFKVPEDVVVQRLTSRLICPKCGRIYNMISLPPKEDELCDDCKVKLVQRDDDKEETVRHRLKVYLEKTQPVIDYYGKKGILKRVDGSQGIDNVVAEVLKIIGWSDK

SEQ ID NO: 1433 - DNA, 699 bp, synthetic construct
  misc_feature 1..699: note = Variant of adenylate kinase
  source 1..699: mol_type = other DNA
atgcaccatcatcaccatcacgggggctccggcatgatggcatatctggtgttcttaggtccgccgggcgcgggaaaaggtacccaatcgaaacgcattcaggaaaagactggcatcccacatattagcacgggcgatatcttccgtgacatcgtcaagaaagagaacgatgaactgggcaagaagattaaagaaatcatggctaaaggtgaactcgttccagatgaactggtgaatgaggtagtaaaacgccgcctgtcggagaaagactgcgaaaaaggctttattttggatggttatccgcgtaccgttgctcaagcggaattcctggacagttttcttgaatcccagaacaaacagttgacagccgccgtgctgttcaaagtccccgaagatgttgttgtgcaacgtttaacctctcgcctgatctgtccgaaatgcgggcgtatctacaatatgatttcactgccaccaaaagaagacgagctgtgtgacgattgcaaagtcaaattagtacagcgtgatgatgataaggaagaaacggttcgtcaccgcctgaaagtctaccttgagaagacccagccggtcattgactattatggcaagaaaggtattctcaaacgcgtagatgggtcgcaaggaatcgacaacgttgttgcagaagtcctgaagattattggttggagcgataagtaatga

SEQ ID NO: 1434 - protein, 231 aa, synthetic construct
  REGION 1..231: note = Variant of adenylate kinase
MHHHHHHGGSGMMAYLVFLGPPGAGKGTQSKRIQEKTGIPHISTGDIFRDIVKKENDELGKKIKEIMAKGELVPDELVNEVVKRRLSEKDCEKGFILDGYPRTVAQAEFLDSFLESQNKQLTAAVLFKVPEDVVVQRLTSRLICPKCGRIYNMISLPPKEDELCDDCKVKLVQRDDDKEETVRHRLKVYLEKTQPVIDYYGKKGILKRVDGSQGIDNVVAEVLKIIGWSDK

SEQ ID NO: 1435 - DNA, 699 bp, synthetic construct
  misc_feature 1..699: note = Variant of adenylate kinase
  source 1..699: mol_type = other DNA
atgcaccatcatcaccatcacgggggctccggcatgatggcatatctggtgttcttaggtccgccgggcgcgggaaaaggtacccaatcgaaacgcattcaggaaaagactggcatcccacatattagcacgggcgatatcttccgtgacatcgtcaagaaagagaacgatgaactgggcaagaagattaaagaaatcatggagaaaggtgaactcgttccagatgaactggtgaatgaggtagtaaaacgccgcctgtcggagaaagactgcgaaaaaggctttattttggatggttatccgcgtaccgttcggcaagcggaattcctggacagttttcttgaatcccagaacaaacagttgacagccgccgtgctgttcaaagtccccgaagatgttgttgtgcaacgtttaacctctcgcctgatctgtccgaaatgcgggcgtatctacaatatgatttcactgccaccaaaagaagacgagctgtgtgacgattgcaaagtcaaattagtacagcgtgatgatgataaggaagaaacggttcgtcaccgcctgaaagtctaccttgagaagacccagccggtcattgactattatggcaagaaaggtattctcaaacgcgtagatgggtcgcaaggaatcgacaacgttgttgcagaagtcctgaagattattggttggagcgataagtaatga

SEQ ID NO: 1436 - protein, 231 aa, synthetic construct
  REGION 1..231: note = Variant of adenylate kinase
MHHHHHHGGSGMMAYLVFLGPPGAGKGTQSKRIQEKTGIPHISTGDIFRDIVKKENDELGKKIKEIMEKGELVPDELVNEVVKRRLSEKDCEKGFILDGYPRTVRQAEFLDSFLESQNKQLTAAVLFKVPEDVVVQRLTSRLICPKCGRIYNMISLPPKEDELCDDCKVKLVQRDDDKEETVRHRLKVYLEKTQPVIDYYGKKGILKRVDGSQGIDNVVAEVLKIIGWSDK

SEQ ID NO: 1437 - DNA, 699 bp, synthetic construct
  misc_feature 1..699: note = Variant of adenylate kinase
  source 1..699: mol_type = other DNA
atgcaccatcatcaccatcacgggggctccggcatgatggcatatctggtgttcttaggtccgccgggcgcgggaaaaggtacccaatcgaaacgcattcaggaaaagactggcatcccacatattagcacgggcgatatcttccgtgacatcgtcaagaaagagaacgatgaactgggcaagaagattaaagaaatcatggagaaaggtgaactcgttccagatgaactggtgaatgaggtagtaaaacgccgcctgtcggagaaagactgcgaaaaaggctttattttggatggttatccgcgtaccgttgctcaagcggaattcctggacagttttcttgaatcccagaacaaacagttgacagccgccgtgctgttcaaagtccccgaagatgttgttgtgcaacgtttaacctctcgcctgatctgtccgaaatgcgggcgtatctacaatatgatttcactgccaccaaaagaagacgagctgtgtgacgattgcaaagtcgcgttagtacagcgtgatgatgataaggaagaaacggttcgtcaccgcctgaaagtctaccttgagaagacccagccggtcattgactattatggcaagaaaggtattctcaaacgcgtagatgggtcgcaaggaatcgacaacgttgttgcagaagtcctgaagattattggttggagcgataagtaatga

SEQ ID NO: 1438 - protein, 231 aa, synthetic construct
  REGION 1..231: note = Variant of adenylate kinase
MHHHHHHGGSGMMAYLVFLGPPGAGKGTQSKRIQEKTGIPHISTGDIFRDIVKKENDELGKKIKEIMEKGELVPDELVNEVVKRRLSEKDCEKGFILDGYPRTVAQAEFLDSFLESQNKQLTAAVLFKVPEDVVVQRLTSRLICPKCGRIYNMISLPPKEDELCDDCKVALVQRDDDKEETVRHRLKVYLEKTQPVIDYYGKKGILKRVDGSQGIDNVVAEVLKIIGWSDK

SEQ ID NO: 1439 - DNA, 699 bp, synthetic construct
  misc_feature 1..699: note = Variant of adenylate kinase
  source 1..699: mol_type = other DNA
atgcaccatcatcaccatcacgggggctccggcatgatggcatatctggtgttcttaggtccgccgggcgcgggaaaaggtacccaatcgaaacgcattcaggaaaagactggcatcccacatattagcacgggcgatatcttccgtgacatcgtcaagaaagagaacgatgaactgggcaagaagattaaagaaatcatggagaaaggtgaactcgttccagatgaactggtgaatgaggtagtaaaacgccgcctgtcggagaaagactgcgaaaaaggctttattttggatggttatccgcgtaccgttgctcaagcggaattcctggacagttttcttgaatccaataacaaacagttgacagccgccgtgctgttcaaagtccccgaagatgttgttgtgcaacgtttaacctctcgcctgatctgtccgaaatgcgggcgtatctacaatatgatttcactgccaccaaaagaagacgagctgtgtgacgattgcaaagtcaaattagtacagcgtgatgatgataaggaagaaacggttcgtcaccgcctgaaagtctaccttgagaagacccagccggtcattgactattatggcaagaaaggtattctcaaacgcgtagatgggtcgcaaggaatcgacaacgttgttgcagaagtcctgaagattattggttggagcgataagtaatga

SEQ ID NO: 1440 - protein, 231 aa, synthetic construct
  REGION 1..231: note = Variant of adenylate kinase
MHHHHHHGGSGMMAYLVFLGPPGAGKGTQSKRIQEKTGIPHISTGDIFRDIVKKENDELGKKIKEIMEKGELVPDELVNEVVKRRLSEKDCEKGFILDGYPRTVAQAEFLDSFLESNNKQLTAAVLFKVPEDVVVQRLTSRLICPKCGRIYNMISLPPKEDELCDDCKVKLVQRDDDKEETVRHRLKVYLEKTQPVIDYYGKKGILKRVDGSQGIDNVVAEVLKIIGWSDK

SEQ ID NO: 1441 - DNA, 699 bp, synthetic construct
  misc_feature 1..699: note = Variant of adenylate kinase
  source 1..699: mol_type = other DNA
atgcaccatcatcaccatcacgggggctccggcatgatggcatatctggtgttcttaggtccgccgggcgcgggaaaaggtacccaatcgaaacgcattcaggaaaagactggcatcccacatattagcacgggcgatatcttccgtgacatcgtcaagaaagagaacgatgaactgggcaagaagattaaagaaatcatggagaaaggtgaactcgttccagatgaactggtgaatgaggtagtaaaacgccgcctgtcggagaaagactgcgaaaaaggctttattttggatggttatccgcgtaccgttgctcaagcggaattcctggacagttttcttgaatcccagaacaaacagttgacagccgccgtgctgttctcggtccccgaagatgttgttgtgcaacgtttaacctctcgcctgatctgtccgaaatgcgggcgtatctacaatatgatttcactgccaccaaaagaagacgagctgtgtgacgattgcaaagtcaaattagtacagcgtgatgatgataaggaagaaacggttcgtcaccgcctgaaagtctaccttgagaagacccagccggtcattgactattatggcaagaaaggtattctcaaacgcgtagatgggtcgcaaggaatcgacaacgttgttgcagaagtcctgaagattattggttggagcgataagtaatga

SEQ ID NO: 1442 - protein, 231 aa, synthetic construct
  REGION 1..231: note = Variant of adenylate kinase
MHHHHHHGGSGMMAYLVFLGPPGAGKGTQSKRIQEKTGIPHISTGDIFRDIVKKENDELGKKIKEIMEKGELVPDELVNEVVKRRLSEKDCEKGFILDGYPRTVAQAEFLDSFLESQNKQLTAAVLFSVPEDVVVQRLTSRLICPKCGRIYNMISLPPKEDELCDDCKVKLVQRDDDKEETVRHRLKVYLEKTQPVIDYYGKKGILKRVDGSQGIDNVVAEVLKIIGWSDK

SEQ ID NO: 1443 - DNA, 699 bp, synthetic construct
  misc_feature 1..699: note = Variant of adenylate kinase
  source 1..699: mol_type = other DNA
atgcaccatcatcaccatcacgggggctccggcatgatggcatatctggtgttcttaggtccgccgggcgcgggaaaaggtacccaatcgaaacgcattcaggaaaagactggcatctttcatattagcacgggcgatatcttccgtgacatcgtcaagaaagagaacgatgaactgggcaagaagattaaagaaatcatggagaaaggtgaactcgttccagatgaactggtgaatgaggtagtaaaacgccgcctgtcggagaaagactgcgaaaaaggctttattttggatggttatccgcgtaccgttgctcaagcggaattcctggacagttttcttgaatcccagaacaaacagttgacagccgccgtgctgttcaaagtccccgaagatgttgttgtgcaacgtttaacctctcgcctgatctgtccgaaatgcgggcgtatctacaatatgatttcactgccaccaaaagaagacgagctgtgtgacgattgcaaagtcaaattagtacagcgtgatgatgataaggaagaaacggttcgtcaccgcctgaaagtctaccttgagaagacccagccggtcattgactattatggcaagaaaggtattctcaaacgcgtagatgggtcgcaaggaatcgacaacgttgttgcagaagtcctgaagattattggttggagcgataagtaatga

SEQ ID NO: 1444 - protein, 231 aa, synthetic construct
  REGION 1..231: note = Variant of adenylate kinase
MHHHHHHGGSGMMAYLVFLGPPGAGKGTQSKRIQEKTGIFHISTGDIFRDIVKKENDELGKKIKEIMEKGELVPDELVNEVVKRRLSEKDCEKGFILDGYPRTVAQAEFLDSFLESQNKQLTAAVLFKVPEDVVVQRLTSRLICPKCGRIYNMISLPPKEDELCDDCKVKLVQRDDDKEETVRHRLKVYLEKTQPVIDYYGKKGILKRVDGSQGIDNVVAEVLKIIGWSDK

SEQ ID NO: 1445 - DNA, 699 bp, synthetic construct
  misc_feature 1..699: note = Variant of adenylate kinase
  source 1..699: mol_type = other DNA
atgcaccatcatcaccatcacgggggctccggcatgatggcatatctggtgttcttaggtccgccgggcgcgggaaaaggtacccaatcgaaacgcattcaggaaaagactggcatcccacatattagcacgggcgatatcttccgtgacatcgtcaagaaagagaacgatgaactgggcaagaagattaaagaaatcatggagaaaggtgaactcgttccagatgaactggtgaatgaggtagtaaaacgccgcctgtcggagaaagactgcgaaaaaggctttattttggatggttatccgcgtaccgttgctcaagcggaattcctggactgttttcttgaatcccagaacaaacagttgacagccgccgtgctgttcaaagtccccgaagatgttgttgtgcaacgtttaacctctcgcctgatctgtccgaaatgcgggcgtatctacaatatgatttcactgccaccaaaagaagacgagctgtgtgacgattgcaaagtcaaattagtacagcgtgatgatgataaggaagaaacggttcgtcaccgcctgaaagtctaccttgagaagacccagccggtcattgactattatggcaagaaaggtattctcaaacgcgtagatgggtcgcaaggaatcgacaacgttgttgcagaagtcctgaagattattggttggagcgataagtaatga

SEQ ID NO: 1446 - protein, 231 aa, synthetic construct
  REGION 1..231: note = Variant of adenylate kinase
MHHHHHHGGSGMMAYLVFLGPPGAGKGTQSKRIQEKTGIPHISTGDIFRDIVKKENDELGKKIKEIMEKGELVPDELVNEVVKRRLSEKDCEKGFILDGYPRTVAQAEFLDCFLESQNKQLTAAVLFKVPEDVVVQRLTSRLICPKCGRIYNMISLPPKEDELCDDCKVKLVQRDDDKEETVRHRLKVYLEKTQPVIDYYGKKGILKRVDGSQGIDNVVAEVLKIIGWSDK

SEQ ID NO: 1447 - DNA, 699 bp, synthetic construct
  misc_feature 1..699: note = Variant of adenylate kinase
  source 1..699: mol_type = other DNA
atgcaccatcatcaccatcacgggggctccggcatgatggcatatctggtgttcttaggtccgccgggcgcgggaaaaggtacccaatcgaaacgcattcaggaaaagactggcatcccacatattagcacgggcgatatcttccgtgacatcgtcaagaaagagaacgatgaactgggcaagaagattaaagaaatcatggagaaaggtgaactcgttccagatgaactggtgaatgaggtagtaaaacgccgcctgtcggagaaagactgcgaaaaagcttttattttggatggttatccgcgtaccgttgctcaagcggaattcctggacagttttcttgaatcccagaacaaacagttgacagccgccgtgctgttcaaagtccccgaagatgttgttgtgcaacgtttaacctctcgcctgatctgtccgaaatgcgggcgtatctacaatatgatttcactgccaccaaaagaagacgagctgtgtgacgattgcaaagtcaaattagtacagcgtgatgatgataaggaagaaacggttcgtcaccgcctgaaagtctaccttgagaagacccagccggtcattgactattatggcaagaaaggtattctcaaacgcgtagatgggtcgcaaggaatcgacaacgttgttgcagaagtcctgaagattattggttggagcgataagtaatga

SEQ ID NO: 1448 - protein, 231 aa, synthetic construct
  REGION 1..231: note = Variant of adenylate kinase
MHHHHHHGGSGMMAYLVFLGPPGAGKGTQSKRIQEKTGIPHISTGDIFRDIVKKENDELGKKIKEIMEKGELVPDELVNEVVKRRLSEKDCEKAFILDGYPRTVAQAEFLDSFLESQNKQLTAAVLFKVPEDVVVQRLTSRLICPKCGRIYNMISLPPKEDELCDDCKVKLVQRDDDKEETVRHRLKVYLEKTQPVIDYYGKKGILKRVDGSQGIDNVVAEVLKIIGWSDK

SEQ ID NO: 1449 - DNA, 699 bp, synthetic construct
  misc_feature 1..699: note = Variant of adenylate kinase
  source 1..699: mol_type = other DNA
atgcaccatcatcaccatcacgggggctccggcatgatggcatatctggtgttcttaggtccgccgggcgcgggaaaaggtacccaatcgaaacgcattcaggaaaagactggcatcccacatattagcacgggcgatatcttccgtgacatcgtcaagaaagagaacgatgaactgggcgctaagattaaagaaatcatggagaaaggtgaactcgttccagatgaactggtgaatgaggtagtaaaacgccgcctgtcggagaaagactgcgaaaaaggctttattttggatggttatccgcgtaccgttgctcaagcggaattcctggacagttttcttgaatcccagaacaaacagttgacagccgccgtgctgttcaaagtccccgaagatgttgttgtgcaacgtttaacctctcgcctgatctgtccgaaatgcgggcgtatctacaatatgatttcactgccaccaaaagaagacgagctgtgtgacgattgcaaagtcaaattagtacagcgtgatgatgataaggaagaaacggttcgtcaccgcctgaaagtctaccttgagaagacccagccggtcattgactattatggcaagaaaggtattctcaaacgcgtagatgggtcgcaaggaatcgacaacgttgttgcagaagtcctgaagattattggttggagcgataagtaatga

SEQ ID NO: 1450 - protein, 231 aa, synthetic construct
  REGION 1..231: note = Variant of adenylate kinase
MHHHHHHGGSGMMAYLVFLGPPGAGKGTQSKRIQEKTGIPHISTGDIFRDIVKKENDELGAKIKEIMEKGELVPDELVNEVVKRRLSEKDCEKGFILDGYPRTVAQAEFLDSFLESQNKQLTAAVLFKVPEDVVVQRLTSRLICPKCGRIYNMISLPPKEDELCDDCKVKLVQRDDDKEETVRHRLKVYLEKTQPVIDYYGKKGILKRVDGSQGIDNVVAEVLKIIGWSDK

SEQ ID NO: 1451 - DNA, 699 bp, synthetic construct
  misc_feature 1..699: note = Variant of adenylate kinase
  source 1..699: mol_type = other DNA
atgcaccatcatcaccatcacgggggctccggcatgatggcatatctggtgttcttaggtccgccgggcgcgggaaaaggtacccaatcgaaacgcattcaggaaaagactggcatcccacatattagcacgggcgatatcttccgtgacatcgtcaagaaagagaacgatgaactgggcaagaagattaaagaaatcatgtggaaaggtgaactcgttccagatgaactggtgaatgaggtagtaaaacgccgcctgtcggagaaagactgcgaaaaaggctttattttggatggttatccgcgtaccgttgctcaagcggaattcctggacagttttcttgaatcccagaacaaacagttgacagccgccgtgctgttcaaagtccccgaagatgttgttgtgcaacgtttaacctctcgcctgatctgtccgaaatgcgggcgtatctacaatatgatttcactgccaccaaaagaagacgagctgtgtgacgattgcaaagtcaaattagtacagcgtgatgatgataaggaagaaacggttcgtcaccgcctgaaagtctaccttgagaagacccagccggtcattgactattatggcaagaaaggtattctcaaacgcgtagatgggtcgcaaggaatcgacaacgttgttgcagaagtcctgaagattattggttggagcgataagtaatga

SEQ ID NO: 1452 - protein, 231 aa, synthetic construct
  REGION 1..231: note = Variant of adenylate kinase
MHHHHHHGGSGMMAYLVFLGPPGAGKGTQSKRIQEKTGIPHISTGDIFRDIVKKENDELGKKIKEIMWKGELVPDELVNEVVKRRLSEKDCEKGFILDGYPRTVAQAEFLDSFLESQNKQLTAAVLFKVPEDVVVQRLTSRLICPKCGRIYNMISLPPKEDELCDDCKVKLVQRDDDKEETVRHRLKVYLEKTQPVIDYYGKKGILKRVDGSQGIDNVVAEVLKIIGWSDK

SEQ ID NO: 1453 - DNA, 699 bp, synthetic construct
  misc_feature 1..699: note = Variant of adenylate kinase
  source 1..699: mol_type = other DNA
atgcaccatcatcaccatcacgggggctccggcatgatggcatatctggtgttcttaggtccgccgggcgcgggaaaaggtacccaatcgaaacgcattcaggaaaagactggcatcccacatattagcacgggcgatatcttccgtgacatcgtcaagaaagagaacgatgaactgggcaagaagattaaagaaatcatggagaaaggtgaactcgttccagatgaactggtgaatgaggtagtaaaacgccgcctgtcggagaaagactgcgaaaaaggctttattttggatggttatccgcgtaccgttgctcaagcggaattcctggacagttttcttgaatcccagaacaaacagttgacagccgccgtgctgttcaaagtccccgaagatgttgttgtgcaacgtttaacctctcgcctgatctgtccgaaatgcgggcgtatctacaatatgatttcactgccaccaaaagaagacgagctgtgtgacgattgcaaagtcaaattagtacagcgtgatgatgataaggaagaaacggttcgtcaccgcctgaaagtctaccttgagaagacccagccggtcattgactattatggcggtaaaggtattctcaaacgcgtagatgggtcgcaaggaatcgacaacgttgttgcagaagtcctgaagattattggttggagcgataagtaatga

SEQ ID NO: 1454 - protein, 231 aa, synthetic construct
  REGION 1..231: note = Variant of adenylate kinase
MHHHHHHGGSGMMAYLVFLGPPGAGKGTQSKRIQEKTGIPHISTGDIFRDIVKKENDELGKKIKEIMEKGELVPDELVNEVVKRRLSEKDCEKGFILDGYPRTVAQAEFLDSFLESQNKQLTAAVLFKVPEDVVVQRLTSRLICPKCGRIYNMISLPPKEDELCDDCKVKLVQRDDDKEETVRHRLKVYLEKTQPVIDYYGGKGILKRVDGSQGIDNVVAEVLKIIGWSDK

SEQ ID NO: 1455 - DNA, 699 bp, synthetic construct
  misc_feature 1..699: note = Variant of adenylate kinase
  source 1..699: mol_type = other DNA
atgcaccatcatcaccatcacgggggctccggcatgatggcatatctggtgttcttaggtccgccgggcgcgggaaaaggtacccaatcgaaacgcattcaggaaaagactggcatcccacatattagcacgggcgatatcttccgtgacatcgtcaagaaagagaacgatgaactgggcaagaagattaaagaaatcatggagaaaggtgaactcgttccagatgaactggtgaatgaggtagtaaaacgccgcctgtcggagaaagactgcgaaaaaggctttattttggatggttatccgcgtaccgttgctcaagcggaattcctggacagttttcttgaatcccagaacaaacagttgacagccgccgtgctgttcaaagtccccgaagatgttgttgtgcaacgtttaacctctcgcctgatctgtccgaaatgcgggcgtatctacaatatgatttcactgccaccaaaagaagacgagctgtgtgacgattgcaaagtcaaattagtacagcgtgatgatgataaggaacctacggttcgtcaccgcctgaaagtctaccttgagaagacccagccggtcattgactattatggcaagaaaggtattctcaaacgcgtagatgggtcgcaaggaatcgacaacgttgttgcagaagtcctgaagattattggttggagcgataagtaatga

SEQ ID NO: 1456 - protein, 231 aa, synthetic construct
  REGION 1..231: note = Variant of adenylate kinase
MHHHHHHGGSGMMAYLVFLGPPGAGKGTQSKRIQEKTGIPHISTGDIFRDIVKKENDELGKKIKEIMEKGELVPDELVNEVVKRRLSEKDCEKGFILDGYPRTVAQAEFLDSFLESQNKQLTAAVLFKVPEDVVVQRLTSRLICPKCGRIYNMISLPPKEDELCDDCKVKLVQRDDDKEPTVRHRLKVYLEKTQPVIDYYGKKGILKRVDGSQGIDNVVAEVLKIIGWSDK

SEQ ID NO: 1457 - DNA, 699 bp, synthetic construct
  misc_feature 1..699: note = Variant of adenylate kinase
  source 1..699: mol_type = other DNA
atgcaccatcatcaccatcacgggggctccggcatgatggcatatctggtgttcttaggtccgccgggcgcgggaaaaggtacccaatcgaaacgcattcaggaaaagactggcatcccacatattagcacgggcgatatcttccgtgacatcgtcaagaaagagaacgatgaactgggcaagaagattaaagaaatcatggagaaaggtgaactcgttccagatgaactggtgaatgaggtagtaaaacgccgcctgtcggagaaagactgcgaaaaaggctttattttggatggttatccgcgtaccgttgctcaagcggaattcctggacagttttcttgaatcccagaaccgtcagttgacagccgccgtgctgttcaaagtccccgaagatgttgttgtgcaacgtttaacctctcgcctgatctgtccgaaatgcgggcgtatctacaatatgatttcactgccaccaaaagaagacgagctgtgtgacgattgcaaagtcaaattagtacagcgtgatgatgataaggaagaaacggttcgtcaccgcctgaaagtctaccttgagaagacccagccggtcattgactattatggcaagaaaggtattctcaaacgcgtagatgggtcgcaaggaatcgacaacgttgttgcagaagtcctgaagattattggttggagcgataagtaatga

SEQ ID NO: 1458 - protein, 231 aa, synthetic construct
  REGION 1..231: note = Variant of adenylate kinase
MHHHHHHGGSGMMAYLVFLGPPGAGKGTQSKRIQEKTGIPHISTGDIFRDIVKKENDELGKKIKEIMEKGELVPDELVNEVVKRRLSEKDCEKGFILDGYPRTVAQAEFLDSFLESQNRQLTAAVLFKVPEDVVVQRLTSRLICPKCGRIYNMISLPPKEDELCDDCKVKLVQRDDDKEETVRHRLKVYLEKTQPVIDYYGKKGILKRVDGSQGIDNVVAEVLKIIGWSDK

SEQ ID NO: 1459 - DNA, 699 bp, synthetic construct
  misc_feature 1..699: note = Variant of adenylate kinase
  source 1..699: mol_type = other DNA
atgcaccatcatcaccatcacgggggctccggcatgatggcatatctggtgttcttaggtccgccgggcgcgggaaaaggtacccaatcgaaacgcattcaggaaaagactggcatcccacatattagcacgggcgatatcttccgtgacatcgtcaagaaagagaacgatgaactgggcaagaagattaaagaaggtatggagaaaggtgaactcgttccagatgaactggtgaatgaggtagtaaaacgccgcctgtcggagaaagactgcgaaaaaggctttattttggatggttatccgcgtaccgttgctcaagcggaattcctggacagttttcttgaatcccagaacaaacagttgacagccgccgtgctgttcaaagtccccgaagatgttgttgtgcaacgtttaacctctcgcctgatctgtccgaaatgcgggcgtatctacaatatgatttcactgccaccaaaagaagacgagctgtgtgacgattgcaaagtcaaattagtacagcgtgatgatgataaggaagaaacggttcgtcaccgcctgaaagtctaccttgagaagacccagccggtcattgactattatggcaagaaaggtattctcaaacgcgtagatgggtcgcaaggaatcgacaacgttgttgcagaagtcctgaagattattggttggagcgataagtaatga

SEQ ID NO: 1460 - protein, 231 aa, synthetic construct
  REGION 1..231: note = Variant of adenylate kinase
MHHHHHHGGSGMMAYLVFLGPPGAGKGTQSKRIQEKTGIPHISTGDIFRDIVKKENDELGKKIKEGMEKGELVPDELVNEVVKRRLSEKDCEKGFILDGYPRTVAQAEFLDSFLESQNKQLTAAVLFKVPEDVVVQRLTSRLICPKCGRIYNMISLPPKEDELCDDCKVKLVQRDDDKEETVRHRLKVYLEKTQPVIDYYGKKGILKRVDGSQGIDNVVAEVLKIIGWSDK

SEQ ID NO: 1461 - DNA, 699 bp, synthetic construct
  misc_feature 1..699: note = Variant of adenylate kinase
  source 1..699: mol_type = other DNA
atgcaccatcatcaccatcacgggggctccggcatgatggcatatctggtgttcttaggtccgccgggcgcgggaaaaggtacccaatcgaaacgcattcaggaaaagactggcatcccacatattagcacgggcgatatcttccgtgacatcgtcaagaaagagaacgatgaactgggcaagaagattaaagaaatcatggagaaaggtgaactcgttccagatgaactggtgaatgaggtagtaaaacgccgcctgtcggagaaagactgcgaaaaaggctttattttggatggttatccgcgtaccgttgctcaagcggaattcctggacagttttcttgaatcccagaacaaacagttgacagccgccgtgctgttcaaagtccccgaagatgttgttgtgcaacgtttaacctctcgcctgatctgtccgaaatgcgggcgtatctacaatatgatttcactgccaccaaaagaagacgagctgtgtgacgattgcaaagtcaaattagtacagcgtgatgatgataagggggaaacggttcgtcaccgcctgaaagtctaccttgagaagacccagccggtcattgactattatggcaagaaaggtattctcaaacgcgtagatgggtcgcaaggaatcgacaacgttgttgcagaagtcctgaagattattggttggagcgataagtaatga

SEQ ID NO: 1462 - protein, 231 aa, synthetic construct
  REGION 1..231: note = Variant of adenylate kinase
MHHHHHHGGSGMMAYLVFLGPPGAGKGTQSKRIQEKTGIPHISTGDIFRDIVKKENDELGKKIKEIMEKGELVPDELVNEVVKRRLSEKDCEKGFILDGYPRTVAQAEFLDSFLESQNKQLTAAVLFKVPEDVVVQRLTSRLICPKCGRIYNMISLPPKEDELCDDCKVKLVQRDDDKGETVRHRLKVYLEKTQPVIDYYGKKGILKRVDGSQGIDNVVAEVLKIIGWSDK

SEQ ID NO: 1463 - DNA, 699 bp, synthetic construct
  misc_feature 1..699: note = Variant of adenylate kinase
  source 1..699: mol_type = other DNA
atgcaccatcatcaccatcacgggggctccggcatgatggcatatctggtgttcttaggtccgccgggcgcgggaaaaggtacccaatcgaaacgcattcaggaaaagactggcatcccacatattagcacgggcgatatcttccgtgacatcgtcaagaaagagaacgatgaactgggcaagaagattaaagaaatcatggagaaaggtgaactcgttccagatgaactggtgaatgaggtagtaaaacgccgcctgtcggagaaagactgcgaaaaaggctttattttggatggttatccgcgtaccgttgctcaagcggaattcctggatagttttcttgaatcccagaacaaacagttgacagccgccgtgctgttcaaagtccccgaagatgttgttgtgcaacgtttaacctctcgcctgatctgtccgaaatgcgggcgtatctacaacatgatttttctgccaccaaaagaagacgagctgtgtgacgattgcaaagtcaaattagtacagcgtgatgatgataaggaagaaacggttcgtcaccgcctgaaagtctaccttgagaagacccagccggtcattgactattatggcaagaaaggtattctcaaacgcgtagatgggtcgcaaggaatcgacaacgttgttgcagaagtcctgaagattattggttggagcgataagtaatga

SEQ ID NO: 1464 - protein, 231 aa, synthetic construct
  REGION 1..231: note = Variant of adenylate kinase
MHHHHHHGGSGMMAYLVFLGPPGAGKGTQSKRIQEKTGIPHISTGDIFRDIVKKENDELGKKIKEIMEKGELVPDELVNEVVKRRLSEKDCEKGFILDGYPRTVAQAEFLDSFLESQNKQLTAAVLFKVPEDVVVQRLTSRLICPKCGRIYNMIFLPPKEDELCDDCKVKLVQRDDDKEETVRHRLKVYLEKTQPVIDYYGKKGILKRVDGSQGIDNVVAEVLKIIGWSDK

SEQ ID NO: 1465 - DNA, 699 bp, synthetic construct
  misc_feature 1..699: note = Variant of adenylate kinase
  source 1..699: mol_type = other DNA
atgcaccatcatcaccatcacgggggctccggcatgatggcatatctggtgttcttaggtccgccgggcgcgggaaaaggtacccaatcgaaacgcattcaggaaaagactggcatcccacatattagcacgggcgatatcttccgtgacatcgtcaagaaagagaacgatgaagtgggcaagaagattaaagaaatcatggagaaaggtgaactcgttccagatgaactggtgaatgaggtagtaaaacgccgcctgtcggagaaagactgcgaaaaaggctttattttggatggttatccgcgtaccgttgctcaagcggaattcctggacagttttcttgaatcccagaacaaacagttgacagccgccgtgctgttcaaagtccccgaagatgttgttgtgcaacgtttaacctctcgcctgatctgtccgaaatgcgggcgtatctacaatatgatttcactgccaccaaaagaagacgagctgtgtgacgattgcaaagtcaaattagtacagcgtgatgatgataaggaagaaacggttcgtcaccgcctgaaagtctaccttgagaagacccagccggtcattgactattatggcaagaaaggtattctcaaacgcgtagatgggtcgcaaggaatcgacaacgttgttgcagaagtcctgaagattattggttggagcgataagtaatga

SEQ ID NO: 1466 - protein, 231 aa, synthetic construct
  REGION 1..231: note = Variant of adenylate kinase
MHHHHHHGGSGMMAYLVFLGPPGAGKGTQSKRIQEKTGIPHISTGDIFRDIVKKENDEVGKKIKEIMEKGELVPDELVNEVVKRRLSEKDCEKGFILDGYPRTVAQAEFLDSFLESQNKQLTAAVLFKVPEDVVVQRLTSRLICPKCGRIYNMISLPPKEDELCDDCKVKLVQRDDDKEETVRHRLKVYLEKTQPVIDYYGKKGILKRVDGSQGIDNVVAEVLKIIGWSDK

SEQ ID NO: 1467 - DNA, 699 bp, synthetic construct
  misc_feature 1..699: note = Variant of adenylate kinase
  source 1..699: mol_type = other DNA
atgcaccatcatcaccatcacgggggctccggcatgatggcatatctggtgttcttaggtccgccgggcgcgggaaaaggtacccaatcgaaacgcattcaggaaaagactggcatcccacatattagcacgggcgatatcttccgtgacatcgtcaagaaagagaacgatgaactgggcaagaagattaaagaaatcatggagaaaggtgaactcgttccagatgaactggtgctggaggtagtaaaacgccgcctgtcggagaaagactgcgaaaaaggctttattttggatggttatccgcgtaccgttgctcaagcggaattcctggacagttttcttgaatcccagaacaaacagttgacagccgccgtgctgttcaaagtccccgaagatgttgttgtgcaacgtttaacctctcgcctgatctgtccgaaatgcgggcgtatctacaatatgatttcactgccaccaaaagaagacgagctgtgtgacgattgcaaagtcaaattagtacagcgtgatgatgataaggaagaaacggttcgtcaccgcctgaaagtctaccttgagaagacccagccggtcattgactattatggcaagaaaggtattctcaaacgcgtagatgggtcgcaaggaatcgacaacgttgttgcagaagtcctgaagattattggttggagcgataagtaatga

SEQ ID NO: 1468 - protein, 231 aa, synthetic construct
  REGION 1..231: note = Variant of adenylate kinase
MHHHHHHGGSGMMAYLVFLGPPGAGKGTQSKRIQEKTGIPHISTGDIFRDIVKKENDELGKKIKEIMEKGELVPDELVLEVVKRRLSEKDCEKGFILDGYPRTVAQAEFLDSFLESQNKQLTAAVLFKVPEDVVVQRLTSRLICPKCGRIYNMISLPPKEDELCDDCKVKLVQRDDDKEETVRHRLKVYLEKTQPVIDYYGKKGILKRVDGSQGIDNVVAEVLKIIGWSDK

SEQ ID NO: 1469 - DNA, 699 bp, synthetic construct
  misc_feature 1..699: note = Variant of adenylate kinase
  source 1..699: mol_type = other DNA
atgcaccatcatcaccatcacgggggctccggcatgatggcatatctggtgttcttaggtccgccgggcgcgggaaaaggtacccaatcgaaacgcattcaggaaaagactggcatcccacatattagcacgggcgatatcttccgtgacatcgtcaagaaagagaacgatgaactgggcaagaagattaaagaaatcatggagaaaggtgaactcgttccagatgaactggtgaatgaggtagtaaaacgccgcctgtcggagaaagactgcgaaaaaggctttattttggatggttatccgcgtaccgttgctcaagcggaattcctggacagttttcttgaatcccagaacaaacagttgacagccgccgtgctgttcaaagtccccgaagatgttgttgtgcaacgtttaacctctcgcctgatctgtccgaaatgcgggcgtatctacaatatgatttcactgccaccaaaagaagacgagctgtgtgacgattgcaaagtcaaattagtacagcgtgatgatgataaggaagaaacggttcgtcaccgcctgaaagtctaccttgagaagacccagccggtcattgactattatggcaagaaaggtattctcaaacgcgtagatgggtcgcaaggaatcgacaacgttgttgaggaagtcctgaagattattggttggagcgataagtaatga

SEQ ID NO: 1470 - protein, 231 aa, synthetic construct
  REGION 1..231: note = Variant of adenylate kinase
MHHHHHHGGSGMMAYLVFLGPPGAGKGTQSKRIQEKTGIPHISTGDIFRDIVKKENDELGKKIKEIMEKGELVPDELVNEVVKRRLSEKDCEKGFILDGYPRTVAQAEFLDSFLESQNKQLTAAVLFKVPEDVVVQRLTSRLICPKCGRIYNMISLPPKEDELCDDCKVKLVQRDDDKEETVRHRLKVYLEKTQPVIDYYGKKGILKRVDGSQGIDNVVEEVLKIIGWSDK

SEQ ID NO: 1471 - DNA, 699 bp, synthetic construct
  misc_feature 1..699: note = Variant of adenylate kinase
  source 1..699: mol_type = other DNA
atgcaccatcatcaccatcacgggggctccggcatgatggcatatctggtgttcttaggtccgccgggcgcgggaaaaggtacccaatcgaaacgcattcaggaaaagactggcatcccacatattagcacgggcgatatcttccgtgactttgtcaagaaagagaacgatgaactgggcaagaagattaaagaaatcatggagaaaggtgaactcgttccagatgaactggtgaatgaggtagtaaaacgccgcctgtcggagaaagactgcgaaaaaggctttattttggatggttatccgcgtaccgttgctcaagcggaattcctggacagttttcttgaatcccagaacaaacagttgacagccgccgtgctgttcaaagtccccgaagatgttgttgtgcaacgtttaacctctcgcctgatctgtccgaaatgcgggcgtatctacaatatgatttcactgccaccaaaagaagacgagctgtgtgacgattgcaaagtcaaattagtacagcgtgatgatgataaggaagaaacggttcgtcaccgcctgaaagtctaccttgagaagacccagccggtcattgactattatggcaagaaaggtattctcaaacgcgtagatgggtcgcaaggaatcgacaacgttgttgcagaagtcctgaagattattggttggagcgataagtaatga

SEQ ID NO: 1472 - protein, 231 aa, synthetic construct
  REGION 1..231: note = Variant of adenylate kinase
MHHHHHHGGSGMMAYLVFLGPPGAGKGTQSKRIQEKTGIPHISTGDIFRDFVKKENDELGKKIKEIMEKGELVPDELVNEVVKRRLSEKDCEKGFILDGYPRTVAQAEFLDSFLESQNKQLTAAVLFKVPEDVVVQRLTSRLICPKCGRIYNMISLPPKEDELCDDCKVKLVQRDDDKEETVRHRLKVYLEKTQPVIDYYGKKGILKRVDGSQGIDNVVAEVLKIIGWSDK

SEQ ID NO: 1473 - DNA, 699 bp, synthetic construct
  misc_feature 1..699: note = Variant of adenylate kinase
  source 1..699: mol_type = other DNA
atgcaccatcatcaccatcacgggggctccggcatgatggcatatctggtgttcttaggtccgccgggcgcgggaaaaggtacccaatcgaaacgcattcaggaaaagactggcatcccacatattagcacgggcgatatcttccgtgacatcgtcaagaaagagaacgatgaactgggcaagaagattaaagaaatcatggagaaaggtgaactcgttccagatgaactggtgaatgaggtagtaaaacgccgcctgtcggagaaagactgcgaagctggctttattttggatggttatccgcgtaccgttgctcaagcggaattcctggacagttttcttgaatcccagaacaaacagttgacagccgccgtgctgttcaaagtccccgaagatgttgttgtgcaacgtttaacctctcgcctgatctgtccgaaatgcgggcgtatctacaatatgatttcactgccaccaaaagaagacgagctgtgtgacgattgcaaagtcaaattagtacagcgtgatgatgataaggaagaaacggttcgtcaccgcctgaaagtctaccttgagaagacccagccggtcattgactattatggcaagaaaggtattctcaaacgcgtagatgggtcgcaaggaatcgacaacgttgttgcagaagtcctgaagattattggttggagcgataagtaatga

SEQ ID NO: 1474 - protein, 231 aa, synthetic construct
  REGION 1..231: note = Variant of adenylate kinase
MHHHHHHGGSGMMAYLVFLGPPGAGKGTQSKRIQEKTGIPHISTGDIFRDIVKKENDELGKKIKEIMEKGELVPDELVNEVVKRRLSEKDCEAGFILDGYPRTVAQAEFLDSFLESQNKQLTAAVLFKVPEDVVVQRLTSRLICPKCGRIYNMISLPPKEDELCDDCKVKLVQRDDDKEETVRHRLKVYLEKTQPVIDYYGKKGILKRVDGSQGIDNVVAEVLKIIGWSDK

SEQ ID NO: 1475 - DNA, 699 bp, synthetic construct
  misc_feature 1..699: note = Variant of adenylate kinase
  source 1..699: mol_type = other DNA
atgcaccatcatcaccatcacgggggctccggcatgatggcatatctggtgttcttaggtccgccgggcgcgggaaaaggtacccaatcgaaacgcattcaggaaaagactggcatcccacatattagcacgggcgatatcttccgtgacatcgtcaagaaagagaacgatgaactgggcaagaagattaaagaaatcatggagaaaggtgaactcgttccagatgaactggtgaatgaggtagtaaaacgccgcctgtcggagaaagactgcgaaaaaggctttattttggatggttatccgcgtaccgttgctcaagcggaattcctggacagttttcttgaatcccagaacaaacagttgacagccgccgtgctgttcaaagtccccgaagatgttgttgtgcaacgtttaacctctcgcctgatctgtccgaaatgcgggcgtatctacaatatgatttcactgccaccaaaagaagacgagctgtgtgacgattgcaaagtcaaattagtacagcgtgatgatgataaggaagaaacggttcgtcaccgcctgaaagtctaccttgagaagacccagccggtcattgactattatggcaagaaaggtattctcaaacgcgtagatgggtcgcaaggaatcgacaacgttgttgcagaagtcctgaagattctgggttggagcgataagtaatga

SEQ ID NO: 1476 - protein, 231 aa, synthetic construct
  REGION 1..231: note = Variant of adenylate kinase
MHHHHHHGGSGMMAYLVFLGPPGAGKGTQSKRIQEKTGIPHISTGDIFRDIVKKENDELGKKIKEIMEKGELVPDELVNEVVKRRLSEKDCEKGFILDGYPRTVAQAEFLDSFLESQNKQLTAAVLFKVPEDVVVQRLTSRLICPKCGRIYNMISLPPKEDELCDDCKVKLVQRDDDKEETVRHRLKVYLEKTQPVIDYYGKKGILKRVDGSQGIDNVVAEVLKILGWSDK

SEQ ID NO: 1477 - DNA, 699 bp, synthetic construct
  misc_feature 1..699: note = Variant of adenylate kinase
  source 1..699: mol_type = other DNA
atgcaccatcatcaccatcacgggggctccggcatgatggcatatctggtgttcttaggtccgccgggcgcgggaaaaggtacccaatcgaaacgcattcaggaaaagactggcatcccacatattagcacgggcgatatcttccgtgacatcgtcaagaaagagaacgatgaactgggcaagaagattaaagaaatcatggagaaaggtgaactcgttccagatgaactggtgaatgaggtagtaaaacgccgcctgtcggagaaagactgcgaaaaaggctttattttggatggttatccgcgtaccgttgctcaagcgatgttcctggatagttttcttgaatcccagaacaaacagttgacagccgccgtgctgttcaaagtccccgaagatgttgttgtgcaacgtttaacctctcgcctgatctgtccgaaatgcgggcgtatctacaacatgatttttctgccaccaaaagaagacgagctgtgtgacgattgcaaagtcaaattagtacagcgtgatgatgataaggaagaaacggttcgtcaccgcctgaaagtctaccttgagaagacccagccggtcattgactattatggcaagaaaggtattctcaaacgcgtagatgggtcgcaaggaatcgacaacgttgttgcagaagtcctgaagattattggttggagcgataagtaatga

SEQ ID NO: 1478 - protein, 231 aa, synthetic construct
  REGION 1..231: note = Variant of adenylate kinase
MHHHHHHGGSGMMAYLVFLGPPGAGKGTQSKRIQEKTGIPHISTGDIFRDIVKKENDELGKKIKEIMEKGELVPDELVNEVVKRRLSEKDCEKGFILDGYPRTVAQAMFLDSFLESQNKQLTAAVLFKVPEDVVVQRLTSRLICPKCGRIYNMIFLPPKEDELCDDCKVKLVQRDDDKEETVRHRLKVYLEKTQPVIDYYGKKGILKRVDGSQGIDNVVAEVLKIIGWSDK

SEQ ID NO: 1479 - DNA, 699 bp, synthetic construct
  misc_feature 1..699: note = Variant of adenylate kinase
  source 1..699: mol_type = other DNA
atgcaccatcatcaccatcacgggggctccggcatgatggcatatctggtgttcttaggtccgccgggcgcgggaaaaggtacccaatcgaaacgcattcaggaaaagactggcatcccacatattagcacgggcgatatcttccgtgacatcgttaagaaagagaacgatgaactgggcaagaagattaaagaaatcatggagaaaggtgaactcgttccagatgaactggtgaatgaggtagtaaaacgccgcctgtcggagaaagactgcgaaaaaggctttattttggatggttatccgcgtaccgttgctcaagcgatgttcctggagagttttcttgaatcccagaacaaacagttgacagccgccgtgctgttcaaagtccccgaagatgttgttgtgcaacgtttaacctctcgcctgatctgtccgaaatgcgggcgtatctacaatatgatttcactgccaccaaaagaagacgagctgtgtgacgattgcaaagtcaaattagtacagcgtgatgatgataaggaagaaacggttcgtcaccgcctgaaagtctaccttgagaagacccagccggtcattgactattatggcaagaaaggtattctcaaacgcgtagatgggtcgcaaggaatcgacaacgttgttgcagaagtcctgaagattattggttggagcgataagtaatga

SEQ ID NO: 1480 - protein, 231 aa, synthetic construct
  REGION 1..231: note = Variant of adenylate kinase
MHHHHHHGGSGMMAYLVFLGPPGAGKGTQSKRIQEKTGIPHISTGDIFRDIVKKENDELGKKIKEIMEKGELVPDELVNEVVKRRLSEKDCEKGFILDGYPRTVAQAMFLESFLESQNKQLTAAVLFKVPEDVVVQRLTSRLICPKCGRIYNMISLPPKEDELCDDCKVKLVQRDDDKEETVRHRLKVYLEKTQPVIDYYGKKGILKRVDGSQGIDNVVAEVLKIIGWSDK

SEQ ID NO: 1481 - DNA, 699 bp, synthetic construct
  misc_feature 1..699: note = Variant of adenylate kinase
  source 1..699: mol_type = other DNA
atgcaccatcatcaccatcacgggggctccggcatgatggcatatctggtgttcttaggtccgccgggcgcgggaaaaggtacccaatcgaaacgcattcaggaaaagactggcatcccacatattagcacgggcgatatcttccgtgacatcgtcaagaaagagaacgatgaactgggcaagaagattaaagaaatcatggagaaaggtgaactcgttccagatgaactggtgaatgaggtagtaaaacgccgcctgtcggagaaagactgcgaaaaaggctttattttggatggttatccgcgtaccgttgctcaagcggaattcctggagagttttcttgaatcccagaacaaacagttgacagccgccgtgctgttcaaagtccccgaagatgttgttgtgcaacgtttaacctctcgcctgatctgtccgaaatgcgggcgtatctacaatatgatttcactgccaccaaaagaagacgagctgtgtgacgattgcaaagtcaaattagtacagcgtgatgatgataaggaagaaacggttcgtcaccgcctgaaagtctaccttgagaagacccagccggtcattgactattatggcaagaaaggtattctcaaacgcgtagatgggtcgcaaggaatcgacaacgttgttgcagaagtcctgaagattattggttggagcgataagtaatga

SEQ ID NO: 1482 - protein, 231 aa, synthetic construct
  REGION 1..231: note = Variant of adenylate kinase
MHHHHHHGGSGMMAYLVFLGPPGAGKGTQSKRIQEKTGIPHISTGDIFRDIVKKENDELGKKIKEIMEKGELVPDELVNEVVKRRLSEKDCEKGFILDGYPRTVAQAEFLESFLESQNKQLTAAVLFKVPEDVVVQRLTSRLICPKCGRIYNMISLPPKEDELCDDCKVKLVQRDDDKEETVRHRLKVYLEKTQPVIDYYGKKGILKRVDGSQGIDNVVAEVLKIIGWSDK

SEQ ID NO: 1483 - DNA, 699 bp, synthetic construct
  misc_feature 1..699: note = Variant of adenylate kinase
  source 1..699: mol_type = other DNA
atgcaccatcatcaccatcacgggggctccggcatgatggcatatctggtgttcttaggtccgccgggcgcgggaaaaggtacccaatcgaaacgcattcaggaaaagactggcatcccacatattagcacgggcgatatcttccgtgacatcgtcaagaaagagaacgatgaactgggcaagaagattaaagaaatcatggagcagggtgaactcgttccagatgaactggtgaatgaggtagtaaaacgccgcctgtcgaacaaagactgcgaaaaaggctttattttggatggttatccgcgtaccgttgctcaagcggaattcctggacagttttcttgaatcccagaacaaacagttgacagccgccgtgctgttcaaagtccccgaagatgttgttgtgcaacgtttaacctctcgcctgatctgtccgaaatgcgggcgtatctacaatatgatttcactgccaccaaaagaagacgagctgtgtgacgattgcaaagtcaaattagtacagcgtgatgatgataaggaagaaacggttcgtcaccgcctgaaagtctaccttgagaagacccagccggtcattgactattatggcaagaaaggtattctcaaacgcgtagatgggtcgcaaggaatcgacaacgttgttgcagaagtcctgaagattattggttggagcgataagtaatga

SEQ ID NO: 1484 - protein, 231 aa, synthetic construct
  REGION 1..231: note = Variant of adenylate kinase
MHHHHHHGGSGMMAYLVFLGPPGAGKGTQSKRIQEKTGIPHISTGDIFRDIVKKENDELGKKIKEIMEQGELVPDELVNEVVKRRLSNKDCEKGFILDGYPRTVAQAEFLDSFLESQNKQLTAAVLFKVPEDVVVQRLTSRLICPKCGRIYNMISLPPKEDELCDDCKVKLVQRDDDKEETVRHRLKVYLEKTQPVIDYYGKKGILKRVDGSQGIDNVVAEVLKIIGWSDK

SEQ ID NO: 1485 - DNA, 699 bp, synthetic construct
  misc_feature 1..699: note = Variant of adenylate kinase
  source 1..699: mol_type = other DNA
atgcaccatcatcaccatcacgggggctccggcatgatggcatatctggtgttcttaggtccgccgggcgcgggaaaaggtacccaatcgaaacgcattcaggaaaagactggcatccctcatattggtacgggcgatatcttccgtgacatcgtcaagaaagagaacgatgaactgggcaagaagattaaagaaatcatggagaagggtgaactcgttccagatgaactggtgaatgaggtagtaaaacgccgcctgtcggagaaagactgcgaaaaaggctttattttggatggttatccgcgtaccgttgctcaagcggaattcctggacagttttcttgaatcccagaacaaacagttgacagccgccgtgctgttcaaagtccccgaagatgtggtggtacaacgtttaacctctcgcctgatctgtccgaaatgcgggcgtatctacaatatgatttcactgccaccaaaagaagacgagctgtgtgacgattgcaaagtcaaattagtacagcgtgatgatgataaggaagaaacggttcgtcaccgcctgaaagtctaccttgagaagacccagccggtcattgactattatggcaagaaaggtattctcaaacgcgtagatgggtcgcaaggaatcgacaacgttgttgcagaagtcctgaagattattggttggagcgataagtaatga

SEQ ID NO: 1486 - protein, 231 aa, synthetic construct
  REGION 1..231: note = Variant of adenylate kinase
MHHHHHHGGSGMMAYLVFLGPPGAGKGTQSKRIQEKTGIPHIGTGDIFRDIVKKENDELGKKIKEIMEKGELVPDELVNEVVKRRLSEKDCEKGFILDGYPRTVAQAEFLDSFLESQNKQLTAAVLFKVPEDVVVQRLTSRLICPKCGRIYNMISLPPKEDELCDDCKVKLVQRDDDKEETVRHRLKVYLEKTQPVIDYYGKKGILKRVDGSQGIDNVVAEVLKIIGWSDK

SEQ ID NO: 1487 - DNA, 699 bp, synthetic construct
  misc_feature 1..699: note = Variant of adenylate kinase
  source 1..699: mol_type = other DNA
atgcaccatcatcaccatcacgggggctccggcatgatggcatatctggtgttcttaggtccgccgggcgcgggaaaaggtacccaatcgaaacgcattcaggaaaagactggcatccctcatattggtacgggcgatatcttccgtgacatcgtcaagaaagagaacgatgaactgggcaagaagattaaagaaatcatggagcagggtgaactcgttccagatgaactggtgaatgaggtagtaaaacgccgcctgtcggagaaagactgcgaaaaaggctttattttggatggttatccgcgtaccgttgctcaagcggaattcctggacagttttcttgaatcccagaacaaacagttgacagccgccgtgctgttcaaagtccccgaagatgttgttgtgcagcgtatcaccagccgcctgatctgtccgaaatgcgggcgtatctacaatatgatttcactgccaccaaaagaagacgagctgtgtgacgattgcaaagtcaaattagtacagcgtgatgatgataaggaagaaacggttcgtcaccgcctgaaagtctaccttgagaagacccagccggtcattgactattatggcaagaaaggtattctcaaacgcgtagatgggtcgcaaggaatcgacaacgttgttgcagaagtcctgaagattattggttggagcgataagtaatga

SEQ ID NO: 1488 - protein, 231 aa, synthetic construct
  REGION 1..231: note = Variant of adenylate kinase
MHHHHHHGGSGMMAYLVFLGPPGAGKGTQSKRIQEKTGIPHIGTGDIFRDIVKKENDELGKKIKEIMEQGELVPDELVNEVVKRRLSEKDCEKGFILDGYPRTVAQAEFLDSFLESQNKQLTAAVLFKVPEDVVVQRITSRLICPKCGRIYNMISLPPKEDELCDDCKVKLVQRDDDKEETVRHRLKVYLEKTQPVIDYYGKKGILKRVDGSQGIDNVVAEVLKIIGWSDK

SEQ ID NO: 1489 - DNA, 699 bp, synthetic construct
  misc_feature 1..699: note = Variant of adenylate kinase
  source 1..699: mol_type = other DNA
atgcaccatcatcaccatcacgggggctccggcatgatggcatatctggtgttcttaggtccgccgggcgcgggaaaaggtacccaatcgaaacgcattcaggaaaagactggcatctgccatattggtacgggcgatatcttccgtgacatcgtcaagaaagagaacgatgaactgggcaagaagattaaagaaatcatggagaaaggtgaactcgttccagatgaactggtgaatgaggtagtaaaacgccgcctgtcgaacaaagactgcgaaaaaggctttattttggatggttatccgcgtaccgttgctcaagcggaattcctggacagttttcttgaatcccagaacaaacagttgacagccgccgtgctgttcaaagtccccgaagatgtgctggtacaacgtttaacctctcgcctgatctgtccgaaatgcgggcgtatctacaatatgatttcactgccaccaaaagaagacgagctgtgtgacgattgcaaagtcaaattagtacagcgtgatgatgataacgaagaaacggttcgtcaccgcctgaaagtctaccttgagaagacccagccggtcattgactattatggcaagaaaggtattctcaaacgcgtagatgggtcgcaaggaatcgacaacgttgttgcagaagtcctgaagattattggttggagcgataagtaatga

SEQ ID NO: 1490 - protein, 231 aa, synthetic construct
  REGION 1..231: note = Variant of adenylate kinase
MHHHHHHGGSGMMAYLVFLGPPGAGKGTQSKRIQEKTGICHIGTGDIFRDIVKKENDELGKKIKEIMEKGELVPDELVNEVVKRRLSNKDCEKGFILDGYPRTVAQAEFLDSFLESQNKQLTAAVLFKVPEDVLVQRLTSRLICPKCGRIYNMISLPPKEDELCDDCKVKLVQRDDDNEETVRHRLKVYLEKTQPVIDYYGKKGILKRVDGSQGIDNVVAEVLKIIGWSDK

SEQ ID NO: 1491 - DNA, 699 bp, synthetic construct
  misc_feature 1..699: note = Variant of adenylate kinase
  source 1..699: mol_type = other DNA
atgcaccatcatcaccatcacgggggctccggcatgatggcatatctggtgttcttaggtccgccgggcgcgggaaaaggtacccaatcgaaacgcattcaggaaaagactggcatcccacatattagcacgggcgatatcttccgtgacatcgtcaagaaagagaacgatgaactgggcaagaagattaaagaaatcatggagaaaggtgaactcgttccagatgaactggtgaatgaggtagtaaaacgccgcctgtcggagaaagactgcgaaaaaggctttattttggatggttatccgcgtaccgttgctcaagcggaattcctggacagttttcttgaatcccagaacaaacagttgacagccgccgtgctgttcaaagtccccgaagatgttgttgtgcaacgtttaacctctcgcctgatctgtccgaaatgcgggcgtatctacaatatgatttcactgccaccaaaagaagacgagctgtgtgacgattgcaaagtcaaattagtacagcgtgatgatgataaggaagaaacggttcgtcatcgcctgaaagtctaccttgagaagacccagccggtcattgactattatggcaagaaaggtattctcaaacgcgtagatgggtcgcaaccaatcgacaacgttgttgcagaagtcctgaagattattggttggagcgataagtaatga

SEQ ID NO: 1492 - protein, 231 aa, synthetic construct
  REGION 1..231: note = Variant of adenylate kinase
MHHHHHHGGSGMMAYLVFLGPPGAGKGTQSKRIQEKTGIPHISTGDIFRDIVKKENDELGKKIKEIMEKGELVPDELVNEVVKRRLSEKDCEKGFILDGYPRTVAQAEFLDSFLESQNKQLTAAVLFKVPEDVVVQRLTSRLICPKCGRIYNMISLPPKEDELCDDCKVKLVQRDDDKEETVRHRLKVYLEKTQPVIDYYGKKGILKRVDGSQPIDNVVAEVLKIIGWSDK

SEQ ID NO: 1493 - DNA, 699 bp, synthetic construct
  misc_feature 1..699: note = Variant of adenylate kinase
  source 1..699: mol_type = other DNA
atgcaccatcatcaccatcacgggggctccggcatgatggcatatctggtgttcttaggtccgccgggcgcgggaaaaggtacccaatcgaaacgcattcaggaaaagactggcatcccacatattagcacgggcgatatcttccgtgacatcgtcaagaaagagaacgatgaactgggcaagaagattaaagaaatcatggagaaaggtgaactcgttccagatgaactggtgaataacgtaattaaacgccgcctgtcggagaaagactgcgaaaaaggctttattttggatggttatccgcgtaccgttgctcaagcggaattcctggacagttttcttgaatcccagaacaaacagttgacagccgccgtgctgttcaaagtccccgaagatgttgttgtgcaacgtttaacctctcgcctgatctgtccgaaatgcgggcgtatctacaatatgatttcactgccaccaaaagaagacgagctgtgtgacgattgcaaagtcaaattagtacagcgtgatgatgataaggaagaaacggttcgtaaacgcctgaaagtctaccttgagaagacccagccggtcattgactattatggcaagaaaggtattctgaaacgcgtagatgggtcgcaaggaattgataacgtttgggcagaagtcctgaagattattggttggagcgataagtaatga

SEQ ID NO: 1494 - protein, 231 aa, synthetic construct
  REGION 1..231: note = Variant of adenylate kinase
MHHHHHHGGSGMMAYLVFLGPPGAGKGTQSKRIQEKTGIPHISTGDIFRDIVKKENDELGKKIKEIMEKGELVPDELVNNVIKRRLSEKDCEKGFILDGYPRTVAQAEFLDSFLESQNKQLTAAVLFKVPEDVVVQRLTSRLICPKCGRIYNMISLPPKEDELCDDCKVKLVQRDDDKEETVRKRLKVYLEKTQPVIDYYGKKGILKRVDGSQGIDNVWAEVLKIIGWSDK

SEQ ID NO: 1495 - DNA, 699 bp, synthetic construct
  misc_feature 1..699: note = Variant of adenylate kinase
  source 1..699: mol_type = other DNA
atgcaccatcatcaccatcacgggggctccggcatgatggcatatctggtgttcttaggtccgccgggcgcgggaaaaggtacccaatcgaaacgcattcaggaaaagactggcatcccacatattagcacgggcgatatcttccgtgacatcgtcaagaaagagaacgatgaactgggcaagaagattaaagaaatcatggagaaaggtgaactcgttccagatgaactggtgaatgaggtagtaaaacgccgcctgtcgaacaaagactgcgaaaaaggctttattttggatggttatccgcgtaccgttgctcaagcggaattcctggacagttttcttgaatcccagaacaaacagttgacagccgccgtgctgttcaaagtccccgaagatgttgttgtggctcgtctgaccagccgcctgatctgtccgaaatgcgggcgtatctacaatatgatttcactgccaccaaaagaagacgagctgtgtgacgattgcaaagtcaaattagtacagcgtgatgatgataaggaagaaacggttcgtcaccgcctgaaagtctaccttgagaagacccagccggtcattgactattatggcaagaaaggtattctcaaacgcgtagatgggtcgcaaggaatcgacaacgttgttgcagaagtcctgaagattattggttggagcgataagtaatga

SEQ ID NO: 1496 - protein, 231 aa, synthetic construct
  REGION 1..231: note = Variant of adenylate kinase
MHHHHHHGGSGMMAYLVFLGPPGAGKGTQSKRIQEKTGIPHISTGDIFRDIVKKENDELGKKIKEIMEKGELVPDELVNEVVKRRLSNKDCEKGFILDGYPRTVAQAEFLDSFLESQNKQLTAAVLFKVPEDVVVARLTSRLICPKCGRIYNMISLPPKEDELCDDCKVKLVQRDDDKEETVRHRLKVYLEKTQPVIDYYGKKGILKRVDGSQGIDNVVAEVLKIIGWSDK

SEQ ID NO: 1497 - DNA, 699 bp, synthetic construct
  misc_feature 1..699: note = Variant of adenylate kinase
  source 1..699: mol_type = other DNA
atgcaccatcatcaccatcacgggggctccggcatgatggcatatatggtgttcttaggtccgccgggcgcgggaaaaggtacccaatcgaaacgcattcaggaaaagactggcatctgccatattggtacgggcgatatcttccgtgacatcgtcaagaaagagaacgatgaactgggcaagaagattaaagaaatcatggagaaaggtgaactcgttccagatgaactggtgaatgaggtagtaaaacgccgcctgtcgaacaaagactgcgaaaaaggctttattttggatggttatccgcgtaccgttgctcaagcggaattcctggacagttttcttgaatcccagaacaaacagttgacagccgccgtgctgttcaaagtccccgaagatgttgttgtgcaacgtttaacctctcgcctgatctgtccgaaatgcgggcgtatctacaatatgatttcactgccaccaaaagaagacgagctgtgtgacgattgcaaagtcaaattagtacagcgtgatgatgataaggaagaaacggttcgtcaccgcctgaaagtctaccttgagaagacccagccggtcattgactattatggcaagaaaggtattctcaaacgcgtagatgggtcgcaaggaatcgacaacgttgttgcagaagtcctgaagattattggttggagcgataagtaatga

SEQ ID NO: 1498 - protein, 231 aa, synthetic construct
  REGION 1..231: note = Variant of adenylate kinase
MHHHHHHGGSGMMAYMVFLGPPGAGKGTQSKRIQEKTGICHIGTGDIFRDIVKKENDELGKKIKEIMEKGELVPDELVNEVVKRRLSNKDCEKGFILDGYPRTVAQAEFLDSFLESQNKQLTAAVLFKVPEDVVVQRLTSRLICPKCGRIYNMISLPPKEDELCDDCKVKLVQRDDDKEETVRHRLKVYLEKTQPVIDYYGKKGILKRVDGSQGIDNVVAEVLKIIGWSDK

SEQ ID NO: 1499 - DNA, 699 bp, synthetic construct
  misc_feature 1..699: note = Variant of adenylate kinase
  source 1..699: mol_type = other DNA
atgcaccatcatcaccatcacgggggctccggcatgatggcatatctggtgttcttaggtccgccgggcgcgggaaaaggtacccaatcgaaacgcattcaggaaaagactggcatctgccatattagtacgggcgatatcttccgtgacatcgtcaagaaagagaacgatgaactgggcaagaagattaaagaaatcatggagaaaggtgaactcgttccagatgaactggtgaatgaggtagtaaaacgccgcctgtcggagaaagactgcgaaaaaggctttattttggatggttatccgcgtaccgttgctcaagcggaattcctggacagttttcttgaatcccagaacaaacagttgacagccgccgtgctgttcaaagtccccgaagatgtgctggtacaacgtttaacctctcgcctgatctgtccgaaatgcgggcgtatctacaatatgatttcactgccaccaaaagaagacgagctgtgtgacgattgcaaagtcaaattagtacagcgtgatgatgataaggaagaaacggttcgtcaccgcctgaaagtctaccttgagaagacccagccggtcattgactattatggcaagaaaggtattctcaaacgcgtagatgggtcgcaaggaatcgacaacgttgttgcagaagtcctgaagattattggttggagcgataagtaatga

SEQ ID NO: 1500 - protein, 231 aa, synthetic construct
  REGION 1..231: note = Variant of adenylate kinase
MHHHHHHGGSGMMAYLVFLGPPGAGKGTQSKRIQEKTGICHISTGDIFRDIVKKENDELGKKIKEIMEKGELVPDELVNEVVKRRLSEKDCEKGFILDGYPRTVAQAEFLDSFLESQNKQLTAAVLFKVPEDVLVQRLTSRLICPKCGRIYNMISLPPKEDELCDDCKVKLVQRDDDKEETVRHRLKVYLEKTQPVIDYYGKKGILKRVDGSQGIDNVVAEVLKIIGWSDK

SEQ ID NO: 1501 - DNA, 699 bp, synthetic construct
  misc_feature 1..699: note = Variant of adenylate kinase
  source 1..699: mol_type = other DNA
atgcaccatcatcaccatcacgggggctccggcatgatggcatatctggtgttcttaggtccgccgggcgcgggaaaaggtacccaatcgaaacgcattcaggaaaagactggcatcccacatattagcacgggcgatatcttccgtgacatcgtcaagaaagagaacgatgaactgggcaagaagattaaagaaatcatggagaaaggtgaactcgttccagatgaactggtgaatgaggtagtaaaacgccgcctgtcgaacaaagactgcgaaaaaggctttattttggatggttatccgcgtaccgttgctcaagcggaattcctggacagttttcttgaatcccagaacaaacagttgacagccgccgtgctgttcaaagtccccgaagatgttgttgtgcaacgtttaacctctcgcctgatctgtccgaaatgcgggcgtatctacaatatgatttcactgccaccaaaagaagacgagctgtgtgacgattgcaaagtcaaattagtacagcgtgatgatgataaggaagaaacggttcgtcaccgcctgaaagtctaccttgagaagacccagccggtcattgactattatggcaagaaaggtattctcaaacgcgtagatgggtcgcaaggaatcgacaacgttgttgcagaagtcctgaagattattggttggagcgataagtaatga

SEQ ID NO: 1502 - protein, 231 aa, synthetic construct
  REGION 1..231: note = Variant of adenylate kinase
MHHHHHHGGSGMMAYLVFLGPPGAGKGTQSKRIQEKTGIPHISTGDIFRDIVKKENDELGKKIKEIMEKGELVPDELVNEVVKRRLSNKDCEKGFILDGYPRTVAQAEFLDSFLESQNKQLTAAVLFKVPEDVVVQRLTSRLICPKCGRIYNMISLPPKEDELCDDCKVKLVQRDDDKEETVRHRLKVYLEKTQPVIDYYGKKGILKRVDGSQGIDNVVAEVLKIIGWSDK

SEQ ID NO: 1503 - DNA, 699 bp, synthetic construct
  misc_feature 1..699: note = Variant of adenylate kinase
  source 1..699: mol_type = other DNA
atgcaccatcatcaccatcacgggggctccggcatgatggcatatctggtgttcttaggtccgccgggcgcgggaaaaggtacccaatcgaaacgcattcaggaaaagactggcatcccacatattagcacgggcgatatcttccgtgacatcgttaagaaagagaacgatgaactgggcaagaagattaaagaaatcatggagaaaggtgaactcgttccagatgaactggtgaatgaggtagtaaaacgccgcctgtcggagaaagactgcgaaaaaggctttattttggatggttatccgcgtaccgttgctcaagcggaattcctggagagttttcttgaatcccagaacaaacagttgacagccgccgtgctgttcaaagtccccgaagatgttgttgtgcaacgtttaacctctcgcctgatctgtccgaaatgcgggcgtatctacaacatgatttttctgccaccaaaagaagacgagctgtgtgacgattgcaaagtcaaattagtacagcgtgatgatgataaggaagaaacggttcgtcaccgcctgaaagtctaccttgagaagacccagccggtcattgactattatggcaagaaaggtattctcaaacgcgtagatgggtcgcaaggaatcgacaacgttgttgcagaagtcctgaagattattggttggagcgataagtaatga

SEQ ID NO: 1504 - protein, 231 aa, synthetic construct
  REGION 1..231: note = Variant of adenylate kinase
MHHHHHHGGSGMMAYLVFLGPPGAGKGTQSKRIQEKTGIPHISTGDIFRDIVKKENDELGKKIKEIMEKGELVPDELVNEVVKRRLSEKDCEKGFILDGYPRTVAQAEFLESFLESQNKQLTAAVLFKVPEDVVVQRLTSRLICPKCGRIYNMIFLPPKEDELCDDCKVKLVQRDDDKEETVRHRLKVYLEKTQPVIDYYGKKGILKRVDGSQGIDNVVAEVLKIIGWSDK

SEQ ID NO: 1505 - DNA, 699 bp, synthetic construct
  misc_feature 1..699: note = Variant of adenylate kinase
  source 1..699: mol_type = other DNA
atgcaccatcatcaccatcacgggggctccggcatgatggcatatctggtgttcttaggtccgccgggcgcgggaaaaggtacccaatcgaaacgcattcaggaaaagactggcatcccacatattagcacgggcgatatcttccgtgacatcgtcaagaaagagaacgatgaactgggcaagaagattaaagaaatcatggagaaaggtgaactcgttccagatgaactggtgaatgaggtagtaaaacgccgcctgtcggagaaagactgcgaaaaaggctttattttggatggttatccgcgtaccgttgctcaagcggaattcctggacagttttcttgaatcccagaacaaacagttgacagccgccgtgctgttcaaagtccccgaagatgttgttgtgcaacgtttaacctctcgcctgatctgtccgaaatgcgggcgtatctacaatatgatttcactgccaccaaaagaagacgagctgtgtgacgattgcaaagtcaaattagtacagcgtgatgatgataaggaagaaacggttcgtcaccgcctgaaagtctaccttgagaagacccagccggtcattgactattatggcaagaaaggtattctcaaacgcgtagatgggtcgcaaggaatcgacaacgttgttgcagaagtcacgaagattattggttggagcgataagtaatga

SEQ ID NO: 1506 - protein, 231 aa, synthetic construct
  REGION 1..231: note = Variant of adenylate kinase
MHHHHHHGGSGMMAYLVFLGPPGAGKGTQSKRIQEKTGIPHISTGDIFRDIVKKENDELGKKIKEIMEKGELVPDELVNEVVKRRLSEKDCEKGFILDGYPRTVAQAEFLDSFLESQNKQLTAAVLFKVPEDVVVQRLTSRLICPKCGRIYNMISLPPKEDELCDDCKVKLVQRDDDKEETVRHRLKVYLEKTQPVIDYYGKKGILKRVDGSQGIDNVVAEVTKIIGWSDK

SEQ ID NO: 1507 - DNA, 699 bp, synthetic construct
  misc_feature 1..699: note = Variant of adenylate kinase
  source 1..699: mol_type = other DNA
atgcaccatcatcaccatcacgggggctccggcatgatggcatatctggtgttcttaggtccgccgggcgcgggaaaaggtacccaatcgaaacgcattcaggaaaagactggcatcccacatattagcacgggcgatatcttccgtgacatcgtcaagaaagagaacgatgaactgggcaagaagattaaagaaatcatggagaaaggtgaactcgttggtgatgaactggtgaatgaggtagtaaaacgccgcctgtcggagaaagactgcgaaaaaggctttattttggatggttatccgcgtaccgttgctcaagcggaattcctggacagttttcttgaatcccagaacaaacagttgacagccgccgtgctgttcaaagtccccgaagatgttgttgtgcaacgtttaacctctcgcctgatctgtccgaaatgcgggcgtatctacaatatgatttcactgccaccaaaagaagacgagctgtgtgacgattgcaaagtcaaattagtacagcgtgatgatgataaggaagaaacggttcgtcaccgcctgaaagtctaccttgagaagacccagccggtcattgactattatggcaagaaaggtattctcaaacgcgtagatgggtcgcaaggaatcgacaacgttgttgcagaagtcctgaagattattggttggagcgataagtaatga

SEQ ID NO: 1508 - protein, 231 aa, synthetic construct
  REGION 1..231: note = Variant of adenylate kinase
MHHHHHHGGSGMMAYLVFLGPPGAGKGTQSKRIQEKTGIPHISTGDIFRDIVKKENDELGKKIKEIMEKGELVGDELVNEVVKRRLSEKDCEKGFILDGYPRTVAQAEFLDSFLESQNKQLTAAVLFKVPEDVVVQRLTSRLICPKCGRIYNMISLPPKEDELCDDCKVKLVQRDDDKEETVRHRLKVYLEKTQPVIDYYGKKGILKRVDGSQGIDNVVAEVLKIIGWSDK

SEQ ID NO: 1509 - DNA, 699 bp, synthetic construct
  misc_feature 1..699: note = Variant of adenylate kinase
  source 1..699: mol_type = other DNA
atgcaccatcatcaccatcacgggggctccggcatgatggcatatctggtgttcttaggtccgccgggcgcgggaaaaggtacccaatcgaaacgcattcaggaaaagactggcatcccacatattagcacgggcgatatcttccgtgacatcgtcaagaaagagaacgatgaactgggcaagaagattaaagaaatcatggagaaaggtgaactcgttccagatgaactggtgaatgaggtagtaaaacgccgcctgtcggagaaagactgcgaaaaaggctttattttggatggttatccgcgtaccgttgctcaagcggaattcctggacagttttcttaggtcccagaacaaacagttgacagccgccgtgctgttcaaagtccccgaagatgttgttgtgcaacgtttaacctctcgcctgatctgtccgaaatgcgggcgtatctacaatatgatttcactgccaccaaaagaagacgagctgtgtgacgattgcaaagtcaaattagtacagcgtgatgatgataaggaagaaacggttcgtcaccgcctgaaagtctaccttgagaagacccagccggtcattgactattatggcaagaaaggtattctcaaacgcgtagatgggtcgcaaggaatcgacaacgttgttgcagaagtcctgaagattattggttggagcgataagtaatga

SEQ ID NO: 1510 - protein, 231 aa, synthetic construct
  REGION 1..231: note = Variant of adenylate kinase
MHHHHHHGGSGMMAYLVFLGPPGAGKGTQSKRIQEKTGIPHISTGDIFRDIVKKENDELGKKIKEIMEKGELVPDELVNEVVKRRLSEKDCEKGFILDGYPRTVAQAEFLDSFLRSQNKQLTAAVLFKVPEDVVVQRLTSRLICPKCGRIYNMISLPPKEDELCDDCKVKLVQRDDDKEETVRHRLKVYLEKTQPVIDYYGKKGILKRVDGSQGIDNVVAEVLKIIGWSDK

SEQ ID NO: 1511 - DNA, 699 bp, synthetic construct
  misc_feature 1..699: note = Variant of adenylate kinase
  source 1..699: mol_type = other DNA
atgcaccatcatcaccatcacgggggctccggcatgatggcatatctggtgttcttaggtccgccgggcgcgggaaaaggtacccaatcgaaacgcattcaggaaaagactggccagccacatattagcacgggcgatatcttccgtgacatcgtcaagaaagagaacgatgaactgggcaagaagattaaagaaatcatggagaaaggtgaactcgttccagatgaactggtgaatgaggtagtaaaacgccgcctgtcggagaaagactgcgaaaaaggctttattttggatggttatccgcgtaccgttgctcaagcggaattcctggacagttttcttgaatcccagaacaaacagttgacagccgccgtgctgttcaaagtccccgaagatgttgttgtgcaacgtttaacctctcgcctgatctgtccgaaatgcgggcgtatctacaatatgatttcactgccaccaaaagaagacgagctgtgtgacgattgcaaagtcaaattagtacagcgtgatgatgataaggaagaaacggttcgtcaccgcctgaaagtctaccttgagaagacccagccggtcattgactattatggcaagaaaggtattctcaaacgcgtagatgggtcgcaaggaatcgacaacgttgttgcagaagtcctgaagattattggttggagcgataagtaatga

SEQ ID NO: 1512 - protein, 231 aa, synthetic construct
  REGION 1..231: note = Variant of adenylate kinase
MHHHHHHGGSGMMAYLVFLGPPGAGKGTQSKRIQEKTGQPHISTGDIFRDIVKKENDELGKKIKEIMEKGELVPDELVNEVVKRRLSEKDCEKGFILDGYPRTVAQAEFLDSFLESQNKQLTAAVLFKVPEDVVVQRLTSRLICPKCGRIYNMISLPPKEDELCDDCKVKLVQRDDDKEETVRHRLKVYLEKTQPVIDYYGKKGILKRVDGSQGIDNVVAEVLKIIGWSDK

SEQ ID NO: 1513 - DNA, 699 bp, synthetic construct
  misc_feature 1..699: note = Variant of adenylate kinase
  source 1..699: mol_type = other DNA
atgcaccatcatcaccatcacgggggctccggcatgatggcatatctggtgttcttaggtccgccgggcgcgggaaagggtacccaatcgaaacgcattcaggaaaagactggcatcccacatattagcacgggcgatatcttccgtgacatcgtcaagaaagagaacgatgaactgggcaagaagattaaagaaatcatggagaaaggtgaactcgttccagatgaactggtgaatgaggtagtaaaacgccgcctgtcggagaaagactgcgaagagggctttattttggatggttatccgcgtaccgttgctcaagcggaattcctggacagttttcttgaatcccagaacaaacagttgacagccgccgtgctgttcaaagtccccgaagatgttgttgtgcaacgtttaacctctcgcctgatctgtccgaaatgcgggcgtatctacaatatgatttcactgccaccaaaagaagacgagctgtgtgacgattgcaaagtcaaattagtacagcgtgatgatgataaggaagaaacggttcgtcaccgcctgaaagtctaccttgagaagacccagccggtcattgactattatggcaagaaaggtattctcaaacgcgtagatgggtcgcaaggaatcgacaacgttgttgcagaagtcctgaagattattggttggagcgataagtaatga

SEQ ID NO: 1514 - protein, 231 aa, synthetic construct
  REGION 1..231: note = Variant of adenylate kinase
MHHHHHHGGSGMMAYLVFLGPPGAGKGTQSKRIQEKTGIPHISTGDIFRDIVKKENDELGKKIKEIMEKGELVPDELVNEVVKRRLSEKDCEEGFILDGYPRTVAQAEFLDSFLESQNKQLTAAVLFKVPEDVVVQRLTSRLICPKCGRIYNMISLPPKEDELCDDCKVKLVQRDDDKEETVRHRLKVYLEKTQPVIDYYGKKGILKRVDGSQGIDNVVAEVLKIIGWSDK

SEQ ID NO: 1515 - DNA, 699 bp, synthetic construct
  misc_feature 1..699: note = Variant of adenylate kinase
  source 1..699: mol_type = other DNA
atgcaccatcatcaccatcacgggggctccggcatgatggcatatctggtgttcttaggtccgccgggcgcgggaaaaggtacccaatcgaaacgcattcaggaaaagactggcatcccacatattagcacgggcgatatcttccgtgacatcgtcaagaaagagaacgatgaactgggcaagaagattaaagaaatcatggagaaaggtgaactcgttccagatgaactggtgaatgaggtagtaaaacgccgcctgtcggagaaagactgcgaaaaaggctttattttggatggttatccgcgtaccgttgctcaagcggaattcctggacagttttcttgaatcccagaacctgcagttgacagccgccgtgctgttcaaagtccccgaagatgttgttgtgcaacgtttaacctctcgcctgatctgtccgaaatgcgggcgtatctacaatatgatttcactgccaccaaaagaagacgagctgtgtgacgattgcaaagtcaaattagtacagcgtgatgatgataaggaagaaacggttcgtcaccgcctgaaagtctaccttgagaagacccagccggtcattgactattatggcaagaaaggtattctcaaacgcgtagatgggtcgcaaggaatcgacaacgttgttgcagaagtcctgaagattattggttggagcgataagtaatga

SEQ ID NO: 1516 - protein, 231 aa, synthetic construct
  REGION 1..231: note = Variant of adenylate kinase
MHHHHHHGGSGMMAYLVFLGPPGAGKGTQSKRIQEKTGIPHISTGDIFRDIVKKENDELGKKIKEIMEKGELVPDELVNEVVKRRLSEKDCEKGFILDGYPRTVAQAEFLDSFLESQNLQLTAAVLFKVPEDVVVQRLTSRLICPKCGRIYNMISLPPKEDELCDDCKVKLVQRDDDKEETVRHRLKVYLEKTQPVIDYYGKKGILKRVDGSQGIDNVVAEVLKIIGWSDK

SEQ ID NO: 1517 - DNA, 699 bp, synthetic construct
  misc_feature 1..699: note = Variant of adenylate kinase
  source 1..699: mol_type = other DNA
atgcaccatcatcaccatcacgggggctccggcatgatggcatatctggtgttcttaggtccgccgggcgcgggaaaaggtacccaatcgaaacgcattcaggaaaagactggcatcccacatattagcacgggcgatatcttccgtgacatcgtcaagaaagagaacgatgaactgggcaagaagattaaagaaatcatggagaaaggtgaactcgttccagatgaactggtgaatgaggtagtaaaacgccgcctgtcggagaaagactgcgaaaaaggctttattttggatggttatccgcgtaccgttgctcaagcggaattcctggacagttttcttgaatcccagaacaaacagttgacagccgccgtgctgttcaaagtccccgaagatgttgttgtgcaacgtttaacctctcgcctgatctgtccgaaatgcgggcgtatctacaatatgatttcactgccaccaaaagaagacgagctgtgtgacgattgcaaagtcaaattagtacagcgtgatgatgataaggaagaaacggttcgtcaccgcctgaaagtctacaatgagaagacccagccggtcattgactattatggcaagaaaggtattctcaaacgcgtagatgggtcgcaaggaatcgacaacgttgttgcagaagtcctgaagattattggttggagcgataagtaatga

SEQ ID NO: 1518 - protein, 231 aa, synthetic construct
  REGION 1..231: note = Variant of adenylate kinase
MHHHHHHGGSGMMAYLVFLGPPGAGKGTQSKRIQEKTGIPHISTGDIFRDIVKKENDELGKKIKEIMEKGELVPDELVNEVVKRRLSEKDCEKGFILDGYPRTVAQAEFLDSFLESQNKQLTAAVLFKVPEDVVVQRLTSRLICPKCGRIYNMISLPPKEDELCDDCKVKLVQRDDDKEETVRHRLKVYNEKTQPVIDYYGKKGILKRVDGSQGIDNVVAEVLKIIGWSDK

SEQ ID NO: 1519 - DNA, 699 bp, synthetic construct
  misc_feature 1..699: note = Variant of adenylate kinase
  source 1..699: mol_type = other DNA
atgcaccatcatcaccatcacgggggctccggcatgatggcatatctggtgttcttaggtccgccgggcgcgggaaaaggtacccaatcgaaacgcattcaggaaaagactggcatcccacatattagcacgggcgatatcttccgtgacatcgtcaagaaagagaacgatgaactgggcaagaagattaaagaaatcatggagaaaggtgaactcgttccagatgaactggtgaatgaggtagtaaaacgccgcctgtcggagaaagactgcgaaaaaggctttattttggatggttatccgcgtaccgttgctcaagcggaattcctggacagttttcttgaatcccagaacaaacagttgacagccgccgtgctgttcaaagtccccgaagatgttgttgtgcaacgtttaacctctcgcctgatctgtccgaaatgcgggcgtatctacaatatgatttcactgccaccaaaagaagacgagctgtgtgacgattgcaaagtcaaattagtacagcgtgatgatgataaggaagaaacggttcgtcaccgcctgaaagtctaccttgagaagacccagccggtcattgactattatggcatgaaaggtattctcaaacgcgtagatgggtcgcaaggaatcgacaacgttgttgcagaagtcctgaagattattggttggagcgataagtaatga

SEQ ID NO: 1520 - protein, 231 aa, synthetic construct
  REGION 1..231: note = Variant of adenylate kinase
MHHHHHHGGSGMMAYLVFLGPPGAGKGTQSKRIQEKTGIPHISTGDIFRDIVKKENDELGKKIKEIMEKGELVPDELVNEVVKRRLSEKDCEKGFILDGYPRTVAQAEFLDSFLESQNKQLTAAVLFKVPEDVVVQRLTSRLICPKCGRIYNMISLPPKEDELCDDCKVKLVQRDDDKEETVRHRLKVYLEKTQPVIDYYGMKGILKRVDGSQGIDNVVAEVLKIIGWSDK

SEQ ID NO: 1521 - DNA, 699 bp, synthetic construct
  misc_feature 1..699: note = Variant of adenylate kinase
  source 1..699: mol_type = other DNA
atgcaccatcatcaccatcacgggggctccggcatgatggcatatctggtgttcttaggtccgccgggcgcgggaaaaggtacccaatcgaaacgcattcaggaaaagactggcatcccacatattagcacgggcgatatcttccgtgacatcgtcaagaaaagtaacgatgaactgggcaagaagattaaagaaatcatggagaaaggtgaactcgttccagatgaactggtgaatgaggtagtaaaacgccgcctgtcggagaaagactgcgaaaaaggctttattttggatggttatccgcgtaccgttgctcaagcggaattcctggacagttttcttgaatcccagaacaaacagttgacagccgccgtgctgttcaaagtccccgaagatgttgttgtgcaacgtttaacctctcgcctgatctgtccgaaatgcgggcgtatctacaatatgatttcactgccaccaaaagaagacgagctgtgtgacgattgcaaagtcaaattagtacagcgtgatgatgataaggaagaaacggttcgtcaccgcctgaaagtctaccttgagaagacccagccggtcattgactattatggcaagaaaggtattctcaaacgcgtagatgggtcgcaaggaatcgacaacgttgttgcagaagtcctgaagattattggttggagcgataagtaatga

SEQ ID NO: 1522 - protein, 231 aa, synthetic construct
  REGION 1..231: note = Variant of adenylate kinase
MHHHHHHGGSGMMAYLVFLGPPGAGKGTQSKRIQEKTGIPHISTGDIFRDIVKKSNDELGKKIKEIMEKGELVPDELVNEVVKRRLSEKDCEKGFILDGYPRTVAQAEFLDSFLESQNKQLTAAVLFKVPEDVVVQRLTSRLICPKCGRIYNMISLPPKEDELCDDCKVKLVQRDDDKEETVRHRLKVYLEKTQPVIDYYGKKGILKRVDGSQGIDNVVAEVLKIIGWSDK

SEQ ID NO: 1523 - DNA, 699 bp, synthetic construct
  misc_feature 1..699: note = Variant of adenylate kinase
  source 1..699: mol_type = other DNA
atgcaccatcatcaccatcacgggggctccggcatgatggcatatctggtgttcttaggtccgccgggcgcgggaaaaggtacccaatcgaaacgcattcaggaaaagactggcatcccacatattagcacgggcgatatcttccgtgacctggtcaagaaagagaacgatgaactgggcaagaagattaaagaaatcatggagaaaggtgaactcgttccagatgaactggtgaatgaggtagtaaaacgccgcctgtcggagaaagactgcgaaaaaggctttattttggatggttatccgcgtaccgttgctcaagcggaattcctggacagttttcttgaatcccagaacaaacagttgacagccgccgtgctgttcaaagtccccgaagatgttgttgtgcaacgtttaacctctcgcctgatctgtccgaaatgcgggcgtatctacaatatgatttcactgccaccaaaagaagacgagctgtgtgacgattgcaaagtcaaattagtacagcgtgatgatgataaggaagaaacggttcgtcaccgcctgaaagtctaccttgagaagacccagccggtcattgactattatggcaagaaaggtattctcaaacgcgtagatgggtcgcaaggaatcgacaacgttgttgcagaagtcctgaagattattggttggagcgataagtaatga

SEQ ID NO: 1524 - protein, 231 aa, synthetic construct
  REGION 1..231: note = Variant of adenylate kinase
MHHHHHHGGSGMMAYLVFLGPPGAGKGTQSKRIQEKTGIPHISTGDIFRDLVKKENDELGKKIKEIMEKGELVPDELVNEVVKRRLSEKDCEKGFILDGYPRTVAQAEFLDSFLESQNKQLTAAVLFKVPEDVVVQRLTSRLICPKCGRIYNMISLPPKEDELCDDCKVKLVQRDDDKEETVRHRLKVYLEKTQPVIDYYGKKGILKRVDGSQGIDNVVAEVLKIIGWSDK

SEQ ID NO: 1525 - DNA, 699 bp, synthetic construct
  misc_feature 1..699: note = Variant of adenylate kinase
  source 1..699: mol_type = other DNA
atgcaccatcatcaccatcacgggggctccggcatgatggcatatctggtgttcttaggtccgccgggcgcgggaaaaggtacccaatcgaaacgcattcaggaaaagactggcatcccacatattagcacgggcgatatcttccgtgacatcgtcaagaaagagaacgatgaactgggcaagaagattaaagaaatcatggagaaaggtgaactcgttccagatgaactggtgaatgaggtagtaaaacgccgcctgtcggagaaagactgcgaaaaaggctttattttggatggttatccgcgtaccgttgctcaagcggaattcctggaccagtttcttgaatcccagaacaaacagttgacagccgccgtgctgttcaaagtccccgaagatgttgttgtgcaacgtttaacctctcgcctgatctgtccgaaatgcgggcgtatctacaatatgatttcactgccaccaaaagaagacgagctgtgtgacgattgcaaagtcaaattagtacagcgtgatgatgataaggaagaaacggttcgtcaccgcctgaaagtctaccttgagaagacccagccggtcattgactattatggcaagaaaggtattctcaaacgcgtagatgggtcgcaaggaatcgacaacgttgttgcagaagtcctgaagattattggttggagcgataagtaatga

SEQ ID NO: 1526 - protein, 231 aa, synthetic construct
  REGION 1..231: note = Variant of adenylate kinase
MHHHHHHGGSGMMAYLVFLGPPGAGKGTQSKRIQEKTGIPHISTGDIFRDIVKKENDELGKKIKEIMEKGELVPDELVNEVVKRRLSEKDCEKGFILDGYPRTVAQAEFLDQFLESQNKQLTAAVLFKVPEDVVVQRLTSRLICPKCGRIYNMISLPPKEDELCDDCKVKLVQRDDDKEETVRHRLKVYLEKTQPVIDYYGKKGILKRVDGSQGIDNVVAEVLKIIGWSDK

SEQ ID NO: 1527 - DNA, 699 bp, synthetic construct
  misc_feature 1..699: note = Variant of adenylate kinase
  source 1..699: mol_type = other DNA
atgcaccatcatcaccatcacgggggctccggcatgatggcatatctggtgttcttaggtccgccgggcgcgggaaaaggtacccaatcgaaacgcattcaggaaaagactggcatcccacatattagcacgggcgatatcttccgtgacatcgtcaagaaagagaacgatgaactgggcaagaagattaaagaaatcatggagaaaggtgaactcgttccagatgaactggtgaatgaggtagtaaaacgccgcctgtcggagaaagactgcgaaaaaacttttattttggatggttatccgcgtaccgttgctcaagcggaattcctggacagttttcttgaatcccagaacaaacagttgacagccgccgtgctgttcaaagtccccgaagatgttgttgtgcaacgtttaacctctcgcctgatctgtccgaaatgcgggcgtatctacaatatgatttcactgccaccaaaagaagacgagctgtgtgacgattgcaaagtcaaattagtacagcgtgatgatgataaggaagaaacggttcgtcaccgcctgaaagtctaccttgagaagacccagccggtcattgactattatggcaagaaaggtattctcaaacgcgtagatgggtcgcaaggaatcgacaacgttgttgcagaagtcctgaagattattggttggagcgataagtaatga

SEQ ID NO: 1528 - protein, 231 aa, synthetic construct
  REGION 1..231: note = Variant of adenylate kinase
MHHHHHHGGSGMMAYLVFLGPPGAGKGTQSKRIQEKTGIPHISTGDIFRDIVKKENDELGKKIKEIMEKGELVPDELVNEVVKRRLSEKDCEKTFILDGYPRTVAQAEFLDSFLESQNKQLTAAVLFKVPEDVVVQRLTSRLICPKCGRIYNMISLPPKEDELCDDCKVKLVQRDDDKEETVRHRLKVYLEKTQPVIDYYGKKGILKRVDGSQGIDNVVAEVLKIIGWSDK

SEQ ID NO: 1529 - DNA, 699 bp, synthetic construct
  misc_feature 1..699: note = Variant of adenylate kinase
  source 1..699: mol_type = other DNA
atgcaccatcatcaccatcacgggggctccggcatgatggcatatctggtgttcttaggtccgccgggcgcgggaaaaggtacccaatcgaaacgcattcaggaaaagactggcatcccacatattagcacgggcgatatcttccgtgacatcgtcaagaaagagaacgatgaactgggcaagaagattaaagaagcgatggagaaaggtgaactcgttccagatgaactggtgaatgaggtagtaaaacgccgcctgtcggagaaagactgcgaaaaaggctttattttggatggttatccgcgtaccgttgctcaagcggaattcctggacagttttcttgaatcccagaacaaacagttgacagccgccgtgctgttcaaagtccccgaagatgttgttgtgcaacgtttaacctctcgcctgatctgtccgaaatgcgggcgtatctacaatatgatttcactgccaccaaaagaagacgagctgtgtgacgattgcaaagtcaaattagtacagcgtgatgatgataaggaagaaacggttcgtcaccgcctgaaagtctaccttgagaagacccagccggtcattgactattatggcaagaaaggtattctcaaacgcgtagatgggtcgcaaggaatcgacaacgttgttgcagaagtcctgaagattattggttggagcgataagtaatga

SEQ ID NO: 1530 - protein, 231 aa, synthetic construct
  REGION 1..231: note = Variant of adenylate kinase
MHHHHHHGGSGMMAYLVFLGPPGAGKGTQSKRIQEKTGIPHISTGDIFRDIVKKENDELGKKIKEAMEKGELVPDELVNEVVKRRLSEKDCEKGFILDGYPRTVAQAEFLDSFLESQNKQLTAAVLFKVPEDVVVQRLTSRLICPKCGRIYNMISLPPKEDELCDDCKVKLVQRDDDKEETVRHRLKVYLEKTQPVIDYYGKKGILKRVDGSQGIDNVVAEVLKIIGWSDK

SEQ ID NO: 1531 - DNA, 699 bp, synthetic construct
  misc_feature 1..699: note = Variant of adenylate kinase
  source 1..699: mol_type = other DNA
atgcaccatcatcaccatcacgggggctccggcatgatggcatatctggtgttcttaggtccgccgggcgcgggaaaaggtacccaatcgaaacgcattcaggaaaagactggcatcccacatattagcacgggcgatatcttccgtgacatcgtcaagaaagagaacgatgaactgggcaagaagattaaagaaatcatggagaaaggtgaactcgttccagatgaactggtgaatgaggtagtaaaacgccgcctgtcggagaaagactgcgaaaaaggctttattttggatggttatccgcgtaccgttgctcaagcggaattcctggacagttttcttgaatcccagaacaaacagttgacagccgccgtgctgttcaaagtccccgaagatgttgttgtgcaacgtttaacctctcgcctgatctgtccgaaatgcgggcgtatctacaatatgatttcactgccaccaaaagaagacgagctgtgtgacgattgcaaagtcaaattagtacagcgtgatgatgataaggaagaaacggttcgtcaccgcctgaaagtctaccttgagaagacccagccggtcattgactattatgctaagaaaggtattctcaaacgcgtagatgggtcgcaaggaatcgacaacgttgttgcagaagtcctgaagattattggttggagcgataagtaatga

SEQ ID NO: 1532 - protein, 231 aa, synthetic construct
  REGION 1..231: note = Variant of adenylate kinase
MHHHHHHGGSGMMAYLVFLGPPGAGKGTQSKRIQEKTGIPHISTGDIFRDIVKKENDELGKKIKEIMEKGELVPDELVNEVVKRRLSEKDCEKGFILDGYPRTVAQAEFLDSFLESQNKQLTAAVLFKVPEDVVVQRLTSRLICPKCGRIYNMISLPPKEDELCDDCKVKLVQRDDDKEETVRHRLKVYLEKTQPVIDYYAKKGILKRVDGSQGIDNVVAEVLKIIGWSDK

SEQ ID NO: 1533 - DNA, 699 bp, synthetic construct
  misc_feature 1..699: note = Variant of adenylate kinase
  source 1..699: mol_type = other DNA
atgcaccatcatcaccatcacgggggctccggcatgatggcatatctggtgttcttaggtccgccgggcgcgggaaaaggtacccaatcgaaacgcattcaggaaaagactggcatcccacatattagcacgggcgatatcttccgtgacatcgtcaagaaagagaacgatgaactgggcaagaagattaaagaaatcatggagaaaggtgaactcgttccagatgaactggtgaatgaggtagtaaaacgccgcctgtcggagaaagactgcgaaaaaggctttattttggatggttatccgcgtaccgttgctcaagcggaattcctggacagttttcttgaatcccagaacaaacagttgacagccgccgtgctgttcaaagtccccgaagatgttgttgtgcaacgtttaacctctcgcctgatctgtccgaaatgcgggcgtatctacaatatgatttcactgccaccaaaagaagacgagctgtgtgacgattgcaaagtcaaattagtacagcgtgatgatgataaggaagaaacggttcgtcaccgcctgaaagtctaccttgagaagacccagccggtcattgactattataagaagaaaggtattctcaaacgcgtagatgggtcgcaaggaatcgacaacgttgttgcagaagtcctgaagattattggttggagcgataagtaatga

SEQ ID NO: 1534 - protein, 231 aa, synthetic construct
  REGION 1..231: note = Variant of adenylate kinase
MHHHHHHGGSGMMAYLVFLGPPGAGKGTQSKRIQEKTGIPHISTGDIFRDIVKKENDELGKKIKEIMEKGELVPDELVNEVVKRRLSEKDCEKGFILDGYPRTVAQAEFLDSFLESQNKQLTAAVLFKVPEDVVVQRLTSRLICPKCGRIYNMISLPPKEDELCDDCKVKLVQRDDDKEETVRHRLKVYLEKTQPVIDYYKKKGILKRVDGSQGIDNVVAEVLKIIGWSDK

SEQ ID NO: 1535 - DNA, 699 bp, synthetic construct
  misc_feature 1..699: note = Variant of adenylate kinase
  source 1..699: mol_type = other DNA
atgcaccatcatcaccatcacgggggctccggcatgatggcatatctggtgttcttaggtccgccgggcgcgggaaaaggtacccaatcgaaacgcattcaggaaaagactggcatcccacatattagcacgggcgatatcttccgtgacatcgtcaagaaagagaacgatgaactgggcaagaagattaaagaaatcatggagaaaggtgaactcgttccagatgaactggtgaatgaggtagtaaaacgccgcctgtcggagaaagactgcgaaaaaggctttattttggatggttatccgcgtaccgttgctcaagcggaattcctggacagttttcttgaatcccagaacaaacagttgacagccgccgtgctgttcaaagtccccgaagatgttgttgtgcaacgtttaacctctcgcctgatctgtccgaaatgcgggcgtatctacaatatgatttcactgccaccaaaagaagacgagctgtgtgacgattgcaaagtcaaattagtacagcgtgatgatgataaggaagaaacggttcgtcaccgcctgaaagtctaccttgagaagacccagccggtcattgactattatttgaagaaaggtattctcaaacgcgtagatgggtcgcaaggaatcgacaacgttgttgcagaagtcctgaagattattggttggagcgataagtaatga

SEQ ID NO: 1536 - protein, 231 aa, synthetic construct
  REGION 1..231: note = Variant of adenylate kinase
MHHHHHHGGSGMMAYLVFLGPPGAGKGTQSKRIQEKTGIPHISTGDIFRDIVKKENDELGKKIKEIMEKGELVPDELVNEVVKRRLSEKDCEKGFILDGYPRTVAQAEFLDSFLESQNKQLTAAVLFKVPEDVVVQRLTSRLICPKCGRIYNMISLPPKEDELCDDCKVKLVQRDDDKEETVRHRLKVYLEKTQPVIDYYLKKGILKRVDGSQGIDNVVAEVLKIIGWSDK

SEQ ID NO: 1537 - DNA, 699 bp, synthetic construct
  misc_feature 1..699: note = Variant of adenylate kinase
  source 1..699: mol_type = other DNA
atgcaccatcatcaccatcacgggggctccggcatgatggcatatctggtgttcttaggtccgccgggcgcgggaaaaggtacccaatcgaaacgcattcaggaaaagactggcatcccacatattagcacgggcgatatcttccgtgacatcgtcaagaaagagaacgatgaactgggcaagaagattaaagaacggatggagaaaggtgaactcgttccagatgaactggtgaatgaggtagtaaaacgccgcctgtcggagaaagactgcgaaaaaggctttattttggatggttatccgcgtaccgttgctcaagcggaattcctggacagttttcttgaatcccagaacaaacagttgacagccgccgtgctgttcaaagtccccgaagatgttgttgtgcaacgtttaacctctcgcctgatctgtccgaaatgcgggcgtatctacaatatgatttcactgccaccaaaagaagacgagctgtgtgacgattgcaaagtcaaattagtacagcgtgatgatgataaggaagaaacggttcgtcaccgcctgaaagtctaccttgagaagacccagccggtcattgactattatggcaagaaaggtattctcaaacgcgtagatgggtcgcaaggaatcgacaacgttgttgcagaagtcctgaagattattggttggagcgataagtaatga

SEQ ID NO: 1538 - protein, 231 aa, synthetic construct
  REGION 1..231: note = Variant of adenylate kinase
MHHHHHHGGSGMMAYLVFLGPPGAGKGTQSKRIQEKTGIPHISTGDIFRDIVKKENDELGKKIKERMEKGELVPDELVNEVVKRRLSEKDCEKGFILDGYPRTVAQAEFLDSFLESQNKQLTAAVLFKVPEDVVVQRLTSRLICPKCGRIYNMISLPPKEDELCDDCKVKLVQRDDDKEETVRHRLKVYLEKTQPVIDYYGKKGILKRVDGSQGIDNVVAEVLKIIGWSDK

SEQ ID NO: 1539 - DNA, 699 bp, synthetic construct
  misc_feature 1..699: note = Variant of adenylate kinase
  source 1..699: mol_type = other DNA
atgcaccatcatcaccatcacgggggctccggcatgatggcatatctggtgttcttaggtccgccgggcgcgggaaaaggtacccaatcgaaacgcattcaggaaaagactggcatcccacatattagcacgggcgatatcttccgtgacatcgtcaagaaagagaacgatgaactgggcaagaagattaaagaaatcatggagaaaggtgaactcgttccagatgaactggtgaatgaggtagtaaaacgccgcctgtcggagaaagactgcgaaaaaggctttattttggatggttatccgcgtaccgttgctcaagcggaattcctggacagttttcttgaatcccagaacaaacagttgacagccgccgtgctgttcaatgtccccgaagatgttgttgtgcaacgtttaacctctcgcctgatctgtccgaaatgcgggcgtatctacaatatgatttcactgccaccaaaagaagacgagctgtgtgacgattgcaaagtcaaattagtacagcgtgatgatgataaggaagaaacggttcgtcaccgcctgaaagtctaccttgagaagacccagccggtcattgactattatggcaagaaaggtattctcaaacgcgtagatgggtcgcaaggaatcgacaacgttgttgcagaagtcctgaagattattggttggagcgataagtaatga

SEQ ID NO: 1540 - protein, 231 aa, synthetic construct
  REGION 1..231: note = Variant of adenylate kinase
MHHHHHHGGSGMMAYLVFLGPPGAGKGTQSKRIQEKTGIPHISTGDIFRDIVKKENDELGKKIKEIMEKGELVPDELVNEVVKRRLSEKDCEKGFILDGYPRTVAQAEFLDSFLESQNKQLTAAVLFNVPEDVVVQRLTSRLICPKCGRIYNMISLPPKEDELCDDCKVKLVQRDDDKEETVRHRLKVYLEKTQPVIDYYGKKGILKRVDGSQGIDNVVAEVLKIIGWSDK

SEQ ID NO: 1541 - DNA, 699 bp, synthetic construct
  misc_feature 1..699: note = Variant of adenylate kinase
  source 1..699: mol_type = other DNA
atgcaccatcatcaccatcacgggggctccggcatgatggcatatctggtgttcttaggtccgccgggcgcgggaaaaggtacccaatcgaaacgcattcaggaaaagactggcatcccacatattagcacgggcgatatcttccgtgacatcgtcaagaaagagaacgatgaactgggcaagaagattaaagaaatcatggagaaaggtgaactcgttccagatgaactggtgaatgaggtagtaaaacgccgcctgtcggagaaagactgcgaaaaaggctttattttggatggttatccgcgtaccgttgctcaagcggaattcctggacagttttcttgaatcccagaacaaacagttgacagccgccgtgctgttcaaagtccccgaagatgttgttgtgcaacgtttaacctctcgcctgatctgtccgaaatgcgggcgtatctacaatatgatttcactgccaccaaaagaagacgagctgtgtgacgattgcaaagtcaaattagtacagcgtgatgatgataaggaagaaacggttcgtcaccgcctgaaagtctaccttgagaagacccagccggtcattgactattatggcaagaaaggtattctcaaacgcgtagatgggtcgcaactgatcgacaacgttgttgcagaagtcctgaagattattggttggagcgataagtaatga

SEQ ID NO: 1542 - protein, 231 aa, synthetic construct
  REGION 1..231: note = Variant of adenylate kinase
MHHHHHHGGSGMMAYLVFLGPPGAGKGTQSKRIQEKTGIPHISTGDIFRDIVKKENDELGKKIKEIMEKGELVPDELVNEVVKRRLSEKDCEKGFILDGYPRTVAQAEFLDSFLESQNKQLTAAVLFKVPEDVVVQRLTSRLICPKCGRIYNMISLPPKEDELCDDCKVKLVQRDDDKEETVRHRLKVYLEKTQPVIDYYGKKGILKRVDGSQLIDNVVAEVLKIIGWSDK

SEQ ID NO: 1543 - DNA, 699 bp, synthetic construct
  misc_feature 1..699: note = Variant of adenylate kinase
  source 1..699: mol_type = other DNA
atgcaccatcatcaccatcacgggggctccggcatgatggcatatctggtgttcttaggtccgccgggcgcgggaaaaggtacccaatcgaaacgcattcaggaaaagactggcatcccacatattagcacgggcgatatcttccgtgacatcgtcaagaaagagaacgatgaactgggcaagaagattaaagaaatcatggagaaaggtgaactcgttccagatgaactggtgaatgaggtagtaaaacgccgcctgtcggagaaagactgcgaaaaaggctttattttggatggttatccgcgtaccgttgctcaagcggaattcctggacagttttcttgaatcccagaacaaacagttgacagccgccgtgagtttcaaagtccccgaagatgttgttgtgcaacgtttaacctctcgcctgatctgtccgaaatgcgggcgtatctacaatatgatttcactgccaccaaaagaagacgagctgtgtgacgattgcaaagtcaaattagtacagcgtgatgatgataaggaagaaacggttcgtcaccgcctgaaagtctaccttgagaagacccagccggtcattgactattatggcaagaaaggtattctcaaacgcgtagatgggtcgcaaggaatcgacaacgttgttgcagaagtcctgaagattattggttggagcgataagtaatga

SEQ ID NO: 1544 - protein, 231 aa, synthetic construct
  REGION 1..231: note = Variant of adenylate kinase
MHHHHHHGGSGMMAYLVFLGPPGAGKGTQSKRIQEKTGIPHISTGDIFRDIVKKENDELGKKIKEIMEKGELVPDELVNEVVKRRLSEKDCEKGFILDGYPRTVAQAEFLDSFLESQNKQLTAAVSFKVPEDVVVQRLTSRLICPKCGRIYNMISLPPKEDELCDDCKVKLVQRDDDKEETVRHRLKVYLEKTQPVIDYYGKKGILKRVDGSQGIDNVVAEVLKIIGWSDK

SEQ ID NO: 1545 - DNA, 699 bp, synthetic construct
  misc_feature 1..699: note = Variant of adenylate kinase
  source 1..699: mol_type = other DNA
atgcaccatcatcaccatcacgggggctccggcatgatggcatatctggtgttcttaggtccgccgggcgcgggaaaaggtacccaatcgaaacgcattcaggaaaagactggcatcccacatattagcacgggcgatatcttccgtgacatcgtcaagaaagaggaggatgaactgggcaagaagattaaagaaatcatggagaaaggtgaactcgttccagatgaactggtgaatgaggtagtaaaacgccgcctgtcggagaaagactgcgaaaaaggctttattttggatggttatccgcgtaccgttgctcaagcggaattcctggacagttttcttgaatcccagaacaaacagttgacagccgccgtgctgttcaaagtccccgaagatgttgttgtgcaacgtttaacctctcgcctgatctgtccgaaatgcgggcgtatctacaatatgatttcactgccaccaaaagaagacgagctgtgtgacgattgcaaagtcaaattagtacagcgtgatgatgataaggaagaaacggttcgtcaccgcctgaaagtctaccttgagaagacccagccggtcattgactattatggcaagaaaggtattctcaaacgcgtagatgggtcgcaaggaatcgacaacgttgttgcagaagtcctgaagattattggttggagcgataagtaatga

SEQ ID NO: 1546 - protein, 231 aa, synthetic construct
  REGION 1..231: note = Variant of adenylate kinase
MHHHHHHGGSGMMAYLVFLGPPGAGKGTQSKRIQEKTGIPHISTGDIFRDIVKKEEDELGKKIKEIMEKGELVPDELVNEVVKRRLSEKDCEKGFILDGYPRTVAQAEFLDSFLESQNKQLTAAVLFKVPEDVVVQRLTSRLICPKCGRIYNMISLPPKEDELCDDCKVKLVQRDDDKEETVRHRLKVYLEKTQPVIDYYGKKGILKRVDGSQGIDNVVAEVLKIIGWSDK

SEQ ID NO: 1547 - DNA, 699 bp, synthetic construct
  misc_feature 1..699: note = Variant of adenylate kinase
  source 1..699: mol_type = other DNA
atgcaccatcatcaccatcacgggggctccggcatgatggcatatctggtgttcttaggtccgccgggcgcgggaaaaggtacccaatcgaaacgcattcaggaaaagactggcatcccacatattagcacgggcgatatcttccgtgacatcgtcaagaaagagaacgatgaactgggcaagaagattaaagaaatcatggagaaaggtgaactcgttccagatgaactggtgaatgaggtagtaaaacgccgcctgtcggagaaagactgcgaaaaaggctttattttggatggttatccgcgtaccgttgctcaagcggaattcctggacagttttcttgaatcccagaacaaacagttgacagccgccgtgctgttcaaagtccccgaagatgttgttgtgcaacgtttaacctctcgcctgatctgtccgaaatgcgggcgtatctacaatatgatttcactgccaccaaaagaagacgagctgtgtgacgattgcaaagtcaaattagtacagcgtgatgatgataagattgaaacggttcgtcaccgcctgaaagtctaccttgagaagacccagccggtcattgactattatggcaagaaaggtattctcaaacgcgtagatgggtcgcaaggaatcgacaacgttgttgcagaagtcctgaagattattggttggagcgataagtaatga

SEQ ID NO: 1548 - protein, 231 aa, synthetic construct
  REGION 1..231: note = Variant of adenylate kinase
MHHHHHHGGSGMMAYLVFLGPPGAGKGTQSKRIQEKTGIPHISTGDIFRDIVKKENDELGKKIKEIMEKGELVPDELVNEVVKRRLSEKDCEKGFILDGYPRTVAQAEFLDSFLESQNKQLTAAVLFKVPEDVVVQRLTSRLICPKCGRIYNMISLPPKEDELCDDCKVKLVQRDDDKIETVRHRLKVYLEKTQPVIDYYGKKGILKRVDGSQGIDNVVAEVLKIIGWSDK

SEQ ID NO: 1549 - DNA, 699 bp, synthetic construct
  misc_feature 1..699: note = Variant of adenylate kinase
  source 1..699: mol_type = other DNA
atgcaccatcatcaccatcacgggggctccggcatgatggcatatctggtgttcttaggtccgccgggcgcgggaaaaggtacccaatcgaaacgcattcaggaaaagactggcatcccacatattagcacgggcgatatcttccgtgacatcgtcaagaaagagaacgatgaactgggcaagaagattaaagaaatcatggagaaaggtgaactcgttccagatgaactggtgaatgaggtagtaaaacgccgcctgtcggagaaagactgcgaaaaaggctttattttggatggttatccgcgtaccgttgctcaagcggaattcctggacagttttcttgaatcccagaacaaacagttgacagccgccgtgctgttcaaagtccccgaagatgttgttgtgcaacgtttaacctctcgcctgatctgtccgaaatgcgggcgtatctacaatatgatttcactgccaccaaaagaagacgagctgtgtgacgattgcaaagtcaaattagtacagcgtgatgatgataaggaagaaacggttcgtcaccgcctgaaagtctaccttgagaagacccagccggtcattgactattatggcaagaaaggtattctcaaacgcgtagatgggtcgcaaggaatctcgaacgttgttgcagaagtcctgaagattattggttggagcgataagtaatga

SEQ ID NO: 1550 - protein, 231 aa, synthetic construct
  REGION 1..231: note = Variant of adenylate kinase
MHHHHHHGGSGMMAYLVFLGPPGAGKGTQSKRIQEKTGIPHISTGDIFRDIVKKENDELGKKIKEIMEKGELVPDELVNEVVKRRLSEKDCEKGFILDGYPRTVAQAEFLDSFLESQNKQLTAAVLFKVPEDVVVQRLTSRLICPKCGRIYNMISLPPKEDELCDDCKVKLVQRDDDKEETVRHRLKVYLEKTQPVIDYYGKKGILKRVDGSQGISNVVAEVLKIIGWSDK

SEQ ID NO: 1551 - DNA, 699 bp, synthetic construct
  misc_feature 1..699: note = Variant of adenylate kinase
  source 1..699: mol_type = other DNA
atgcaccatcatcaccatcacgggggctccggcatgatggcatatctggtgttcttaggtccgccgggcgcgggaaaaggtacccaatcgaaacgcattcaggaaaagactggcatcccacatattagcacgggcgatatcttccgtgacatcgtcaagaaagagaacgatgaactgggcaagaagattaaagaaatcatggagaaaggtgaactcgttccagatcctctggtgaatgaggtagtaaaacgccgcctgtcggagaaagactgcgaaaaaggctttattttggatggttatccgcgtaccgttgctcaagcggaattcctggacagttttcttgaatcccagaacaaacagttgacagccgccgtgctgttcaaagtccccgaagatgttgttgtgcaacgtttaacctctcgcctgatctgtccgaaatgcgggcgtatctacaatatgatttcactgccaccaaaagaagacgagctgtgtgacgattgcaaagtcaaattagtacagcgtgatgatgataaggaagaaacggttcgtcaccgcctgaaagtctaccttgagaagacccagccggtcattgactattatggcaagaaaggtattctcaaacgcgtagatgggtcgcaaggaatcgacaacgttgttgcagaagtcctgaagattattggttggagcgataagtaatga

SEQ ID NO: 1552 - protein, 231 aa, synthetic construct
  REGION 1..231: note = Variant of adenylate kinase
MHHHHHHGGSGMMAYLVFLGPPGAGKGTQSKRIQEKTGIPHISTGDIFRDIVKKENDELGKKIKEIMEKGELVPDPLVNEVVKRRLSEKDCEKGFILDGYPRTVAQAEFLDSFLESQNKQLTAAVLFKVPEDVVVQRLTSRLICPKCGRIYNMISLPPKEDELCDDCKVKLVQRDDDKEETVRHRLKVYLEKTQPVIDYYGKKGILKRVDGSQGIDNVVAEVLKIIGWSDK

SEQ ID NO: 1553 - DNA, 699 bp, synthetic construct
  misc_feature 1..699: note = Variant of adenylate kinase
  source 1..699: mol_type = other DNA
atgcaccatcatcaccatcacgggggctccggcatgatggcatatctggtgttcttaggtccgccgggcgcgggaaaaggtacccaatcgaaacgcattcaggaaaagactggcatcccacatattagcacgggcgatatcttccgtgacatcgtcaagaaagagaacgatgaactgggcaagaagattaaagaaatcatggagtatggtgaactcgttccagatgaactggtgaatgaggtagtaaaacgccgcctgtcggagaaagactgcgaaaaaggctttattttggatggttatccgcgtaccgttgctcaagcggaattcctggacagttttcttgaatcccagaacaaacagttgacagccgccgtgctgttcaaagtccccgaagatgttgttgtgcaacgtttaacctctcgcctgatctgtccgaaatgcgggcgtatctacaatatgatttcactgccaccaaaagaagacgagctgtgtgacgattgcaaagtcaaattagtacagcgtgatgatgataaggaagaaacggttcgtcaccgcctgaaagtctaccttgagaagacccagccggtcattgactattatggcaagaaaggtattctcaaacgcgtagatgggtcgcaaggaatcgacaacgttgttgcagaagtcctgaagattattggttggagcgataagtaatga

SEQ ID NO: 1554 - protein, 231 aa, synthetic construct
  REGION 1..231: note = Variant of adenylate kinase
MHHHHHHGGSGMMAYLVFLGPPGAGKGTQSKRIQEKTGIPHISTGDIFRDIVKKENDELGKKIKEIMEYGELVPDELVNEVVKRRLSEKDCEKGFILDGYPRTVAQAEFLDSFLESQNKQLTAAVLFKVPEDVVVQRLTSRLICPKCGRIYNMISLPPKEDELCDDCKVKLVQRDDDKEETVRHRLKVYLEKTQPVIDYYGKKGILKRVDGSQGIDNVVAEVLKIIGWSDK

SEQ ID NO: 1555 - DNA, 699 bp, synthetic construct
  misc_feature 1..699: note = Variant of adenylate kinase
  source 1..699: mol_type = other DNA
atgcaccatcatcaccatcacgggggctccggcatgatggcatatctggtgttcttaggtccgccgggcgcgggaaaaggtacccaatcgaaacgcattcaggaaaagactggcatcccacatattagcacgggcgatatcttccgtgacatcgtcaagaaagagaacgatgaactgggcaagaagattaaagaaatcatggagaaaggtgaactcgttccagatgaactggtgaatgaggtagtaaaacgccgcctgtcggagaaagactgcgaaaaaggctttattttggatggttatccgcgtaccgttgctcaagcggaattcctggacagttttcttgggtcccagaacaaacagttgacagccgccgtgctgttcaaagtccccgaagatgttgttgtgcaacgtttaacctctcgcctgatctgtccgaaatgcgggcgtatctacaatatgatttcactgccaccaaaagaagacgagctgtgtgacgattgcaaagtcaaattagtacagcgtgatgatgataaggaagaaacggttcgtcaccgcctgaaagtctaccttgagaagacccagccggtcattgactattatggcaagaaaggtattctcaaacgcgtagatgggtcgcaaggaatcgacaacgttgttgcagaagtcctgaagattattggttggagcgataagtaatga

SEQ ID NO: 1556 - protein, 231 aa, synthetic construct
  REGION 1..231: note = Variant of adenylate kinase
MHHHHHHGGSGMMAYLVFLGPPGAGKGTQSKRIQEKTGIPHISTGDIFRDIVKKENDELGKKIKEIMEKGELVPDELVNEVVKRRLSEKDCEKGFILDGYPRTVAQAEFLDSFLGSQNKQLTAAVLFKVPEDVVVQRLTSRLICPKCGRIYNMISLPPKEDELCDDCKVKLVQRDDDKEETVRHRLKVYLEKTQPVIDYYGKKGILKRVDGSQGIDNVVAEVLKIIGWSDK

SEQ ID NO: 1557 - DNA, 699 bp, synthetic construct
  misc_feature 1..699: note = Variant of adenylate kinase
  source 1..699: mol_type = other DNA
atgcaccatcatcaccatcacgggggctccggcatgatggcatatctggtgttcttaggtccgccgggcgcgggaaaaggtacccaatcgaaacgcattcaggaaaagactggcatcccacatattagcacgggcgatatcttccgtgacatcgtcaagaaagagaacgatgaactgggcaagaagattaaagaaatcatggagaaaggtgaactcgttccagatgaactggtgaatgaggtagtaaaacgccgcctgtcggagaaagactgcgaaaaaggctttattttggatggttatccgcgtaccgttgctcaagcggaattcctggacagttttcttgaatcccagaacaaacagttgacagccgccgtgctgttcaaagtccccgaagatgttgttgtgcaacgtttaacctctcgcctgatctgtccgaaatgcgggcgtatctacaatatgatttcactgccaccaaaagaagacgagctgtgtgactgttgcaaagtcaaattagtacagcgtgatgatgataaggaagaaacggttcgtcaccgcctgaaagtctaccttgagaagacccagccggtcattgactattatggcaagaaaggtattctcaaacgcgtagatgggtcgcaaggaatcgacaacgttgttgcagaagtcctgaagattattggttggagcgataagtaatga

SEQ ID NO: 1558 - protein, 231 aa, synthetic construct
  REGION 1..231: note = Variant of adenylate kinase
MHHHHHHGGSGMMAYLVFLGPPGAGKGTQSKRIQEKTGIPHISTGDIFRDIVKKENDELGKKIKEIMEKGELVPDELVNEVVKRRLSEKDCEKGFILDGYPRTVAQAEFLDSFLESQNKQLTAAVLFKVPEDVVVQRLTSRLICPKCGRIYNMISLPPKEDELCDCCKVKLVQRDDDKEETVRHRLKVYLEKTQPVIDYYGKKGILKRVDGSQGIDNVVAEVLKIIGWSDK

SEQ ID NO: 1559 - DNA, 699 bp, synthetic construct
  misc_feature 1..699: note = Variant of adenylate kinase
  source 1..699: mol_type = other DNA
atgcaccatcatcaccatcacgggggctccggcatgatggcatatctggtgttcttaggtccgccgggcgcgggaaaaggtacccaatcgaaacgcattcaggaaaagactggcatcccacatattagcacgggcgatatcttccgtgacatcgtcaagaaagagaacgatgaactgggcaagaagattaaagaaatcatggagaaaggtgaactcgttccagatgaactggtgaatgaggtagtaaaacgccgcctgtcggagaaagactgcgaaaaaggctttattttggatggttatccgcgtaccgttgctcaagcggaattcctggacagttttcttgaatcccagaacaaattgttgacagccgccgtgctgttcaaagtccccgaagatgttgttgtgcaacgtttaacctctcgcctgatctgtccgaaatgcgggcgtatctacaatatgatttcactgccaccaaaagaagacgagctgtgtgacgattgcaaagtcaaattagtacagcgtgatgatgataaggaagaaacggttcgtcaccgcctgaaagtctaccttgagaagacccagccggtcattgactattatggcaagaaaggtattctcaaacgcgtagatgggtcgcaaggaatcgacaacgttgttgcagaagtcctgaagattattggttggagcgataagtaatga

SEQ ID NO: 1560 - protein, 231 aa, synthetic construct
  REGION 1..231: note = Variant of adenylate kinase
MHHHHHHGGSGMMAYLVFLGPPGAGKGTQSKRIQEKTGIPHISTGDIFRDIVKKENDELGKKIKEIMEKGELVPDELVNEVVKRRLSEKDCEKGFILDGYPRTVAQAEFLDSFLESQNKLLTAAVLFKVPEDVVVQRLTSRLICPKCGRIYNMISLPPKEDELCDDCKVKLVQRDDDKEETVRHRLKVYLEKTQPVIDYYGKKGILKRVDGSQGIDNVVAEVLKIIGWSDK

SEQ ID NO: 1561 - DNA, 699 bp, synthetic construct
  misc_feature 1..699: note = Variant of adenylate kinase
  source 1..699: mol_type = other DNA
atgcaccatcatcaccatcacgggggctccggcatgatggcatatctggtgttcttaggtccgccgggcgcgggaaaaggtacccaatcgaaacgcattcaggaaaagactggcatcccacatattagcacgggcgatatcttccgtgacatcgtcaagaaagagaacgatgaactgggcaagaagattaaagaaatcatggagaaaggtgaactcgttccagatgaactggtgaatgaggtagtaaaacgccgcctgtcggagaaagactgcgaaaaaggctttattttggatggttatccgcgtaccgttgctcaagcggaattcctggacagttttcttgaattgcagaacaaacagttgacagccgccgtgctgttcaaagtccccgaagatgttgttgtgcaacgtttaacctctcgcctgatctgtccgaaatgcgggcgtatctacaatatgatttcactgccaccaaaagaagacgagctgtgtgacgattgcaaagtcaaattagtacagcgtgatgatgataaggaagaaacggttcgtcaccgcctgaaagtctaccttgagaagacccagccggtcattgactattatggcaagaaaggtattctcaaacgcgtagatgggtcgcaaggaatcgacaacgttgttgcagaagtcctgaagattattggttggagcgataagtaatga

SEQ ID NO: 1562 - protein, 231 aa, synthetic construct
  REGION 1..231: note = Variant of adenylate kinase
MHHHHHHGGSGMMAYLVFLGPPGAGKGTQSKRIQEKTGIPHISTGDIFRDIVKKENDELGKKIKEIMEKGELVPDELVNEVVKRRLSEKDCEKGFILDGYPRTVAQAEFLDSFLELQNKQLTAAVLFKVPEDVVVQRLTSRLICPKCGRIYNMISLPPKEDELCDDCKVKLVQRDDDKEETVRHRLKVYLEKTQPVIDYYGKKGILKRVDGSQGIDNVVAEVLKIIGWSDK

SEQ ID NO: 1563 - DNA, 699 bp, synthetic construct
  misc_feature 1..699: note = Variant of adenylate kinase
  source 1..699: mol_type = other DNA
atgcaccatcatcaccatcacgggggctccggcatgatggcatatctggtgttcttaggtccgccgggcgcgggaaaaggtacccaatcgaaacgcattcaggaaaagactggcatcccacatattagcacgggcgatatcttccgtgacatcgtcaagaaagagaacgatgaactgggcaagaagattaaagaaatcatggagaaaggtgaactcgttccagatgaactggtgaatgaggtagtaaaacgccgcctgtcggagaaagactgcgaaaaaggctttattttggatggttatccgcgtaccgttgctcaagcggtgttcctggacagttttcttgaatcccagaacaaacagttgacagccgccgtgctgttcaaagtccccgaagatgttgttgtgcaacgtttaacctctcgcctgatctgtccgaaatgcgggcgtatctacaatatgatttcactgccaccaaaagaagacgagctgtgtgacgattgcaaagtcaaattagtacagcgtgatgatgataaggaagaaacggttcgtcaccgcctgaaagtctaccttgagaagacccagccggtcattgactattatggcaagaaaggtattctcaaacgcgtagatgggtcgcaaggaatcgacaacgttgttgcagaagtcctgaagattattggttggagcgataagtaatga

SEQ ID NO: 1564 - protein, 231 aa, synthetic construct
  REGION 1..231: note = Variant of adenylate kinase
MHHHHHHGGSGMMAYLVFLGPPGAGKGTQSKRIQEKTGIPHISTGDIFRDIVKKENDELGKKIKEIMEKGELVPDELVNEVVKRRLSEKDCEKGFILDGYPRTVAQAVFLDSFLESQNKQLTAAVLFKVPEDVVVQRLTSRLICPKCGRIYNMISLPPKEDELCDDCKVKLVQRDDDKEETVRHRLKVYLEKTQPVIDYYGKKGILKRVDGSQGIDNVVAEVLKIIGWSDK

SEQ ID NO: 1565 - DNA, 699 bp, synthetic construct
  misc_feature 1..699: note = Variant of adenylate kinase
  source 1..699: mol_type = other DNA
atgcaccatcatcaccatcacgggggctccggcatgatggcatatctggtgttcttaggtccgccgggcgcgggaaaaggtacccaatcgaaacgcattcaggaaaagactggcatcccacatattagcacgggcgatatcttccgtgacatcgtcaagaaagagaacgatgaactgggcaagaagattaaagaaatcatggagaaaggtgaactcgttccagatgaactggtgaatgaggtagtaaaacgccgcctgtcggagaaagactgcgaaaaaggctttattttggatggttatccgcgtaccgttgctcaagcggaattcctggacagttttcttgaatcccagaacaaacagttgacagccgccgtgctgttcaaagtccccgaagatgttgttgtgcaacgtttaacctctcgcctgatctgtccgaaatgcgggcgtatctacaatatgatttcactgccaccaaaagaagacgagctgtgtgacgattgcaaagtcaaattagtacagcgtgatgatgataaggaagaaacggttcgtcaccgcctgaaagtctaccttgagaagacccagccggtcattgactattatggcaaggagggtattctcaaacgcgtagatgggtcgcaaggaatcgacaacgttgttgcagaagtcctgaagattattggttggagcgataagtaatga

SEQ ID NO: 1566 - protein, 231 aa, synthetic construct
  REGION 1..231: note = Variant of adenylate kinase
MHHHHHHGGSGMMAYLVFLGPPGAGKGTQSKRIQEKTGIPHISTGDIFRDIVKKENDELGKKIKEIMEKGELVPDELVNEVVKRRLSEKDCEKGFILDGYPRTVAQAEFLDSFLESQNKQLTAAVLFKVPEDVVVQRLTSRLICPKCGRIYNMISLPPKEDELCDDCKVKLVQRDDDKEETVRHRLKVYLEKTQPVIDYYGKEGILKRVDGSQGIDNVVAEVLKIIGWSDK

SEQ ID NO: 1567 - DNA, 699 bp, synthetic construct
  misc_feature 1..699: note = Variant of adenylate kinase
  source 1..699: mol_type = other DNA
atgcaccatcatcaccatcacgggggctccggcatgatggcatatctggtgttcttaggtccgccgggcgcgggaaaaggtacccaatcgaaacgcattcaggaaaagactggcatcccacatattagcacgggcgatatcttccgtgacatcgtcaagaaagagaacgatgaactgggcaagaagattaaagaaatcatggagaaaggtgaactcgttccagatgaactggtgaatgaggtagtaaaacgccgcctgtcggagaaagactgcgaaaaaggctttattttggatggttatccgcgtaccgttgctcaagcggaattcctggacagttttcttgaatcccagaacaaacagttgacagccgccgtgctgttcaaagtccccgaagatgttgttgtgcaacgtttaacctctcgcctgatctgtccgaaatgcgggcgtatctacaatatgatttcactgccaccaaaagaagacgagctgtgtgacgattgcaaagtcaaattagtacagcgtgatgatgataaggaagaaacggttcgtcaccgcctgaaagtctaccttgagaagacctttccggtcattgactattatggcaagaaaggtattctcaaacgcgtagatgggtcgcaaggaatcgacaacgttgttgcagaagtcctgaagattattggttggagcgataagtaatga

SEQ ID NO: 1568 - protein, 231 aa, synthetic construct
  REGION 1..231: note = Variant of adenylate kinase
MHHHHHHGGSGMMAYLVFLGPPGAGKGTQSKRIQEKTGIPHISTGDIFRDIVKKENDELGKKIKEIMEKGELVPDELVNEVVKRRLSEKDCEKGFILDGYPRTVAQAEFLDSFLESQNKQLTAAVLFKVPEDVVVQRLTSRLICPKCGRIYNMISLPPKEDELCDDCKVKLVQRDDDKEETVRHRLKVYLEKTFPVIDYYGKKGILKRVDGSQGIDNVVAEVLKIIGWSDK

SEQ ID NO: 1569 - DNA, 699 bp, synthetic construct
  misc_feature 1..699: note = Variant of adenylate kinase
  source 1..699: mol_type = other DNA
atgcaccatcatcaccatcacgggggctccggcatgatggcatatctggtgttcttaggtccgccgggcgcgggaaaaggtacccaatcgaaacgcattcaggaaaagactggcatcccacatattagcacgggcgatatcttccgtgacatcgtcaagaaagagaacgatgaactgggcaagaagattaaagaaatcatggagaaaggtgaactcgttccagatgaactggtgaatgaggtagtaaaacgccgcctgtcggagaaagactgcgaaaaaggctttattttggatggttatccgcgtaccgttgctcaagcggaattcctggacagttttcttgaatcccagaacaaacagttgacagccgccgtgctgttcaaagtccccgaagatgttgttgtgcaacgtatgacctctcgcctgatctgtccgaaatgcgggcgtatctacaatatgatttcactgccaccaaaagaagacgagctgtgtgacgattgcaaagtcaaattagtacagcgtgatgatgataaggaagaaacggttcgtcaccgcctgaaagtctaccttgagaagacccagccggtcattgactattatggcaagaaaggtattctcaaacgcgtagatgggtcgcaaggaatcgacaacgttgttgcagaagtcctgaagattattggttggagcgataagtaatga

SEQ ID NO: 1570 - protein, 231 aa, synthetic construct
  REGION 1..231: note = Variant of adenylate kinase
MHHHHHHGGSGMMAYLVFLGPPGAGKGTQSKRIQEKTGIPHISTGDIFRDIVKKENDELGKKIKEIMEKGELVPDELVNEVVKRRLSEKDCEKGFILDGYPRTVAQAEFLDSFLESQNKQLTAAVLFKVPEDVVVQRMTSRLICPKCGRIYNMISLPPKEDELCDDCKVKLVQRDDDKEETVRHRLKVYLEKTQPVIDYYGKKGILKRVDGSQGIDNVVAEVLKIIGWSDK

SEQ ID NO: 1571 - DNA, 699 bp, synthetic construct
  misc_feature 1..699: note = Variant of adenylate kinase
  source 1..699: mol_type = other DNA
atgcaccatcatcaccatcacgggggctccggcatgatggcatatctggtgttcttaggtccgccgggcgcgggaaaaggtacccaatcgaaacgcattcaggaaaagactggcatcccacatattagcacgggcgatatcttccgtgacatcgtcaagaaagagaacgatgaactgggcaagaagattaaagaaatcatggagaaaggtgaactcgttccagatgaactggtgaatgaggtagtaaaacgccgcctgtcggagaaagactgcgaaaaaggctttattttggatggttatccgcgtaccgttgctcaagcggaattcctggacagttttcttgaatcccagaacaaacagttgacagccgccgtgctgttcaaagtccccgaagatgttgttgtgcaacgtttaacctctcgcctgatctgtccgaaatgcgggcgtatctacaatatgatttcactgccaccaaaagaagacgagctgtgtgacgattgcaaagtcaaattagtacagcgtgatgatgatgaggaagaaacggttcgtcaccgcctgaaagtctaccttgagaagacccagccggtcattgactattatggcaagaaaggtattctcaaacgcgtagatgggtcgcaaggaatcgacaacgttgttgcagaagtcctgaagattattggttggagcgataagtaatga

SEQ ID NO: 1572 - protein, 231 aa, synthetic construct
  REGION 1..231: note = Variant of adenylate kinase
MHHHHHHGGSGMMAYLVFLGPPGAGKGTQSKRIQEKTGIPHISTGDIFRDIVKKENDELGKKIKEIMEKGELVPDELVNEVVKRRLSEKDCEKGFILDGYPRTVAQAEFLDSFLESQNKQLTAAVLFKVPEDVVVQRLTSRLICPKCGRIYNMISLPPKEDELCDDCKVKLVQRDDDEEETVRHRLKVYLEKTQPVIDYYGKKGILKRVDGSQGIDNVVAEVLKIIGWSDK

SEQ ID NO: 1573 - DNA, 699 bp, synthetic construct
  misc_feature 1..699: note = Variant of adenylate kinase
  source 1..699: mol_type = other DNA
atgcaccatcatcaccatcacgggggctccggcatgatggcatatctggtgttcttaggtccgccgggcgcgggaaaaggtacccaatcgaaacgcattcaggaaaagacttgtatcccacatattagcacgggcgatatcttccgtgacatcgtcaagaaagagaacgatgaactgggcaagaagattaaagaaatcatggagaaaggtgaactcgttccagatgaactggtgaatgaggtagtaaaacgccgcctgtcggagaaagactgcgaaaaaggctttattttggatggttatccgcgtaccgttgctcaagcggaattcctggacagttttcttgaatcccagaacaaacagttgacagccgccgtgctgttcaaagtccccgaagatgttgttgtgcaacgtttaacctctcgcctgatctgtccgaaatgcgggcgtatctacaatatgatttcactgccaccaaaagaagacgagctgtgtgacgattgcaaagtcaaattagtacagcgtgatgatgataaggaagaaacggttcgtcaccgcctgaaagtctaccttgagaagacccagccggtcattgactattatggcaagaaaggtattctcaaacgcgtagatgggtcgcaaggaatcgacaacgttgttgcagaagtcctgaagattattggttggagcgataagtaatga

SEQ ID NO: 1574 - protein, 231 aa, synthetic construct
  REGION 1..231: note = Variant of adenylate kinase
MHHHHHHGGSGMMAYLVFLGPPGAGKGTQSKRIQEKTCIPHISTGDIFRDIVKKENDELGKKIKEIMEKGELVPDELVNEVVKRRLSEKDCEKGFILDGYPRTVAQAEFLDSFLESQNKQLTAAVLFKVPEDVVVQRLTSRLICPKCGRIYNMISLPPKEDELCDDCKVKLVQRDDDKEETVRHRLKVYLEKTQPVIDYYGKKGILKRVDGSQGIDNVVAEVLKIIGWSDK

SEQ ID NO: 1575 - DNA, 699 bp, synthetic construct
  misc_feature 1..699: note = Variant of adenylate kinase
  source 1..699: mol_type = other DNA
atgcaccatcatcaccatcacgggggctccggcatgatggcatatctggtgttcttaggtccgccgggcgcgggaaaaggtacccaatcgaaacgcattcaggaaaagactggcatcccacatattagcacgggcgatatcttccgtgacatcgttaagaaagagaacgatgaactgggcaagaagattaaagaggaaatggaaaaaggtgaactcgttccagatgaactgggtaatgaggtagtaaaacgccgcctgtcggagaaagactgcgaaaaaggctttattttggatggttatccgcgtaccgttgctcaagcggaattcctggatagttttcttgaatcccagaacaaacagttgacagccgccgtgctgttcaaagtccccgaagatgttgttgtgcaacgtttaacctctcgcctgatctgtccgaaatgcgggcgtatctacaacatgatttttctgccaccaaaagaagacgagctgtgtgacgattgcaaagtcaaattagtacagcgtgatgatgataaggaagaaacggttcgtcaccgcctgaaagtctaccttgagaagacccagccggtcattgactattatggcaagaaaggtattctcaaacgcgtagatgggtcgcaaggaatcgacaacgttgttgcagaagtcctgaagattctgggttggagcgataagtaatga

SEQ ID NO: 1576 - protein, 231 aa, synthetic construct
  REGION 1..231: note = Variant of adenylate kinase
MHHHHHHGGSGMMAYLVFLGPPGAGKGTQSKRIQEKTGIPHISTGDIFRDIVKKENDELGKKIKEEMEKGELVPDELGNEVVKRRLSEKDCEKGFILDGYPRTVAQAEFLDSFLESQNKQLTAAVLFKVPEDVVVQRLTSRLICPKCGRIYNMIFLPPKEDELCDDCKVKLVQRDDDKEETVRHRLKVYLEKTQPVIDYYGKKGILKRVDGSQGIDNVVAEVLKILGWSDK

SEQ ID NO: 1577 - DNA, 699 bp, synthetic construct
  misc_feature 1..699: note = Variant of adenylate kinase
  source 1..699: mol_type = other DNA
atgcaccatcatcaccatcacgggggctccggcatgatggcatatctggtgttcttaggtccgccgggcgcgggaaaaggtacccaatcgaaacgcattcaggaaaagactggcatcccacatattagcacgggcgatatcttccgtgacatcgtcaagaaagagaacgatgaactgggcaagaagattaaagaaatcatggagaaaggtgaactcgttccagatgaactgggtaatgcggtagtaaaacgccgcctgtcggagaaagactgcgaaaaaggctttattttggatggttatccgcgtaccgttgctcaagcggaattcctggatagttttcttgaatcccagaacaaacagttgacagccgccgtgctgttcaaagtccccgaagatgttgttgtgcaacgtttaacctctcgcctgatctgtccgaaatgcgggcgtatctacaacatgatttttctgccaccaaaagaagacgagctgtgtgacgattgcaaagtcaaattagtacagcgtgatgatgataaggaagaaacggttcgtcaccgcctgaaagtctaccttgagaagacccagccggtcattgactattatggcaagaaaggtattctcaaacgcgtagatgggtcgcaaggaatcgacaacgttgttgcagaagtcctggggattctgggttggagcgataagtaatga

SEQ ID NO: 1578 - protein, 231 aa, synthetic construct
  REGION 1..231: note = Variant of adenylate kinase
MHHHHHHGGSGMMAYLVFLGPPGAGKGTQSKRIQEKTGIPHISTGDIFRDIVKKENDELGKKIKEIMEKGELVPDELGNAVVKRRLSEKDCEKGFILDGYPRTVAQAEFLDSFLESQNKQLTAAVLFKVPEDVVVQRLTSRLICPKCGRIYNMIFLPPKEDELCDDCKVKLVQRDDDKEETVRHRLKVYLEKTQPVIDYYGKKGILKRVDGSQGIDNVVAEVLGILGWSDK

SEQ ID NO: 1579 - DNA, 699 bp, synthetic construct
  misc_feature 1..699: note = Variant of adenylate kinase
  source 1..699: mol_type = other DNA
atgcaccatcatcaccatcacgggggctccggcatgatggcatatctggtgttcttaggtccgccgggcgcgggaaaaggtacccaatcgaaacgcattcaggaaaagactggcatcccacatattagcacgggcgatatcttccgtgacatcgttaagaaagagaacgatgaactgggcaagaagattaaagaaatcatggagaaaggtgaactcgttccagatgaactgggtaatgaggtagtaaaacgccgcctgtcggagaaagactgcgaaaaaggctttattttggatggttatccgcgtaccgttgctcaagcggaattcctggatagttttcttgaatcccagaacaaacagttgacagccgccgtgctgttcaaagtccccgaagatgttgttgtgcaacgtttaacctctcgcctgatctgtccgaaatgcgggcgtatctacaacatgatttttctgccaccaaaagaagacgagctgtgtgacgattgcaaagtcaaattagtacagcgtgatgatgataaggaagaaacggttcgtcaccgcctgaaagtctaccttgagaagacccagccggtcattgactattatggcaagaaaggtattctcaaacgcgtagatgggtcgcaaggaatcgacaacgttgttgcagaagtcctgaagattctgggttggagcgataagtaatga

SEQ ID NO: 1580 - protein, 231 aa, synthetic construct
  REGION 1..231: note = Variant of adenylate kinase
MHHHHHHGGSGMMAYLVFLGPPGAGKGTQSKRIQEKTGIPHISTGDIFRDIVKKENDELGKKIKEIMEKGELVPDELGNEVVKRRLSEKDCEKGFILDGYPRTVAQAEFLDSFLESQNKQLTAAVLFKVPEDVVVQRLTSRLICPKCGRIYNMIFLPPKEDELCDDCKVKLVQRDDDKEETVRHRLKVYLEKTQPVIDYYGKKGILKRVDGSQGIDNVVAEVLKILGWSDK

SEQ ID NO: 1581 - DNA, 699 bp, synthetic construct
  misc_feature 1..699: note = Variant of adenylate kinase
  source 1..699: mol_type = other DNA
atgcaccatcatcaccatcacgggggctccggcatgatggcatatctggtgttcttaggtccgccgggcgcgggaaaaggtacccaatcgaaacgcattcaggaaaagactggcatcccacatattagcacgggcgatatcttccgtgacatcgtcaagaaagagaacgatgaactgggcaagaagattaaaccagaaatggaaaaaggtgaactcgttccagatgaactggtgaatgaggtagtaaaacgccgcctgtcggagaaagactgcgaaaaaggctttattttggatggttatccgcgtaccgttgctcaagcggaattcctggatagttttcttgaatcccagaacaaacagttgacagccgccgtgctgttcaaagtccccgaagatgttgttgtgcaacgtttaacctctcgcctgatctgtccgaaatgcgggcgtatctacaacatgatttttctgccaccaaaagaagacgagctgtgtgacgattgcaaagtcaaattagtacagcgtgatgatgataaggaagaaacggttcgtcaccgcctgaaagtctaccttgagaagacccagccggtcattgactattatggcaagaaaggtattctcaaacgcgtagatgggtcgcaaggaatcgacaacgttgttgcagaagtcctgaagattctgggttggagcgataagtaatga

SEQ ID NO: 1582 - protein, 231 aa, synthetic construct
  REGION 1..231: note = Variant of adenylate kinase
MHHHHHHGGSGMMAYLVFLGPPGAGKGTQSKRIQEKTGIPHISTGDIFRDIVKKENDELGKKIKPEMEKGELVPDELVNEVVKRRLSEKDCEKGFILDGYPRTVAQAEFLDSFLESQNKQLTAAVLFKVPEDVVVQRLTSRLICPKCGRIYNMIFLPPKEDELCDDCKVKLVQRDDDKEETVRHRLKVYLEKTQPVIDYYGKKGILKRVDGSQGIDNVVAEVLKILGWSDK

SEQ ID NO: 1583 - DNA, 699 bp, synthetic construct
  misc_feature 1..699: note = Variant of adenylate kinase
  source 1..699: mol_type = other DNA
atgcaccatcatcaccatcacgggggctccggcatgatggcatatctggtgttcttaggtccgccgggcgcgggaaaaggtacccaatcgaaacgcattcaggaaaagactggcatcccacatattagcacgggcgatatcttccgtgacatcgtcaagaaagagaacgatgaactgggcaagaagattaaagaaatcatggagaaaggtgaactcgttccagatgaactgggtaatgaggtagtaaaacgccgcctgtcggagaaagactgcgaaaaaggctttattttggatggttatccgcgtaccgttgctcaagcggaattcctggatagttttcttgaatcccagaacaaacagttgacagccgccgtgctgttcaaagtccccgaagatgttgttgtgcaacgtttaacctctcgcctgatctgtccgaaatgcgggcgtatctacaacatgatttttctgccaccaaaagaagacgagctgtgtgacgattgcaaagtcaaattagtacagcgtgatgatgataaggaagaaacggttcgtcaccgcctgaaagtctaccttgagaagacccagccggtcattgactattatggcaagaaaggtattctcaaacgcgtagatgggtcgcaaggaatcgacaacgttgttgcagaagtcctggggattctgggttggagcgataagtaatga

SEQ ID NO: 1584 - protein, 231 aa, synthetic construct
  REGION 1..231: note = Variant of adenylate kinase
MHHHHHHGGSGMMAYLVFLGPPGAGKGTQSKRIQEKTGIPHISTGDIFRDIVKKENDELGKKIKEIMEKGELVPDELGNEVVKRRLSEKDCEKGFILDGYPRTVAQAEFLDSFLESQNKQLTAAVLFKVPEDVVVQRLTSRLICPKCGRIYNMIFLPPKEDELCDDCKVKLVQRDDDKEETVRHRLKVYLEKTQPVIDYYGKKGILKRVDGSQGIDNVVAEVLGILGWSDK

SEQ ID NO: 1585 - DNA, 699 bp, synthetic construct
  misc_feature 1..699: note = Variant of adenylate kinase
  source 1..699: mol_type = other DNA
atgcaccatcatcaccatcacgggggctccggcatgatggcatatctggtgttcttaggtccgccgggcgcgggaaaaggtacccaatcgaaacgcattcaggaaaagactggcatcccacatattagcacgggcgatatcttccgtgacatcgttaagaaagagaacgatgaactgggcaagaagattaaagaaatcatggagaaaggtgaactcgttccagatgaactgggtaatgcggtagtaaaacgccgcctgtcggagaaagactgcgaaaaaggctttattttggatggttatccgcgtaccgttgctcaagcggaagagctggacagttttcttgaatcccagaacaaacagttgacagccgccgtgctgttcaaagtccccgaagatgttgttgtgcaacgtttaacctctcgcctgatctgtccgaaatgcgggcgtatctacaacatgatttttctgccaccaaaagaagacgagctgtgtgacgattgcaaagtcaaattagtacagcgtgatgatgataaggaagaaacggttcgtcaccgcctgaaagtctaccttgagaagacccagccggtcattgactattatggcaagaaaggtattctcaaacgcgtagatgggtcgcaaggaatcgacaacgttgttgcagaagtcctgaagattctgggttggagcgataagtaatga

SEQ ID NO: 1586 - protein, 231 aa, synthetic construct
  REGION 1..231: note = Variant of adenylate kinase
MHHHHHHGGSGMMAYLVFLGPPGAGKGTQSKRIQEKTGIPHISTGDIFRDIVKKENDELGKKIKEIMEKGELVPDELGNAVVKRRLSEKDCEKGFILDGYPRTVAQAEELDSFLESQNKQLTAAVLFKVPEDVVVQRLTSRLICPKCGRIYNMIFLPPKEDELCDDCKVKLVQRDDDKEETVRHRLKVYLEKTQPVIDYYGKKGILKRVDGSQGIDNVVAEVLKILGWSDK

SEQ ID NO: 1587 - DNA, 699 bp, synthetic construct
  misc_feature 1..699: note = Variant of adenylate kinase
  source 1..699: mol_type = other DNA
atgcaccatcatcaccatcacgggggctccggcatgatggcatatctggtgttcttaggtccgccgggcgcgggaaaaggtacccaatcgaaacgcattcaggaaaagactggcatctttcatattagcacgggcgatatcttccgtgacatcgttaagaaagagaacgatgaactgagtaagaaaattaaagaaatcatggagaaaggtgaactcgttccagatgaactggtgaatgaggtagtaaaacgccgcctgtcggagaaagactgcgaaaagagttttattttggatggttatccgcgtaccgttgctcaagcggaattcctggatagttttcttgaatcccagaataaacagttgacagccgccgtgctgttcaaagtccccgaagatgttgttgtgcaacgtttaacctctcgcctgatctgtccgaaatgcgggcgtatctacaacatgatttttctgccaccaaaagaagacgagctgtgtgacgattgcaaagtcaaattagtacagcgtgatgatgataaggaagaaacggttcgtcaccgcctgaaagtctaccttgagaagacccagccggtcattgactattatggcaagaaaggtattctcaaacgcgtagatgggtcgcaaggaatcgacaacgttgttgcagaagtcctgaagattattggttggagcgataagtaatga

SEQ ID NO: 1588 - protein, 231 aa, synthetic construct
  REGION 1..231: note = Variant of adenylate kinase
MHHHHHHGGSGMMAYLVFLGPPGAGKGTQSKRIQEKTGIFHISTGDIFRDIVKKENDELSKKIKEIMEKGELVPDELVNEVVKRRLSEKDCEKSFILDGYPRTVAQAEFLDSFLESQNKQLTAAVLFKVPEDVVVQRLTSRLICPKCGRIYNMIFLPPKEDELCDDCKVKLVQRDDDKEETVRHRLKVYLEKTQPVIDYYGKKGILKRVDGSQGIDNVVAEVLKIIGWSDK

SEQ ID NO: 1589 - DNA, 699 bp, synthetic construct
  misc_feature 1..699: note = Variant of adenylate kinase
  source 1..699: mol_type = other DNA
atgcaccatcatcaccatcacgggggctccggcatgatggcatatctggtgttcttaggtccgccgggcgcgggaaaaggtacccaatcgaaacgcattcaggaaaagactggcatcccacatattagcacgggcgatatcttccgtgacatcgttaagaaagagaacgatgaactgggcaagaagattaaagaggcaatgcgtaaaggtgaactcgttccagatgaactggttaatgaggtagtaaaacgccgcctgtcggagaaagactgcgaaaaaggctttattttggatggttatccgcgtaccgttgctcaagcggaattcctggatagttttcttgaatcccagaacaaacagttgacagccgccgtgctgttcaaagtccccgaagatgttgttgtgcaacgtttaacctctcgcctgatctgtccgaaatgcgggcgtatctacaacatgatttttctgccaccaaaagaagacgagctgtgtgacgattgcaaagtcaaattagtacagcgtgatgatgataaggaagaaacggttcgtcaccgcctgaaagtctaccttgagaagacccagccggtcattgactattatggcaagaaaggtattctcaaacgcgtagatgggtcgcaaggaatcgacaacgttgttgcagaagtcctgaagattctgggttggagcgataagtaatga

SEQ ID NO: 1590 - protein, 231 aa, synthetic construct
  REGION 1..231: note = Variant of adenylate kinase
MHHHHHHGGSGMMAYLVFLGPPGAGKGTQSKRIQEKTGIPHISTGDIFRDIVKKENDELGKKIKEAMRKGELVPDELVNEVVKRRLSEKDCEKGFILDGYPRTVAQAEFLDSFLESQNKQLTAAVLFKVPEDVVVQRLTSRLICPKCGRIYNMIFLPPKEDELCDDCKVKLVQRDDDKEETVRHRLKVYLEKTQPVIDYYGKKGILKRVDGSQGIDNVVAEVLKILGWSDK

SEQ ID NO: 1591 - DNA, 699 bp, synthetic construct
  misc_feature 1..699: note = Variant of adenylate kinase
  source 1..699: mol_type = other DNA
atgcaccatcatcaccatcacgggggctccggcatgatggcatatctggtgttcttaggtccgccgggcgcgggaaaaggtacccaatcgaaacgcattcaggaaaagactggcatcccacatattagcacgggcgatatcttccgtgacatcgtcaagaaagagaacgatgaactgggcaagaagattaaagaggaaatgcgtaaaggtgaactcgttccagatgaactggttaatgaggtagtaaaacgccgcctgtcggagaaagactgcgaaaaaggctttattttggatggttatccgcgtaccgttgctcaagcggaattcctggatagttttcttgaatcccagaacaaacagttgacagccgccgtgctgttcaaagtccccgaagatgttgttgtgcaacgtttaacctctcgcctgatctgtccgaaatgcgggcgtatctacaacatgatttttctgccaccaaaagaagacgagctgtgtgacgattgcaaagtcaaattagtacagcgtgatgatgataaggaagaaacggttcgtcaccgcctgaaagtctaccttgagaagacccagccggtcattgactattatggcaagaaaggtattctcaaacgcgtagatgggtcgcaaggaatcgacaacgttgttgcagaagtcctgaagattctgggttggagcgataagtaatga

SEQ ID NO: 1592 - protein, 231 aa, synthetic construct
  REGION 1..231: note = Variant of adenylate kinase
MHHHHHHGGSGMMAYLVFLGPPGAGKGTQSKRIQEKTGIPHISTGDIFRDIVKKENDELGKKIKEEMRKGELVPDELVNEVVKRRLSEKDCEKGFILDGYPRTVAQAEFLDSFLESQNKQLTAAVLFKVPEDVVVQRLTSRLICPKCGRIYNMIFLPPKEDELCDDCKVKLVQRDDDKEETVRHRLKVYLEKTQPVIDYYGKKGILKRVDGSQGIDNVVAEVLKILGWSDK

SEQ ID NO: 1593 - DNA, 699 bp, synthetic construct
  misc_feature 1..699: note = Variant of adenylate kinase
  source 1..699: mol_type = other DNA
atgcaccatcatcaccatcacgggggctccggcatgatggcatatctggtgttcttaggtccgccgggcgcgggaaaaggtacccaatcgaaacgcattcaggaaaagactggcatcccacatattagcacgggcgatatcttccgtgacatcgtcaagaaagagaacgatgaactgggcaagaagattaaagaaatcatggagaaaggtgaactcgttccagatgaactgggtaatgcggtagtaaaacgccgcctgtcggagaaagactgcgaaaaaggctttattttggatggttatccgcgtaccgttgctcaagcggaattcctggatagttttcttgaatcccagaacaaacagttgacagccgccgtgctgttcaaagtccccgaagatgttgttgtgcaacgtttaacctctcgcctgatctgtccgaaatgcgggcgtatctacaacatgatttttctgccaccaaaagaagacgagctgtgtgacgattgcaaagtcaaattagtacagcgtgatgatgataaggaagaaacggttcgtcaccgcctgaaagtctaccttgaaaagacccagccggtcattgactattatggcaagaaaggtattctcaaacgcgtagatgggtcgcaaggaatcgacaacgttgttgcagaagtcctgaagattctgggttggagcgataagtaatga

SEQ ID NO: 1594 - protein, 231 aa, synthetic construct
  REGION 1..231: note = Variant of adenylate kinase
MHHHHHHGGSGMMAYLVFLGPPGAGKGTQSKRIQEKTGIPHISTGDIFRDIVKKENDELGKKIKEIMEKGELVPDELGNAVVKRRLSEKDCEKGFILDGYPRTVAQAEFLDSFLESQNKQLTAAVLFKVPEDVVVQRLTSRLICPKCGRIYNMIFLPPKEDELCDDCKVKLVQRDDDKEETVRHRLKVYLEKTQPVIDYYGKKGILKRVDGSQGIDNVVAEVLKILGWSDK

SEQ ID NO: 1595 - DNA, 699 bp, synthetic construct
  misc_feature 1..699: note = Variant of adenylate kinase
  source 1..699: mol_type = other DNA
atgcaccatcatcaccatcacgggggctccggcatgatggcatatctggtgttcttaggtccgccgggcgcgggaaaaggtacccaatcgaaacgcattcaggaaaagactggcatcccacatattagcacgggcgatatcttccgtgacatcgttaagaaagagaacgatgaactgggcaagaagattaaagaaatcatggagaaaggtgaactcgttccagatgaactggtgaatgaggtagtaaaacgccgcctgtcggagaaagactgcgaaaagagttttattttggatggttatccgcgtaccgttgctcaagcggaattcctggatagttttcttgaatccaaccgtaaacagttgacagccgccgtgctgttcaaagtccccgaagatgttgttgtgcaacgtttaacctctcgcctgatctgtccgaaatgcgggcgtatctacaacatgatttttctgccaccaaaagaagacgagctgtgtgacgattgcaaagtcaaattagtacagcgtgatgatgataaggaagaaacggttcgtcaccgcctgaaagtctaccttgagaagacccagccggtcattgactattatggcaagaaaggtattctcaaacgcgtagatgggtcgcaaggaatcgacaacgttgttgcagaagtcctgaagattattggttggagcgataagtaatga

SEQ ID NO: 1596 - protein, 231 aa, synthetic construct
  REGION 1..231: note = Variant of adenylate kinase
MHHHHHHGGSGMMAYLVFLGPPGAGKGTQSKRIQEKTGIPHISTGDIFRDIVKKENDELGKKIKEIMEKGELVPDELVNEVVKRRLSEKDCEKSFILDGYPRTVAQAEFLDSFLESNRKQLTAAVLFKVPEDVVVQRLTSRLICPKCGRIYNMIFLPPKEDELCDDCKVKLVQRDDDKEETVRHRLKVYLEKTQPVIDYYGKKGILKRVDGSQGIDNVVAEVLKIIGWSDK

SEQ ID NO: 1597 - DNA, 699 bp, synthetic construct
  misc_feature 1..699: note = Variant of adenylate kinase
  source 1..699: mol_type = other DNA
atgcaccatcatcaccatcacgggggctccggcatgatggcatatctggtgttcttaggtccgccgggcgcgggaaaaggtacccaatcgaaacgcattcaggaaaagactggcatcccacatattagcacgggcgatatcttccgtgacatcgttaagaaagagaacgatgaactgggcaagaagattaaagagatcatgcgtaaaggtgaactcgttccagatgaactggttaatgaggtagtaaaacgccgcctgtcggagaaagactgcgaaaaaggctttattttggatggttatccgcgtaccgttgctcaagcggaagagctggacagttttcttgaatcccagaacaaacagttgacagccgccgtgctgttcaaagtccccgaagatgttgttgtgcaacgtttaacctctcgcctgatctgtccgaaatgcgggcgtatctacaacatgatttttctgccaccaaaagaagacgagctgtgtgacgattgcaaagtcaaattagtacagcgtgatgatgataaggaagaaacggttcgtcaccgcctgaaagtctaccttgaaaagacccagccggtcattgactattatggcaagaaaggtattctcaaacgcgtagatgggtcgcaaggaatcgacaacgttgttgcagaagtcctgaagattctgggttggagcgataagtaatga

SEQ ID NO: 1598 - protein, 231 aa, synthetic construct
  REGION 1..231: note = Variant of adenylate kinase
MHHHHHHGGSGMMAYLVFLGPPGAGKGTQSKRIQEKTGIPHISTGDIFRDIVKKENDELGKKIKEIMRKGELVPDELVNEVVKRRLSEKDCEKGFILDGYPRTVAQAEELDSFLESQNKQLTAAVLFKVPEDVVVQRLTSRLICPKCGRIYNMIFLPPKEDELCDDCKVKLVQRDDDKEETVRHRLKVYLEKTQPVIDYYGKKGILKRVDGSQGIDNVVAEVLKILGWSDK

SEQ ID NO: 1599 - DNA, 699 bp, synthetic construct
  misc_feature 1..699: note = Variant of adenylate kinase
  source 1..699: mol_type = other DNA
atgcaccatcatcaccatcacgggggctccggcatgatggcatatctggtgttcttaggtccgccgggcgcgggaaaaggtacccaatcgaaacgcattcaggaaaagactggcatcccacatattagcacgggcgatatcttccgtgacatcgtcaagaaagagaacgatgaactgggcaagaagattaaagagatcatgcgtaaaggtgaactcgttccagatgaactggtgaatgaggtagtaaaacgccgcctgtcggagaaagactgcgaaaaaggctttattttggatggttatccgcgtaccgttgctcaagcggaattcctggatagttttcttgaatcccagaacaaacagttgacagccgccgtgctgttcaaagtccccgaagatgttgttgtgcaacgtttaacctctcgcctgatctgtccgaaatgcgggcgtatctacaacatgatttttctgccaccaaaagaagacgagctgtgtgacgattgcaaagtcaaattagtacagcgtgatgatgataaggaagaaacggttcgtcaccgcctgaaagtctaccttgagaagacccagccggtcattgactattatggcaagaaaggtattctcaaacgcgtagatgggtcgcaaggaatcgacaacgttgttgcagaagtcctgaagattctgggttggagcgataagtaatga

SEQ ID NO: 1600 - protein, 231 aa, synthetic construct
  REGION 1..231: note = Variant of adenylate kinase
MHHHHHHGGSGMMAYLVFLGPPGAGKGTQSKRIQEKTGIPHISTGDIFRDIVKKENDELGKKIKEIMRKGELVPDELVNEVVKRRLSEKDCEKGFILDGYPRTVAQAEFLDSFLESQNKQLTAAVLFKVPEDVVVQRLTSRLICPKCGRIYNMIFLPPKEDELCDDCKVKLVQRDDDKEETVRHRLKVYLEKTQPVIDYYGKKGILKRVDGSQGIDNVVAEVLKILGWSDK

SEQ ID NO: 1601 - DNA, 699 bp, synthetic construct
  misc_feature 1..699: note = Variant of adenylate kinase
  source 1..699: mol_type = other DNA
atgcaccatcatcaccatcacgggggctccggcatgatggcatatctggtgttcttaggtccgccgggcgcgggaaaaggtacccaatcgaaacgcattcaggaaaagactggcatcccacatattagcacgggcgatatcttccgtgacatcgttaagaaagagaacgatgaactgggcaagaagattaaagaaatcatggagaaaggtgaactcgttccagatgaactggtgaatgaggtagtaaaacgccgcctgtcggagaaagactgcgaaaagagttttattttggatggttatccgcgtaccgttgctcaagcggaattcctggatagttttcttgaatcccagaacaaacagttgacagccgccgtgctgttcaaagtccccgaagatgttgttgtgcaacgtttaacctctcgcctgatctgtccgaaatgcgggcgtatctacaacatgatttttctgccaccaaaagaagacgagctgtgtgacgattgcaaagtcaaattagtacagcgtgatgatgataaactggaaacggttcgtcaccgcctgaaagtctaccttgagaagacccagccggtcattgactattatggcaagaaaggtattctcaaacgcgtagatgggtcgcaaggaatcgacaacgttgttgcagaagtcctgaagattctgggttggagcgataagtaatga

SEQ ID NO: 1602 - protein, 231 aa, synthetic construct
  REGION 1..231: note = Variant of adenylate kinase
MHHHHHHGGSGMMAYLVFLGPPGAGKGTQSKRIQEKTGIPHISTGDIFRDIVKKENDELGKKIKEIMEKGELVPDELVNEVVKRRLSEKDCEKSFILDGYPRTVAQAEFLDSFLESQNKQLTAAVLFKVPEDVVVQRLTSRLICPKCGRIYNMIFLPPKEDELCDDCKVKLVQRDDDKLETVRHRLKVYLEKTQPVIDYYGKKGILKRVDGSQGIDNVVAEVLKILGWSDK

SEQ ID NO: 1603 - DNA, 699 bp, synthetic construct
  misc_feature 1..699: note = Variant of adenylate kinase
  source 1..699: mol_type = other DNA
atgcaccatcatcaccatcacgggggctccggcatgatggcatatctggtgttcttaggtccgccgggcgcgggaaaaggtacccaatcgaaacgcattcaggaaaagactggcatcccacatattagcacgggcgatatcttccgtgaccgtgtcaagaaagagaacgatgaactgggcaagaagattaaagaggaaatgcgtaaaggtgaactcgttccagatgaactggtgaatgaggtagtaaaacgccgcctgtcggagaaagactgcgaaaaaggctttattttggatggttatccgcgtaccgttgctcaagcggaattcctggatagttttcttgaatcccagaacaaacagttgacagccgccgtgctgttcaaagtccccgaagatgttgttgtgcaacgtttaacctctcgcctgatctgtccgaaatgcgggcgtatctacaacatgatttttctgccaccaaaagaagacgagctgtgtgacgattgcaaagtcaaattagtacagcgtgatgatgataaggaagaaacggttcgtcaccgcctgaaagtctaccttgagaagacccagccggtcattgactattatggcaagaaaggtattctcaaacgcgtagatgggtcgcaaggaatcgacaacgttgttgcagaagtcctggggattctgggttggagcgataagtaatga

SEQ ID NO: 1604 - protein, 231 aa, synthetic construct
  REGION 1..231: note = Variant of adenylate kinase
MHHHHHHGGSGMMAYLVFLGPPGAGKGTQSKRIQEKTGIPHISTGDIFRDRVKKENDELGKKIKEEMRKGELVPDELVNEVVKRRLSEKDCEKGFILDGYPRTVAQAEFLDSFLESQNKQLTAAVLFKVPEDVVVQRLTSRLICPKCGRIYNMIFLPPKEDELCDDCKVKLVQRDDDKEETVRHRLKVYLEKTQPVIDYYGKKGILKRVDGSQGIDNVVAEVLGILGWSDK

SEQ ID NO: 1605 - DNA, 699 bp, synthetic construct
  misc_feature 1..699: note = Variant of adenylate kinase
  source 1..699: mol_type = other DNA
atgcaccatcatcaccatcacgggggctccggcatgatggcatatctggtgttcttaggtccgccgggcgcgggaaaaggtacccaatcgaaacgcattcaggaaaagactggcatcccacatattagcacgggcgatatcttccgtgacatcgttaagaaagagaacgatgaactgggcaagaagattaaagaaatcatggagaaaggtgaactcgttccagatgaactggtgaatgaggtagtaaaacgccgcctgtcggagaaagactgcgaaaagagttttattttggatggttatccgcgtaccgttgctcaagcggaattcctggatagttttcttgaatccaacaataaacagttgacagccgccgtgctgttcaaagtccccgaagatgttgttgtgcaacgtttaacctctcgcctgatctgtccgaaatgcgggcgtatctacaacatgatttttctgccaccaaaagaagacgagctgtgtgacgattgcaaagtcaaattagtacagcgtgatgatgataaggaagaaacggttcgtcaccgcctgaaagtctaccttgagaagacccagccggtcattgactattatggcaagaaaggtattctcaaacgcgtagatgggtcgcaaggaatcgacaacgttgttgcagaagtcctgaagattctgggttggagcgataagtaatga

SEQ ID NO: 1606 - protein, 231 aa, synthetic construct
  REGION 1..231: note = Variant of adenylate kinase
MHHHHHHGGSGMMAYLVFLGPPGAGKGTQSKRIQEKTGIPHISTGDIFRDIVKKENDELGKKIKEIMEKGELVPDELVNEVVKRRLSEKDCEKSFILDGYPRTVAQAEFLDSFLESNNKQLTAAVLFKVPEDVVVQRLTSRLICPKCGRIYNMIFLPPKEDELCDDCKVKLVQRDDDKEETVRHRLKVYLEKTQPVIDYYGKKGILKRVDGSQGIDNVVAEVLKILGWSDK

SEQ ID NO: 1607 - DNA, 699 bp, synthetic construct
  misc_feature 1..699: note = Variant of adenylate kinase
  source 1..699: mol_type = other DNA
atgcaccatcatcaccatcacgggggctccggcatgatggcatatctggtgttcttaggtccgccgggcgcgggaaaaggtacccaatcgaaacgcattcaggaaaagactggcatcccacatattagcacgggcgatatcttccgtgaccgtgtcaagaaagagaacgatgaactgggcaagaagattaaagaggaaatgcgtaaaggtgaactcgttccagatgaactgggtaatgaggtagtaaaacgccgcctgtcggagaaagactgcgaaaaaggctttattttggatggttatccgcgtaccgttgctcaagcggaattcctggatagttttcttgaatcccagaacaaacagttgacagccgccgtgctgttcaaagtccccgaagatgttgttgtgcaacgtttaacctctcgcctgatctgtccgaaatgcgggcgtatctacaacatgatttttctgccaccaaaagaagacgagctgtgtgacgattgcaaagtcaaattagtacagcgtgatgatgataaggaagaaacggttcgtcaccgcctgaaagtctaccttgagaagacccagccggtcattgactattatggcaagaaaggtattctcaaacgcgtagatgggtcgcaaggaatcgacaacgttgttgcagaagtcctggggattctgggttggagcgataagtaatga

SEQ ID NO: 1608 - protein, 231 aa, synthetic construct
  REGION 1..231: note = Variant of adenylate kinase
MHHHHHHGGSGMMAYLVFLGPPGAGKGTQSKRIQEKTGIPHISTGDIFRDRVKKENDELGKKIKEEMRKGELVPDELGNEVVKRRLSEKDCEKGFILDGYPRTVAQAEFLDSFLESQNKQLTAAVLFKVPEDVVVQRLTSRLICPKCGRIYNMIFLPPKEDELCDDCKVKLVQRDDDKEETVRHRLKVYLEKTQPVIDYYGKKGILKRVDGSQGIDNVVAEVLGILGWSDK

SEQ ID NO: 1609 - DNA, 699 bp, synthetic construct
  misc_feature 1..699: note = Variant of adenylate kinase
  source 1..699: mol_type = other DNA
atgcaccatcatcaccatcacgggggctccggcatgatggcatatctggtgttcttaggtccgccgggcgcgggaaaaggtacccaatcgaaacgcattcaggaaaagactggcatcccacatattagcacgggcgatatcttccgtgacatcgtcaagaaagagaacgatgaactgggcaagaagattaaagaggaaatggaaaaaggtgaactcgttccagatgaactggtgaatgaggtagtaaaacgccgcctgtcggagaaagactgcgaaaaaggctttattttggatggttatccgcgtaccgttgctcaagcggaattcctggatagttttcttgaatcccagaacaaacagttgacagccgccgtgctgttcaaagtccccgaagatgttgttgtgcaacgtttaacctctcgcctgatctgtccgaaatgcgggcgtatctacaacatgatttttctgccaccaaaagaagacgagctgtgtgacgattgcaaagtcaaattagtacagcgtgatgatgataaggaagaaacggttcgtcaccgcctgaaagtctaccttgagaagacccagccggtcattgactattatggcaagaaaggtattctcaaacgcgtagatgggtcgcaaggaatcgacaacgttgttgcagaagtcctgaagattctgggttggagcgataagtaatga

SEQ ID NO: 1610 - protein, 231 aa, synthetic construct
  REGION 1..231: note = Variant of adenylate kinase
MHHHHHHGGSGMMAYLVFLGPPGAGKGTQSKRIQEKTGIPHISTGDIFRDIVKKENDELGKKIKEEMEKGELVPDELVNEVVKRRLSEKDCEKGFILDGYPRTVAQAEFLDSFLESQNKQLTAAVLFKVPEDVVVQRLTSRLICPKCGRIYNMIFLPPKEDELCDDCKVKLVQRDDDKEETVRHRLKVYLEKTQPVIDYYGKKGILKRVDGSQGIDNVVAEVLKILGWSDK

SEQ ID NO: 1611 - DNA, 699 bp, synthetic construct
  misc_feature 1..699: note = Variant of adenylate kinase
  source 1..699: mol_type = other DNA
atgcaccatcatcaccatcacgggggctccggcatgatggcatatctggtgttcttaggtccgccgggcgcgggaaaaggtacccaatcgaaacgcattcaggaaaagactggcatcccacatattagcacgggcgatatcttccgtgacatcgttaagaaagagaacgatgaactgggcaagaagattaaagaaatcatggagaaaggtgaactcgttccagatgaactggtgaatgaggtagtaaaacgccgcctgtcggagaaagactgcgaaaagggctttattttggatggttatccgcgtaccgttgctcaagcggaattcctggatagttttcttgaatcccagcgtaaacagttgacagccgccgtgctgttcaaagtccccgaagatgttgttgtgcaacgtttaacctctcgcctgatctgtccgaaatgcgggcgtatctacaacatgatttttctgccaccaaaagaagacgagctgtgtgacgattgcaaagtcaaattagtacagcgtgatgatgataaggaagaaacggttcgtcaccgcctgaaagtctaccttgagaagacccagccggtcattgactattatggcaagaaaggtattctcaaacgcgtagatgggtcgcaaggaatcgacaacgttgttgcagaagtcctgaagattctgggttggagcgataagtaatga

SEQ ID NO: 1612 - protein, 231 aa, synthetic construct
  REGION 1..231: note = Variant of adenylate kinase
MHHHHHHGGSGMMAYLVFLGPPGAGKGTQSKRIQEKTGIPHISTGDIFRDIVKKENDELGKKIKEIMEKGELVPDELVNEVVKRRLSEKDCEKGFILDGYPRTVAQAEFLDSFLESQRKQLTAAVLFKVPEDVVVQRLTSRLICPKCGRIYNMIFLPPKEDELCDDCKVKLVQRDDDKEETVRHRLKVYLEKTQPVIDYYGKKGILKRVDGSQGIDNVVAEVLKILGWSDK

SEQ ID NO: 1613 - DNA, 699 bp, synthetic construct
  misc_feature 1..699: note = Variant of adenylate kinase
  source 1..699: mol_type = other DNA
atgcaccatcatcaccatcacgggggctccggcatgatggcatatctggtgttcttaggtccgccgggcgcgggaaaaggtacccaatcgaaacgcattcaggaaaagactggcatcccacatattagcacgggcgatatcttccgtgacatcgttaagaaagagaacgatgaactgggcaagaagattaaagaaatcatggagaaaggtgaactcgttccagatgaactggtgaatgaggtagtaaaacgccgcctgtcggagaaagactgcgaagtgagttttattttggatggttatccgcgtaccgttgctcaagcggaattcctggatagttttcttgaatcccagaacaaacagttgacagccgccgtgctgttcaaagtccccgaagatgttgttgtgcaacgtttaacctctcgcctgatctgtccgaaatgcgggcgtatctacaacatgatttttctgccaccaaaagaagacgagctgtgtgacgattgcaaagtcaaattagtacagcgtgatgatgataaagagccgacggttcgtcaccgcctgaaagtctaccttgagaagacccagccggtcattgactattatggcaagaaaggtattctcaaacgcgtagatgggtcgcaaggaatcgacaacgttgttgcagaagtcctgaagattctgggttggagcgataagtaatga

SEQ ID NO: 1614 - protein, 231 aa, synthetic construct
  REGION 1..231: note = Variant of adenylate kinase
MHHHHHHGGSGMMAYLVFLGPPGAGKGTQSKRIQEKTGIPHISTGDIFRDIVKKENDELGKKIKEIMEKGELVPDELVNEVVKRRLSEKDCEVSFILDGYPRTVAQAEFLDSFLESQNKQLTAAVLFKVPEDVVVQRLTSRLICPKCGRIYNMIFLPPKEDELCDDCKVKLVQRDDDKEPTVRHRLKVYLEKTQPVIDYYGKKGILKRVDGSQGIDNVVAEVLKILGWSDK

SEQ ID NO: 1615 - DNA, 699 bp, synthetic construct
  misc_feature 1..699: note = Variant of adenylate kinase
  source 1..699: mol_type = other DNA
atgcaccatcatcaccatcacgggggctccggcatgatggcatatctggtgttcttaggtccgccgggcgcgggaaaaggtacccaatcgaaacgcattcaggaaaagactggcatcccacatattagcacgggcgatatcttccgtgacatcgttaagaaagagaacgatgaactgggcaagaagattaaagaaatcatggagaaaggtgaactcgttccagatgaactggtgaatgaggtagtaaaacgccgcctgtcggagaaagactgcgaaaaaggctttattttggatggttatccgcgtaccgttgctcaagcggaagagctggacagttttcttgaatcccagaacaaacagttgacagccgccgtgctgttcaaagtccccgaagatgttgttgtgcaacgtttaacctctcgcctgatctgtccgaaatgcgggcgtatctacaacatgatttttctgccaccaaaagaagacgagctgtgtgacgattgcaaagtcaaattagtacagcgtgatgatgataaggaagaaacggttcgtcaccgcctgaaagtctaccttgagaagacccagccggtcattgactattatggcaagaaaggtattctcaaacgcgtagatgggtcgcaaggaatcgacaacgttgttgcagaagtcctgaagattctgggttggagcgataagtaatga

SEQ ID NO: 1616 - protein, 231 aa, synthetic construct
  REGION 1..231: note = Variant of adenylate kinase
MHHHHHHGGSGMMAYLVFLGPPGAGKGTQSKRIQEKTGIPHISTGDIFRDIVKKENDELGKKIKEIMEKGELVPDELVNEVVKRRLSEKDCEKGFILDGYPRTVAQAEELDSFLESQNKQLTAAVLFKVPEDVVVQRLTSRLICPKCGRIYNMIFLPPKEDELCDDCKVKLVQRDDDKEETVRHRLKVYLEKTQPVIDYYGKKGILKRVDGSQGIDNVVAEVLKILGWSDK

SEQ ID NO: 1617 - DNA, 699 bp, synthetic construct
  misc_feature 1..699: note = Variant of adenylate kinase
  source 1..699: mol_type = other DNA
atgcaccatcatcaccatcacgggggctccggcatgatggcatatctggtgttcttaggtccgccgggcgcgggaaaaggtacccaatcgaaacgcattcaggaaaagactggcatcccacatattagcacgggcgatatcttccgtgacatcgtcaagaaagagaacgatgaactgggcaagaagattaaagagatcatgcgtaaaggtgaactcgttccagatgaactggtgaatgaggtagtaaaacgccgcctgtcggagaaagactgcgaaaaaggctttattttggatggttatccgcgtaccgttgctcaagcggaattcctggacagttttcttgaatcccagaacaaacagttgacagccgccgtgctgttcaaagtccccgaagatgttgttgtgcaacgtttaacctctcgcctgatctgtccgaaatgcgggcgtatctacaacatgatttttctgccaccaaaagaagacgagctgtgtgacgattgcaaagtcaaattagtacagcgtgatgatgataaggaagaaacggttcgtcaccgcctgaaagtctaccttgagaagacccagccggtcattgactattatggcaagaaaggtattctcaaacgcgtagatgggtcgcaaggaatcgacaacgttgttgcagaagtcctggggattctgggttggagcgataagtaatga

SEQ ID NO: 1618 - protein, 231 aa, synthetic construct
  REGION 1..231: note = Variant of adenylate kinase
MHHHHHHGGSGMMAYLVFLGPPGAGKGTQSKRIQEKTGIPHISTGDIFRDIVKKENDELGKKIKEIMRKGELVPDELVNEVVKRRLSEKDCEKGFILDGYPRTVAQAEFLDSFLESQNKQLTAAVLFKVPEDVVVQRLTSRLICPKCGRIYNMIFLPPKEDELCDDCKVKLVQRDDDKEETVRHRLKVYLEKTQPVIDYYGKKGILKRVDGSQGIDNVVAEVLGILGWSDK

SEQ ID NO: 1619 - DNA, 699 bp, synthetic construct
  misc_feature 1..699: note = Variant of adenylate kinase
  source 1..699: mol_type = other DNA
atgcaccatcatcaccatcacgggggctccggcatgatggcatatctggtgttcttaggtccgccgggcgcgggaaaaggtacccaatcgaaacgcattcaggaaaagactggcatctttcatattagcacgggcgatatcttccgtgacatcgttaagaaagagaacgatgaactgggtaagctgattaaagaaatcatggagaaaggtgaactcgttccagatgaactggtgaatgaggtagtaaaacgccgcctgtcggagaaagactgcgaagtgggctttattttggatggttatccgcgtaccgttgctcaagcggaattcctggatagttttcttgaatcccagaacaaacagttgacagccgccgtgctgttcaaagtccccgaagatgttgttgtgcaacgtttaacctctcgcctgatctgtccgaaatgcgggcgtatctacaacatgatttttctgccaccaaaagaagacgagctgtgtgacgattgcaaagtcaaattagtacagcgtgatgatgataaggaagaaacggttcgtcaccgcctgaaagtctaccttgagaagacccagccggtcattgactattatggcaagaaaggtattctcaaacgcgtagatgggtcgcaaggaatcgacaacgttgttgcagaagtcctgaagattctgggttggagcgataagtaatga

SEQ ID NO: 1620 - protein, 231 aa, synthetic construct
  REGION 1..231: note = Variant of adenylate kinase
MHHHHHHGGSGMMAYLVFLGPPGAGKGTQSKRIQEKTGIFHISTGDIFRDIVKKENDELGKLIKEIMEKGELVPDELVNEVVKRRLSEKDCEVGFILDGYPRTVAQAEFLDSFLESQNKQLTAAVLFKVPEDVVVQRLTSRLICPKCGRIYNMIFLPPKEDELCDDCKVKLVQRDDDKEETVRHRLKVYLEKTQPVIDYYGKKGILKRVDGSQGIDNVVAEVLKILGWSDK

SEQ ID NO: 1621 - DNA, 699 bp, synthetic construct
  misc_feature 1..699: note = Variant of adenylate kinase
  source 1..699: mol_type = other DNA
atgcaccatcatcaccatcacgggggctccggcatgatggcatatctggtgttcttaggtccgccgggcgcgggaaaaggtacccaatcgaaacgcattcaggaaaagactggcatcccacatattagcacgggcgatatcttccgtgacatcgttaagaaagagaacgatgaactgggcaagaagattaaagaaatcatggagaaaggtgaactcgttccagatgaactggtgaatgaggtagtaaaacgccgcctgtcggagaaagactgcgaagtgggctttattttggatggttatccgcgtaccgttgctcaagcggaattcctggatagttttcttgaatcccagaacaaacagttgacagccgccgtgctgttcaaagtccccgaagatgttgttgtgcaacgtttaacctctcgcctgatctgtccgaaatgcgggcgtatctacaacatgatttttctgccaccaaaagaagacgagctgtgtgacgattgcaaagtcaaattagtacagcgtgatgatgataaggaagaaacggttcgtcaccgcctgaaagtctaccttgagaagacccagccggtcattgactattatggcaagaaaggtattctcaaacgcgtagatgggtcgcaaggaatcgacaacgttgttgcagaagtcctgaagattctgggttggagcgataagtaatga

SEQ ID NO: 1622 - protein, 231 aa, synthetic construct
  REGION 1..231: note = Variant of adenylate kinase
MHHHHHHGGSGMMAYLVFLGPPGAGKGTQSKRIQEKTGIPHISTGDIFRDIVKKENDELGKKIKEIMEKGELVPDELVNEVVKRRLSEKDCEVGFILDGYPRTVAQAEFLDSFLESQNKQLTAAVLFKVPEDVVVQRLTSRLICPKCGRIYNMIFLPPKEDELCDDCKVKLVQRDDDKEETVRHRLKVYLEKTQPVIDYYGKKGILKRVDGSQGIDNVVAEVLKILGWSDK

SEQ ID NO: 1623 - DNA, 699 bp, synthetic construct
  misc_feature 1..699: note = Variant of adenylate kinase
  source 1..699: mol_type = other DNA
atgcaccatcatcaccatcacgggggctccggcatgatggcatatctggtgttcttaggtccgccgggcgcgggaaaaggtacccaatcgaaacgcattcaggaaaagactggcatcccacatattagcacgggcgatatcttccgtgaccgtgtcaagaaagagaacgatgaactgggcaagaagattaaagaggaaatggaaaaaggtgaactcgttccagatgaactggtgaatgaggtagtaaaacgccgcctgtcggagaaagactgcgaaaaaggctttattttggatggttatccgcgtaccgttgctcaagcggaattcctggatagttttcttgaatcccagaacaaacagttgacagccgccgtgctgttcaaagtccccgaagatgttgttgtgcaacgtttaacctctcgcctgatctgtccgaaatgcgggcgtatctacaacatgatttttctgccaccaaaagaagacgagctgtgtgacgattgcaaagtcaaattagtacagcgtgatgatgataaggaagaaacggttcgtcaccgcctgaaagtctaccttgagaagacccagccggtcattgactattatggcaagaaaggtattctcaaacgcgtagatgggtcgcaaggaatcgacaacgttgttgcagaagtcctgaagattctgggttggagcgataagtaatga

SEQ ID NO: 1624 - protein, 231 aa, synthetic construct
  REGION 1..231: note = Variant of adenylate kinase
MHHHHHHGGSGMMAYLVFLGPPGAGKGTQSKRIQEKTGIPHISTGDIFRDRVKKENDELGKKIKEEMEKGELVPDELVNEVVKRRLSEKDCEKGFILDGYPRTVAQAEFLDSFLESQNKQLTAAVLFKVPEDVVVQRLTSRLICPKCGRIYNMIFLPPKEDELCDDCKVKLVQRDDDKEETVRHRLKVYLEKTQPVIDYYGKKGILKRVDGSQGIDNVVAEVLKILGWSDK

SEQ ID NO: 1625 - DNA, 699 bp, synthetic construct
  misc_feature 1..699: note = Variant of adenylate kinase
  source 1..699: mol_type = other DNA
atgcaccatcatcaccatcacgggggctccggcatgatggcatatctggtgttcttaggtccgccgggcgcgggaaaaggtacccaatcgaaacgcattcaggaaaagactggcatcccacatattagcacgggcgatatcttccgtgacatcgttaagaaagagaacgatgaactgggcaagaagattaaagaaatcatggagaaaggtgaactcgttccagatgaactggtgaatgaggtagtaaaacgccgcctgtcggagaaagactgcgaaaagagttttattttggatggttatccgcgtaccgttgctcaagcggaattcctggatagttttcttgaatccaaccgtaaacagttgacagccgccgtgctgttcaaagtccccgaagatgttgttgtgcaacgtttaacctctcgcctgatctgtccgaaatgcgggcgtatctacaacatgatttttctgccaccaaaagaagacgagctgtgtgacgattgcaaagtcaaattagtacagcgtgatgatgataaggaagaaacggttcgtcaccgcctgaaagtctaccttgagaagacccagccggtcattgactattatggcaagaaaggtattctcaaacgcgtagatgggtcgcaaggaatcgacaacgttgttgcagaagtcctgaagattctgggttggagcgataagtaatga

SEQ ID NO: 1626 - protein, 231 aa, synthetic construct
  REGION 1..231: note = Variant of adenylate kinase
MHHHHHHGGSGMMAYLVFLGPPGAGKGTQSKRIQEKTGIPHISTGDIFRDIVKKENDELGKKIKEIMEKGELVPDELVNEVVKRRLSEKDCEKSFILDGYPRTVAQAEFLDSFLESNRKQLTAAVLFKVPEDVVVQRLTSRLICPKCGRIYNMIFLPPKEDELCDDCKVKLVQRDDDKEETVRHRLKVYLEKTQPVIDYYGKKGILKRVDGSQGIDNVVAEVLKILGWSDK

SEQ ID NO: 1627 - DNA, 699 bp, synthetic construct
  misc_feature 1..699: note = Variant of adenylate kinase
  source 1..699: mol_type = other DNA
atgcaccatcatcaccatcacgggggctccggcatgatggcatatctggtgttcttaggtccgccgggcgcgggaaaaggtacccaatcgaaacgcattcaggaaaagactggcatcccacatattagcacgggcgatatcttccgtgacatcgttaagaaagagaacgatgaactgggcaagaagattaaagaaatcatggagaaaggtgaactcgttccagatgaactggtgaatgaggtagtaaaacgccgcctgtcggagaaagactgcgaaaaaggctttattttggatggttatccgcgtaccgttgctcaagcggaattcctggatagttttcttgaatcccagaacaaacagttgacagccgccgtgctgttcaaagtccccgaagatgttgttgtgcaacgtttaacctctcgcctgatctgtccgaaatgcgggcgtatctacaacatgatttttctgccaccaaaagaagacgagctgtgtgacgattgcaaagtcaaattagtacagcgtgatgatgataaggaagaaacggttcgtcaccgcctgaaagtctaccttgagaagacccagccggtcattggctattatggcaagaaaggtattctcaaacgcgtagatgggtcgcaaggaatcgacaacgttgttgaagaagtcctgaagattctgggttggagcgataagtaatga

SEQ ID NO: 1628 - protein, 231 aa, synthetic construct
  REGION 1..231: note = Variant of adenylate kinase
MHHHHHHGGSGMMAYLVFLGPPGAGKGTQSKRIQEKTGIPHISTGDIFRDIVKKENDELGKKIKEIMEKGELVPDELVNEVVKRRLSEKDCEKGFILDGYPRTVAQAEFLDSFLESQNKQLTAAVLFKVPEDVVVQRLTSRLICPKCGRIYNMIFLPPKEDELCDDCKVKLVQRDDDKEETVRHRLKVYLEKTQPVIGYYGKKGILKRVDGSQGIDNVVEEVLKILGWSDK

SEQ ID NO: 1629 - DNA, 699 bp, synthetic construct
  misc_feature 1..699: note = Variant of adenylate kinase
  source 1..699: mol_type = other DNA
atgcaccatcatcaccatcacgggggctccggcatgatggcatatctggtgttcttaggtccgccgggcgcgggaaaaggtacccaatcgaaacgcattcaggaaaagactggcatcccacatattagcacgggcgatatcttccgtgacatcgttaagaaagagaacgatgaactgggcaagaagattaaagaaatcatggagaaaggtgaactcgttccagatgaactggtgaatgaggtagtaaaacgccgcctgtcggagaaagactgcgaagtgggctttattttggatggttatccgcgtaccgttgctcaagcggaattcctggatagttttcttgaatccaacaataaacagttgacagccgccgtgctgttcaaagtccccgaagatgttgttgtgcaacgtttaacctctcgcctgatctgtccgaaatgcgggcgtatctacaacatgatttttctgccaccaaaagaagacgagctgtgtgacgattgcaaagtcaaattagtacagcgtgatgatgataaagaggaaacggttcgtcaccgcctgaaagtctaccttgagaagacccagccggtcattgactattatggcaagaaaggtattctcaaacgcgtagatgggtcgcaaggaatcgacaacgttgttgcagaagtcctgaagattctgggttggagcgataagtaatga

SEQ ID NO: 1630 - protein, 231 aa, synthetic construct
  REGION 1..231: note = Variant of adenylate kinase
MHHHHHHGGSGMMAYLVFLGPPGAGKGTQSKRIQEKTGIPHISTGDIFRDIVKKENDELGKKIKEIMEKGELVPDELVNEVVKRRLSEKDCEVGFILDGYPRTVAQAEFLDSFLESNNKQLTAAVLFKVPEDVVVQRLTSRLICPKCGRIYNMIFLPPKEDELCDDCKVKLVQRDDDKEETVRHRLKVYLEKTQPVIDYYGKKGILKRVDGSQGIDNVVAEVLKILGWSDK

SEQ ID NO: 1631 - DNA, 699 bp, synthetic construct
  misc_feature 1..699: note = Variant of adenylate kinase
  source 1..699: mol_type = other DNA
atgcaccatcatcaccatcacgggggctccggcatgatggcatatctggtgttcttaggtccgccgggcgcgggaaaaggtacccaatcgaaacgcattcaggaaaagactggcatcccacatattagcacgggcgatatcttccgtgacatcgttaagaaagagaacgatgaactgggcaagaagattaaagaaatcatggagaaaggtgaactcgttccagatgaactggtgaatgaggtagtaaaacgccgcctgtcggagaaagactgcgaaaaaggctttattttggatggttatccgcgtaccgttgctcaagcggaattcctggatagttttcttgaatccaaccgtaaacagttgacagccgccgtgctgttcaaagtccccgaagatgttgttgtgcaacgtttaacctctcgcctgatctgtccgaaatgcgggcgtatctacaacatgatttttctgccaccaaaagaagacgagctgtgtgacgattgcaaagtcaaattagtacagcgtgatgatgataaggaagaaacggttcgtcaccgcctgaaagtctaccttgagaagacccagccggtcattgactattatggcaagaaaggtattctcaaacgcgtagatgggtcgcaaggaatcgacaacgttgttgcagaagtcctgaagattctgggttggagcgataagtaatga

SEQ ID NO: 1632 - protein, 231 aa, synthetic construct
  REGION 1..231: note = Variant of adenylate kinase
MHHHHHHGGSGMMAYLVFLGPPGAGKGTQSKRIQEKTGIPHISTGDIFRDIVKKENDELGKKIKEIMEKGELVPDELVNEVVKRRLSEKDCEKGFILDGYPRTVAQAEFLDSFLESNRKQLTAAVLFKVPEDVVVQRLTSRLICPKCGRIYNMIFLPPKEDELCDDCKVKLVQRDDDKEETVRHRLKVYLEKTQPVIDYYGKKGILKRVDGSQGIDNVVAEVLKILGWSDK

SEQ ID NO: 1633 - DNA, 699 bp, synthetic construct
  misc_feature 1..699: note = Variant of adenylate kinase
  source 1..699: mol_type = other DNA
atgcaccatcatcaccatcacgggggctccggcatgatggcatatctggtgttcttaggtccgccgggcgcgggaaaaggtacccaatcgaaacgcattcaggaaaagactggcatcccacatattagcacgggcgatatcttccgtgacatcgttaagaaagagaacgatgaactgggcaagaagattaaagaaatcatggagaaaggtgaactcgttccagatgaactggtgaatgaggtagtaaaacgccgcctgtcggagaaagactgcgaagtgggctttattttggatggttatccgcgtaccgttgctcaagcggaattcctggatagttttcttgaatcccagaataaacagttgacagccgccgtgctgttcaaagtccccgaagatgttgttgtgcaacgtttaacctctcgcctgatctgtccgaaatgcgggcgtatctacaacatgatttttctgccaccaaaagaagacgagctgtgtgacgattgcaaagtcaaattagtacagcgtgatgatgataaggaagaaacggttcgtcaccgcctgaaagtctaccttgagaagacccagccggtcattggctattatggcaagaaaggtattctcaaacgcgtagatgggtcgcaaggaatcgacaacgttgttgcagaagtcctgaagattctgggttggagcgataagtaatga

SEQ ID NO: 1634 - protein, 231 aa, synthetic construct
  REGION 1..231: note = Variant of adenylate kinase
MHHHHHHGGSGMMAYLVFLGPPGAGKGTQSKRIQEKTGIPHISTGDIFRDIVKKENDELGKKIKEIMEKGELVPDELVNEVVKRRLSEKDCEVGFILDGYPRTVAQAEFLDSFLESQNKQLTAAVLFKVPEDVVVQRLTSRLICPKCGRIYNMIFLPPKEDELCDDCKVKLVQRDDDKEETVRHRLKVYLEKTQPVIGYYGKKGILKRVDGSQGIDNVVAEVLKILGWSDK

SEQ ID NO: 1635 - DNA, 699 bp, synthetic construct
  misc_feature 1..699: note = Variant of adenylate kinase
  source 1..699: mol_type = other DNA
atgcaccatcatcaccatcacgggggctccggcatgatggcatatctggtgttcttaggtccgccgggcgcgggaaaaggtacccaatcgaaacgcattcaggaaaagactggcatcccacatattagcacgggcgatatcttccgtgacatcgtcaagaaagagaacgatgaactgggcaagaagattaaagagatcatgcgtaaaggtgaactcgttccagatgaactggttaatgaggtagtaaaacgccgcctgtcggagaaagactgcgaaaaaggctttattttggatggttatccgcgtaccgttgctcaagcggaattcctggatagttttcttgaatcccagaacaaacagttgacagccgccgtgctgttcaaagtccccgaagatgttgttgtgcaacgtttaacctctcgcctgatctgtccgaaatgcgggcgtatctacaacatgatttttctgccaccaaaagaagacgagctgtgtgacgattgcaaagtcaaattagtacgccgtgatgatgataaggaagaaacggttcgtcaccgcctgaaagtctaccttgagaagacccagccggtcattgactattatggcaagaaaggtattctcaaacgcgtagatgggtcgcaaggaatcgacaacgttgttgcagaagtcctgaagattctgggttggagcgataagtaatga

SEQ ID NO: 1636 - protein, 231 aa, synthetic construct
  REGION 1..231: note = Variant of adenylate kinase
MHHHHHHGGSGMMAYLVFLGPPGAGKGTQSKRIQEKTGIPHISTGDIFRDIVKKENDELGKKIKEIMRKGELVPDELVNEVVKRRLSEKDCEKGFILDGYPRTVAQAEFLDSFLESQNKQLTAAVLFKVPEDVVVQRLTSRLICPKCGRIYNMIFLPPKEDELCDDCKVKLVRRDDDKEETVRHRLKVYLEKTQPVIDYYGKKGILKRVDGSQGIDNVVAEVLKILGWSDK

SEQ ID NO: 1637 - DNA, 699 bp, synthetic construct
  misc_feature 1..699: note = Variant of adenylate kinase
  source 1..699: mol_type = other DNA
atgcaccatcatcaccatcacgggggctccggcatgatggcatatctggtgttcttaggtccgccgggcgcgggaaaaggtacccaatcgaaacgcattcaggaaaagactggcatctttcatattagcacgggcgatatcttccgtgacatcgttaagaaagagaacgatgaactgggcaagaagattaaagaaatcatggagaaaggtgaactcgttccagatgaactggtgaatgaggtagtaaaacgccgcctgtcggagaaagactgcgaaaagggctttattttggatggttatccgcgtaccgttgctcaagcggaattcctggatagttttcttgaatccaacaataaacagttgacagccgccgtgctgttcaaagtccccgaagatgttgttgtgcaacgtttaacctctcgcctgatctgtccgaaatgcgggcgtatctacaacatgatttttctgccaccaaaagaagacgagctgtgtgacgattgcaaagtcaaattagtacagcgtgatgatgataaggaagaaacggttcgtcaccgcctgaaagtctaccttgagaagacccagccggtcattgactattatggcaagaaaggtattctcaaacgcgtagatgggtcgcaaggaatcgacaacgttgttgcagaagtcctgaagattctgggttggagcgataagtaatga

SEQ ID NO: 1638 - protein, 231 aa, synthetic construct
  REGION 1..231: note = Variant of adenylate kinase
MHHHHHHGGSGMMAYLVFLGPPGAGKGTQSKRIQEKTGIFHISTGDIFRDIVKKENDELGKKIKEIMEKGELVPDELVNEVVKRRLSEKDCEKGFILDGYPRTVAQAEFLDSFLESNNKQLTAAVLFKVPEDVVVQRLTSRLICPKCGRIYNMIFLPPKEDELCDDCKVKLVQRDDDKEETVRHRLKVYLEKTQPVIDYYGKKGILKRVDGSQGIDNVVAEVLKILGWSDK

SEQ ID NO: 1639 - DNA, 699 bp, synthetic construct
  misc_feature 1..699: note = Variant of adenylate kinase
  source 1..699: mol_type = other DNA
atgcaccatcatcaccatcacgggggctccggcatgatggcatatctggtgttcttaggtccgccgggcgcgggaaaaggtacccaatcgaaacgcattcaggaaaagactggcatcccacatattagcacgggcgatatcttccgtgacatcgttaagaaagagaacgatgaactgggcaagaagattaaagaaatcatggagaaaggtgaactcgttccagatgaactggtgaatgaggtagtaaaacgccgcctgtcggagaaagactgcgaaaaaggctttattttggatggttatccgcgtaccgttgctcaagcggaattcctggatagttttcttgaatcccagaacaaacagttgacagccgccgtgctgttcaaagtccccgaagatgttgttgtgcaacgtttaacctctcgcctgatctgtccgaaatgcgggcgtatctacaacatgatttttctgccaccaaaagaagacgagctgtgtgacgattgcaaagtcaaattagtacagcgtgatgatgataaggaagaaacggttcgtcaccgcctgaaagtctaccttgagaagacccagccggtcattgactattatggcaagaaaggtattctcaaacgcgtagatgggtcgcaaggaatcgacaacgttgttgcagaagtcctggggattctgggttggagcgataagtaatga

SEQ ID NO: 1640 - protein, 231 aa, synthetic construct
  REGION 1..231: note = Variant of adenylate kinase
MHHHHHHGGSGMMAYLVFLGPPGAGKGTQSKRIQEKTGIPHISTGDIFRDIVKKENDELGKKIKEIMEKGELVPDELVNEVVKRRLSEKDCEKGFILDGYPRTVAQAEFLDSFLESQNKQLTAAVLFKVPEDVVVQRLTSRLICPKCGRIYNMIFLPPKEDELCDDCKVKLVQRDDDKEETVRHRLKVYLEKTQPVIDYYGKKGILKRVDGSQGIDNVVAEVLGILGWSDK

SEQ ID NO: 1641 - DNA, 699 bp, synthetic construct
  misc_feature 1..699: note = Variant of adenylate kinase
  source 1..699: mol_type = other DNA
atgcaccatcatcaccatcacgggggctccggcatgatggcatatctggtgttcttaggtccgccgggcgcgggaaaaggtacccaatcgaaacgcattcaggaaaagactggcatctttcatattagcacgggcgatatcttccgtgacatcgttaagaaagagaacgatgaactgggtaagaaaattaaagaaatcatggagaaaggtgaactcgttccagatgaactggtgaatgaggtagtaaaacgccgcctgtcggagaaagactgcgaaaaaggctttattttggatggttatccgcgtaccgttgctcaagcggaattcctggatagttttcttgaatcccagcgtaaacagttgacagccgccgtgctgttcaaagtccccgaagatgttgttgtgcaacgtttaacctctcgcctgatctgtccgaaatgcgggcgtatctacaacatgatttttctgccaccaaaagaagacgagctgtgtgacgattgcaaagtcaaattagtacagcgtgatgatgataaagaggaaacggttcgtcaccgcctgaaagtctaccttgagaagacccagccggtcattgactattatggcaagaaaggtattctcaaacgcgtagatgggtcgcaaggaatcgacaacgttgttgcagaagtcctgaagattattggttggagcgataagtaatga

SEQ ID NO: 1642 - protein, 231 aa, synthetic construct
  REGION 1..231: note = Variant of adenylate kinase
MHHHHHHGGSGMMAYLVFLGPPGAGKGTQSKRIQEKTGIFHISTGDIFRDIVKKENDELGKKIKEIMEKGELVPDELVNEVVKRRLSEKDCEKGFILDGYPRTVAQAEFLDSFLESQRKQLTAAVLFKVPEDVVVQRLTSRLICPKCGRIYNMIFLPPKEDELCDDCKVKLVQRDDDKEETVRHRLKVYLEKTQPVIDYYGKKGILKRVDGSQGIDNVVAEVLKIIGWSDK

SEQ ID NO: 1643 - DNA, 699 bp, synthetic construct
  misc_feature 1..699: note = Variant of adenylate kinase
  source 1..699: mol_type = other DNA
atgcaccatcatcaccatcacgggggctccggcatgatggcatatctggtgttcttaggtccgccgggcgcgggaaaaggtacccaatcgaaacgcattcaggaaaagactggcatcccacatattagcacgggcgatatcttccgtgacatcgttaagaaagagaacgatgaactgggcaagaagattaaagaaatcatggagaaaggtgaactcgttccagatgaactggtgaatgaggtagtaaaacgccgcctgtcggagaaagactgcgaagtgagttttattttggatggttatccgcgtaccgttgctcaagcggaattcctggatagttttcttgaatcccagaataaacagttgacagccgccgtgctgttcaaagtccccgaagatgttgttgtgcaacgtttaacctctcgcctgatctgtccgaaatgcgggcgtatctacaacatgatttttctgccaccaaaagaagacgagctgtgtgacgattgcaaagtcaaattagtacagcgtgatgatgataaggaagaaacggttcgtcaccgcctgaaagtctaccttgagaagacccagccggtcattgactattatggcaagaaaggtattctcaaacgcgtagatgggtcgcaaggaatcgacaacgttgttgcagaagtcctgaagattctgggttggagcgataagtaatga

SEQ ID NO: 1644 - protein, 231 aa, synthetic construct
  REGION 1..231: note = Variant of adenylate kinase
MHHHHHHGGSGMMAYLVFLGPPGAGKGTQSKRIQEKTGIPHISTGDIFRDIVKKENDELGKKIKEIMEKGELVPDELVNEVVKRRLSEKDCEVSFILDGYPRTVAQAEFLDSFLESQNKQLTAAVLFKVPEDVVVQRLTSRLICPKCGRIYNMIFLPPKEDELCDDCKVKLVQRDDDKEETVRHRLKVYLEKTQPVIDYYGKKGILKRVDGSQGIDNVVAEVLKILGWSDK

SEQ ID NO: 1645 - DNA, 699 bp, synthetic construct
  misc_feature 1..699: note = Variant of adenylate kinase
  source 1..699: mol_type = other DNA
atgcaccatcatcaccatcacgggggctccggcatgatggcatatctggtgttcttaggtccgccgggcgcgggaaaaggtacccaatcgaaacgcattcaggaaaagactggcatctttcatattagcacgggcgatatcttccgtgacatcgttaagaaagagaacgatgaactgggtaagctgattaaagaaatcatggagaaaggtgaactcgttccagatgaactggtgaatgaggtagtaaaacgccgcctgtcggagaaagactgcgaaaagggctttattttggatggttatccgcgtaccgttgctcaagcggaattcctggatagttttcttgaatcccagcgtaaacagttgacagccgccgtgctgttcaaagtccccgaagatgttgttgtgcaacgtttaacctctcgcctgatctgtccgaaatgcgggcgtatctacaacatgatttttctgccaccaaaagaagacgagctgtgtgacgattgcaaagtcaaattagtacagcgtgatgatgataaggaagaaacggttcgtcaccgcctgaaagtctaccttgagaagacccagccggtcattgactattatggcaagaaaggtattctcaaacgcgtagatgggtcgcaaggaatcgacaacgttgttgcagaagtcctgaagattctgggttggagcgataagtaatga

SEQ ID NO: 1646 - protein, 231 aa, synthetic construct
  REGION 1..231: note = Variant of adenylate kinase
MHHHHHHGGSGMMAYLVFLGPPGAGKGTQSKRIQEKTGIFHISTGDIFRDIVKKENDELGKLIKEIMEKGELVPDELVNEVVKRRLSEKDCEKGFILDGYPRTVAQAEFLDSFLESQRKQLTAAVLFKVPEDVVVQRLTSRLICPKCGRIYNMIFLPPKEDELCDDCKVKLVQRDDDKEETVRHRLKVYLEKTQPVIDYYGKKGILKRVDGSQGIDNVVAEVLKILGWSDK

SEQ ID NO: 1647 - DNA, 699 bp, synthetic construct
  misc_feature 1..699: note = Variant of adenylate kinase
  source 1..699: mol_type = other DNA
atgcaccatcatcaccatcacgggggctccggcatgtcggcatatctggtgttcttaggtccgccgggcgcgggaaaaggtacccaatcgaaacgcattcaggaaaagactggcatcccacatattagcacgggcgatatcttccgtgacatcgtcaagaaagagaacgatgaactgggcaagaagattaaagaaatcatggagaaaggtgaactcgttccagatgaactgggtaatgcggtagtaaaacgccgcctgtcggagaaagactgcgaaaaaggctttattttggatggttatccgcgtaccgttgctcaagcggaattcctggatagttttcttgaatcccagaacaaacagttgacagccgccgtgctgttcaaagtccccgaagatgttgttgtgcaacgtttaacctctcgcctgatctgtccgaaatgcgggcgtatctacaacatgatttttctgccaccaaaagaagacgagctgtgtgacgattgcaaagtcaaattagtacagcgtgatgatgataaggaagaaacggttcgtcaccgcctgaaagtctaccttgagaagacccagccggtcattgactattatggcaagaaaggtattctcaaacgcgtagatgggtcgcaaggaatcgacaacgttgttgcagaagtcctggggattctgggttggagcgataagtaatga

SEQ ID NO: 1648 - protein, 231 aa, synthetic construct
  REGION 1..231: note = Variant of adenylate kinase
MHHHHHHGGSGMSAYLVFLGPPGAGKGTQSKRIQEKTGIPHISTGDIFRDIVKKENDELGKKIKEIMEKGELVPDELGNAVVKRRLSEKDCEKGFILDGYPRTVAQAEFLDSFLESQNKQLTAAVLFKVPEDVVVQRLTSRLICPKCGRIYNMIFLPPKEDELCDDCKVKLVQRDDDKEETVRHRLKVYLEKTQPVIDYYGKKGILKRVDGSQGIDNVVAEVLGILGWSDK

SEQ ID NO: 1649 - DNA, 699 bp, synthetic construct
  misc_feature 1..699: note = Variant of adenylate kinase
  source 1..699: mol_type = other DNA
atgcaccatcatcaccatcacgggggctccggcatgatggcatatctggtgttcttaggtccgccgggcgcgggaaaaggtacccaatcgaaacgcattcaggaaaagactggcatcccacatattagcacgggcgatatcttccgtgacatcgtcaagaaagagaacgatgaactggctaagaagattaaagaaatcatggagaaaggtgaactcgttccagatgaactgggtaatgcggtagtaaaacgccgcctgtcggagaaagactgcgaaaaaggctttattttggatggttatccgcgtaccgttgctcaagcggaattcctggatagttttcttgaatcccagaacaaacagttgacagccgccgtgctgttcaaagtccccgaagatgttgttgtgcaacgtttaacctctcgcctgatctgtccgaaatgcgggcgtatctacaacatgatttttctgccaccaaaagaagacgagctgtgtgacgattgcaaagtcaaattagtacagcgtgatgatgataaggaagaaacggttcgtcaccgcctgaaagtctaccttgagaagacccagccggtcattgactattatggcaagaaaggtattctcaaacgcgtagatgggtcgcaaggaatcgacaacgttgttgcagaagtcctggggattctgggttggagcgataagtaatga

SEQ ID NO: 1650 - protein, 231 aa, synthetic construct
  REGION 1..231: note = Variant of adenylate kinase
MHHHHHHGGSGMMAYLVFLGPPGAGKGTQSKRIQEKTGIPHISTGDIFRDIVKKENDELAKKIKEIMEKGELVPDELGNAVVKRRLSEKDCEKGFILDGYPRTVAQAEFLDSFLESQNKQLTAAVLFKVPEDVVVQRLTSRLICPKCGRIYNMIFLPPKEDELCDDCKVKLVQRDDDKEETVRHRLKVYLEKTQPVIDYYGKKGILKRVDGSQGIDNVVAEVLGILGWSDK

SEQ ID NO: 1651 - DNA, 699 bp, synthetic construct
  misc_feature 1..699: note = Variant of adenylate kinase
  source 1..699: mol_type = other DNA
atgcaccatcatcaccatcacgggggctccggcatgatggcatatctggtgttcttaggtccgccgggcgcgggaaaaggtacccaatcgaaacgcattcaggaaaagactggcatcccacatattagcacgggcgatatcttccgtgacatcgtcaagaaagagaacgatgaactgggcaagaagattaaagaaatcatggagaaaggtgaactcgttccagatgaactgggtaatgcggtagtaaaacgccgcctgtcggagaaagactgcgaaaaaggctttattttggatggttatccgcgtaccgttgctcaagcggaattcctggatagttttcttgaatcccagaacaaacagttgacagccgccgtggagttcaaagtccccgaagatgttgttgtgcaacgtttaacctctcgcctgatctgtccgaaatgcgggcgtatctacaacatgatttttctgccaccaaaagaagacgagctgtgtgacgattgcaaagtcaaattagtacagcgtgatgatgataaggaagaaacggttcgtcaccgcctgaaagtctaccttgagaagacccagccggtcattgactattatggcaagaaaggtattctcaaacgcgtagatgggtcgcaaggaatcgacaacgttgttgcagaagtcctggggattctgggttggagcgataagtaatga

SEQ ID NO: 1652 - protein, 231 aa, synthetic construct
  REGION 1..231: note = Variant of adenylate kinase
MHHHHHHGGSGMMAYLVFLGPPGAGKGTQSKRIQEKTGIPHISTGDIFRDIVKKENDELGKKIKEIMEKGELVPDELGNAVVKRRLSEKDCEKGFILDGYPRTVAQAEFLDSFLESQNKQLTAAVEFKVPEDVVVQRLTSRLICPKCGRIYNMIFLPPKEDELCDDCKVKLVQRDDDKEETVRHRLKVYLEKTQPVIDYYGKKGILKRVDGSQGIDNVVAEVLGILGWSDK

SEQ ID NO: 1653 - DNA, 699 bp, synthetic construct
  misc_feature 1..699: note = Variant of adenylate kinase
  source 1..699: mol_type = other DNA
atgcaccatcatcaccatcacgggggctccggcatgatggcatatctggtgttcttaggtccgccgggcgcgggaaaaggtacccaatcgaaacgcattcaggaaaagactggcatcccacatattagcacgggcgatatcttccgtgacatcgtcaagaaagagaacgatgaactgggcaagaagattaaagaaatcatggagaaaggtgaactcgttccagatgaactgggtaatgcggtagtaaaacgccgcctgtcggagaaagactgcgaaaaaggctttattttggatggttatccgcgtaccctggctcaagcggaattcctggatagttttcttgaatcccagaacaaacagttgacagccgccgtgctgttcaaagtccccgaagatgttgttgtgcaacgtttaacctctcgcctgatctgtccgaaatgcgggcgtatctacaacatgatttttctgccaccaaaagaagacgagctgtgtgacgattgcaaagtcaaattagtacagcgtgatgatgataaggaagaaacggttcgtcaccgcctgaaagtctaccttgagaagacccagccggtcattgactattatggcaagaaaggtattctcaaacgcgtagatgggtcgcaaggaatcgacaacgttgttgcagaagtcctggggattctgggttggagcgataagtaatga

SEQ ID NO: 1654 - protein, 231 aa, synthetic construct
  REGION 1..231: note = Variant of adenylate kinase
MHHHHHHGGSGMMAYLVFLGPPGAGKGTQSKRIQEKTGIPHISTGDIFRDIVKKENDELGKKIKEIMEKGELVPDELGNAVVKRRLSEKDCEKGFILDGYPRTLAQAEFLDSFLESQNKQLTAAVLFKVPEDVVVQRLTSRLICPKCGRIYNMIFLPPKEDELCDDCKVKLVQRDDDKEETVRHRLKVYLEKTQPVIDYYGKKGILKRVDGSQGIDNVVAEVLGILGWSDK

SEQ ID NO: 1655 - DNA, 699 bp, synthetic construct
  misc_feature 1..699: note = Variant of adenylate kinase
  source 1..699: mol_type = other DNA
atgcaccatcatcaccatcacgggggctccggcatgatggcatatctggtgttcttaggtccgccgggcgcgggaaaaggtacccaatcgaaacgcattcaggaaaagactggcatcccacatattagcacgggcgatatcttccgtgacatcgtcaagaaagagaacgatgaactgggcaagaagattaaagaaatcatggagaaaggtgaactcgttccagatgaactgggtaatgcggtagtaaaacgccgcctgtcggagaaagactgcgaaaaaggctttattttggatggttatccgcgtaccgttgctcaagcggaattcctggatagttttcttgaatcccagaacaaacagttgacagccgccgtgctgttcaaagtccccgaagatgttgttgtgcaacgtttaacctctcgcctgatctgtccgaaatgcgggcgtatctacaacatgatttttctgccaccaaaagaagacgagctgtgtgacgattgcaaagtcaaattagtacagcgtgatgatgataaggaagaaacggttcgtcaccgcctgaaagtctaccttgagaagacccagccggtcattgactattatagtaagaaaggtattctcaaacgcgtagatgggtcgcaaggaatcgacaacgttgttgcagaagtcctggggattctgggttggagcgataagtaatga

SEQ ID NO: 1656 - protein, 231 aa, synthetic construct
  REGION 1..231: note = Variant of adenylate kinase
MHHHHHHGGSGMMAYLVFLGPPGAGKGTQSKRIQEKTGIPHISTGDIFRDIVKKENDELGKKIKEIMEKGELVPDELGNAVVKRRLSEKDCEKGFILDGYPRTVAQAEFLDSFLESQNKQLTAAVLFKVPEDVVVQRLTSRLICPKCGRIYNMIFLPPKEDELCDDCKVKLVQRDDDKEETVRHRLKVYLEKTQPVIDYYSKKGILKRVDGSQGIDNVVAEVLGILGWSDK

SEQ ID NO: 1657 - DNA, 699 bp, synthetic construct
  misc_feature 1..699: note = Variant of adenylate kinase
  source 1..699: mol_type = other DNA
atgcaccatcatcaccatcacgggggctccggcatgatggcatatctggtgttcttaggtccgccgggcgcgggaaaaggtacccaatcgaaacgcattcaggaaaagactggcatcccacatattagcacgggcgatatcttccgtgacatcgtcaagaaagagaacgatgaagagggcaagaagattaaagaaatcatggagaaaggtgaactcgttccagatgaactgggtaatgcggtagtaaaacgccgcctgtcggagaaagactgcgaaaaaggctttattttggatggttatccgcgtaccgttgctcaagcggaattcctggatagttttcttgaatcccagaacaaacagttgacagccgccgtgctgttcaaagtccccgaagatgttgttgtgcaacgtttaacctctcgcctgatctgtccgaaatgcgggcgtatctacaacatgatttttctgccaccaaaagaagacgagctgtgtgacgattgcaaagtcaaattagtacagcgtgatgatgataaggaagaaacggttcgtcaccgcctgaaagtctaccttgagaagacccagccggtcattgactattatggcaagaaaggtattctcaaacgcgtagatgggtcgcaaggaatcgacaacgttgttgcagaagtcctggggattctgggttggagcgataagtaatga

SEQ ID NO: 1658 - protein, 231 aa, synthetic construct
  REGION 1..231: note = Variant of adenylate kinase
MHHHHHHGGSGMMAYLVFLGPPGAGKGTQSKRIQEKTGIPHISTGDIFRDIVKKENDEEGKKIKEIMEKGELVPDELGNAVVKRRLSEKDCEKGFILDGYPRTVAQAEFLDSFLESQNKQLTAAVLFKVPEDVVVQRLTSRLICPKCGRIYNMIFLPPKEDELCDDCKVKLVQRDDDKEETVRHRLKVYLEKTQPVIDYYGKKGILKRVDGSQGIDNVVAEVLGILGWSDK

SEQ ID NO: 1659 - DNA, 699 bp, synthetic construct
  misc_feature 1..699: note = Variant of adenylate kinase
  source 1..699: mol_type = other DNA
atgcaccatcatcaccatcacgggggctccggcatgatggcatatctggtgttcttaggtccgccgggcgcgggaaaaggtacccaatcgaaacgcattcaggaaaagactggcatcccacatattagcacgggcgatatcttccgtgacatcgtcaagaaacagaacgatgaactgggcaagaagattaaagaaatcatggagaaaggtgaactcgttccagatgaactgggtaatgcggtagtaaaacgccgcctgtcggagaaagactgcgaaaaaggctttattttggatggttatccgcgtaccgttgctcaagcggaattcctggatagttttcttgaatcccagaacaaacagttgacagccgccgtgctgttcaaagtccccgaagatgttgttgtgcaacgtttaacctctcgcctgatctgtccgaaatgcgggcgtatctacaacatgatttttctgccaccaaaagaagacgagctgtgtgacgattgcaaagtcaaattagtacagcgtgatgatgataaggaagaaacggttcgtcaccgcctgaaagtctaccttgagaagacccagccggtcattgactattatggcaagaaaggtattctcaaacgcgtagatgggtcgcaaggaatcgacaacgttgttgcagaagtcctggggattctgggttggagcgataagtaatga

SEQ ID NO: 1660 - protein, 231 aa, synthetic construct
  REGION 1..231: note = Variant of adenylate kinase
MHHHHHHGGSGMMAYLVFLGPPGAGKGTQSKRIQEKTGIPHISTGDIFRDIVKKQNDELGKKIKEIMEKGELVPDELGNAVVKRRLSEKDCEKGFILDGYPRTVAQAEFLDSFLESQNKQLTAAVLFKVPEDVVVQRLTSRLICPKCGRIYNMIFLPPKEDELCDDCKVKLVQRDDDKEETVRHRLKVYLEKTQPVIDYYGKKGILKRVDGSQGIDNVVAEVLGILGWSDK

SEQ ID NO: 1661 - DNA, 699 bp, synthetic construct
  misc_feature 1..699: note = Variant of adenylate kinase
  source 1..699: mol_type = other DNA
atgcaccatcatcaccatcacgggggctccggcatgatggcatatctggtgttcttaggtccgccgggcgcgggaaaaggtacccaatcgaaacgcattcaggaaaagactggcatcccacatattagcacgggcgatatcttccgtgacatcgtcaagaaagagaacgatgaactgggcaagaagattaaagaaatcatggagaaaggtgaactcgttccagatgaactgggtaatgcggtagtaaaacgccgcctgtcggagaaagactgcgaaaaaggctttattttggatggttatccgcgtaccgttgctcaagcggaattcctggatagttttcttgaatcccagaacaaacagttgacagccgccgtgctgttcaaagtccccgaagatgaggttgtgcaacgtttaacctctcgcctgatctgtccgaaatgcgggcgtatctacaacatgatttttctgccaccaaaagaagacgagctgtgtgacgattgcaaagtcaaattagtacagcgtgatgatgataaggaagaaacggttcgtcaccgcctgaaagtctaccttgagaagacccagccggtcattgactattatggcaagaaaggtattctcaaacgcgtagatgggtcgcaaggaatcgacaacgttgttgcagaagtcctggggattctgggttggagcgataagtaatga

SEQ ID NO: 1662 - protein, 231 aa, synthetic construct
  REGION 1..231: note = Variant of adenylate kinase
MHHHHHHGGSGMMAYLVFLGPPGAGKGTQSKRIQEKTGIPHISTGDIFRDIVKKENDELGKKIKEIMEKGELVPDELGNAVVKRRLSEKDCEKGFILDGYPRTVAQAEFLDSFLESQNKQLTAAVLFKVPEDEVVQRLTSRLICPKCGRIYNMIFLPPKEDELCDDCKVKLVQRDDDKEETVRHRLKVYLEKTQPVIDYYGKKGILKRVDGSQGIDNVVAEVLGILGWSDK

SEQ ID NO: 1663 - DNA, 699 bp, synthetic construct
  misc_feature 1..699: note = Variant of adenylate kinase
  source 1..699: mol_type = other DNA
atgcaccatcatcaccatcacgggggctccggcatgatggcatatctggtgttcttaggtccgccgggcgcgggaaaaggtacccaatcgaaacgcattcaggaaaagactggcatcccacatattagcacgggcgatatcttccgtgacatcgtcaagaaagagaacgatgaactgggccctaagattaaagaaatcatggagaaaggtgaactcgttccagatgaactgggtaatgcggtagtaaaacgccgcctgtcggagaaagactgcgaaaaaggctttattttggatggttatccgcgtaccgttgctcaagcggaattcctggatagttttcttgaatcccagaacaaacagttgacagccgccgtgctgttcaaagtccccgaagatgttgttgtgcaacgtttaacctctcgcctgatctgtccgaaatgcgggcgtatctacaacatgatttttctgccaccaaaagaagacgagctgtgtgacgattgcaaagtcaaattagtacagcgtgatgatgataaggaagaaacggttcgtcaccgcctgaaagtctaccttgagaagacccagccggtcattgactattatggcaagaaaggtattctcaaacgcgtagatgggtcgcaaggaatcgacaacgttgttgcagaagtcctggggattctgggttggagcgataagtaatga

SEQ ID NO: 1664 - protein, 231 aa, synthetic construct
  REGION 1..231: note = Variant of adenylate kinase
MHHHHHHGGSGMMAYLVFLGPPGAGKGTQSKRIQEKTGIPHISTGDIFRDIVKKENDELGPKIKEIMEKGELVPDELGNAVVKRRLSEKDCEKGFILDGYPRTVAQAEFLDSFLESQNKQLTAAVLFKVPEDVVVQRLTSRLICPKCGRIYNMIFLPPKEDELCDDCKVKLVQRDDDKEETVRHRLKVYLEKTQPVIDYYGKKGILKRVDGSQGIDNVVAEVLGILGWSDK

SEQ ID NO: 1665 - DNA, 699 bp, synthetic construct
  misc_feature 1..699: note = Variant of adenylate kinase
  source 1..699: mol_type = other DNA
atgcaccatcatcaccatcacgggggctccggcatgatggcatatctggtgttcttaggtccgccgggcgcgggaaaaggtacccaatcgaaacgcattcaggaaaagactggcatcccacatattagcacgggcgatatcttccgtgacatcgtcaagaaagagaacgatgaaatgggcaagaagattaaagaaatcatggagaaaggtgaactcgttccagatgaactgggtaatgcggtagtaaaacgccgcctgtcggagaaagactgcgaaaaaggctttattttggatggttatccgcgtaccgttgctcaagcggaattcctggatagttttcttgaatcccagaacaaacagttgacagccgccgtgctgttcaaagtccccgaagatgttgttgtgcaacgtttaacctctcgcctgatctgtccgaaatgcgggcgtatctacaacatgatttttctgccaccaaaagaagacgagctgtgtgacgattgcaaagtcaaattagtacagcgtgatgatgataaggaagaaacggttcgtcaccgcctgaaagtctaccttgagaagacccagccggtcattgactattatggcaagaaaggtattctcaaacgcgtagatgggtcgcaaggaatcgacaacgttgttgcagaagtcctggggattctgggttggagcgataagtaatga

SEQ ID NO: 1666 - protein, 231 aa, synthetic construct
  REGION 1..231: note = Variant of adenylate kinase
MHHHHHHGGSGMMAYLVFLGPPGAGKGTQSKRIQEKTGIPHISTGDIFRDIVKKENDEMGKKIKEIMEKGELVPDELGNAVVKRRLSEKDCEKGFILDGYPRTVAQAEFLDSFLESQNKQLTAAVLFKVPEDVVVQRLTSRLICPKCGRIYNMIFLPPKEDELCDDCKVKLVQRDDDKEETVRHRLKVYLEKTQPVIDYYGKKGILKRVDGSQGIDNVVAEVLGILGWSDK

SEQ ID NO: 1667 - DNA, 699 bp, synthetic construct
  misc_feature 1..699: note = Variant of adenylate kinase
  source 1..699: mol_type = other DNA
atgcaccatcatcaccatcacgggggctccggcatgggtgcatatctggtgttcttaggtccgccgggcgcgggaaaaggtacccaatcgaaacgcattcaggaaaagactggcatcccacatattagcacgggcgatatcttccgtgacatcgtcaagaaagagaacgatgaactgggcaagaagattaaagaaatcatggagaaaggtgaactcgttccagatgaactgggtaatgcggtagtaaaacgccgcctgtcggagaaagactgcgaaaaaggctttattttggatggttatccgcgtaccgttgctcaagcggaattcctggatagttttcttgaatcccagaacaaacagttgacagccgccgtgctgttcaaagtccccgaagatgttgttgtgcaacgtttaacctctcgcctgatctgtccgaaatgcgggcgtatctacaacatgatttttctgccaccaaaagaagacgagctgtgtgacgattgcaaagtcaaattagtacagcgtgatgatgataaggaagaaacggttcgtcaccgcctgaaagtctaccttgagaagacccagccggtcattgactattatggcaagaaaggtattctcaaacgcgtagatgggtcgcaaggaatcgacaacgttgttgcagaagtcctggggattctgggttggagcgataagtaatga

SEQ ID NO: 1668 - protein, 231 aa, synthetic construct
  REGION 1..231: note = Variant of adenylate kinase
MHHHHHHGGSGMGAYLVFLGPPGAGKGTQSKRIQEKTGIPHISTGDIFRDIVKKENDELGKKIKEIMEKGELVPDELGNAVVKRRLSEKDCEKGFILDGYPRTVAQAEFLDSFLESQNKQLTAAVLFKVPEDVVVQRLTSRLICPKCGRIYNMIFLPPKEDELCDDCKVKLVQRDDDKEETVRHRLKVYLEKTQPVIDYYGKKGILKRVDGSQGIDNVVAEVLGILGWSDK

SEQ ID NO: 1669 - DNA, 699 bp, synthetic construct
  misc_feature 1..699: note = Variant of adenylate kinase
  source 1..699: mol_type = other DNA
atgcaccatcatcaccatcacgggggctccggcatgatggcatatctggtgttcttaggtccgccgggcgcgggaaaaggtacccaatcgaaacgcattcaggaaaagactggcatcccacatattagcacgggcgatatcttccgtgacatcgtcgctaaagagaacgatgaactgggcaagaagattaaagaaatcatggagaaaggtgaactcgttccagatgaactgggtaatgcggtagtaaaacgccgcctgtcggagaaagactgcgaaaaaggctttattttggatggttatccgcgtaccgttgctcaagcggaattcctggatagttttcttgaatcccagaacaaacagttgacagccgccgtgctgttcaaagtccccgaagatgttgttgtgcaacgtttaacctctcgcctgatctgtccgaaatgcgggcgtatctacaacatgatttttctgccaccaaaagaagacgagctgtgtgacgattgcaaagtcaaattagtacagcgtgatgatgataaggaagaaacggttcgtcaccgcctgaaagtctaccttgagaagacccagccggtcattgactattatggcaagaaaggtattctcaaacgcgtagatgggtcgcaaggaatcgacaacgttgttgcagaagtcctggggattctgggttggagcgataagtaatga

SEQ ID NO: 1670 - protein, 231 aa, synthetic construct
  REGION 1..231: note = Variant of adenylate kinase
MHHHHHHGGSGMMAYLVFLGPPGAGKGTQSKRIQEKTGIPHISTGDIFRDIVAKENDELGKKIKEIMEKGELVPDELGNAVVKRRLSEKDCEKGFILDGYPRTVAQAEFLDSFLESQNKQLTAAVLFKVPEDVVVQRLTSRLICPKCGRIYNMIFLPPKEDELCDDCKVKLVQRDDDKEETVRHRLKVYLEKTQPVIDYYGKKGILKRVDGSQGIDNVVAEVLGILGWSDK

SEQ ID NO: 1671 - DNA, 699 bp, synthetic construct
  misc_feature 1..699: note = Variant of adenylate kinase
  source 1..699: mol_type = other DNA
atgcaccatcatcaccatcacgggggctccggcatgatggcatatctggtgttcttaggtccgccgggcgcgggaaaaggtacccaatcgaaacgcattcaggaaaagactggcatcccacatattagcacgggcgatatcttccgtgacatcgtcaagaaagagaacgatgaactgggcaagaagattaaagaaatcatggagaaaggtgaactcgttccagatgaactgggtaatgcggtagtaaaacgccgcctgtcggagaaagactgcgaaaaaggctttattttggatggttatccgcgtaccgttgctcaagcggaattcctggatagttttcttgaatcccagaacaaacagttgacagccgccgtgctgttcaaagtccccgaagatgttgttgtgcaacgtttaacctctcgcctgatctgtccgaaatgcgggcgtatctacaacatgatttttctgccaccaaaagaagacgagctgtgtgacgattgcaaagtcaaattagtacagcgtgatgatgataaggaagaaacggttcgtcaccgcctgaaagtctacgcggagaagacccagccggtcattgactattatggcaagaaaggtattctcaaacgcgtagatgggtcgcaaggaatcgacaacgttgttgcagaagtcctggggattctgggttggagcgataagtaatga

SEQ ID NO: 1672 - protein, 231 aa, synthetic construct
  REGION 1..231: note = Variant of adenylate kinase
MHHHHHHGGSGMMAYLVFLGPPGAGKGTQSKRIQEKTGIPHISTGDIFRDIVKKENDELGKKIKEIMEKGELVPDELGNAVVKRRLSEKDCEKGFILDGYPRTVAQAEFLDSFLESQNKQLTAAVLFKVPEDVVVQRLTSRLICPKCGRIYNMIFLPPKEDELCDDCKVKLVQRDDDKEETVRHRLKVYAEKTQPVIDYYGKKGILKRVDGSQGIDNVVAEVLGILGWSDK

SEQ ID NO: 1673 - DNA, 699 bp, synthetic construct
  misc_feature 1..699: note = Variant of adenylate kinase
  source 1..699: mol_type = other DNA
atgcaccatcatcaccatcacgggggctccggcatgatggcatatctggtgttcttaggtccgccgggcgcgggaaaaggtacccaatcgaaacgcattcaggaaaagactggcatcccacatattagcacgggcgatatcttccgtgacatcgtcaagaaagagaactcggaactgggcaagaagattaaagaaatcatggagaaaggtgaactcgttccagatgaactgggtaatgcggtagtaaaacgccgcctgtcggagaaagactgcgaaaaaggctttattttggatggttatccgcgtaccgttgctcaagcggaattcctggatagttttcttgaatcccagaacaaacagttgacagccgccgtgctgttcaaagtccccgaagatgttgttgtgcaacgtttaacctctcgcctgatctgtccgaaatgcgggcgtatctacaacatgatttttctgccaccaaaagaagacgagctgtgtgacgattgcaaagtcaaattagtacagcgtgatgatgataaggaagaaacggttcgtcaccgcctgaaagtctaccttgagaagacccagccggtcattgactattatggcaagaaaggtattctcaaacgcgtagatgggtcgcaaggaatcgacaacgttgttgcagaagtcctggggattctgggttggagcgataagtaatga

SEQ ID NO: 1674 - protein, 231 aa, synthetic construct
  REGION 1..231: note = Variant of adenylate kinase
MHHHHHHGGSGMMAYLVFLGPPGAGKGTQSKRIQEKTGIPHISTGDIFRDIVKKENSELGKKIKEIMEKGELVPDELGNAVVKRRLSEKDCEKGFILDGYPRTVAQAEFLDSFLESQNKQLTAAVLFKVPEDVVVQRLTSRLICPKCGRIYNMIFLPPKEDELCDDCKVKLVQRDDDKEETVRHRLKVYLEKTQPVIDYYGKKGILKRVDGSQGIDNVVAEVLGILGWSDK

SEQ ID NO: 1675 - DNA, 699 bp, synthetic construct
  misc_feature 1..699: note = Variant of adenylate kinase
  source 1..699: mol_type = other DNA
atgcaccatcatcaccatcacgggggctccggcatgatggcatatctggtgttcttaggtccgccgggcgcgggaaaaggtacccaatcgaaacgcattcaggaaaagactggcatcccacatattagcacgggcgatatcttccgtgacatcgtcaagaaagagaacgatgaactgggcaaggcgattaaagaaatcatggagaaaggtgaactcgttccagatgaactgggtaatgcggtagtaaaacgccgcctgtcggagaaagactgcgaaaaaggctttattttggatggttatccgcgtaccgttgctcaagcggaattcctggatagttttcttgaatcccagaacaaacagttgacagccgccgtgctgttcaaagtccccgaagatgttgttgtgcaacgtttaacctctcgcctgatctgtccgaaatgcgggcgtatctacaacatgatttttctgccaccaaaagaagacgagctgtgtgacgattgcaaagtcaaattagtacagcgtgatgatgataaggaagaaacggttcgtcaccgcctgaaagtctaccttgagaagacccagccggtcattgactattatggcaagaaaggtattctcaaacgcgtagatgggtcgcaaggaatcgacaacgttgttgcagaagtcctggggattctgggttggagcgataagtaatga

SEQ ID NO: 1676 - protein, 231 aa, synthetic construct
  REGION 1..231: note = Variant of adenylate kinase
MHHHHHHGGSGMMAYLVFLGPPGAGKGTQSKRIQEKTGIPHISTGDIFRDIVKKENDELGKAIKEIMEKGELVPDELGNAVVKRRLSEKDCEKGFILDGYPRTVAQAEFLDSFLESQNKQLTAAVLFKVPEDVVVQRLTSRLICPKCGRIYNMIFLPPKEDELCDDCKVKLVQRDDDKEETVRHRLKVYLEKTQPVIDYYGKKGILKRVDGSQGIDNVVAEVLGILGWSDK

SEQ ID NO: 1677 - DNA, 699 bp, synthetic construct
  misc_feature 1..699: note = Variant of adenylate kinase
  source 1..699: mol_type = other DNA
atgcaccatcatcaccatcacgggggctccggcatgatggcatatctggtgttcttaggtccgccgggcgcgggaaaaggtacccaatcgaaacgcattcaggaaaagactggcatcccacatattagcacgggcgatatcttccgtgacatcgtcaagaaagagaacgatgaactgggcaagaagattaaagaaatcatggagaaaggtgaactcgttccagatgaactgggtaatgcggtagtaaaacgccgcctgtcggagaaagactgcgaaaaaggctttattttggatggttatccgcgtaccgttgctcaagcggaattcctggatagttttcttgaatcccagaacaaacagttgacagccgccgtgctgttcaaagtccccgaagatgttgttgtgcaacgtttaacctctcgcctgatctgtccgaaatgcgggcgtatctacaacatgatttttctgccaccaaaagaagacgagctgtgtgacgattgcaaagtcaaattagtacagcgtgatgatgataaggaagaagtggttcgtcaccgcctgaaagtctaccttgagaagacccagccggtcattgactattatggcaagaaaggtattctcaaacgcgtagatgggtcgcaaggaatcgacaacgttgttgcagaagtcctggggattctgggttggagcgataagtaatga

SEQ ID NO: 1678 - protein, 231 aa, synthetic construct
  REGION 1..231: note = Variant of adenylate kinase
MHHHHHHGGSGMMAYLVFLGPPGAGKGTQSKRIQEKTGIPHISTGDIFRDIVKKENDELGKKIKEIMEKGELVPDELGNAVVKRRLSEKDCEKGFILDGYPRTVAQAEFLDSFLESQNKQLTAAVLFKVPEDVVVQRLTSRLICPKCGRIYNMIFLPPKEDELCDDCKVKLVQRDDDKEEVVRHRLKVYLEKTQPVIDYYGKKGILKRVDGSQGIDNVVAEVLGILGWSDK

SEQ ID NO: 1679 - DNA, 699 bp, synthetic construct
  misc_feature 1..699: note = Variant of adenylate kinase
  source 1..699: mol_type = other DNA
atgcaccatcatcaccatcacgggggctccggcatgatggcatatctggtgttcttaggtccgccgggcgcgggaaaaggtacccaatcgaaacgcattcaggaaaagactggcatcccacatattagcacgggcgatatcttccgtgacatcgtcaagaaagggaacgatgaactgggcaagaagattaaagaaatcatggagaaaggtgaactcgttccagatgaactgggtaatgcggtagtaaaacgccgcctgtcggagaaagactgcgaaaaaggctttattttggatggttatccgcgtaccgttgctcaagcggaattcctggatagttttcttgaatcccagaacaaacagttgacagccgccgtgctgttcaaagtccccgaagatgttgttgtgcaacgtttaacctctcgcctgatctgtccgaaatgcgggcgtatctacaacatgatttttctgccaccaaaagaagacgagctgtgtgacgattgcaaagtcaaattagtacagcgtgatgatgataaggaagaaacggttcgtcaccgcctgaaagtctaccttgagaagacccagccggtcattgactattatggcaagaaaggtattctcaaacgcgtagatgggtcgcaaggaatcgacaacgttgttgcagaagtcctggggattctgggttggagcgataagtaatga

SEQ ID NO: 1680 - protein, 231 aa, synthetic construct
  REGION 1..231: note = Variant of adenylate kinase
MHHHHHHGGSGMMAYLVFLGPPGAGKGTQSKRIQEKTGIPHISTGDIFRDIVKKGNDELGKKIKEIMEKGELVPDELGNAVVKRRLSEKDCEKGFILDGYPRTVAQAEFLDSFLESQNKQLTAAVLFKVPEDVVVQRLTSRLICPKCGRIYNMIFLPPKEDELCDDCKVKLVQRDDDKEETVRHRLKVYLEKTQPVIDYYGKKGILKRVDGSQGIDNVVAEVLGILGWSDK

SEQ ID NO: 1681 - DNA, 699 bp, synthetic construct
  misc_feature 1..699: note = Variant of adenylate kinase
  source 1..699: mol_type = other DNA
atgcaccatcatcaccatcacgggggctccggcatgatggcatatctggtgttcttaggtccgccgggcgcgggaaaaggtacccaatcgaaacgcattcaggaaaagactggcatcccacatattagcacgggcgatatcttccgtgacatcgtcaagaaagagaacgatgaactgggcaagaagattaaagaaatcatggagaaaggtgaactcgttccagatgaactgggtaatgcggtagtaaaacgccgcctgtcggagaaagactgcgaaaaaggctttattttggatggttatccgcgtaccgttgctcaagcggaattcctggatagttttcttgaatcccagaacaaacagttgacagccgccgtgctgttcaaagtccccgaagatgttgttgtgcaacgtttaacctctcgcctgatctgtccgaaatgcgggcgtatctacaacatgatttttctgccaccaaaagaagacgagctgtgtgacgattgcggggtcaaattagtacagcgtgatgatgataaggaagaaacggttcgtcaccgcctgaaagtctaccttgagaagacccagccggtcattgactattatggcaagaaaggtattctcaaacgcgtagatgggtcgcaaggaatcgacaacgttgttgcagaagtcctggggattctgggttggagcgataagtaatga

SEQ ID NO: 1682 - protein, 231 aa, synthetic construct
  REGION 1..231: note = Variant of adenylate kinase
MHHHHHHGGSGMMAYLVFLGPPGAGKGTQSKRIQEKTGIPHISTGDIFRDIVKKENDELGKKIKEIMEKGELVPDELGNAVVKRRLSEKDCEKGFILDGYPRTVAQAEFLDSFLESQNKQLTAAVLFKVPEDVVVQRLTSRLICPKCGRIYNMIFLPPKEDELCDDCGVKLVQRDDDKEETVRHRLKVYLEKTQPVIDYYGKKGILKRVDGSQGIDNVVAEVLGILGWSDK

SEQ ID NO: 1683 - DNA, 699 bp, synthetic construct
  misc_feature 1..699: note = Variant of adenylate kinase
  source 1..699: mol_type = other DNA
atgcaccatcatcaccatcacgggggctccggcatgatggcatatctggtgttcttaggtccgccgggcgcgggaaaaggtacccaatcgaaacgcattcaggaaaagactggcatcccacatattagcacgggcgatatcttccgtgacatcgtcaagcgggagaacgatgaactgggcaagaagattaaagaaatcatggagaaaggtgaactcgttccagatgaactgggtaatgcggtagtaaaacgccgcctgtcggagaaagactgcgaaaaaggctttattttggatggttatccgcgtaccgttgctcaagcggaattcctggatagttttcttgaatcccagaacaaacagttgacagccgccgtgctgttcaaagtccccgaagatgttgttgtgcaacgtttaacctctcgcctgatctgtccgaaatgcgggcgtatctacaacatgatttttctgccaccaaaagaagacgagctgtgtgacgattgcaaagtcaaattagtacagcgtgatgatgataaggaagaaacggttcgtcaccgcctgaaagtctaccttgagaagacccagccggtcattgactattatggcaagaaaggtattctcaaacgcgtagatgggtcgcaaggaatcgacaacgttgttgcagaagtcctggggattctgggttggagcgataagtaatga

SEQ ID NO: 1684 - protein, 231 aa, synthetic construct
  REGION 1..231: note = Variant of adenylate kinase
MHHHHHHGGSGMMAYLVFLGPPGAGKGTQSKRIQEKTGIPHISTGDIFRDIVKRENDELGKKIKEIMEKGELVPDELGNAVVKRRLSEKDCEKGFILDGYPRTVAQAEFLDSFLESQNKQLTAAVLFKVPEDVVVQRLTSRLICPKCGRIYNMIFLPPKEDELCDDCKVKLVQRDDDKEETVRHRLKVYLEKTQPVIDYYGKKGILKRVDGSQGIDNVVAEVLGILGWSDK

SEQ ID NO: 1685 - DNA, 699 bp, synthetic construct
  misc_feature 1..699: note = Variant of adenylate kinase
  source 1..699: mol_type = other DNA
atgcaccatcatcaccatcacgggggctccggcatgatggcatatctggtgttcttaggtccgccgggcgcgggaaaaggtacccaatcgaaacgcattcaggaaaagactggcatcccacatattagcacgggcgatatcttccgtgacatcgtcaagcaggagaacgatgaactgggcaagaagattaaagaaatcatggagaaaggtgaactcgttccagatgaactgggtaatgcggtagtaaaacgccgcctgtcggagaaagactgcgaaaaaggctttattttggatggttatccgcgtaccgttgctcaagcggaattcctggatagttttcttgaatcccagaacaaacagttgacagccgccgtgctgttcaaagtccccgaagatgttgttgtgcaacgtttaacctctcgcctgatctgtccgaaatgcgggcgtatctacaacatgatttttctgccaccaaaagaagacgagctgtgtgacgattgcaaagtcaaattagtacagcgtgatgatgataaggaagaaacggttcgtcaccgcctgaaagtctaccttgagaagacccagccggtcattgactattatggcaagaaaggtattctcaaacgcgtagatgggtcgcaaggaatcgacaacgttgttgcagaagtcctggggattctgggttggagcgataagtaatga

SEQ ID NO: 1686 - protein, 231 aa, synthetic construct
  REGION 1..231: note = Variant of adenylate kinase
MHHHHHHGGSGMMAYLVFLGPPGAGKGTQSKRIQEKTGIPHISTGDIFRDIVKQENDELGKKIKEIMEKGELVPDELGNAVVKRRLSEKDCEKGFILDGYPRTVAQAEFLDSFLESQNKQLTAAVLFKVPEDVVVQRLTSRLICPKCGRIYNMIFLPPKEDELCDDCKVKLVQRDDDKEETVRHRLKVYLEKTQPVIDYYGKKGILKRVDGSQGIDNVVAEVLGILGWSDK

SEQ ID NO: 1687 - DNA, 699 bp, synthetic construct
  misc_feature 1..699: note = Variant of adenylate kinase
  source 1..699: mol_type = other DNA
atgcaccatcatcaccatcacgggggctccggcatgatggcatatctggtgttcttaggtccgccgggcgcgggaaaaggtacccaatcgaaacgcattcaggaaaagactggcatcccacatattagcacgggcgatatcttccgtgacatcgtcaagaaagagaacgatgaactgggcaagaagattaaagaaatcatggagaaaggtgaactcgttccagatgaactgggtaatgcggtagtaaaacgccgcctgtcggagaaagactgcgaaaaaggctttattttggatggttatccgcgtaccgttgctcaagcggaattcctggatagttttcttgaatcccagaacaaacagttgacagccgccgtgctgttcaaagtccccgaagatgttgttgtgcaacgtttaacctctcgcctgatctgtccgaaatgcgggcgtatctacaacatgatttttctgccaccaaaagaagacgagctgtgtgacgattgcaaagtcaaattagtacgtcgtgatgatgataaggaagaaacggttcgtcaccgcctgaaagtctaccttgagaagacccagccggtcattgactattatggcaagaaaggtattctcaaacgcgtagatgggtcgcaaggaatcgacaacgttgttgcagaagtcctggggattctgggttggagcgataagtaatga

SEQ ID NO: 1688 - protein, 231 aa, synthetic construct
  REGION 1..231: note = Variant of adenylate kinase
MHHHHHHGGSGMMAYLVFLGPPGAGKGTQSKRIQEKTGIPHISTGDIFRDIVKKENDELGKKIKEIMEKGELVPDELGNAVVKRRLSEKDCEKGFILDGYPRTVAQAEFLDSFLESQNKQLTAAVLFKVPEDVVVQRLTSRLICPKCGRIYNMIFLPPKEDELCDDCKVKLVRRDDDKEETVRHRLKVYLEKTQPVIDYYGKKGILKRVDGSQGIDNVVAEVLGILGWSDK

SEQ ID NO: 1689 - DNA, 699 bp, synthetic construct
  misc_feature 1..699: note = Variant of adenylate kinase
  source 1..699: mol_type = other DNA
atgcaccatcatcaccatcacgggggctccggcatgatggcatatctggtgttcttaggtccgccgggcgcgggaaaaggtacccaatcgaaacgcattcaggaaaagactggcatcccacatattagcacgggcgatatcttccgtgacatcgtcaagaaagagaacgatgaactgggcaagaagattaaagaaatcatggagaaaggtgaactcgttccagatgaactgggtaatgcggtagtaaaacgccgcctgtcggagaaagactgcgaaaaaggctttattttggatggttatccgcgtaccgttgctcaagcggaattcctggatagttttcttgaatcccagaacaaacagttgacagccgccgtgctgttcaaagtccccgaagatgttgttgtgcaacgtttaacctctcgcctgatctgtccgaaatgcgggcgtatctacaacatgatttttctgccaccaaaagaagacgagctgtgtgacgattgccaggtcaaattagtacagcgtgatgatgataaggaagaaacggttcgtcaccgcctgaaagtctaccttgagaagacccagccggtcattgactattatggcaagaaaggtattctcaaacgcgtagatgggtcgcaaggaatcgacaacgttgttgcagaagtcctggggattctgggttggagcgataagtaatga

SEQ ID NO: 1690 - protein, 231 aa, synthetic construct
  REGION 1..231: note = Variant of adenylate kinase
MHHHHHHGGSGMMAYLVFLGPPGAGKGTQSKRIQEKTGIPHISTGDIFRDIVKKENDELGKKIKEIMEKGELVPDELGNAVVKRRLSEKDCEKGFILDGYPRTVAQAEFLDSFLESQNKQLTAAVLFKVPEDVVVQRLTSRLICPKCGRIYNMIFLPPKEDELCDDCQVKLVQRDDDKEETVRHRLKVYLEKTQPVIDYYGKKGILKRVDGSQGIDNVVAEVLGILGWSDK

SEQ ID NO: 1691 - DNA, 699 bp, synthetic construct
  misc_feature 1..699: note = Variant of adenylate kinase
  source 1..699: mol_type = other DNA
atgcaccatcatcaccatcacgggggctccggcatgatggcatatctggtgttcttaggtccgccgggcgcgggaaaaggtacccaatcgaaacgcattcaggaaaagactggcatcccacatattagcacgggcgatatcttccgtgacatcgtcaagaaagagaacgatgaactgggcaagaagattaaagaaatcatggagaaaggtgaactcgttccagatgaactgggtaatgcggtagtaaaacgccgcctgtcggagaaagactgcgaaaaaggctttattttggatggttatccgcgtaccgttgctcaagcggaattcctggatagttttcttgaatcccagaacaaacagttgacagccgccgtgctgttcaaagtccccgaagatgttgttgtgcaacgtttaacctctcgcctgatctgtccgaaatgcgggcgtatctacaacatgatttttctgccaccaaaagaagacgagctgtgtgacgattgcaatgtcaaattagtacagcgtgatgatgataaggaagaaacggttcgtcaccgcctgaaagtctaccttgagaagacccagccggtcattgactattatggcaagaaaggtattctcaaacgcgtagatgggtcgcaaggaatcgacaacgttgttgcagaagtcctggggattctgggttggagcgataagtaatga

SEQ ID NO: 1692 - protein, 231 aa, synthetic construct
  REGION 1..231: note = Variant of adenylate kinase
MHHHHHHGGSGMMAYLVFLGPPGAGKGTQSKRIQEKTGIPHISTGDIFRDIVKKENDELGKKIKEIMEKGELVPDELGNAVVKRRLSEKDCEKGFILDGYPRTVAQAEFLDSFLESQNKQLTAAVLFKVPEDVVVQRLTSRLICPKCGRIYNMIFLPPKEDELCDDCNVKLVQRDDDKEETVRHRLKVYLEKTQPVIDYYGKKGILKRVDGSQGIDNVVAEVLGILGWSDK

SEQ ID NO: 1693 - DNA, 699 bp, synthetic construct
  misc_feature 1..699: note = Variant of adenylate kinase
  source 1..699: mol_type = other DNA
atgcaccatcatcaccatcacgggggctccggcatgatggcatatctggtgttcttaggtccgccgggcgcgggaaaaggtacccaatcgaaacgcattcaggaaaagactggcatcccacatattagcacgggcgatatcttccgtgacatcgtcaagaaagagaacgatgaactgggcaagaagattaaagaaatcatggagaaaggtgaactcgttccagatgaactgggtaatgcggtagtaaaacgccgcctgtcggagaaagactgcgaaaaaggctttattttggatggttatccgcgtaccgttgctcaagcggaattcctggatagttttcttgaatcccagaacaaacagttgacagccgccgtgctgttcaaagtccccgaagatgttgttgtgcaacgtttaacctctcgcctgatctgtccgaaatgcgggcgtatctacaacatgatttttctgccaccaaaagaagacgagctgtgtgacgattgcaaagtcccgttagtacagcgtgatgatgataaggaagaaacggttcgtcaccgcctgaaagtctaccttgagaagacccagccggtcattgactattatggcaagaaaggtattctcaaacgcgtagatgggtcgcaaggaatcgacaacgttgttgcagaagtcctggggattctgggttggagcgataagtaatga

SEQ ID NO: 1694 - protein, 231 aa, synthetic construct
  REGION 1..231: note = Variant of adenylate kinase
MHHHHHHGGSGMMAYLVFLGPPGAGKGTQSKRIQEKTGIPHISTGDIFRDIVKKENDELGKKIKEIMEKGELVPDELGNAVVKRRLSEKDCEKGFILDGYPRTVAQAEFLDSFLESQNKQLTAAVLFKVPEDVVVQRLTSRLICPKCGRIYNMIFLPPKEDELCDDCKVPLVQRDDDKEETVRHRLKVYLEKTQPVIDYYGKKGILKRVDGSQGIDNVVAEVLGILGWSDK

SEQ ID NO: 1695 - DNA, 699 bp, synthetic construct
  misc_feature 1..699: note = Variant of adenylate kinase
  source 1..699: mol_type = other DNA
atgcaccatcatcaccatcacgggggctccggcatgatggcatatctggtgttcttaggtccgccgggcgcgggaaaaggtacccaatcgaaacgcattgttgaaaagactggcatcccacatattagcacgggcgatatcttccgtgacatcgtcaagaaagagaacgatgaactgggcaagaagattaaagaaatcatggagaaaggtgaactcgttccagatgaactgggtaatgcggtagtaaaacgccgcctgtcggagaaagactgcgaaaaaggctttattttggatggttatccgcgtaccgttgctcaagcggaattcctggatagttttcttgaatcccagaacaaacagttgacagccgccgtgctgttcaaagtccccgaagatgttgttgtgcaacgtttaacctctcgcctgatctgtccgaaatgcgggcgtatctacaacatgatttttctgccaccaaaagaagacgagctgtgtgacgattgcaaagtcaaattagtacagcgtgatgatgataaggaagaaacggttcgtcaccgcctgaaagtctaccttgagaagacccagccggtcattgactattatggcaagaaaggtattctcaaacgcgtagatgggtcgcaaggaatcgacaacgttgttgcagaagtcctggggattctgggttggagcgataagtaatga

SEQ ID NO: 1696 - protein, 231 aa, synthetic construct
  REGION 1..231: note = Variant of adenylate kinase
MHHHHHHGGSGMMAYLVFLGPPGAGKGTQSKRIVEKTGIPHISTGDIFRDIVKKENDELGKKIKEIMEKGELVPDELGNAVVKRRLSEKDCEKGFILDGYPRTVAQAEFLDSFLESQNKQLTAAVLFKVPEDVVVQRLTSRLICPKCGRIYNMIFLPPKEDELCDDCKVKLVQRDDDKEETVRHRLKVYLEKTQPVIDYYGKKGILKRVDGSQGIDNVVAEVLGILGWSDK

SEQ ID NO: 1697 - DNA, 699 bp, synthetic construct
  misc_feature 1..699: note = Variant of adenylate kinase
  source 1..699: mol_type = other DNA
atgcaccatcatcaccatcacgggggctccggcatgatggcatatctggtgttcttaggtccgccgggcgcgggaaaaggtacccaatcgaaacgcattcaggaaaagactggcatcccacatattagcacgggcgatatcttccgtgacatcgtcaagaaagagaacgatgaacatggcaagaagattaaagaaatcatggagaaaggtgaactcgttccagatgaactgggtaatgcggtagtaaaacgccgcctgtcggagaaagactgcgaaaaaggctttattttggatggttatccgcgtaccgttgctcaagcggaattcctggatagttttcttgaatcccagaacaaacagttgacagccgccgtgctgttcaaagtccccgaagatgttgttgtgcaacgtttaacctctcgcctgatctgtccgaaatgcgggcgtatctacaacatgatttttctgccaccaaaagaagacgagctgtgtgacgattgcaaagtcaaattagtacagcgtgatgatgataaggaagaaacggttcgtcaccgcctgaaagtctaccttgagaagacccagccggtcattgactattatggcaagaaaggtattctcaaacgcgtagatgggtcgcaaggaatcgacaacgttgttgcagaagtcctggggattctgggttggagcgataagtaatga

SEQ ID NO: 1698 - protein, 231 aa, synthetic construct
  REGION 1..231: note = Variant of adenylate kinase
MHHHHHHGGSGMMAYLVFLGPPGAGKGTQSKRIQEKTGIPHISTGDIFRDIVKKENDEHGKKIKEIMEKGELVPDELGNAVVKRRLSEKDCEKGFILDGYPRTVAQAEFLDSFLESQNKQLTAAVLFKVPEDVVVQRLTSRLICPKCGRIYNMIFLPPKEDELCDDCKVKLVQRDDDKEETVRHRLKVYLEKTQPVIDYYGKKGILKRVDGSQGIDNVVAEVLGILGWSDK

SEQ ID NO: 1699 - DNA, 699 bp, synthetic construct
  misc_feature 1..699: note = Variant of adenylate kinase
  source 1..699: mol_type = other DNA
atgcaccatcatcaccatcacgggggctccggcatgatggcatatctggtgttcttaggtccgccgggcgcgggaaaaggtacccaatcgaaacgcattcaggaaaagactggcatcccacatattagcacgggcgatatcttccgtgacatcgtcaagaaagagaacgatgaactgggcaagaagattaaagaaatcatggagaaaggtgaactcgttccagatgaactgggtaatgcggtagtaaaacgccgcctgtcggagaaagactgcgaaaaaggctttattttggatggttatccgcgtaccgttgctcaagcggaattcctggatagttttcttgaatcccagaacaaacagttgacagccgccgtgctgttcaaagtccccgaagatgttgttgtgcaacgtttaacctctcgcctgatctgtccgaaatgcgggcgtatctacaacatgatttttctgccaccaaaagaagacgagctgtgtgacgattgcaaagtcaaattagtacagcgtgatgatgataaggaagaaacggttttgcaccgcctgaaagtctaccttgagaagacccagccggtcattgactattatggcaagaaaggtattctcaaacgcgtagatgggtcgcaaggaatcgacaacgttgttgcagaagtcctggggattctgggttggagcgataagtaatga

SEQ ID NO: 1700 - protein, 231 aa, synthetic construct
  REGION 1..231: note = Variant of adenylate kinase
MHHHHHHGGSGMMAYLVFLGPPGAGKGTQSKRIQEKTGIPHISTGDIFRDIVKKENDELGKKIKEIMEKGELVPDELGNAVVKRRLSEKDCEKGFILDGYPRTVAQAEFLDSFLESQNKQLTAAVLFKVPEDVVVQRLTSRLICPKCGRIYNMIFLPPKEDELCDDCKVKLVQRDDDKEETVLHRLKVYLEKTQPVIDYYGKKGILKRVDGSQGIDNVVAEVLGILGWSDK

SEQ ID NO: 1701 - DNA, 699 bp, synthetic construct
  misc_feature 1..699: note = Variant of adenylate kinase
  source 1..699: mol_type = other DNA
atgcaccatcatcaccatcacgggggctccggcatgatggcatatctggtgttcttaggtccgccgggcgcgggaaaaggtacccaatcgaaacgcattcaggaaaagactggcatcccacatattagcacgggcgatatcttccgtgacatcgtcaagaaagagaacgatgaactgggcaagaagattaaagaaatcatggagaaaggtgaactcgttccagatgaactgggtaatgcggtagtaaaacgccgcctgtcggagaaagactgcgaaaaaggctttattttggatggttatccgcgtaccgttgctcaagcggaattcctggatagttttcttgaatcccagaacaaacagttgacagccgccgtgctgttcaaagtccccgaagatgttgttgtgcaacgtttaacctctcgcctgatctgtccgaaatgcgggcgtatctacaacatgatttttctgccaccaaaagaagacgagctgtgtgacgattgcaaagtcaaattagtaaagcgtgatgatgataaggaagaaacggttcgtcaccgcctgaaagtctaccttgagaagacccagccggtcattgactattatggcaagaaaggtattctcaaacgcgtagatgggtcgcaaggaatcgacaacgttgttgcagaagtcctggggattctgggttggagcgataagtaatga

SEQ ID NO: 1702 - protein, 231 aa, synthetic construct
  REGION 1..231: note = Variant of adenylate kinase
MHHHHHHGGSGMMAYLVFLGPPGAGKGTQSKRIQEKTGIPHISTGDIFRDIVKKENDELGKKIKEIMEKGELVPDELGNAVVKRRLSEKDCEKGFILDGYPRTVAQAEFLDSFLESQNKQLTAAVLFKVPEDVVVQRLTSRLICPKCGRIYNMIFLPPKEDELCDDCKVKLVKRDDDKEETVRHRLKVYLEKTQPVIDYYGKKGILKRVDGSQGIDNVVAEVLGILGWSDK

SEQ ID NO: 1703 - DNA, 699 bp, synthetic construct
  misc_feature 1..699: note = Variant of adenylate kinase
  source 1..699: mol_type = other DNA
atgcaccatcatcaccatcacgggggctccggcatgatggcatatctggtgttcttaggtccgccgggcgcgggaaaaggtacccaatcgaaacgcattcaggaaaagactggcatcccacatattagcacgggcgatatcttccgtgacatcgtcaagaaagagaacgatgaactgggcaagaagattaaagaaatcatggagaaaggtgaactcgttccagatgaactgggtaatgcggtagtaaaacgccgcctgtcggagaaagactgcgaaaaaggctttattttggatggttatccgcgtaccgttgctcaagcggaattcctggatagttttcttgaatcccagaacaaacagttgacagccgccgtgctgttcaaagtccccgaagatgttgttgtgcaacgtttaacctctcgcctgatctgtccgaaatgcgggcgtatctacaacatgatttttctgccaccaaaagaagacgagctgtgtgacgattgcaaagtcaaattagtacagcgtgatgatgataaggaagaaacggttgctcaccgcctgaaagtctaccttgagaagacccagccggtcattgactattatggcaagaaaggtattctcaaacgcgtagatgggtcgcaaggaatcgacaacgttgttgcagaagtcctggggattctgggttggagcgataagtaatga

SEQ ID NO: 1704 - protein, 231 aa, synthetic construct
  REGION 1..231: note = Variant of adenylate kinase
MHHHHHHGGSGMMAYLVFLGPPGAGKGTQSKRIQEKTGIPHISTGDIFRDIVKKENDELGKKIKEIMEKGELVPDELGNAVVKRRLSEKDCEKGFILDGYPRTVAQAEFLDSFLESQNKQLTAAVLFKVPEDVVVQRLTSRLICPKCGRIYNMIFLPPKEDELCDDCKVKLVQRDDDKEETVAHRLKVYLEKTQPVIDYYGKKGILKRVDGSQGIDNVVAEVLGILGWSDK

SEQ ID NO: 1705 - DNA, 699 bp, synthetic construct
  misc_feature 1..699: note = Variant of adenylate kinase
  source 1..699: mol_type = other DNA
atgcaccatcatcaccatcacgggggctccggcatgatggagtatctggtgttcttaggtccgccgggcgcgggaaaaggtacccaatcgaaacgcattcaggaaaagactggcatcccacatattagcacgggcgatatcttccgtgacatcgtcaagaaagagaacgatgaactgggcaagaagattaaagaaatcatggagaaaggtgaactcgttccagatgaactgggtaatgcggtagtaaaacgccgcctgtcggagaaagactgcgaaaaaggctttattttggatggttatccgcgtaccgttgctcaagcggaattcctggatagttttcttgaatcccagaacaaacagttgacagccgccgtgctgttcaaagtccccgaagatgttgttgtgcaacgtttaacctctcgcctgatctgtccgaaatgcgggcgtatctacaacatgatttttctgccaccaaaagaagacgagctgtgtgacgattgcaaagtcaaattagtacagcgtgatgatgataaggaagaaacggttcgtcaccgcctgaaagtctaccttgagaagacccagccggtcattgactattatggcaagaaaggtattctcaaacgcgtagatgggtcgcaaggaatcgacaacgttgttgcagaagtcctggggattctgggttggagcgataagtaatga

SEQ ID NO: 1706 - protein, 231 aa, synthetic construct
  REGION 1..231: note = Variant of adenylate kinase
MHHHHHHGGSGMMEYLVFLGPPGAGKGTQSKRIQEKTGIPHISTGDIFRDIVKKENDELGKKIKEIMEKGELVPDELGNAVVKRRLSEKDCEKGFILDGYPRTVAQAEFLDSFLESQNKQLTAAVLFKVPEDVVVQRLTSRLICPKCGRIYNMIFLPPKEDELCDDCKVKLVQRDDDKEETVRHRLKVYLEKTQPVIDYYGKKGILKRVDGSQGIDNVVAEVLGILGWSDK

SEQ ID NO: 1707 - DNA, 699 bp, synthetic construct
  misc_feature 1..699: note = Variant of adenylate kinase
  source 1..699: mol_type = other DNA
atgcaccatcatcaccatcacgggggctccggcatgatggcatatctggtgttcttaggtccgccgggcgcgggaaaaggtacccaatcgaaacgcattcaggaaaagactggcatcccgcatattagcacgggcgatatcttccgtgacatcgtcaagaaagagaacgatgaactggccaaggcgattaaagaaatcatggagaaaggtgaactcgttccagatgaactgggtaatgcggtagtaaaacgccgcctgtcggagaaagactgcgaaaaaggctttattttggatggttatccgcgtaccgtggctcaagcggaattcctggatagttttcttgaatcccagaacaaacagttgacagccgtggtgctgttcaaagtccccgaagatgttgttgtgcaacgtttaacctctcgcctgatctgtccgaaatgcgggcgtatctacaacatgatttttctgccaccaaaagaagacgagctgtgtgacgattgcaaagtcggcttagtacagcgtgatgatgataaggaagaaacggttcgtcaccgcctgaaagtctaccttgagaagacccagccggtcattgactattatggcaagaaaggtattctcaaacgcgtagatgggtcgcaaggaatcgacaacgttgttgcagaagtcctggggattctgggttggagcgataagtaatga

SEQ ID NO: 1708 - protein, 231 aa, synthetic construct
  REGION 1..231: note = Variant of adenylate kinase
MHHHHHHGGSGMMAYLVFLGPPGAGKGTQSKRIQEKTGIPHISTGDIFRDIVKKENDELAKAIKEIMEKGELVPDELGNAVVKRRLSEKDCEKGFILDGYPRTVAQAEFLDSFLESQNKQLTAVVLFKVPEDVVVQRLTSRLICPKCGRIYNMIFLPPKEDELCDDCKVGLVQRDDDKEETVRHRLKVYLEKTQPVIDYYGKKGILKRVDGSQGIDNVVAEVLGILGWSDK

SEQ ID NO: 1709 - DNA, 699 bp, synthetic construct
  misc_feature 1..699: note = Variant of adenylate kinase
  source 1..699: mol_type = other DNA
atgcaccatcatcaccatcacgggggctccggcatgatggcatatctggtgttcttaggtccgccgggcgcgggaaaaggtacccaatcgaaacgcattcaggaaaagactggcatcccgcatattagcacgggcgatatcttccgtgacatcgtcaagaaagagaacgatgaactggccaagaaaattaaagaaatcatggagaaaggtgaactcgttccagatgaactgggtaatgcggtagtaaaacgccgcctgtcggagaaagactgcgaaaaaggctttattttggatggttatccgcgtaccgtggctcaagcggaattcctggatagttttcttgaatcccagaacaaacagttgacagccgccgtgctgttcaaagtccccgaagatgttgttgtgcaacgtttaacctctcgcctgatctgtccgaaatgcgggcgtatctacaacatgatttttctgccaccaaaagaagacgagctgtgtgacgattgcaaagtcggcttagtacagcgtgatgatgataaggaagaaacggttcgtcaccgcctgaaagtctaccttgagaagacccagccggtcattgactattatggcaagaaaggtattctcaaacgcgtagatgggtcgcaaggaatcgacaacgttgttgcagaagtcctggggattctgggttggagcgataagtaatga

SEQ ID NO: 1710 - protein, 231 aa, synthetic construct
  REGION 1..231: note = Variant of adenylate kinase
MHHHHHHGGSGMMAYLVFLGPPGAGKGTQSKRIQEKTGIPHISTGDIFRDIVKKENDELAKKIKEIMEKGELVPDELGNAVVKRRLSEKDCEKGFILDGYPRTVAQAEFLDSFLESQNKQLTAAVLFKVPEDVVVQRLTSRLICPKCGRIYNMIFLPPKEDELCDDCKVGLVQRDDDKEETVRHRLKVYLEKTQPVIDYYGKKGILKRVDGSQGIDNVVAEVLGILGWSDK

SEQ ID NO: 1711 - DNA, 699 bp, synthetic construct
  misc_feature 1..699: note = Variant of adenylate kinase
  source 1..699: mol_type = other DNA
atgcaccatcatcaccatcacgggggctccggcatgatggcatatctggtgttcttaggtccgccgggcgcgggaaaaggtacccaatcgaaacgcattcaggaaaagactggcatcccacatattagcacgggcgatatcttccgtgacatcgtcaagaaagagaacgatgaactggccaaggcgattaaagaaatcatggagaaaggtgaactcgttccagatgaactgggtaatgcggtagtaaaacgccgcctgtcggagaaagactgcgaaaaaggctttattttggatggttatccgcgtaccgttgctcaagcggaattcctggatagttttcttgaatcccagaacaaacagttgacagccgcggtgctgttcaaagtccccgaagatgttgttgtgcaacgtttaacctctcgcctgatctgtccgaaatgcgggcgtatctacaacatgatttttctgccaccaaaagaagacgagctgtgtgacgattgcaaagtcaaattagtacagcgtgatgatgataaggaagaaacggttcgtcaccgcctgaaagtctaccttgagaagacccagccggtcattgactattatggcaagaaaggtattctcaaacgcgtagatgggtcgcaaggaatcgacaacgttgttgcagaagtcctggggattctgggttggagcgataagtaatga

SEQ ID NO: 1712 - protein, 231 aa, synthetic construct
  REGION 1..231: note = Variant of adenylate kinase
MHHHHHHGGSGMMAYLVFLGPPGAGKGTQSKRIQEKTGIPHISTGDIFRDIVKKENDELAKAIKEIMEKGELVPDELGNAVVKRRLSEKDCEKGFILDGYPRTVAQAEFLDSFLESQNKQLTAAVLFKVPEDVVVQRLTSRLICPKCGRIYNMIFLPPKEDELCDDCKVKLVQRDDDKEETVRHRLKVYLEKTQPVIDYYGKKGILKRVDGSQGIDNVVAEVLGILGWSDK

SEQ ID NO: 1713 - DNA, 699 bp, synthetic construct
  misc_feature 1..699: note = Variant of adenylate kinase
  source 1..699: mol_type = other DNA
atgcaccatcatcaccatcacgggggctccggcatgatggcatttctggtgttcttaggtccgccgggcgcgggaaaaggtacccaatcgaaacgcattcaggaaaagactggcatcccgcatattagcacgggcgatatcttccgtgacatcgtcaagaaagagaacgatgagctggccaagaaaattaaagaaatcatggagaaaggtgaactcgttccagatgaactgggtaatgcggtagtaaaacgccgcctgtcggagaaagactgcgaaaaaggctttattttggatggttatccgcgtaccgtggctcaagcggaattcctggatagttttcttgaatcccagaacaaacagttgacagccgccgtgctgttcaaagtccccgaagatgttgttgtgcaacgtttaacctctcgcctgatatgtccgaaatgcgggcgtatctacaacatgatttttctgccaccaaaagaagacgagctgtgtgacgattgcaaagtcggcttagtacagcgtgatgatgataaggaagaaacggttcgtcaccgcctgaaagtctaccttgagaagacccagccggtcattgactattatggcaagaaaggtattctcaaacgcgtagatgggtcgcaaggaatcgacaacgttgttgcagaagtcctggggattctgggttggagcgataagtaatga

SEQ ID NO: 1714 - protein, 231 aa, synthetic construct
  REGION 1..231: note = Variant of adenylate kinase
MHHHHHHGGSGMMAFLVFLGPPGAGKGTQSKRIQEKTGIPHISTGDIFRDIVKKENDELAKKIKEIMEKGELVPDELGNAVVKRRLSEKDCEKGFILDGYPRTVAQAEFLDSFLESQNKQLTAAVLFKVPEDVVVQRLTSRLICPKCGRIYNMIFLPPKEDELCDDCKVGLVQRDDDKEETVRHRLKVYLEKTQPVIDYYGKKGILKRVDGSQGIDNVVAEVLGILGWSDK

SEQ ID NO: 1715 - DNA, 699 bp, synthetic construct
  misc_feature 1..699: note = Variant of adenylate kinase
  source 1..699: mol_type = other DNA
atgcaccatcatcaccatcacgggggctccggcatgatggcatttctggtgttcttaggtccgccgggcgcgggaaaaggtacccaatcgaaacgcattcaggaaaagactggcatcccgcatattagcacgggcgatatcttccgtgacatcgtcaagaaagagaacgatgaactggccaagaaaattaaagaaatcatggcaaaaggtgaactcgttccagatgaactgggtaatgcggtagtaaaacgccgcctgtcggagaaagactgcgaaaaaggctttattttggatggttatccgcgtaccgtggctcaagcggaattcctggatagttttcttgaatcccagaacaaacagttgacagccgccgtgctgttcaaagtccccgaagatgttgttgtgcaacgtttaacctctcgcctgatctgtccgaaatgcgggcgtatctacaacatgatttttctgccaccaaaagaagacgagctgtgtgacgattgcaaagtcggcttagtacagcgtgatgatgataaggaagaaacggttcgtcaccgcctgaaagtctaccttgagaagacccagccggtcattgactattatggcaagaaaggtattctcaaacgcgtagatgggtcgcaaggaatcgacaacgttgttgcagaagtcctggggattctgggttggagcgataagtaatga

SEQ ID NO: 1716 - protein, 231 aa, synthetic construct
  REGION 1..231: note = Variant of adenylate kinase
MHHHHHHGGSGMMAFLVFLGPPGAGKGTQSKRIQEKTGIPHISTGDIFRDIVKKENDELAKKIKEIMAKGELVPDELGNAVVKRRLSEKDCEKGFILDGYPRTVAQAEFLDSFLESQNKQLTAAVLFKVPEDVVVQRLTSRLICPKCGRIYNMIFLPPKEDELCDDCKVGLVQRDDDKEETVRHRLKVYLEKTQPVIDYYGKKGILKRVDGSQGIDNVVAEVLGILGWSDK

SEQ ID NO: 1717 - DNA, 699 bp, synthetic construct
  misc_feature 1..699: note = Variant of adenylate kinase
  source 1..699: mol_type = other DNA
atgcaccatcatcaccatcacgggggctccggcatgatggcatttctggtgttcttaggtccgccgggcgcgggaaaaggtacccaatcgaaacgcattcaggaaaagactggcatcccgcatattagcacgggcgatatcttccgtgacatcgtcaagaaagagaacgatgaactggccaagaaaattaaagaaatcatggagaaaggtgaactcgttccagatgaactgggtaatgcggtagtaaaacgccgcctgtcggagaaagactgcgaaaaaggctttattttggatggttatccgcgtaccgtggctcaagcggaattcctggatagttttcttgaatcccagaacaaacagttgacagccgccgtgctgttcaaagtccccgaagatgttgttgtgcaacgtttaacctctcgcctgatctgtccgaaatgcgggcgtatctacaacatgatttttctgccaccaaaagaagacgagctgtgtgacgattgcaaagtcggcttagtacagcgtgatgatgataaggaagaagtcgttcgtcaccgcctgaaagtctaccttgagaagacccagccggtcattgactattatggcaagaaaggtattctcaaacgcgtagatgggtcgcaaggaatcgacaacgttgttgcagaagtcctggggattctgggttggagcgataagtaatga

SEQ ID NO: 1718 - protein, 231 aa, synthetic construct
  REGION 1..231: note = Variant of adenylate kinase
MHHHHHHGGSGMMAFLVFLGPPGAGKGTQSKRIQEKTGIPHISTGDIFRDIVKKENDELAKKIKEIMEKGELVPDELGNAVVKRRLSEKDCEKGFILDGYPRTVAQAEFLDSFLESQNKQLTAAVLFKVPEDVVVQRLTSRLICPKCGRIYNMIFLPPKEDELCDDCKVGLVQRDDDKEEVVRHRLKVYLEKTQPVIDYYGKKGILKRVDGSQGIDNVVAEVLGILGWSDK

SEQ ID NO: 1719 - DNA, 699 bp, synthetic construct
  misc_feature 1..699: note = Variant of adenylate kinase
  source 1..699: mol_type = other DNA
atgcaccatcatcaccatcacgggggctccggcatgagtgcatttctggtgttcttaggtccgccgggcgcgggaaaaggtacccaatcgaaacgcattcaggaaaagactggcatcccgcatattagcacgggcgatatcttccgtgacatcgtcaagaaagagaacgatgaactggccaagaaaattaaagaaatcatggagaaaggtgaactcgttccagatgaactgggtaatgcggtagtaaaacgccgcctgtcggagaaagactgcgaaaaaggctttattttggatggttatccgcgtaccgtggctcaagcggaattcctggatagttttcttgaatcccagaacaaacagttgacagccgccgtgctgttcaaagtccccgaagatgttgttgtgcaacgtttaacctctcgcctgatctgtccgaaatgcgggcgtatctacaacatgatttttctgccaccaaaagaagacgagctgtgtgacgattgcaaagtcggcttagtacagcgtgatgatgataaggaagaaacggttcgtcaccgcctgaaagtctaccttgagaagacccagccggtcattgactattatggcaagaaaggtattctcaaacgcgtagatgggtcgcaaggaatcgacaacgttgttgcagaagtcctggggattctgggttggagcgataagtaatga

SEQ ID NO: 1720 - protein, 231 aa, synthetic construct
  REGION 1..231: note = Variant of adenylate kinase
MHHHHHHGGSGMSAFLVFLGPPGAGKGTQSKRIQEKTGIPHISTGDIFRDIVKKENDELAKKIKEIMEKGELVPDELGNAVVKRRLSEKDCEKGFILDGYPRTVAQAEFLDSFLESQNKQLTAAVLFKVPEDVVVQRLTSRLICPKCGRIYNMIFLPPKEDELCDDCKVGLVQRDDDKEETVRHRLKVYLEKTQPVIDYYGKKGILKRVDGSQGIDNVVAEVLGILGWSDK

SEQ ID NO: 1721 - DNA, 699 bp, synthetic construct
  misc_feature 1..699: note = Variant of adenylate kinase
  source 1..699: mol_type = other DNA
atgcaccatcatcaccatcacgggggctccggcatgagtgcatttctggtgttcttaggtccgccgggcgcgggaaaaggtacccaatcgaaacgcattcaggaaaagactggcatcccgcatattagcacgggcgatatcttccgtgacatcgtcaagaaagagaacgatgaactggccaagaaaattaaagaaatcatggagaaaggtgaactcgttccagatgaactgggtaatgcggtagtaaaacgccgcctgtcggagaaagactgcgaaaaaggctttattttggatggttatccgcgtaccgtggctcaagcggaattcctggatagttttcttgaatcccagaacaaacagttgacagccgccgtgctgttcaaagtccccgaagatgttgttgtgcaacgtttaacctctcgcctgatctgtccgaaatgcgggcgtatctacaacatgatttttctgccaccaaaagaagacgagctgtgtgacgattgcaaagtcggcttagtacagcgtgatgatgataaggaagaaacggttcgtcaccgcctgaaagtctaccttgagaagacccagccggtcattgactattatagtaagaaaggtattctcaaacgcgtagatgggtcgcaaggaatcgacaacgttgttgcagaagtcctggggattctgggttggagcgataagtaatga

SEQ ID NO: 1722 - protein, 231 aa, synthetic construct
  REGION 1..231: note = Variant of adenylate kinase
MHHHHHHGGSGMSAFLVFLGPPGAGKGTQSKRIQEKTGIPHISTGDIFRDIVKKENDELAKKIKEIMEKGELVPDELGNAVVKRRLSEKDCEKGFILDGYPRTVAQAEFLDSFLESQNKQLTAAVLFKVPEDVVVQRLTSRLICPKCGRIYNMIFLPPKEDELCDDCKVGLVQRDDDKEETVRHRLKVYLEKTQPVIDYYSKKGILKRVDGSQGIDNVVAEVLGILGWSDK

SEQ ID NO: 1723 - DNA, 699 bp, synthetic construct
  misc_feature 1..699: note = Variant of adenylate kinase
  source 1..699: mol_type = other DNA
atgcaccatcatcaccatcacgggggctccggcatgatggcatatctggtgttcttaggtccgccgggcgcgggaaaaggtacccaatcgaaacgcattcaggaaaagactggcatcccgcatattagcacgggcgatatcttccgtgacatcgtcaagcagcaaaacgatgaactggccaagaaaattaaagaaatcatggagaaaggtgaactcgttccagatgaactgggtaatgcggtagtaaaacgccgcctgtcggagaaagactgcgaaaaaggctttattttggatggttatccgcgtaccgtggctcaagcggaattcctggatagttttcttgaatcccagaacaaacagttgacagccgccgtgctgttcaaagtccccgaagatgtagttgtgcaacgtttaacctctcgcctgatctgtccgaaatgcgggcgtatctacaacatgatttttctgccaccaaaagaagacgagctgtgtgacgattgcaaagtcggcttagtacagcgtgatgatgataaggaagaaacggttcgtcaccgcctgaaagtctaccttgagaagacccagccggtcattgactattatggcaagaaaggtattctcaaacgcgtagatgggtcgcaaggaatcgacaacgttgttgcagaagtcctggggattctgggttggagcgataagtaatga

SEQ ID NO: 1724 - protein, 231 aa, synthetic construct
  REGION 1..231: note = Variant of adenylate kinase
MHHHHHHGGSGMMAYLVFLGPPGAGKGTQSKRIQEKTGIPHISTGDIFRDIVKQQNDELAKKIKEIMEKGELVPDELGNAVVKRRLSEKDCEKGFILDGYPRTVAQAEFLDSFLESQNKQLTAAVLFKVPEDVVVQRLTSRLICPKCGRIYNMIFLPPKEDELCDDCKVGLVQRDDDKEETVRHRLKVYLEKTQPVIDYYGKKGILKRVDGSQGIDNVVAEVLGILGWSDK

SEQ ID NO: 1725 - DNA, 699 bp, synthetic construct
  misc_feature 1..699: note = Variant of adenylate kinase
  source 1..699: mol_type = other DNA
atgcaccatcatcaccatcacgggggctccggcatgatggcatatctggtgttcttaggtccgccgggcgcgggaaaaggtacccaatcgaaacgcattcaggaaaagactggcatcccgcatattagcacgggcgatatcttccgtgacatcgtcaagaagcaaaacgatgaactggccaagaaaattaaagaaatcatggagaaaggtgaactcgttccagatgaactgggtaatgcggtagtaaaacgccgcctgtcggagaaagactgcgaaaaaggctttattttggatggttatccgcgtaccgtggctcaagcggaattcctggatagttttcttgaatcccagaacaaacagttgacagccgccgtgctgttcaaagtccccgaagatgaagttgtgcaacgtttaacctctcgcctgatctgtccgaaatgcgggcgtatctacaacatgatttttctgccaccaaaagaagacgagctgtgtgacgattgcaaagtcggcttagtacagcgtgatgatgataaggaagaaacggttcgtcaccgcctgaaagtctaccttgagaagacccagccggtcattgactattatggcaagaaaggtattctcaaacgcgtagatgggtcgcaaggaatcgacaacgttgttgcagaagtcctggggattctgggttggagcgataagtaatga

SEQ ID NO: 1726 - protein, 231 aa, synthetic construct
  REGION 1..231: note = Variant of adenylate kinase
MHHHHHHGGSGMMAYLVFLGPPGAGKGTQSKRIQEKTGIPHISTGDIFRDIVKKQNDELAKKIKEIMEKGELVPDELGNAVVKRRLSEKDCEKGFILDGYPRTVAQAEFLDSFLESQNKQLTAAVLFKVPEDEVVQRLTSRLICPKCGRIYNMIFLPPKEDELCDDCKVGLVQRDDDKEETVRHRLKVYLEKTQPVIDYYGKKGILKRVDGSQGIDNVVAEVLGILGWSDK

SEQ ID NO: 1727 - DNA, 699 bp, synthetic construct
  misc_feature 1..699: note = Variant of adenylate kinase
  source 1..699: mol_type = other DNA
atgcaccatcatcaccatcacgggggctccggcatgatggcatatctggtgttcttaggtccgccgggcgcgggaaaaggtacccaatcgaaacgcattcaggaaaagactggcatcccgcatattagcacgggcgatatcttccgtgacatcgtcaagaagcaaaacgatgaactggccaagaaaattaaagaaatcatggagaaaggtgaactcgttccagatgaactgggtaatgcggtagtaaaacgccgcctgtcggagaaagactgcgaaaaaggctttattttggatggttatccgcgtaccgtggctcaagcggaattcctggatagttttcttgaatcccagaacaaacagttgacagccgccgtgctgttcaaagtccccgaagatgaagttgtgcaacgtttaacctctcgcctgatctgtccgaaatgcgggcgtatctacaacatgatttttctgccaccaaaagaagacgagctgtgtgacgattgcaaagtcggcttagtacagcgtgatgatgataaggaagaaacggttcgtcaccgcctgaaagtctaccttgagaagacccagccggtcgcggactattatggcaagaaaggtattctcaaacgcgtagatgggtcgcaaggaatcgacaacgttgttgcagaagtcctggggattctgggttggagcgataagtaatga

SEQ ID NO: 1728 - protein, 231 aa, synthetic construct
  REGION 1..231: note = Variant of adenylate kinase
MHHHHHHGGSGMMAYLVFLGPPGAGKGTQSKRIQEKTGIPHISTGDIFRDIVKKQNDELAKKIKEIMEKGELVPDELGNAVVKRRLSEKDCEKGFILDGYPRTVAQAEFLDSFLESQNKQLTAAVLFKVPEDEVVQRLTSRLICPKCGRIYNMIFLPPKEDELCDDCKVGLVQRDDDKEETVRHRLKVYLEKTQPVADYYGKKGILKRVDGSQGIDNVVAEVLGILGWSDK

SEQ ID NO: 1729 - DNA, 699 bp, synthetic construct
  misc_feature 1..699: note = Variant of adenylate kinase
  source 1..699: mol_type = other DNA
atgcaccatcatcaccatcacgggggctccggcatgatggcatatctggtgttcttaggtccgccgggcgcgggaaaaggtacccaatcgaaacgcattcaggaaaagactggcatcccgcatattagcacgggcgatatcttccgtgacatcgtcaagcagcaaaacgatgaactggccaagaaaattaaagaaatcatggagaaaggtgaactcgttccagatgaactgggtaatgcggtagtaaaacgccgcctgtcggagaaagactgcgaaaaaggctttattttggatggttatccgcgtaccgtggctcaagcggaattcctggatagttttcttgaatcccagaacaaacagttgacagccgccgtgctgttcaaagtccccgaagatgaagttgtgcaacgtttaacctctcgcctgatctgtccgaaatgcgggcgtatctacaacatgatttttctgccaccaaaagaagacgagctgtgtgacgattgcaaagtcggcttagtacagcgtgatgatgataaggaagaaacggttcgtcaccgcctgaaagtctaccttgagaagacccagccggtcgcggactattatggcaagaaaggtattctcaaacgcgtagatgggtcgcaaggaatcgacaacgttgttgcagaagtcctggggattctgggttggagcgataagtaatga

SEQ ID NO: 1730 - protein, 231 aa, synthetic construct
  REGION 1..231: note = Variant of adenylate kinase
MHHHHHHGGSGMMAYLVFLGPPGAGKGTQSKRIQEKTGIPHISTGDIFRDIVKQQNDELAKKIKEIMEKGELVPDELGNAVVKRRLSEKDCEKGFILDGYPRTVAQAEFLDSFLESQNKQLTAAVLFKVPEDEVVQRLTSRLICPKCGRIYNMIFLPPKEDELCDDCKVGLVQRDDDKEETVRHRLKVYLEKTQPVADYYGKKGILKRVDGSQGIDNVVAEVLGILGWSDK

SEQ ID NO: 1731 - DNA, 699 bp, synthetic construct
  misc_feature 1..699: note = Variant of adenylate kinase
  source 1..699: mol_type = other DNA
atgcaccatcatcaccatcacgggggctccggcatgatggcatatctggtgttcttaggtccgccgggcgcgggaaaaggtacccaatcgaaacgcattcaggaaaagactggcatcccgcatattagcacgggcgatatcttccgtgacatcgtcaagaaagagaacgatgaactggccaagaaaattaaagaaatcatggcaaaaggtgaactcgttccagatgaactgggtaatgcggtagtaaaacgccgcctgtcggagaaagactgcgaaaaaggctttattttggatggttatccgcgtaccgtggctcaagcggaattcctggatagttttcttgaatcccagaacaaacagttgacagccgccgtgctgttcaaagtccccgaagatgttgttgtgcaacgtttaacctctcgcctgatctgtccgaaatgcgggcgtatctacaacatgatttttctgccaccaaaagaagacgagctgtgtgacgattgcaaagtcggcttagtacagcgtgatgatgataaggaagaaacggttcgtcaccgcctgaaagtctaccttgagaagacccagccggtcattgactattatggcaagaaaggtattctcaaacgcgtagatgggtcgcaaggaatcgacaacgttgttgcagaagtcctggggattctgggttggagcgataagtaatga

SEQ ID NO: 1732 - protein, 231 aa, synthetic construct
  REGION 1..231: note = Variant of adenylate kinase
MHHHHHHGGSGMMAYLVFLGPPGAGKGTQSKRIQEKTGIPHISTGDIFRDIVKKENDELAKKIKEIMAKGELVPDELGNAVVKRRLSEKDCEKGFILDGYPRTVAQAEFLDSFLESQNKQLTAAVLFKVPEDVVVQRLTSRLICPKCGRIYNMIFLPPKEDELCDDCKVGLVQRDDDKEETVRHRLKVYLEKTQPVIDYYGKKGILKRVDGSQGIDNVVAEVLGILGWSDK

SEQ ID NO: 1733 - DNA, 699 bp, synthetic construct
  misc_feature 1..699: note = Variant of adenylate kinase
  source 1..699: mol_type = other DNA
atgcaccatcatcaccatcacgggggctccggcatgatggcatatctggtgttcttaggtccgccgggcgcgggaaaaggtacccaatcgaaacgcattcaggaaaagactggcatcccgcatattagcacgggcgatatcttccgtgacatcgtcaagcaggaaaacgatgaactggccaagaaaattaaagaaatcatggagaaaggtgaactcgttccagatgaactgggtaatgcggtagtaaaacgccgcctgtcggagaaagactgcgaaaaaggctttattttggatggttatccgcgtaccgtggctcaagcggaattcctggatagttttcttgaatcccagaacaaacagttgacagccgccgtgctgttcaaagtccccgaagatgaagttgtgcaacgtttaacctctcgcctgatctgtccgaaatgcgggcgtatctacaacatgatttttctgccaccaaaagaagacgagctgtgtgacgattgcaaagtcggcttagtacagcgtgatgatgataaggaagaaacggttcgtcaccgcctgaaagtctaccttgagaagacccagccggtcgcggactattatggcaagaaaggtattctcaaacgcgtagatgggtcgcaaggaatcgacaacgttgttgcagaagtcctggggattctgggttggagcgataagtaatga

SEQ ID NO: 1734 - protein, 231 aa, synthetic construct
  REGION 1..231: note = Variant of adenylate kinase
MHHHHHHGGSGMMAYLVFLGPPGAGKGTQSKRIQEKTGIPHISTGDIFRDIVKQENDELAKKIKEIMEKGELVPDELGNAVVKRRLSEKDCEKGFILDGYPRTVAQAEFLDSFLESQNKQLTAAVLFKVPEDEVVQRLTSRLICPKCGRIYNMIFLPPKEDELCDDCKVGLVQRDDDKEETVRHRLKVYLEKTQPVADYYGKKGILKRVDGSQGIDNVVAEVLGILGWSDK

SEQ ID NO: 1735 - DNA, 699 bp, synthetic construct
  misc_feature 1..699: note = Variant of adenylate kinase
  source 1..699: mol_type = other DNA
atgcaccatcatcaccatcacgggggctccggcatgatggcatatctggtgttcttaggtccgccgggcgcgggaaaaggtacccaatcgaaacgcattcaggaaaagactggcatcccgcatattagcacgggcgatatcttccgtgacatcgtcaagcaggaaaacgatgaactggccaagaaaattaaagaaatcatggagaaaggtgaactcgttccagatgaactgggtaatgcggtagtaaaacgccgcctgtcggagaaagactgcgaaaaaggctttattttggatggttatccgcgtaccgtggctcaagcggaattcctggatagttttcttgaatcccagaacaaacagttgacagccgccgtgctgttcaaagtccccgaagatgttgttgtgcaacgtttaacctctcgcctgatctgtccgaaatgcgggcgtatctacaacatgatttttctgccaccaaaagaagacgagctgtgtgacgattgcaaagtcggcttagtacagcgtgatgatgataaggaagaaacggttcgtcaccgcctgaaagtctaccttgagaagacccagccggtcgcggactattatggcaagaaaggtattctcaaacgcgtagatgggtcgcaaggaatcgacaacgttgttgcagaagtcctggggattctgggttggagcgataagtaatga

SEQ ID NO: 1736 - protein, 231 aa, synthetic construct
  REGION 1..231: note = Variant of adenylate kinase
MHHHHHHGGSGMMAYLVFLGPPGAGKGTQSKRIQEKTGIPHISTGDIFRDIVKQENDELAKKIKEIMEKGELVPDELGNAVVKRRLSEKDCEKGFILDGYPRTVAQAEFLDSFLESQNKQLTAAVLFKVPEDVVVQRLTSRLICPKCGRIYNMIFLPPKEDELCDDCKVGLVQRDDDKEETVRHRLKVYLEKTQPVADYYGKKGILKRVDGSQGIDNVVAEVLGILGWSDK

SEQ ID NO: 1737 - DNA, 699 bp, synthetic construct
  misc_feature 1..699: note = Variant of adenylate kinase
  source 1..699: mol_type = other DNA
atgcaccatcatcaccatcacgggggctccggcatgagtgcatttctggtgttcttaggtccgccgggcgcgggaaaaggtacccaatcgaaacgcattcaggaaaagactggcatcccgcatattagcacgggcgatatcttccgtgacatcgtcaagaaagagaacgatgaactggccaagaaaattaaagaaatcatgtataaaggtgaactcgttccagatgaactgggtaatgcggtagtaaaacgccgcctgtcggagaaagactgcgaaaaaggctttattttggatggttatccgcgtaccgtggctcaagcggaattcctggatagttttcttgaatcccagaacaaacagttgacagccgccgtgctgttcaaagtccccgaagatgttgttgtgcaacgtttaacctctcgcctgatctgtccgaaatgcgggcgtatctacaacatgatttttctgccaccaaaagaagacgagctgtgtgacgattgcaaagtcggcttagtacagcgtgatgatgataaggaagaaacggttcgtcaccgcctgaaagtctaccttgagaagacccagccggtcattgactattatggcaagaaaggtattctcaaacgcgtagatgggtcgcaaggaatcgacaacgttgttgcagaagtcctggggattctgggttggagcgataagtaatga

SEQ ID NO: 1738 - protein, 231 aa, synthetic construct
  REGION 1..231: note = Variant of adenylate kinase
MHHHHHHGGSGMSAFLVFLGPPGAGKGTQSKRIQEKTGIPHISTGDIFRDIVKKENDELAKKIKEIMYKGELVPDELGNAVVKRRLSEKDCEKGFILDGYPRTVAQAEFLDSFLESQNKQLTAAVLFKVPEDVVVQRLTSRLICPKCGRIYNMIFLPPKEDELCDDCKVGLVQRDDDKEETVRHRLKVYLEKTQPVIDYYGKKGILKRVDGSQGIDNVVAEVLGILGWSDK

SEQ ID NO: 1739 - DNA, 699 bp, synthetic construct
  misc_feature 1..699: note = Variant of adenylate kinase
  source 1..699: mol_type = other DNA
atgcaccatcatcaccatcacgggggctccggcatgatggcatatctggtgttcttaggtccgccgggcgcgggaaaaggtacccaatcgaaacgcattgtggaaaagactggcatcccgcatattagcacgggcgatatcttccgtgacatcgtcaagaaagagaacgatgaactggccaagaaaattaaagaaatcatggagaaaggtgaactcgttccagatgaactgggtaatgcggtagtaaaacgccgcctgtcggagaaagactgcgaaaaaggctttattttggatggttatccgcgtaccgtggctcaagcggaattcctggatagttttcttgaatcccagaacaaacagttgacagccgccgtgctgttcaaagtccccgaagatgttgttgtgcaacgtttaacctctcgcctgatctgtccgaaatgcgggcgtatctacaacatgatttttctgccaccaaaagaagacgagctgtgtgacgattgcaaagtcggcttagtacagcgtgatgatgataaggaagaaacggttcgtcaccgcctgaaagtctaccttgagaagacccagccggtcattgactattatggcaagaaaggtattctcaaacgcgtagatgggtcgcaaggaatcgacaacgttgttgcagaagtcctggggattctgggttggagcgataagtaatga

SEQ ID NO: 1740 - protein, 231 aa, synthetic construct
  REGION 1..231: note = Variant of adenylate kinase
MHHHHHHGGSGMMAYLVFLGPPGAGKGTQSKRIVEKTGIPHISTGDIFRDIVKKENDELAKKIKEIMEKGELVPDELGNAVVKRRLSEKDCEKGFILDGYPRTVAQAEFLDSFLESQNKQLTAAVLFKVPEDVVVQRLTSRLICPKCGRIYNMIFLPPKEDELCDDCKVGLVQRDDDKEETVRHRLKVYLEKTQPVIDYYGKKGILKRVDGSQGIDNVVAEVLGILGWSDK

SEQ ID NO: 1741 - DNA, 699 bp, synthetic construct
  misc_feature 1..699: note = Variant of adenylate kinase
  source 1..699: mol_type = other DNA
atgcaccatcatcaccatcacgggggctccggcatgatggcatatctggtgttcttaggtccgccgggcgcgggaaaaggtacccaatcgaaacgcattcaggaaaagactggcatcccgcatattagcacgggcgatatcttccgtgacatcgtcaagcaggaaaacgatgaactggccaagaaaattaaagaaatcatggagaaaggtgaactcgttccagatgaactgggtaatgcggtagtaaaacgccgcctgtcggagaaagactgcgaaaaaggctttattttggatggttatccgcgtaccgtggctcaagcggaattcctggatagttttcttgaatcccagaacaaacagttgacagccgccgtgctgttcaaagtccccgaagatgttgttgtgcaacgtttaacctctcgcctgatctgtccgaaatgcgggcgtatctacaacatgatttttctgccaccaaaagaagacgagctgtgtgacgattgcaaagtcggcttagtacagcgtgatgatgataaggaagaaacggttcgtcaccgcctgaaagtctaccttgagaagacccagccggtcattgactattatggcaagaaaggtattctcaaacgcgtagatgggtcgcaaggaatcgacaacgttgttgcagaagtcctggggattctgggttggagcgataagtaatga

SEQ ID NO: 1742 - protein, 231 aa, synthetic construct
  REGION 1..231: note = Variant of adenylate kinase
MHHHHHHGGSGMMAYLVFLGPPGAGKGTQSKRIQEKTGIPHISTGDIFRDIVKQENDELAKKIKEIMEKGELVPDELGNAVVKRRLSEKDCEKGFILDGYPRTVAQAEFLDSFLESQNKQLTAAVLFKVPEDVVVQRLTSRLICPKCGRIYNMIFLPPKEDELCDDCKVGLVQRDDDKEETVRHRLKVYLEKTQPVIDYYGKKGILKRVDGSQGIDNVVAEVLGILGWSDK

SEQ ID NO: 1743 - DNA, 699 bp, synthetic construct
  misc_feature 1..699: note = Variant of adenylate kinase
  source 1..699: mol_type = other DNA
atgcaccatcatcaccatcacgggggctccggcatgatggcatatctggtgttcttaggtccgccgggcgcgggaaaaggtacccaatcgaaacgcattcaggaaaagactggcatcccgcatattagcacgggcgatatcttccgtgacatcgtcaagaaagagaacgatgaactggccaagaaaattaaagaaatcatggagaaaggtgaactcgttccagatgaactgggtaatgcggtagtaaaacgccgcctgtcggagaaagactgcgaaaaaggctttattttggatggttatccgcgtaccgtggctcaagcggaattcctggatagttttcttgaatcccagaacaaacagttgacagccgccgtgctgttcaaagtccccgaagatgaagttgtgcaacgtttaacctctcgcctgatctgtccgaaatgcgggcgtatctacaacatgatttttctgccaccaaaagaagacgagctgtgtgacgattgcaaagtcggcttagtacagcgtgatgatgataaggaagaaacggttcgtcaccgcctgaaagtctaccttgagaagacccagccggtcattgactattatggcaagaaaggtattctcaaacgcgtagatgggtcgcaaggaatcgacaacgttgttgcagaagtcctggggattctgggttggagcgataagtaatga

SEQ ID NO: 1744 - protein, 231 aa, synthetic construct
  REGION 1..231: note = Variant of adenylate kinase
MHHHHHHGGSGMMAYLVFLGPPGAGKGTQSKRIQEKTGIPHISTGDIFRDIVKKENDELAKKIKEIMEKGELVPDELGNAVVKRRLSEKDCEKGFILDGYPRTVAQAEFLDSFLESQNKQLTAAVLFKVPEDEVVQRLTSRLICPKCGRIYNMIFLPPKEDELCDDCKVGLVQRDDDKEETVRHRLKVYLEKTQPVIDYYGKKGILKRVDGSQGIDNVVAEVLGILGWSDK

SEQ ID NO: 1745 - DNA, 699 bp, synthetic construct
  misc_feature 1..699: note = Variant of adenylate kinase
  source 1..699: mol_type = other DNA
atgcaccatcatcaccatcacgggggctccggcatgatggcatatctggtgttcttaggtccgccgggcgcgggaaaaggtacccaatcgaaacgcattcaggaaaagactggcatcccgcatattagcacgggcgatatcttccgtgacatcgtcaagaaagagaacgatgaactggccaaaaaaattaaagaaatcatggagaaaggtgaactcgttccagatgaactgggtaatgcggtagtaaaacgccgcctgtcggagaaagactgcgaaaaaggctttattttggatggttatccgcgtaccgtggctcaagcggaattcctggatagttttcttgaatcccagaacaaaaagttgacagccgccgtgctgtttaaagtccccgaagatgttgttgtgcaacgtttaacctctcgcctgatctgtccgaaatgcgggcgtatctacaacatgatttttctgccaccaaaagaagacgagctgtgtgacgattgcaaagtcggtttagtacagcgtgatgatgataaggaagaaacggttcgtcaccgcctgaaagtctaccttgagaagacccagccggtcattgactattatggcaagaaaggtattctcaaacgcgtagatgggtcgcaaggaatcgacaacgttgttgcagaagtcctggggattctgggttggagcgataagtaatga

SEQ ID NO: 1746 - protein, 231 aa, synthetic construct
  REGION 1..231: note = Variant of adenylate kinase
MHHHHHHGGSGMMAYLVFLGPPGAGKGTQSKRIQEKTGIPHISTGDIFRDIVKKENDELAKKIKEIMEKGELVPDELGNAVVKRRLSEKDCEKGFILDGYPRTVAQAEFLDSFLESQNKKLTAAVLFKVPEDVVVQRLTSRLICPKCGRIYNMIFLPPKEDELCDDCKVGLVQRDDDKEETVRHRLKVYLEKTQPVIDYYGKKGILKRVDGSQGIDNVVAEVLGILGWSDK

SEQ ID NO: 1747 - DNA, 699 bp, synthetic construct
  misc_feature 1..699: note = Variant of adenylate kinase
  source 1..699: mol_type = other DNA
atgcaccatcatcaccatcacgggggctccggcatgatggcatatctggtgttcttaggtccgccgggcgcgggaaaaggtacccaatcgaaacgcattgtggaaaagactggcatcccgcatattagcacgggcgatatcttccgtgacatcgtcaagaaagagaacgatgaactggccaaaaaaattaaagaaatcatggagaaaggtgaactcgttccagatgaactgggtaatgcggtagtaaaacgccgcctgtcggagaaagactgcgaaaaaggctttattttggatggttatccgcgtaccgtggctcaagcggaattcctggatagttttcttgaatcccagaacaaacagttgacagccgccgtgctgttcaaagtccccgaagatgctgttgtgcaacgtttaacctctcgcctgatctgtccgaaatgcgggcgtatctacaacatgatttttctgccaccaaaagaagacgagctgtgtgacgattgcaaagtcggcttagtacagcgtgatgatgataaggaagaaacggttcgtcaccgcctgaaagtctaccttgagaagacccagccggtcattgactattatggcaagaaaggtattctcaaacgcgtagatgggtcgcaaggaatcgacaacgttgttgcagaagtcctggggattctgggttggagcgataagtaatga

SEQ ID NO: 1748 - protein, 231 aa, synthetic construct
  REGION 1..231: note = Variant of adenylate kinase
MHHHHHHGGSGMMAYLVFLGPPGAGKGTQSKRIVEKTGIPHISTGDIFRDIVKKENDELAKKIKEIMEKGELVPDELGNAVVKRRLSEKDCEKGFILDGYPRTVAQAEFLDSFLESQNKQLTAAVLFKVPEDAVVQRLTSRLICPKCGRIYNMIFLPPKEDELCDDCKVGLVQRDDDKEETVRHRLKVYLEKTQPVIDYYGKKGILKRVDGSQGIDNVVAEVLGILGWSDK

SEQ ID NO: 1749 - DNA, 699 bp, synthetic construct
  misc_feature 1..699: note = Variant of adenylate kinase
  source 1..699: mol_type = other DNA
atgcaccatcatcaccatcacgggggctccggcatgagtgcatttctggtgttcttaggtccgccgggcgcgggaaaaggtacccaatcgaaacgcattcaggaaaagactggcatcccgcatattagcacgggcgatatcttccgtgacatcgtcaagaaagagaacgatgagctggccaagaaaattaaagaaatcatggagaaaggtgaactcgttccagatgaactgggtaatgcggtagtaaaacgccgcctgtcggagaaagactgcgaaaaaggctttattttggatggttatccgcgtaccgtggctcaagcggaattcctggatagttttcttgaatcccagaacaaacagttgacagccgccgtgctgttcaaagtccccgaagatgttgttgtgcaacgtttaacctctcgcctgatctgtccgaaatgcgggcgtatctacaacatgatttttctgccaccaaaagaagacgagctgtgtgacgattgcaaagtcggcttagtacagcgtgatgatgataaggaagaagtcgttcgtcaccgcctgaaagtctaccttgagaagacccagccggtcattgactattatggcaagaaaggtattctcaaacgcgtagatgggtcgcaaggaatcgacaacgttgttgcagaagtcctggggattctgggttggagcgataagtaatga

SEQ ID NO: 1750 - protein, 231 aa, synthetic construct
  REGION 1..231: note = Variant of adenylate kinase
MHHHHHHGGSGMSAFLVFLGPPGAGKGTQSKRIQEKTGIPHISTGDIFRDIVKKENDELAKKIKEIMEKGELVPDELGNAVVKRRLSEKDCEKGFILDGYPRTVAQAEFLDSFLESQNKQLTAAVLFKVPEDVVVQRLTSRLICPKCGRIYNMIFLPPKEDELCDDCKVGLVQRDDDKEEVVRHRLKVYLEKTQPVIDYYGKKGILKRVDGSQGIDNVVAEVLGILGWSDK

SEQ ID NO: 1751 - DNA, 699 bp, synthetic construct
  misc_feature 1..699: note = Variant of adenylate kinase
  source 1..699: mol_type = other DNA
atgcaccatcatcaccatcacgggggctccggcatgatggcatatctggtgttcttaggtccgccgggcgcgggaaaaggtacccaatcgaaacgcattcaggaaaagactggcatcccgcatattagcacgggcgatatcttccgtgacatcgtcaagaagcaaaacgatgaactggccaagaaaattaaagaaatcatggagaaaggtgaactcgttccagatgaactgggtaatgcggtagtaaaacgccgcctgtcggagaaagactgcgaaaaaggctttattttggatggttatccgcgtaccgtggctcaagcggaattcctggatagttttcttgaatcccagaacaaacagttgacagccgccgtgctgttcaaagtccccgaagatgttgttgtgcaacgtttaacctctcgcctgatctgtccgaaatgcgggcgtatctacaacatgatttttctgccaccaaaagaagacgagctgtgtgacgattgcaaagtcggcttagtacagcgtgatgatgataaggaagaaacggttcgtcaccgcctgaaagtctaccttgagaagacccagccggtcattgactattatggcaagaaaggtattctcaaacgcgtagatgggtcgcaaggaatcgacaacgttgttgcagaagtcctggggattctgggttggagcgataagtaatga

SEQ ID NO: 1752 - protein, 231 aa, synthetic construct
  REGION 1..231: note = Variant of adenylate kinase
MHHHHHHGGSGMMAYLVFLGPPGAGKGTQSKRIQEKTGIPHISTGDIFRDIVKKQNDELAKKIKEIMEKGELVPDELGNAVVKRRLSEKDCEKGFILDGYPRTVAQAEFLDSFLESQNKQLTAAVLFKVPEDVVVQRLTSRLICPKCGRIYNMIFLPPKEDELCDDCKVGLVQRDDDKEETVRHRLKVYLEKTQPVIDYYGKKGILKRVDGSQGIDNVVAEVLGILGWSDK

SEQ ID NO: 1753 - DNA, 699 bp, synthetic construct
  misc_feature 1..699: note = Variant of adenylate kinase
  source 1..699: mol_type = other DNA
atgcaccatcatcaccatcacgggggctccggcatgatggcatttctggtgttcttaggtccgccgggcgcgggaaaaggtacccaatcgaaacgcattcaggaaaagactggcatcccgcatattagcacgggcgatatcttccgtgacatcgtcaagaaagagaacgatgagatggccaagaaaattaaagaaatcatggagaaaggtgaactcgttccagatgaactgggtaatgcggtagtaaaacgccgcctgtcggagaaagactgcgaaaaaggctttattttggatggttatccgcgtaccgtggctcaagcggaattcctggatagttttcttgaatcccagaacaaacagttgacagccgccgtgctgttcaaagtccccgaagatgttgttgtgcaacgtttaacctctcgcctgatctgtccgaaatgcgggcgtatctacaacatgatttttctgccaccaaaagaagacgagctgtgtgacgattgcaaagtcggcttagtacagcgtgatgatgataaggaagaaacggttcgtcaccgcctgaaagtctaccttgagaagacccagccggtcattgactattatggcaagaaaggtattctcaaacgcgtagatgggtcgcaaggaatcgacaacgttgttgcagaagtcctggggattctgggttggagcgataagtaatga

SEQ ID NO: 1754 - protein, 231 aa, synthetic construct
  REGION 1..231: note = Variant of adenylate kinase
MHHHHHHGGSGMMAFLVFLGPPGAGKGTQSKRIQEKTGIPHISTGDIFRDIVKKENDEMAKKIKEIMEKGELVPDELGNAVVKRRLSEKDCEKGFILDGYPRTVAQAEFLDSFLESQNKQLTAAVLFKVPEDVVVQRLTSRLICPKCGRIYNMIFLPPKEDELCDDCKVGLVQRDDDKEETVRHRLKVYLEKTQPVIDYYGKKGILKRVDGSQGIDNVVAEVLGILGWSDK

SEQ ID NO: 1755 - DNA, 699 bp, synthetic construct
  misc_feature 1..699: note = Variant of adenylate kinase
  source 1..699: mol_type = other DNA
atgcaccatcatcaccatcacgggggctccggcatgatggcatatctggtgttcttaggtccgccgggcgcgggaaaaggtacccaatcgaaacgcattcaggaaaagactggcatcccgcatattagcacgggcgatatcttccgtgacatcgtcaagaaagagaacgatgaactggccaagaaaattaaagaaatcatggcaaaaggtgaactcgttccagatgaactgggtaatgcggtagtaaaacgccgcctgtcggagaaagactgcgaaaaaggctttattttggatggttatccgcgtaccgtggctcaagcggaattcctggatagttttcttgaatcccagaacaaacagttgacagccgccgtgctgttcaaagtccccgaagatgttgttgtgcaacgtttaacctctcgcctgatctgtccgaaatgcgggcgtatctacaacatgatttttctgccaccaaaagaagacgagctgtgtgacgattgcaaagtcggcttagtacagcgtgatgatgataaggaagaagtcgttcgtcaccgcctgaaagtctaccttgagaagacccagccggtcattgactattatggcaagaaaggtattctcaaacgcgtagatgggtcgcaaggaatcgacaacgttgttgcagaagtcctggggattctgggttggagcgataagtaatga

SEQ ID NO: 1756 - protein, 231 aa, synthetic construct
  REGION 1..231: note = Variant of adenylate kinase
MHHHHHHGGSGMMAYLVFLGPPGAGKGTQSKRIQEKTGIPHISTGDIFRDIVKKENDELAKKIKEIMAKGELVPDELGNAVVKRRLSEKDCEKGFILDGYPRTVAQAEFLDSFLESQNKQLTAAVLFKVPEDVVVQRLTSRLICPKCGRIYNMIFLPPKEDELCDDCKVGLVQRDDDKEEVVRHRLKVYLEKTQPVIDYYGKKGILKRVDGSQGIDNVVAEVLGILGWSDK

SEQ ID NO: 1757 - DNA, 699 bp, synthetic construct
  misc_feature 1..699: note = Variant of adenylate kinase
  source 1..699: mol_type = other DNA
atgcaccatcatcaccatcacgggggctccggcatgatggcatatctggtgttcttaggtccgccgggcgcgggaaaaggtacccaatcgaaacgcattcaggaaaagactggcatcccgcatattagcacgggcgatatcttccgtgacatcgtcaagaaagagaacgatgagctggccaagaaaattaaagaaatcatggagaaaggtgaactcgttccagatgaactgggtaatgcggtagtaaaacgccgcctgtcggagaaagactgcgaaaaaggctttattttggatggttatccgcgtaccgtggctcaagcggaattcctggatagttttcttgaatcccagaacaaacagttgacagccgccgtgctgttcaaagtccccgaagatgttgttgtgcaacgtttaacctctcgcctgatctgtccgaaatgcgggcgtatctacaacatgatttttctgccaccaaaagaagacgagctgtgtgacgattgcaaagtcggcttagtacagcgtgatgatgataaggaagaaacggttcgtcaccgcctgaaagtctaccttgagaagacccagccggtcattgactattatagtaagaaaggtattctcaaacgcgtagatgggtcgcaaggaatcgacaacgttgttgcagaagtcctggggattctgggttggagcgataagtaatga

SEQ ID NO: 1758 - protein, 231 aa, synthetic construct
  REGION 1..231: note = Variant of adenylate kinase
MHHHHHHGGSGMMAYLVFLGPPGAGKGTQSKRIQEKTGIPHISTGDIFRDIVKKENDELAKKIKEIMEKGELVPDELGNAVVKRRLSEKDCEKGFILDGYPRTVAQAEFLDSFLESQNKQLTAAVLFKVPEDVVVQRLTSRLICPKCGRIYNMIFLPPKEDELCDDCKVGLVQRDDDKEETVRHRLKVYLEKTQPVIDYYSKKGILKRVDGSQGIDNVVAEVLGILGWSDK

SEQ ID NO: 1759 - DNA, 699 bp, synthetic construct
  misc_feature 1..699: note = Variant of adenylate kinase
  source 1..699: mol_type = other DNA
atgcaccatcatcaccatcacgggggctccggcatgatggcatatctggtgttcttaggtccgccgggcgcgggaaaaggtacccaatcgaaacgcattcaggaaaagactggcatcccgcatattagcacgggcgatatcttccgtgacatcgtcaagaaagagaacgatgaactggccaagaaaattaaagaaatcatgtataaaggtgaactcgttccagatgaactgggtaatgcggtagtaaaacgccgcctgtcggagaaagactgcgaaaaaggctttattttggatggttatccgcgtaccgtggctcaagcggaattcctggatagttttcttgaatcccagaacaaacagttgacagccgccgtgctgttcaaagtccccgaagatgttgttgtgcaacgtttaacctctcgcctgatctgtccgaaatgcgggcgtatctacaacatgatttttctgccaccaaaagaagacgagctgtgtgacgattgcaaagtcggcttagtacagcgtgatgatgataaggaagaaacggttcgtcaccgcctgaaagtctaccttgagaagacccagccggtcattgactattatggcaagaaaggtattctcaaacgcgtagatgggtcgcaaggaatcgacaacgttgttgcagaagtcctggggattctgggttggagcgataagtaatga

SEQ ID NO: 1760 - protein, 231 aa, synthetic construct
  REGION 1..231: note = Variant of adenylate kinase
MHHHHHHGGSGMMAYLVFLGPPGAGKGTQSKRIQEKTGIPHISTGDIFRDIVKKENDELAKKIKEIMYKGELVPDELGNAVVKRRLSEKDCEKGFILDGYPRTVAQAEFLDSFLESQNKQLTAAVLFKVPEDVVVQRLTSRLICPKCGRIYNMIFLPPKEDELCDDCKVGLVQRDDDKEETVRHRLKVYLEKTQPVIDYYGKKGILKRVDGSQGIDNVVAEVLGILGWSDK

SEQ ID NO: 1761 - DNA, 699 bp, synthetic construct
  misc_feature 1..699: note = Variant of adenylate kinase
  source 1..699: mol_type = other DNA
atgcaccatcatcaccatcacgggggctccggcatgatggcatatctggtgttcttaggtccgccgggcgcgggaaaaggtacccaatcgaaacgcattcaggaaaagactggcatcccgcatattagcacgggcgatatcttccgtgacatcgtcaagaaagagaacgatgaactggccaagaaaattaaagaaatcatggagaaaggtgaactcgttccagatgaactgggtaatgcggtagtaaaacgccgcctgtcggagaaagactgcgaaaaaggctttattttggatggttatccgcgtaccgtggctcaagcggaattcctggatagttttcttgaatcccagaacaaacagttgacagccgccgtgctgttcaaagtccccgaagatgttgttgtgcaacgtttaacctctcgcctgatctgtccgaaatgcgggcgtatctacaacatgatttttctgccaccaaaagaagacgagctgtgtgacgattgcaaagtcggcttagtacagcgtgatgatgataaggaagaagtcgttcgtcaccgcctgaaagtctaccttgagaagacccagccggtcattgactattatggcaagaaaggtattctcaaacgcgtagatgggtcgcaaggaatcgacaacgttgttgcagaagtcctggggattctgggttggagcgataagtaatga

SEQ ID NO: 1762 - protein, 231 aa, synthetic construct
  REGION 1..231: note = Variant of adenylate kinase
MHHHHHHGGSGMMAYLVFLGPPGAGKGTQSKRIQEKTGIPHISTGDIFRDIVKKENDELAKKIKEIMEKGELVPDELGNAVVKRRLSEKDCEKGFILDGYPRTVAQAEFLDSFLESQNKQLTAAVLFKVPEDVVVQRLTSRLICPKCGRIYNMIFLPPKEDELCDDCKVGLVQRDDDKEEVVRHRLKVYLEKTQPVIDYYGKKGILKRVDGSQGIDNVVAEVLGILGWSDK

SEQ ID NO: 1763 - DNA, 699 bp, synthetic construct
  misc_feature 1..699: note = Variant of adenylate kinase
  source 1..699: mol_type = other DNA
atgcaccatcatcaccatcacgggggctccggcatgatggcatatctggtgttcttaggtccgccgggcgcgggaaaaggtacccaatcgaaacgcattcaggaaaagactggcatcccgcatattagcacgggcgatatcttccgtgacatcgtcaagaaagagaacgatgaactggccaagaaaattaaagagagcatggagaaaggtgaactcgttccagatgaactgggtaatgcggtagtaaaacgccgcctgtcggagaaagactgcgaaaaaggctttattttggatggttatccgcgtaccgtggctcaagcggaattcctggatagttttcttgaatcccagaacaaacagttgacagccgccgtgctgttcaaagtccccgaagatgtagttgtgcaacgtttaacctctcgcctgatctgtccgaaatgcgggcgtatctacaacatgatttttctgccaccaaaagaagacgagctgtgtgacgattgcaaagtcggcttagtacagcgtgatgatgataaggaagaaacggttcgtcaccgcctgaaagtctaccttgagaagacccagccggtcattgactattatggcaagaaaggtattctcaaacgcgtagatgggtcgcaaggaatcgacaacgttgttgcagaagtcctggggattctgggttggagcgataagtaatga

SEQ ID NO: 1764 - protein, 231 aa, synthetic construct
  REGION 1..231: note = Variant of adenylate kinase
MHHHHHHGGSGMMAYLVFLGPPGAGKGTQSKRIQEKTGIPHISTGDIFRDIVKKENDELAKKIKESMEKGELVPDELGNAVVKRRLSEKDCEKGFILDGYPRTVAQAEFLDSFLESQNKQLTAAVLFKVPEDVVVQRLTSRLICPKCGRIYNMIFLPPKEDELCDDCKVGLVQRDDDKEETVRHRLKVYLEKTQPVIDYYGKKGILKRVDGSQGIDNVVAEVLGILGWSDK

SEQ ID NO: 1765 - DNA, 699 bp, synthetic construct
  misc_feature 1..699: note = Variant of adenylate kinase
  source 1..699: mol_type = other DNA
atgcaccatcatcaccatcacgggggctccggcatgatggcatttctggtgttcttaggtccgccgggcgcgggaaaaggtacccaatcgaaacgcattcaggaaaagactggcatcccgcatattagcacgggcgatatcttccgtgacatcgtcaagaaagagaacgatgagatggccaagaaaattaaagaaatcatggagaaaggtgaactcgttccagatgaactgggtaatgcggtagtaaaacgccgcctgtcggagaaagactgcgaaaaaggctttattttggatggttatccgcgtaccgtggctcaagcggaattcctggatagttttcttgaatcccagaacaaacagttgacagccgccgtgctgttcaaagtccccgaagatgttgttgtgcaacgtttaacctctcgcctgatctgtccgaaatgcgggcgtatctacaacatgatttttctgccaccaaaagaagacgagctgtgtgacgattgcaaagtcggcttagtacagcgtgatgatgataaggaagaagtcgttcgtcaccgcctgaaagtctaccttgagaagacccagccggtcattgactattatggcaagaaaggtattctcaaacgcgtagatgggtcgcaaggaatcgacaacgttgttgcagaagtcctggggattctgggttggagcgataagtaatga

SEQ ID NO: 1766 - protein, 231 aa, synthetic construct
  REGION 1..231: note = Variant of adenylate kinase
MHHHHHHGGSGMMAFLVFLGPPGAGKGTQSKRIQEKTGIPHISTGDIFRDIVKKENDEMAKKIKEIMEKGELVPDELGNAVVKRRLSEKDCEKGFILDGYPRTVAQAEFLDSFLESQNKQLTAAVLFKVPEDVVVQRLTSRLICPKCGRIYNMIFLPPKEDELCDDCKVGLVQRDDDKEEVVRHRLKVYLEKTQPVIDYYGKKGILKRVDGSQGIDNVVAEVLGILGWSDK

SEQ ID NO: 1767 - DNA, 699 bp, synthetic construct
  misc_feature 1..699: note = Variant of adenylate kinase
  source 1..699: mol_type = other DNA
atgcaccatcatcaccatcacgggggctccggcatgatggcatatctggtgttcttaggtccgccgggcgcgggaaaaggtacccaatcgaaacgcattcaggaaaagactggcatcccgcatattagcacgggcgatatcttccgtgacatcgtcaagaaagagaacgatgaactggccaagaaaattaaagaaatcatggagaaaggtgaactcgttccagatgaactgggtaatgcggtagtaaaacgccgcctgtcggagaaagactgcgaaaaaggctttattttggatggttatccgcgtaccgtggctcaagcggaattcctggatagttttcttgaatcccagaacaaacagttgacagccgccgtgctgttcaaagtccccgaagatgttgttgtgcaacgtttaacctctcgcctgatctgtccgaaatgcgggcgtatctacaacatgatttttctgccaccaaaagaagacgagctgtgtgacgattgcaaagtcggcttagtacagcgtgatgatgataaggaagaaacggttcgtcaccgcctgaaagtctaccttgagaagacccagccggtcgcggactattatggcaagaaaggtattctcaaacgcgtagatgggtcgcaaggaatcgacaacgttgttgcagaagtcctggggattctgggttggagcgataagtaatga

SEQ ID NO: 1768 - protein, 231 aa, synthetic construct
  REGION 1..231: note = Variant of adenylate kinase
MHHHHHHGGSGMMAYLVFLGPPGAGKGTQSKRIQEKTGIPHISTGDIFRDIVKKENDELAKKIKEIMEKGELVPDELGNAVVKRRLSEKDCEKGFILDGYPRTVAQAEFLDSFLESQNKQLTAAVLFKVPEDVVVQRLTSRLICPKCGRIYNMIFLPPKEDELCDDCKVGLVQRDDDKEETVRHRLKVYLEKTQPVADYYGKKGILKRVDGSQGIDNVVAEVLGILGWSDK

SEQ ID NO: 1769 - DNA, 699 bp, synthetic construct
  misc_feature 1..699: note = Variant of adenylate kinase
  source 1..699: mol_type = other DNA
atgcaccatcatcaccatcacgggggctccggcatgagtgcatttctggtgttcttaggtccgccgggcgcgggaaaaggtacccaatcgaaacgcattcaggaaaagactggcatcccgcatattagcacgggcgatatcttccgtgacatcgtcaagaaagagaacgatgagatggccaagaaaattaaagaaatcatggagaaaggtgaactcgttccagatgaactgggtaatgcggtagtaaaacgccgcctgtcggagaaagactgcgaaaaaggctttattttggatggttatccgcgtaccgtggctcaagcggaattcctggatagttttcttgaatcccagaacaaacagttgacagccgccgtgctgttcaaagtccccgaagatgttgttgtgcaacgtttaacctctcgcctgatctgtccgaaatgcgggcgtatctacaacatgatttttctgccaccaaaagaagacgagctgtgtgacgattgcaaagtcggcttagtacagcgtgatgatgataaggaagaaacggttcgtcaccgcctgaaagtctaccttgagaagacccagccggtcattgactattatggcaagaaaggtattctcaaacgcgtagatgggtcgcaaggaatcgacaacgttgttgcagaagtcctggggattctgggttggagcgataagtaatga

SEQ ID NO: 1770 - protein, 231 aa, synthetic construct
  REGION 1..231: note = Variant of adenylate kinase
MHHHHHHGGSGMSAFLVFLGPPGAGKGTQSKRIQEKTGIPHISTGDIFRDIVKKENDEMAKKIKEIMEKGELVPDELGNAVVKRRLSEKDCEKGFILDGYPRTVAQAEFLDSFLESQNKQLTAAVLFKVPEDVVVQRLTSRLICPKCGRIYNMIFLPPKEDELCDDCKVGLVQRDDDKEETVRHRLKVYLEKTQPVIDYYGKKGILKRVDGSQGIDNVVAEVLGILGWSDK

SEQ ID NO: 1771 - DNA, 699 bp, synthetic construct
  misc_feature 1..699: note = Variant of adenylate kinase
  source 1..699: mol_type = other DNA
atgcaccatcatcaccatcacgggggctccggcatgatggcatatctggtgttcttaggtccgccgggcgcgggaaaaggtacccaatcgaaacgcattcaggaaaagactggcatcccgcatattagcacgggcgatatcttccgtgacatcgtcaagaaagagaacgatgaactggcctcgaaaattaaagaaatcatggagaaaggtgaactcgttccagatgaactgggtaatgcggtagtaaaacgccgcctgtcggagaaagactgcgaaaaaggctttattttggatggttatccgcgtaccgtggctcaagcggaattcctggatagttttcttgaatcccagaacaaacagttgacagccgccgtgctgtttaaagtccccgaagatgttgttgtgcaacgtttaacctctcgcctgatctgtccgaaatgcgggcgtatctacaacatgatttttctgccaccaaaagaagacgagctgtgtgacgattgcaaagtcggtttagtacagcgtgatgatgataaggaagaaacggttcgtcaccgcctgaaagtctaccttgagaagacccagccggtcattgactattatggcaagaaaggtattctcaaacgcgtagatgggtcgcaaggaatcgacaacgttgttgcagaagtcctggggattctgggttggagcgataagtaatga

SEQ ID NO: 1772 - protein, 231 aa, synthetic construct
  REGION 1..231: note = Variant of adenylate kinase
MHHHHHHGGSGMMAYLVFLGPPGAGKGTQSKRIQEKTGIPHISTGDIFRDIVKKENDELASKIKEIMEKGELVPDELGNAVVKRRLSEKDCEKGFILDGYPRTVAQAEFLDSFLESQNKQLTAAVLFKVPEDVVVQRLTSRLICPKCGRIYNMIFLPPKEDELCDDCKVGLVQRDDDKEETVRHRLKVYLEKTQPVIDYYGKKGILKRVDGSQGIDNVVAEVLGILGWSDK

SEQ ID NO: 1773 - DNA, 699 bp, synthetic construct
  misc_feature 1..699: note = Variant of adenylate kinase
  source 1..699: mol_type = other DNA
atgcaccatcatcaccatcacgggggctccggcatgatggcatatctggtgttcttaggtccgccgggcgcgggaaaaggtacccaatcgaaacgcattgtggaaaagactggcatcccgcatattagcacgggcgatatcttccgtgacatcgtcaagaaagagaacgatgaactggcctcgaaaattaaagaaatcatggagaaaggtgaactcgttccagatgaactgggtaatgcggtagtaaaacgccgcctgtcggagaaagactgcgaaaaaggctttattttggatggttatccgcgtaccgtggctcaagcggaattcctggatagttttcttgaatcccagaacaaacagttgacagccgccgtgctgtttaaagtccccgaagatgttgttgtgcaacgtttaacctctcgcctgatctgtccgaaatgcgggcgtatctacaacatgatttttctgccaccaaaagaagacgagctgtgtgacgattgcaaagtcggtttagtacagcgtgatgatgataaggaagaaacggttcgtcaccgcctgaaagtctaccttgagaagacccagccggtcattgactattatggcaagaaaggtattctcaaacgcgtagatgggtcgcaaggaatcgacaacgttgttgcagaagtcctggggattctgggttggagcgataagtaatga

SEQ ID NO: 1774 - protein, 231 aa, synthetic construct
  REGION 1..231: note = Variant of adenylate kinase
MHHHHHHGGSGMMAYLVFLGPPGAGKGTQSKRIVEKTGIPHISTGDIFRDIVKKENDELASKIKEIMEKGELVPDELGNAVVKRRLSEKDCEKGFILDGYPRTVAQAEFLDSFLESQNKQLTAAVLFKVPEDVVVQRLTSRLICPKCGRIYNMIFLPPKEDELCDDCKVGLVQRDDDKEETVRHRLKVYLEKTQPVIDYYGKKGILKRVDGSQGIDNVVAEVLGILGWSDK

SEQ ID NO: 1775 - DNA, 699 bp, synthetic construct
  misc_feature 1..699: note = Variant of adenylate kinase
  source 1..699: mol_type = other DNA
atgcaccatcatcaccatcacgggggctccggcatgagtgcatatctggtgttcttaggtccgccgggcgcgggaaaaggtacccaatcgaaacgcattcaggaaaagactggcatcccgcatattagcacgggcgatatcttccgtgacatcgtcaagaaagagaacgatgaactggccaagaaaattaaagaaatcatggagaaaggtgaactcgttccagatgaactgggtaatgcggtagtaaaacgccgcctgtcggagaaagactgcgaaaaaggctttattttggatggttatccgcgtaccgtggctcaagcggaattcctggatagttttcttgaatcccagaacaaacagttgacagccgccgtgctgttcaaagtccccgaagatgttgttgtgcaacgtttaacctctcgcctgatctgtccgaaatgcgggcgtatctacaacatgatttttctgccaccaaaagaagacgagctgtgtgacgattgcaaagtcggcttagtacagcgtgatgatgataaggaagaaacggttcgtcaccgcctgaaagtctaccttgagaagacccagccggtcattgactattatggcaagaaaggtattctcaaacgcgtagatgggtcgcaaggaatcgacaacgttgttgcagaagtcctggggattctgggttggagcgataagtaatga

SEQ ID NO: 1776 - protein, 231 aa, synthetic construct
  REGION 1..231: note = Variant of adenylate kinase
MHHHHHHGGSGMSAYLVFLGPPGAGKGTQSKRIQEKTGIPHISTGDIFRDIVKKENDELAKKIKEIMEKGELVPDELGNAVVKRRLSEKDCEKGFILDGYPRTVAQAEFLDSFLESQNKQLTAAVLFKVPEDVVVQRLTSRLICPKCGRIYNMIFLPPKEDELCDDCKVGLVQRDDDKEETVRHRLKVYLEKTQPVIDYYGKKGILKRVDGSQGIDNVVAEVLGILGWSDK

SEQ ID NO: 1777 - DNA, 699 bp, synthetic construct
  misc_feature 1..699: note = Variant of adenylate kinase
  source 1..699: mol_type = other DNA
atgcaccatcatcaccatcacgggggctccggcatgatggcatatctggtgttcttaggtccgccgggcgcgggaaaaggtacccaatcgaaacgcattcaggaaaagactggcatcccgcatattagcacgggcgatatcttccgtgacatcgtcaagaaagagaacgatgaactggccgcgaaaattaaagaaatcatggagaaaggtgaactcgttccagatgaactgggtaatgcggtagtaaaacgccgcctgtcggagaaagactgcgaaaaaggctttattttggatggttatccgcgtaccgtggctcaagcggaattcctggatagttttcttgaatcccagaacaaacagttgacagccgccgtgctgtttaaagtccccgaagatgttgttgtgcaacgtttaacctctcgcctgatctgtccgaaatgcgggcgtatctacaacatgatttttctgccaccaaaagaagacgagctgtgtgacgattgcaaagtcggtttagtacagcgtgatgatgataaggaagaaacggttcgtcaccgcctgaaagtctaccttgagaagacccagccggtcattgactattatggcaagaaaggtattctcaaacgcgtagatgggtcgcaaggaatcgacaacgttgttgcagaagtcctggggattctgggttggagcgataagtaatga

SEQ ID NO: 1778 - protein, 231 aa, synthetic construct
  REGION 1..231: note = Variant of adenylate kinase
MHHHHHHGGSGMMAYLVFLGPPGAGKGTQSKRIQEKTGIPHISTGDIFRDIVKKENDELAAKIKEIMEKGELVPDELGNAVVKRRLSEKDCEKGFILDGYPRTVAQAEFLDSFLESQNKQLTAAVLFKVPEDVVVQRLTSRLICPKCGRIYNMIFLPPKEDELCDDCKVGLVQRDDDKEETVRHRLKVYLEKTQPVIDYYGKKGILKRVDGSQGIDNVVAEVLGILGWSDK

SEQ ID NO: 1779 - DNA, 699 bp, synthetic construct
  misc_feature 1..699: note = Variant of adenylate kinase
  source 1..699: mol_type = other DNA
atgcaccatcatcaccatcacgggggctccggcatgatggcatatctggtgttcttaggtccgccgggcgcgggaaaaggtacccaatcgaaacgcattgtggaaaagactggcatcccgcatattagcacgggcgatatcttccgtgacatcgtcaagaaagagaacgatgaactggccaagaaaattaaagaaatcatggagcgtggtgaactcgttccagatgaactgggtaatgcggtagtaaaacgccgcctgtcggagaaagactgcgaaaaaggctttattttggatggttatccgcgtaccgtggctcaagcggaattcctggatagttttcttgaatcccagaacaaacagttgacagccgccgtgctgttcaaagtccccgaagatgttgttgtgcaacgtttaacctctcgcctgatctgtccgaaatgcgggcgtatctacaacatgatttttctgccaccaaaagaagacgagctgtgtgacgattgcaaagtcggcttagtacagcgtgatgatgataaggaagaaacggttcgtcaccgcctgaaagtctaccttgagaagacccagccggtcattgactattatggcaagaaaggtattctcaaacgcgtagatgggtcgcaaggaatcgacaacgttgttgcagaagtcctggggattctgggttggagcgataagtaatga

SEQ ID NO: 1780 - protein, 231 aa, synthetic construct
  REGION 1..231: note = Variant of adenylate kinase
MHHHHHHGGSGMMAYLVFLGPPGAGKGTQSKRIVEKTGIPHISTGDIFRDIVKKENDELAKKIKEIMERGELVPDELGNAVVKRRLSEKDCEKGFILDGYPRTVAQAEFLDSFLESQNKQLTAAVLFKVPEDVVVQRLTSRLICPKCGRIYNMIFLPPKEDELCDDCKVGLVQRDDDKEETVRHRLKVYLEKTQPVIDYYGKKGILKRVDGSQGIDNVVAEVLGILGWSDK

SEQ ID NO: 1781 - DNA, 699 bp, synthetic construct
  misc_feature 1..699: note = Variant of adenylate kinase
  source 1..699: mol_type = other DNA
atgcaccatcatcaccatcacgggggctccggcatgatggcatatctggtgttcttaggtccgccgggcgcgggaaaaggtacccaatcgaaacgcattcaggaaaagactggcatcccgcatattagcacgggcgatatcttccgtgacatcgtcaagaaagagaacgatgaactggccaagaaaattaaagaaatcatggagaaaggtgaactcgttccagatgaactgggtaatgcggtagtaaaacgccgcctgtcggagaaagactgcgaaaaaggctttattttggatggttatccgcgtaccgtggctcaagcggaattcctggatagttttcttgaatcccagaacaaacagttgacagccgccgtgctgttcaaagtccccgaagatgtagttgtgcaacgtttaacctctcgcctgatctgtccgaaatgcgggcgtatctacaacatgatttttctgccaccaaaagaagacgagtcgtgtgacgattgcaaagtcggcttagtacagcgtgatgatgataaggaagaaacggttcgtcaccgcctgaaagtctaccttgagaagacccagccggtcattgactattatggcaagaaaggtattctcaaacgcgtagatgggtcgcaaggaatcgacaacgttgttgcagaagtcctggggattctgggttggagcgataagtaatga

SEQ ID NO: 1782 - protein, 231 aa, synthetic construct
  REGION 1..231: note = Variant of adenylate kinase
MHHHHHHGGSGMMAYLVFLGPPGAGKGTQSKRIQEKTGIPHISTGDIFRDIVKKENDELAKKIKEIMEKGELVPDELGNAVVKRRLSEKDCEKGFILDGYPRTVAQAEFLDSFLESQNKQLTAAVLFKVPEDVVVQRLTSRLICPKCGRIYNMIFLPPKEDESCDDCKVGLVQRDDDKEETVRHRLKVYLEKTQPVIDYYGKKGILKRVDGSQGIDNVVAEVLGILGWSDK

SEQ ID NO: 1783 - DNA, 699 bp, synthetic construct
  misc_feature 1..699: note = Variant of adenylate kinase
  source 1..699: mol_type = other DNA
atgcaccatcatcaccatcacgggggctccggcatgatggcatatctggtgttcttaggtccgccgggcgcgggaaaaggtacccaatcgaaacgcattcaggaaaagactggcatcccgcatattagcacgggcgatatcttccgtgacatcgtcaagaagcaaaacgatgaactggccaagaaaattaaagaaatcatggagaaaggtgaactcgttccagatgaactgggtaatgcggtagtaaaacgccgcctgtcggagaaagactgcgaaaaaggctttattttggatggttatccgcgtaccgtggctcaagcggaattcctggatagttttcttgaatcccagaacaaacggttgacagccgccgtgctgttcaaagtccccgaagatgaagttgtgcaacgtttaacctctcgcctgatctgtccgaaatgcgggcgtatctacaacatgatttttctgccaccaaaagaagacgagctgtgtgacgattgcaaagtcggcttagtacagcgtgatgatgataaggaagaaacggttcgtcaccgcctgaaagtctaccttgagaagacccagccggtcattgactattatggcaagaaaggtattctcaaacgcgtagatgggtcgcaaggaatcgacaacgttgttgcagaagtcctggggattctgggttggagcgataagtaatga

SEQ ID NO: 1784 - protein, 231 aa, synthetic construct
  REGION 1..231: note = Variant of adenylate kinase
MHHHHHHGGSGMMAYLVFLGPPGAGKGTQSKRIQEKTGIPHISTGDIFRDIVKKQNDELAKKIKEIMEKGELVPDELGNAVVKRRLSEKDCEKGFILDGYPRTVAQAEFLDSFLESQNKRLTAAVLFKVPEDEVVQRLTSRLICPKCGRIYNMIFLPPKEDELCDDCKVGLVQRDDDKEETVRHRLKVYLEKTQPVIDYYGKKGILKRVDGSQGIDNVVAEVLGILGWSDK

SEQ ID NO: 1785 - DNA, 699 bp, synthetic construct
  misc_feature 1..699: note = Variant of adenylate kinase
  source 1..699: mol_type = other DNA
atgcaccatcatcaccatcacgggggctccggcatgatggcatatctggtgttcttaggtccgccgggcgcgggaaaaggtacccaatcgaaacgcattcaggaaaagactggcatcccgcatattagcacgggcgatatcttccgtgacatcgtcaagaagcaaaacgatgaactggcctcgaaaattaaagaaatcatggagaaaggtgaactcgttccagatgaactgggtaatgcggtagtaaaacgccgcctgtcggagaaagactgcgaaaaaggctttattttggatggttatccgcgtaccgtggctcaagcggaattcctggatagttttcttgaatcccagaacaaacagttgacagccgccgtgctgttcaaagtccccgaagatgaagttgtgcaacgtttaacctctcgcctgatctgtccgaaatgcgggcgtatctacaacatgatttttctgccaccaaaagaagacgagctgtgtgacgattgcaaagtcggcttagtacagcgtgatgatgataaggaagaaacggttcgtcaccgcctgaaagtctaccttgagaagacccagccggtcattgactattatagtaagaaaggtattctcaaacgcgtagatgggtcgcaaggaatcgacaacgttgttgcagaagtcctggggattctgggttggagcgataagtaatga

SEQ ID NO: 1786 - protein, 231 aa, synthetic construct
  REGION 1..231: note = Variant of adenylate kinase
MHHHHHHGGSGMMAYLVFLGPPGAGKGTQSKRIQEKTGIPHISTGDIFRDIVKKQNDELASKIKEIMEKGELVPDELGNAVVKRRLSEKDCEKGFILDGYPRTVAQAEFLDSFLESQNKQLTAAVLFKVPEDEVVQRLTSRLICPKCGRIYNMIFLPPKEDELCDDCKVGLVQRDDDKEETVRHRLKVYLEKTQPVIDYYSKKGILKRVDGSQGIDNVVAEVLGILGWSDK

SEQ ID NO: 1787 - DNA, 699 bp, synthetic construct
  misc_feature 1..699: note = Variant of adenylate kinase
  source 1..699: mol_type = other DNA
atgcaccatcatcaccatcacgggggctccggcatgatggcatatctggtgttcttaggtccgccgggcgcgggaaaaggtacccaatcgaaacgcatttctgaaaagactggcatcccacatattagcacgggcgatatcttccgtgacatcgtcaagaagcaaaacgatgaactggccaagaaaattaaagaaatcatggagaaaggtgaactcgttccagatgaactgggtaatgcggtagtaaaacgccgcctgtcggagaaagactgcgaaaaaggctttattttggatggttatccgcgtaccgtggctcaagcggaattcctggatagttttcttgaatcccagaacaaacagttgacagccgccgtgctgttcaaagtccccgaagatgaagttgtgcaacgtttaacctctcgcctgatctgtccgaaatgcgggcgtatctacaacatgatttttctgccaccaaaagaagacgagctgtgtgacgattgcaaagtcggcttagtacagcgtgatgatgataaggaagaaacggttcgtcaccgcctgaaagtctaccttgagaagacccagccggtcattgactattatggcaagaaaggtattctcaaacgcgtagatgggtcgcaaggaatcgacaacgttgttgcagaagtcctggggattctgggttggagcgataagtaatga

SEQ ID NO: 1788 - protein, 231 aa, synthetic construct
  REGION 1..231: note = Variant of adenylate kinase
MHHHHHHGGSGMMAYLVFLGPPGAGKGTQSKRISEKTGIPHISTGDIFRDIVKKQNDELAKKIKEIMEKGELVPDELGNAVVKRRLSEKDCEKGFILDGYPRTVAQAEFLDSFLESQNKQLTAAVLFKVPEDEVVQRLTSRLICPKCGRIYNMIFLPPKEDELCDDCKVGLVQRDDDKEETVRHRLKVYLEKTQPVIDYYGKKGILKRVDGSQGIDNVVAEVLGILGWSDK

SEQ ID NO: 1789 - DNA, 699 bp, synthetic construct
  misc_feature 1..699: note = Variant of adenylate kinase
  source 1..699: mol_type = other DNA
atgcaccatcatcaccatcacgggggctccggcatgatggcatatctggtgttcttaggtccgccgggcgcgggaaaaggtacccaatcgaaacgcattcaggaaattactggcatcccacatattagcacgggcgatatcttccgtgacatcgtcaagaagcaaaacgatgaactggccaagaaaattaaagaaatcatggagaaaggtgaactcgttccagatgaactgggtaatgcggtagtaaaacgccgcctgtcggagaaagactgcgaaaaaggctttattttggatggttatccgcgtaccgtggctcaagcggaattcctggatagttttcttgaatcccagaacaaacagttgacagccgccgtgctgttcaaagtccccgaagatgaagttgtgcaacgtttaacctctcgcctgatctgtccgaaatgcgggcgtatctacaacatgatttttctgccaccaaaagaagacgagctgtgtgacgattgcaaagtcggcttagtacagcgtgatgatgataaggaagaaacggttcgtcaccgcctgaaagtctaccttgagaagacccagccggtcattgactattatggcaagaaaggtattctcaaacgcgtagatgggtcgcaaggaatcgacaacgttgttgcagaagtcctggggattctgggttggagcgataagtaatga

SEQ ID NO: 1790 - protein, 231 aa, synthetic construct
  REGION 1..231: note = Variant of adenylate kinase
MHHHHHHGGSGMMAYLVFLGPPGAGKGTQSKRIQEITGIPHISTGDIFRDIVKKQNDELAKKIKEIMEKGELVPDELGNAVVKRRLSEKDCEKGFILDGYPRTVAQAEFLDSFLESQNKQLTAAVLFKVPEDEVVQRLTSRLICPKCGRIYNMIFLPPKEDELCDDCKVGLVQRDDDKEETVRHRLKVYLEKTQPVIDYYGKKGILKRVDGSQGIDNVVAEVLGILGWSDK

SEQ ID NO: 1791 - DNA, 699 bp, synthetic construct
  misc_feature 1..699: note = Variant of adenylate kinase
  source 1..699: mol_type = other DNA
atgcaccatcatcaccatcacgggggctccggcatgatggcatatctggtgttcttaggtccgccgggcgcgggaaaaggtacccaatcgaaacgcattcaggaagtgactggcatcccacatattagcacgggcgatatcttccgtgacatcgtcaagaagcaaaacgatgaactggccaagaaaattaaagaaatcatggagaaaggtgaactcgttccagatgaactgggtaatgcggtagtaaaacgccgcctgtcggagaaagactgcgaaaaaggctttattttggatggttatccgcgtaccgtggctcaagcggaattcctggatagttttcttgaatcccagaacaaacagttgacagccgccgtgctgttcaaagtccccgaagatgaagttgtgcaacgtttaacctctcgcctgatctgtccgaaatgcgggcgtatctacaacatgatttttctgccaccaaaagaagacgagctgtgtgacgattgcaaagtcggcttagtacagcgtgatgatgataaggaagaaacggttcgtcaccgcctgaaagtctaccttgagaagacccagccggtcattgactattatggcaagaaaggtattctcaaacgcgtagatgggtcgcaaggaatcgacaacgttgttgcagaagtcctggggattctgggttggagcgataagtaatga

SEQ ID NO: 1792 - protein, 231 aa, synthetic construct
  REGION 1..231: note = Variant of adenylate kinase
MHHHHHHGGSGMMAYLVFLGPPGAGKGTQSKRIQEVTGIPHISTGDIFRDIVKKQNDELAKKIKEIMEKGELVPDELGNAVVKRRLSEKDCEKGFILDGYPRTVAQAEFLDSFLESQNKQLTAAVLFKVPEDEVVQRLTSRLICPKCGRIYNMIFLPPKEDELCDDCKVGLVQRDDDKEETVRHRLKVYLEKTQPVIDYYGKKGILKRVDGSQGIDNVVAEVLGILGWSDK

SEQ ID NO: 1793 - DNA, 699 bp, synthetic construct
  misc_feature 1..699: note = Variant of adenylate kinase
  source 1..699: mol_type = other DNA
atgcaccatcatcaccatcacgggggctccggcatgatggcatatctggtgttcttaggtccgccgggcgcgggaaaaggtacccaatcgaaacgcattcaggaagctactggcatcccacatattagcacgggcgatatcttccgtgacatcgtcaagaagcaaaacgatgaactggccaagaaaattaaagaaatcatggagaaaggtgaactcgttccagatgaactgggtaatgcggtagtaaaacgccgcctgtcggagaaagactgcgaaaaaggctttattttggatggttatccgcgtaccgtggctcaagcggaattcctggatagttttcttgaatcccagaacaaacagttgacagccgccgtgctgttcaaagtccccgaagatgaagttgtgcaacgtttaacctctcgcctgatctgtccgaaatgcgggcgtatctacaacatgatttttctgccaccaaaagaagacgagctgtgtgacgattgcaaagtcggcttagtacagcgtgatgatgataaggaagaaacggttcgtcaccgcctgaaagtctaccttgagaagacccagccggtcattgactattatggcaagaaaggtattctcaaacgcgtagatgggtcgcaaggaatcgacaacgttgttgcagaagtcctggggattctgggttggagcgataagtaatga

SEQ ID NO: 1794 - protein, 231 aa, synthetic construct
  REGION 1..231: note = Variant of adenylate kinase
MHHHHHHGGSGMMAYLVFLGPPGAGKGTQSKRIQEATGIPHISTGDIFRDIVKKQNDELAKKIKEIMEKGELVPDELGNAVVKRRLSEKDCEKGFILDGYPRTVAQAEFLDSFLESQNKQLTAAVLFKVPEDEVVQRLTSRLICPKCGRIYNMIFLPPKEDELCDDCKVGLVQRDDDKEETVRHRLKVYLEKTQPVIDYYGKKGILKRVDGSQGIDNVVAEVLGILGWSDK

SEQ ID NO: 1795 - DNA, 699 bp, synthetic construct
  misc_feature 1..699: note = Variant of adenylate kinase
  source 1..699: mol_type = other DNA
atgcaccatcatcaccatcacgggggctccggcatgatggcatatctggtgttcttaggtccgccgggcgcgggaaaaggtacccaatcgaaacgcattcaggaactgactggcatcccacatattagcacgggcgatatcttccgtgacatcgtcaagaagcaaaacgatgaactggccaagaaaattaaagaaatcatggagaaaggtgaactcgttccagatgaactgggtaatgcggtagtaaaacgccgcctgtcggagaaagactgcgaaaaaggctttattttggatggttatccgcgtaccgtggctcaagcggaattcctggatagttttcttgaatcccagaacaaacagttgacagccgccgtgctgttcaaagtccccgaagatgaagttgtgcaacgtttaacctctcgcctgatctgtccgaaatgcgggcgtatctacaacatgatttttctgccaccaaaagaagacgagctgtgtgacgattgcaaagtcggcttagtacagcgtgatgatgataaggaagaaacggttcgtcaccgcctgaaagtctaccttgagaagacccagccggtcattgactattatggcaagaaaggtattctcaaacgcgtagatgggtcgcaaggaatcgacaacgttgttgcagaagtcctggggattctgggttggagcgataagtaatga

SEQ ID NO: 1796 - protein, 231 aa, synthetic construct
  REGION 1..231: note = Variant of adenylate kinase
MHHHHHHGGSGMMAYLVFLGPPGAGKGTQSKRIQELTGIPHISTGDIFRDIVKKQNDELAKKIKEIMEKGELVPDELGNAVVKRRLSEKDCEKGFILDGYPRTVAQAEFLDSFLESQNKQLTAAVLFKVPEDEVVQRLTSRLICPKCGRIYNMIFLPPKEDELCDDCKVGLVQRDDDKEETVRHRLKVYLEKTQPVIDYYGKKGILKRVDGSQGIDNVVAEVLGILGWSDK

SEQ ID NO: 1797 - DNA, 699 bp, synthetic construct
  misc_feature 1..699: note = Variant of adenylate kinase
  source 1..699: mol_type = other DNA
atgcaccatcatcaccatcacgggggctccggcatgatggcatatctggtgttcttaggtccgccgggcgcgggaaaaggtacccaatcgaaacgcattcaggaaatgactggcatcccacatattagcacgggcgatatcttccgtgacatcgtcaagaagcaaaacgatgaactggccaagaaaattaaagaaatcatggagaaaggtgaactcgttccagatgaactgggtaatgcggtagtaaaacgccgcctgtcggagaaagactgcgaaaaaggctttattttggatggttatccgcgtaccgtggctcaagcggaattcctggatagttttcttgaatcccagaacaaacagttgacagccgccgtgctgttcaaagtccccgaagatgaagttgtgcaacgtttaacctctcgcctgatctgtccgaaatgcgggcgtatctacaacatgatttttctgccaccaaaagaagacgagctgtgtgacgattgcaaagtcggcttagtacagcgtgatgatgataaggaagaaacggttcgtcaccgcctgaaagtctaccttgagaagacccagccggtcattgactattatggcaagaaaggtattctcaaacgcgtagatgggtcgcaaggaatcgacaacgttgttgcagaagtcctggggattctgggttggagcgataagtaatga

SEQ ID NO: 1798 - protein, 231 aa, synthetic construct
  REGION 1..231: note = Variant of adenylate kinase
MHHHHHHGGSGMMAYLVFLGPPGAGKGTQSKRIQEMTGIPHISTGDIFRDIVKKQNDELAKKIKEIMEKGELVPDELGNAVVKRRLSEKDCEKGFILDGYPRTVAQAEFLDSFLESQNKQLTAAVLFKVPEDEVVQRLTSRLICPKCGRIYNMIFLPPKEDELCDDCKVGLVQRDDDKEETVRHRLKVYLEKTQPVIDYYGKKGILKRVDGSQGIDNVVAEVLGILGWSDK

SEQ ID NO: 1799 - DNA, 699 bp, synthetic construct
  misc_feature 1..699: note = Variant of adenylate kinase
  source 1..699: mol_type = other DNA
atgcaccatcatcaccatcacgggggctccggcatgatggcatatctggtgttcttaggtccgccgggcgcgggaaaaggtacccaatcgaaacgcattcaggaaaagactggcatcccgcatattagcacgggcgatatcttccgtgacatcgtcaagaagcaaaacgatgaactggccaagaaaattaaagaaatcatggagaaaggtgaactcgttccagatgaactgggtaatgcggtagtaaaacgccgcctgtcggagaaagactgcgaaaaaggctttattttggatggttatccgcgtaccgttagtcaagcggaattcctggatagttttcttgaatcccagaacaaacagttgacagccgccgtgctgttcaaagtccccgaagatgaagttgtgcaacgtttaacctctcgcctgatctgtccgaaatgcgggcgtatctacaacatgatttttctgccaccaaaagaagacgagctgtgtgacgattgcaaagtcggcttagtacagcgtgatgatgataaggaagaaacggttcgtcaccgcctgaaagtctaccttgagaagacccagccggtcattgactattatggcaagaaaggtattctcaaacgcgtagatgggtcgcaaggaatcgacaacgttgttgcagaagtcctggggattctgggttggagcgataagtaatga

SEQ ID NO: 1800 - protein, 231 aa, synthetic construct
  REGION 1..231: note = Variant of adenylate kinase
MHHHHHHGGSGMMAYLVFLGPPGAGKGTQSKRIQEKTGIPHISTGDIFRDIVKKQNDELAKKIKEIMEKGELVPDELGNAVVKRRLSEKDCEKGFILDGYPRTVSQAEFLDSFLESQNKQLTAAVLFKVPEDEVVQRLTSRLICPKCGRIYNMIFLPPKEDELCDDCKVGLVQRDDDKEETVRHRLKVYLEKTQPVIDYYGKKGILKRVDGSQGIDNVVAEVLGILGWSDK

SEQ ID NO: 1801 - DNA, 699 bp, synthetic construct
  misc_feature 1..699: note = Variant of adenylate kinase
  source 1..699: mol_type = other DNA
atgcaccatcatcaccatcacgggggctccggcatgatggcatatctggtgttcttaggtccgccgggcgcgggaaaaggtacccaatcgaaacgcattgctgaaaagactggcatcccacatattagcacgggcgatatcttccgtgacatcgtcaagaagcaaaacgatgaactggccaagaaaattaaagaaatcatggagaaaggtgaactcgttccagatgaactgggtaatgcggtagtaaaacgccgcctgtcggagaaagactgcgaaaaaggctttattttggatggttatccgcgtaccgtggctcaagcggaattcctggatagttttcttgaatcccagaacaaacagttgacagccgccgtgctgttcaaagtccccgaagatgaagttgtgcaacgtttaacctctcgcctgatctgtccgaaatgcgggcgtatctacaacatgatttttctgccaccaaaagaagacgagctgtgtgacgattgcaaagtcggcttagtacagcgtgatgatgataaggaagaaacggttcgtcaccgcctgaaagtctaccttgagaagacccagccggtcattgactattatggcaagaaaggtattctcaaacgcgtagatgggtcgcaaggaatcgacaacgttgttgcagaagtcctggggattctgggttggagcgataagtaatga

SEQ ID NO: 1802 - protein, 231 aa, synthetic construct
  REGION 1..231: note = Variant of adenylate kinase
MHHHHHHGGSGMMAYLVFLGPPGAGKGTQSKRIAEKTGIPHISTGDIFRDIVKKQNDELAKKIKEIMEKGELVPDELGNAVVKRRLSEKDCEKGFILDGYPRTVAQAEFLDSFLESQNKQLTAAVLFKVPEDEVVQRLTSRLICPKCGRIYNMIFLPPKEDELCDDCKVGLVQRDDDKEETVRHRLKVYLEKTQPVIDYYGKKGILKRVDGSQGIDNVVAEVLGILGWSDK

SEQ ID NO: 1803 - DNA, 699 bp, synthetic construct
  misc_feature 1..699: note = Variant of adenylate kinase
  source 1..699: mol_type = other DNA
atgcaccatcatcaccatcacgggggctccggcatgatggcatatctggtgttcttaggtccgccgggcgcgggaaaaggtacccaatcgaaacgcattcaggaaaagactggcatcccgcatattagcacgggcgatatcttccgtgacatcgtcaagaagcaaaacgatgaactggccaagaaaattaaagaaatcatggagaaaggtgaactcgttccagatgaactgggtaatgcggtagtaaaacgccgcctgtcggagaaagactgcgaaaaaggctttattttggatggttatccgcgtaccgtggctcaagcggaattcctggacgagtttcttgaatcccagaacaaacagttgacagccgccgtgctgttcaaagtccccgaagatgaagttgtgcaacgtttaacctctcgcctgatctgtccgaaatgcgggcgtatctacaacatgatttttctgccaccaaaagaagacgagctgtgtgacgattgcaaagtcggcttagtacagcgtgatgatgataaggaagaaacggttcgtcaccgcctgaaagtctaccttgagaagacccagccggtcattgactattatggcaagaaaggtattctcaaacgcgtagatgggtcgcaaggaatcgacaacgttgttgcagaagtcctggggattctgggttggagcgataagtaatga

SEQ ID NO: 1804 - protein, 231 aa, synthetic construct
  REGION 1..231: note = Variant of adenylate kinase
MHHHHHHGGSGMMAYLVFLGPPGAGKGTQSKRIQEKTGIPHISTGDIFRDIVKKQNDELAKKIKEIMEKGELVPDELGNAVVKRRLSEKDCEKGFILDGYPRTVAQAEFLDEFLESQNKQLTAAVLFKVPEDEVVQRLTSRLICPKCGRIYNMIFLPPKEDELCDDCKVGLVQRDDDKEETVRHRLKVYLEKTQPVIDYYGKKGILKRVDGSQGIDNVVAEVLGILGWSDK

SEQ ID NO: 1805 - DNA, 699 bp, synthetic construct
  misc_feature 1..699: note = Variant of adenylate kinase
  source 1..699: mol_type = other DNA
atgcaccatcatcaccatcacgggggctccggcatgatggcatatctggtgttcttaggtccgccgggcgcgggaaaaggtacccaatcgaggcgcattcaggaaaagactggcatcccgcatattagcacgggcgatatcttccgtgacatcgtcaagaagcaaaacgatgaactggccaagaaaattaaagaaatcatggagaaaggtgaactcgttccagatgaactgggtaatgcggtagtaaaacgccgcctgtcggagaaagactgcgaaaaaggctttattttggatggttatccgcgtaccgtggctcaagcggaattcctggatagttttcttgaatcccagaacaaacagttgacagccgccgtgctgttcaaagtccccgaagatgaagttgtgcaacgtttaacctctcgcctgatctgtccgaaatgcgggcgtatctacaacatgatttttctgccaccaaaagaagacgagctgtgtgacgattgcaaagtcggcttagtacagcgtgatgatgataaggaagaaacggttcgtcaccgcctgaaagtctaccttgagaagacccagccggtcattgactattatggcaagaaaggtattctcaaacgcgtagatgggtcgcaaggaatcgacaacgttgttgcagaagtcctggggattctgggttggagcgataagtaatga

SEQ ID NO: 1806 - protein, 231 aa, synthetic construct
  REGION 1..231: note = Variant of adenylate kinase
MHHHHHHGGSGMMAYLVFLGPPGAGKGTQSRRIQEKTGIPHISTGDIFRDIVKKQNDELAKKIKEIMEKGELVPDELGNAVVKRRLSEKDCEKGFILDGYPRTVAQAEFLDSFLESQNKQLTAAVLFKVPEDEVVQRLTSRLICPKCGRIYNMIFLPPKEDELCDDCKVGLVQRDDDKEETVRHRLKVYLEKTQPVIDYYGKKGILKRVDGSQGIDNVVAEVLGILGWSDK

SEQ ID NO: 1807 - DNA, 699 bp, synthetic construct
  misc_feature 1..699: note = Variant of adenylate kinase
  source 1..699: mol_type = other DNA
atgcaccatcatcaccatcacgggggctccggcatgatggcatatctggtgttcttaggtccgccgggcgcgggaaaaggtacccaatcgaaacgcattcaggaaaagactggcatcccgcatattagcacgggcgatatcttccgtgacatcgtcaagaagcaaaacgatgaactggccaagaaaattaaagaaatcatggagaaaggtgaactcgttccagatgaactgggtaatgcggtagtaaaacgccgcctgtcggagaaagactgcgaaaaaggctttattttggatggttatccgcgtaccgtggctcaagcggaattcctggatagttttcttgaatcccagaacaaacagttgacagccgccgtgctgttcaaagtccccgaagatgaagttgtgcaacgtttaacctctcgcctgatctgtccggattgcgggcgtatctacaatatgatttttctgccaccaaaagaagacgagctgtgtgacgattgcaaagtcggcttagtacagcgtgatgatgataaggaagaaacggttcgtcaccgcctgaaagtctaccttgagaagacccagccggtcattgactattatggcaagaaaggtattctcaaacgcgtagatgggtcgcaaggaatcgacaacgttgttgcagaagtcctggggattctgggttggagcgataagtaatga

SEQ ID NO: 1808 - protein, 231 aa, synthetic construct
  REGION 1..231: note = Variant of adenylate kinase
MHHHHHHGGSGMMAYLVFLGPPGAGKGTQSKRIQEKTGIPHISTGDIFRDIVKKQNDELAKKIKEIMEKGELVPDELGNAVVKRRLSEKDCEKGFILDGYPRTVAQAEFLDSFLESQNKQLTAAVLFKVPEDEVVQRLTSRLICPDCGRIYNMIFLPPKEDELCDDCKVGLVQRDDDKEETVRHRLKVYLEKTQPVIDYYGKKGILKRVDGSQGIDNVVAEVLGILGWSDK

SEQ ID NO: 1809 - DNA, 699 bp, synthetic construct
  misc_feature 1..699: note = Variant of adenylate kinase
  source 1..699: mol_type = other DNA
atgcaccatcatcaccatcacgggggctccggcatgatggcatatctggtgttcttaggtccgccgggcgcgggaaaaggtacccaatcgaaacgcattcaggaaaagactggcatcccgcatattagcacgggcgatatcttccgtgacatcgtcaagaagcaaaacgatgaactggccaagaaaattaaagaaatcatggagaaaggtgaactcgttccagatgaactgggtaatgcggtagtaaaacgccgcctgtcggagaaagactgcgaaaaaggctttattttggatggttatccgcgtaccgtggctcaagcggaattcctggacaggtttcttgaatcccagaacaaacagttgacagccgccgtgctgttcaaagtccccgaagatgaagttgtgcaacgtttaacctctcgcctgatctgtccgaaatgcgggcgtatctacaacatgatttttctgccaccaaaagaagacgagctgtgtgacgattgcaaagtcggcttagtacagcgtgatgatgataaggaagaaacggttcgtcaccgcctgaaagtctaccttgagaagacccagccggtcattgactattatggcaagaaaggtattctcaaacgcgtagatgggtcgcaaggaatcgacaacgttgttgcagaagtcctggggattctgggttggagcgataagtaatga

SEQ ID NO: 1810 - protein, 231 aa, synthetic construct
  REGION 1..231: note = Variant of adenylate kinase
MHHHHHHGGSGMMAYLVFLGPPGAGKGTQSKRIQEKTGIPHISTGDIFRDIVKKQNDELAKKIKEIMEKGELVPDELGNAVVKRRLSEKDCEKGFILDGYPRTVAQAEFLDRFLESQNKQLTAAVLFKVPEDEVVQRLTSRLICPKCGRIYNMIFLPPKEDELCDDCKVGLVQRDDDKEETVRHRLKVYLEKTQPVIDYYGKKGILKRVDGSQGIDNVVAEVLGILGWSDK

SEQ ID NO: 1811 - DNA, 699 bp, synthetic construct
  misc_feature 1..699: note = Variant of adenylate kinase
  source 1..699: mol_type = other DNA
atgcaccatcatcaccatcacgggggctccggcatgggggcatatctggtgttcttaggtccgccgggcgcgggaaaaggtacccaaggccgtcgcattcaggaaaagactggcatcccgcatattagcacgggcgatatcttccgtgacatcgtcgctaagcaaaacgatgaactggcctcgaaaattaaagaaatcatggagaaaggtgaactcgttccagatgaactgggtaatgcggtagtaaaacgccgcctgtcggagaaagactgcgaaaaaggctttattttggatggttatccgcgtaccgtggctcaagcggaatatctggatagttttcttgaatcccagaatcgccagttgacagccgccgtgctgttcaaagtccccgaagatgaagttgtgcaacgtttaacctctcgcctgatctgtccgaaatgcgggcgtatctacaacatgatttttctgccaccaaaagaagacgagctgtgtgacgattgcggtgtcggcttagtacagcgtgatgatgataaggaagaaacggtccgtcaccgcctgaaagtctaccttgagaagacccagccggtcattgactattatagtaagaaaggtattctcaaacgcgtagatgggtcgcaaggaatcgacaacgttgttgcagaagtcctggggattctgggttggagcgataagtaatga

SEQ ID NO: 1812 - protein, 231 aa, synthetic construct
  REGION 1..231: note = Variant of adenylate kinase
MHHHHHHGGSGMGAYLVFLGPPGAGKGTQGRRIQEKTGIPHISTGDIFRDIVAKQNDELASKIKEIMEKGELVPDELGNAVVKRRLSEKDCEKGFILDGYPRTVAQAEYLDSFLESQNRQLTAAVLFKVPEDEVVQRLTSRLICPKCGRIYNMIFLPPKEDELCDDCGVGLVQRDDDKEETVRHRLKVYLEKTQPVIDYYSKKGILKRVDGSQGIDNVVAEVLGILGWSDK

SEQ ID NO: 1813 - DNA, 699 bp, synthetic construct
  misc_feature 1..699: note = Variant of adenylate kinase
  source 1..699: mol_type = other DNA
atgcaccatcatcaccatcacgggggctccggcatgatggcatatctggtgttcttaggtccgccgggcgcgggaaaaggtacccaatcgaaacgcattcaggaatacactggcatcccgcatattagcacgggcgatatcttccgtgacatcgtcaagaagcaaaacgatgaactggcctcgaaaattaaagaaatcatggagaaaggtgaactcgttccagatgaactgggtaatgcggtagtaaaacgccgcctgtcggagaaagactgcgaaaaaggctttattttggatggttatccgcgtaccgtggctcaagcggaattcctggatagttttcttgaatcccagaacaaacagttgacagccgccgtggagttcaaagtccccgaagatgaagttgtgcaacgtttaacctctcgcctgatctgtccgaaatgcgggcgtatctacaacatgatttttctgccaccaaaagaagacgagctgtgtgacgattgcaaagtcggcttagtacagcgtgatgatgataaggaagaaacggttcgtcaccgcctgaaagtctacgcagagaagacccagccggtcattgactattatagtaagaaaggtattctcaaacgcgtagatgggtcgcaaggaatcgacaacgttgttgcagaagtcctggggattctgggttggagcgataagtaatga

SEQ ID NO: 1814 - protein, 231 aa, synthetic construct
  REGION 1..231: note = Variant of adenylate kinase
MHHHHHHGGSGMMAYLVFLGPPGAGKGTQSKRIQEYTGIPHISTGDIFRDIVKKQNDELASKIKEIMEKGELVPDELGNAVVKRRLSEKDCEKGFILDGYPRTVAQAEFLDSFLESQNKQLTAAVEFKVPEDEVVQRLTSRLICPKCGRIYNMIFLPPKEDELCDDCKVGLVQRDDDKEETVRHRLKVYAEKTQPVIDYYSKKGILKRVDGSQGIDNVVAEVLGILGWSDK

SEQ ID NO: 1815 - DNA, 699 bp, synthetic construct
  misc_feature 1..699: note = Variant of adenylate kinase
  source 1..699: mol_type = other DNA
atgcaccatcatcaccatcacgggggctccggcatgatggcatatctggtgttcttaggtccgccgggcgcgggaaaaggtacccaatcgaaacgcattcaggaaaagactggcatcccgcatattagcacgggcgatatcttccgtgacatcgtcaagaagcaaaacgatgaactggcctcgaaaattaaagaaatcatggagaaaggtgaactcgttccagatgaactgggtaatgcggtagtaaaacgccgcctgtcggagaaagactgcgaaaaaggctttattttggatggttatccgcgtaccgtggctcaagcggaattcctggatagttttcttgaatcccagaacaaacaattgacagccgccgtggagttcaaagtccccgaagatgaagttgtgcaacgtttaacctctcgcctgatctgtccgaaatgcggccgtatctacaacatgatttttctgccaccaaaagaagacgagctgtgtgacgattgcaaagtcggcttagtacagcgtgatgatgataaggaagaaacggttcgtcaccgcctgaaagtctacctggagaagacccagccggtcattgactattatagtaagaaaggtattctcaaacgcgtagatgggtcgcaaggaatcgacaacgttgttgcagaagtcctggggattctgggttggagcgataagtaatga

SEQ ID NO: 1816 - protein, 231 aa, synthetic construct
  REGION 1..231: note = Variant of adenylate kinase
MHHHHHHGGSGMMAYLVFLGPPGAGKGTQSKRIQEKTGIPHISTGDIFRDIVKKQNDELASKIKEIMEKGELVPDELGNAVVKRRLSEKDCEKGFILDGYPRTVAQAEFLDSFLESQNKQLTAAVEFKVPEDEVVQRLTSRLICPKCGRIYNMIFLPPKEDELCDDCKVGLVQRDDDKEETVRHRLKVYLEKTQPVIDYYSKKGILKRVDGSQGIDNVVAEVLGILGWSDK

SEQ ID NO: 1817 - DNA, 699 bp, synthetic construct
  misc_feature 1..699: note = Variant of adenylate kinase
  source 1..699: mol_type = other DNA
atgcaccatcatcaccatcacgggggctccggcatgatggcatatctggtgttcttaggtccgccgggcgcgggaaaaggtacccaatcgaaacgcattcaggaacaaactggcatgccgcatattagcacgggcgatatcttccgtgacatcgtcaagaagcaaaacgatgaactggcctcgaaaattaaagaaatcatggagaaaggtgaactcgttccagatgaactgggtaatgcggtagtaaaacgccgcctgtcggagaaagactgcgaaaaaggctttattttggatggttatccgcgtaccgtggctcaagcggaattcctggatagttttcttgaatcccagaacaaacaattgacagccgccgtggagttcaaagtccccgaagatgaagttgtgcaacgtttaacctctcgcctgatctgtccgaaatgcgggcgtatctacaacatgatttttctgccaccaaaagaagacgagctgtgtgacgattgcaaagtcggcttagtacagcgtgatgatgataaggaagaaacggttcgtcaccgcctgaaagtctacctggagaagacccagccggtcattgactattatagtaagaaaggtattctcaaacgcgtagatgggtcgcaaggaatcgacaacgttgttgcagaagtcctggggattctgggttggagcgataagtaatga

SEQ ID NO: 1818 - protein, 231 aa, synthetic construct
  REGION 1..231: note = Variant of adenylate kinase
MHHHHHHGGSGMMAYLVFLGPPGAGKGTQSKRIQEQTGMPHISTGDIFRDIVKKQNDELASKIKEIMEKGELVPDELGNAVVKRRLSEKDCEKGFILDGYPRTVAQAEFLDSFLESQNKQLTAAVEFKVPEDEVVQRLTSRLICPKCGRIYNMIFLPPKEDELCDDCKVGLVQRDDDKEETVRHRLKVYLEKTQPVIDYYSKKGILKRVDGSQGIDNVVAEVLGILGWSDK

SEQ ID NO: 1819 - DNA, 699 bp, synthetic construct
  misc_feature 1..699: note = Variant of adenylate kinase
  source 1..699: mol_type = other DNA
atgcaccatcatcaccatcacggcggctccggcatgatggcatatctggtgttcttaggtccgccgggcgcgggaaaaggtacccaatcgaaacgcattcaggaaaagactggcatcccgcatattagcacgggcgatatcttccgtgacatcgtcaagaagcaaaacgatgaactggcctcgaaaattaaagaaatcatggagaaaggtgaactcgttccagatgaactgggtaatgcggtagtaaaacgccgcctgtcggagaaagactgcgaaaaaggctttattttggatggttatccgcgtaccgtggctcaagcggaattcctggatagttttcttgaatcccagaacaaacagttgacagccgccgtggagttcaaagtccccgaagatgaagttgtgcaacgtttaacctctcgcctgatctgtccgaaatgcgggcgtatctacaacatgatttttctgccaccaaaagaagacgagctgtgtgacgattgcaaagtcggcttagtacagcgtgatgatgataaggaagaaacggttcgtcaccgcctgaaagtctacgcagagaagacccagccggtcattgactattatagtaagaaaggtattctcaaacgcgtagatgggtcgcaaggaatcgacaacgttgttgcagaagtcctggggattctgggttggagcgataagtaatga

SEQ ID NO: 1820 - protein, 231 aa, synthetic construct
  REGION 1..231: note = Variant of adenylate kinase
MHHHHHHGGSGMMAYLVFLGPPGAGKGTQSKRIQEKTGIPHISTGDIFRDIVKKQNDELASKIKEIMEKGELVPDELGNAVVKRRLSEKDCEKGFILDGYPRTVAQAEFLDSFLESQNKQLTAAVEFKVPEDEVVQRLTSRLICPKCGRIYNMIFLPPKEDELCDDCKVGLVQRDDDKEETVRHRLKVYAEKTQPVIDYYSKKGILKRVDGSQGIDNVVAEVLGILGWSDK

SEQ ID NO: 1821 - DNA, 699 bp, synthetic construct
  misc_feature 1..699: note = Variant of adenylate kinase
  source 1..699: mol_type = other DNA
atgcaccatcatcaccatcacgggggctccggcatgatggcatatctggtgttcttaggtccgccgggcgcgggaaaaggtacccaatcgaaacgcattcaggaatacactggcatgccgcatattagcacgggcgatatcttccgtgacatcgtcaagaagcaaaacgatgaactggcctcgaaaattaaagaaatcatggagaaaggtgaactcgttccagatgaactgggtaatgcggtagtaaaacgccgcctgtcggagaaagactgcgaaaaaggctttattttggatggttatccgcgtaccgtggctcaagcggaattcctggatagttttcttgaatcccagaacaaacaattgacagccgccgtggagttcaaagtccccgaagatgaagttgtgcaacgtttaacctctcgcctgatctgtccgaaatgcggccgtatctacaacatgatttttctgccaccaaaagaagacgagctgtgtgacgattgcaaagtcggcttagtacaacgtgatgatgataaggaagaaacggttcgtcaccgcctgaaagtctacctggagaagacccagccggtcattgactattatagtaagaaaggtattctcaaacgcgtagatgggtcgcaaggaatcgacaacgttgttgcagaagtcctggggattctgggttggagcgataagtaatga

SEQ ID NO: 1822 - protein, 231 aa, synthetic construct
  REGION 1..231: note = Variant of adenylate kinase
MHHHHHHGGSGMMAYLVFLGPPGAGKGTQSKRIQEYTGMPHISTGDIFRDIVKKQNDELASKIKEIMEKGELVPDELGNAVVKRRLSEKDCEKGFILDGYPRTVAQAEFLDSFLESQNKQLTAAVEFKVPEDEVVQRLTSRLICPKCGRIYNMIFLPPKEDELCDDCKVGLVQRDDDKEETVRHRLKVYLEKTQPVIDYYSKKGILKRVDGSQGIDNVVAEVLGILGWSDK

SEQ ID NO: 1823 - DNA, 699 bp, synthetic construct
  misc_feature 1..699: note = Variant of adenylate kinase
  source 1..699: mol_type = other DNA
atgcaccatcatcaccatcacgggggctccggcatgatggcatatctggtgttcttaggtccgccgggcgcgggaaaaggtacccaatcgaaacgcattcaggaacaaactggcatcccgcatattagcacgggcgatatcttccgtgacatcgtcaagaagcaaaacgatgaactggcctcgaaaattaaagaaatcatggagaaaggtgaactcgttccagatgaactgggtaatgcggtagtaaaacgccgcctgtcggagaaagactgcgaaaaaggctttattttggatggttatccgcgtaccgtggctcaagcggaattcctggatagttttcttgaatcccagaacaaacagttgacagccgccgtggagttcaaagtccccgaagatgaagttgtgcaacgtttaacctctcgcctgatctgtccgaaatgcgggcgtatctacaacatgatttttctgccaccaaaagaagacgagctgtgtgacgattgcaaagtcggcttagtacaacgtgatgatgataaggaagaaacggttcgtcaccgcctgaaagtctaccttgagaagacccagccggtcattgactattatagtaagaaaggtattctcaaacgcgtagatgggtcgcaaggaatcgacaacgttgttgcagaagtcctggggattctgggttggagcgataagtaatga

SEQ ID NO: 1824 - protein, 231 aa, synthetic construct
  REGION 1..231: note = Variant of adenylate kinase
MHHHHHHGGSGMMAYLVFLGPPGAGKGTQSKRIQEQTGIPHISTGDIFRDIVKKQNDELASKIKEIMEKGELVPDELGNAVVKRRLSEKDCEKGFILDGYPRTVAQAEFLDSFLESQNKQLTAAVEFKVPEDEVVQRLTSRLICPKCGRIYNMIFLPPKEDELCDDCKVGLVQRDDDKEETVRHRLKVYLEKTQPVIDYYSKKGILKRVDGSQGIDNVVAEVLGILGWSDK

SEQ ID NO: 1825 - DNA, 699 bp, synthetic construct
  misc_feature 1..699: note = Variant of adenylate kinase
  source 1..699: mol_type = other DNA
atgcaccatcatcaccatcacgggggctccggcatgatggcatatctggtgttcttaggtccgccgggcgcgggaaaaggtacccaatcgaaacgcattcaggaatacactggcatcccgcatattagcacgggcgatatcttccgtgacatcgtcaagaagcaaaacgatgaactggcctcgaaaattaaagaaatcatggagaaaggtgaactcgttccagatgaactgggtaatgcggtagtaaaacgccgcctgtcggagaaagactgcgaaaaaggctttattttggatggttatccgcgtaccgtggctcaagcggaattcctggatagttttcttgaatcccagaacaaacaattgacagccgccgtgctgttcaaagtccccgaagatgaagttgtgcaacgtttaacctctcgcctgatctgtccgaaatgcggccgtatctacaacatgatttttctgccaccaaaagaagacgagctgtgtgacgattgcaaagtcggcttagtacagcgtgatgatgataaggaagaaacggttcgtcaccgcctgaaagtctacgcagagaagacccagccggtcattgactattatagtaagaaaggtattctcaaacgcgtagatgggtcgcaaggaatcgacaacgttgttgcagaagtcctggggattctgggttggagcgataagtaatga

SEQ ID NO: 1826 - protein, 231 aa, synthetic construct
  REGION 1..231: note = Variant of adenylate kinase
MHHHHHHGGSGMMAYLVFLGPPGAGKGTQSKRIQEYTGIPHISTGDIFRDIVKKQNDELASKIKEIMEKGELVPDELGNAVVKRRLSEKDCEKGFILDGYPRTVAQAEFLDSFLESQNKQLTAAVLFKVPEDEVVQRLTSRLICPKCGRIYNMIFLPPKEDELCDDCKVGLVQRDDDKEETVRHRLKVYAEKTQPVIDYYSKKGILKRVDGSQGIDNVVAEVLGILGWSDK

SEQ ID NO: 1827 - DNA, 699 bp, synthetic construct
  misc_feature 1..699: note = Variant of adenylate kinase
  source 1..699: mol_type = other DNA
atgcaccatcatcaccatcacgggggctccggcatgatggcatatctggtgttcttaggtccgccgggcgcgggaaaaggtacccaatcgaaacgcattcaggaaaagactggcatgccgcatattagcacgggcgatatcttccgtgacatcgtcaagaagcaaaacgatgaactggcctcgaaaattaaagaaatcatggagaaaggtgaactcgttccagatgaactgggtaatgcggtagtaaaacgccgcctgtcggagaaagactgcgaaaaaggctttattttggatggttatccgcgtaccgtggctcaagcggaattcctggatagttttcttgaatcccagaacaaacagttgacagccgccgtggagttcaaagtccccgaagatgaagttgtgcaacgtttaacctctcgcctgatctgtccgaaatgcgggcgtatctacaacatgatttttctgccaccaaaagaagacgagctgtgtgacgattgcaaagtcggcttagtacagcgtgatgatgataaggaagaaacggttcgtcaccgcctgaaagtctaccttgagaagacccagccggtcattgactattatagtaagaaaggtattctcaaacgcgtagatgggtcgcaaggaatcgacaacgttgttgcagaagtcctggggattctgggttggagcgataagtaatga

SEQ ID NO: 1828 - protein, 231 aa, synthetic construct
  REGION 1..231: note = Variant of adenylate kinase
MHHHHHHGGSGMMAYLVFLGPPGAGKGTQSKRIQEKTGMPHISTGDIFRDIVKKQNDELASKIKEIMEKGELVPDELGNAVVKRRLSEKDCEKGFILDGYPRTVAQAEFLDSFLESQNKQLTAAVEFKVPEDEVVQRLTSRLICPKCGRIYNMIFLPPKEDELCDDCKVGLVQRDDDKEETVRHRLKVYLEKTQPVIDYYSKKGILKRVDGSQGIDNVVAEVLGILGWSDK

SEQ ID NO: 1829 - DNA, 699 bp, synthetic construct
  misc_feature 1..699: note = Variant of adenylate kinase
  source 1..699: mol_type = other DNA
atgcaccatcatcaccatcacgggggctccggcatgggggcatatctggtgttcttaggtccgccgggcgcgggaaaaggtacccaaagcaagcgcattcaggaaaagactggcatcccgcatattagcacgggcgatatcttccgtgacatcgtcaagaagcaaaacgatgaactggcctcgaaaattaaagaaatcatggagaaaggtgaactcgttccagatgaactgggtaatgcggtagtaaaacgccgcctgtcggagaaagactgcgaaaaaggctttattttggatggttatccgcgtaccgtggctcaagcggaatatctggatagttttcttgaatcccagaatcgccagttgacagccgccgtgctgttcaaagtccccgaagatgaagttgtgcaacgtttaacctctcgcctgatctgtccgaaatgcgggcgtatctacaacatgatttttctgccaccaaaagaagacgagctgtgtgacgattgcaaggtcggcttagtacagcgtgatgatgataaggaagaaacggtccgtcaccgcctgaaagtctaccttgagaagacccagccggtcattgactattatagtaagaaaggtattctcaaacgcgtagatgggtcgcaaggaatcgacaacgttgttgcagaagtcctggggattctgggttggagcgataagtaatga

SEQ ID NO: 1830 - protein, 231 aa, synthetic construct
  REGION 1..231: note = Variant of adenylate kinase
MHHHHHHGGSGMGAYLVFLGPPGAGKGTQSKRIQEKTGIPHISTGDIFRDIVKKQNDELASKIKEIMEKGELVPDELGNAVVKRRLSEKDCEKGFILDGYPRTVAQAEYLDSFLESQNRQLTAAVLFKVPEDEVVQRLTSRLICPKCGRIYNMIFLPPKEDELCDDCKVGLVQRDDDKEETVRHRLKVYLEKTQPVIDYYSKKGILKRVDGSQGIDNVVAEVLGILGWSDK

SEQ ID NO: 1831 - DNA, 699 bp, synthetic construct
  misc_feature 1..699: note = Variant of adenylate kinase
  source 1..699: mol_type = other DNA
atgcaccatcatcaccatcacgggggctccggcatgatggcatatctggtgttcttaggtccgccgggcgcgggaaaaggtacccaatcgaaacgcattcaggaaaagactggcatcccgcatattagcacgggcgatatcttccgtgacatcgtcaaaaagcaaaacgatgaactggcctcgaaaattaaagaaatcatggagaaaggtgaactcgttccagatgaactgggtaatgcggtagtaaaacgccgcctgtcggagaaagactgcgaaaaaggctttattttggatggttatccgcgtaccgtggctcaagcggaatatctggatagttttcttgaatcccagaacaaacagttgacagccgccgtgctgttcaaagtccccgaagatgaagttgtgcaacgtttaacctctcgcctgatctgtccgaaatgcgggcgtatctacaacatgatttttctgccaccaaaagaagacgagctgtgtgacgattgcaaggtcggcttagtacagcgtgatgatgataaggaagaaacggttcgtcaccgcctgaaagtctaccttgagaagacccagccggtcattgactattatagtaagaaaggtattctcaaacgcgtagatgggtcgcaaggaatcgacaacgttgttgcagaagtcctggggattctgggttggagcgataagtaatga

SEQ ID NO: 1832 - protein, 231 aa, synthetic construct
  REGION 1..231: note = Variant of adenylate kinase
MHHHHHHGGSGMMAYLVFLGPPGAGKGTQSKRIQEKTGIPHISTGDIFRDIVKKQNDELASKIKEIMEKGELVPDELGNAVVKRRLSEKDCEKGFILDGYPRTVAQAEYLDSFLESQNKQLTAAVLFKVPEDEVVQRLTSRLICPKCGRIYNMIFLPPKEDELCDDCKVGLVQRDDDKEETVRHRLKVYLEKTQPVIDYYSKKGILKRVDGSQGIDNVVAEVLGILGWSDK

SEQ ID NO: 1833 - DNA, 699 bp, synthetic construct
  misc_feature 1..699: note = Variant of adenylate kinase
  source 1..699: mol_type = other DNA
atgcaccatcatcaccatcacgggggctccggcatgatggcatatctggtgttcttaggtccgccgggcgcgggaaaaggtacccaatcgaaacgcattcaggaatacactggcatcccgcatattagcacgggcgatatcttccgtgacatcgtcaagaagcaaaacgatgaactggcctcgaaaattaaagaaatcatggagaaaggtgaactcgttccagatgaactgggtaatgcggtagtaaaacgccgcctgtcggagaaagactgcgaaaaaggctttattttggatggttatccgcgtaccgtggctcaagcggaattcctggatagttttcttgaatcccagaacaaaggtttgacagccgccgtgctgttcaaagtccccgaagatgaagttgtgcaacgtttaacctctcgcctgatctgtccgaaatgcgggcgtatctacaacatgatttttctgccaccaaaagaagacgagctgtgtgacgattgcaaagtcggcttagtacagcgtgatgatgataaggaagaaacggttcgtcaccgcctgaaagtctacgcagagaagacccagccggtcattgactattatagtaagaaaggtattctcaaacgcgtagatgggtcgcaaggaatcgacaacgttgttgcagaagtcctggggattctgggttggagcgataagtaatga

SEQ ID NO: 1834 - protein, 231 aa, synthetic construct
  REGION 1..231: note = Variant of adenylate kinase
MHHHHHHGGSGMMAYLVFLGPPGAGKGTQSKRIQEYTGIPHISTGDIFRDIVKKQNDELASKIKEIMEKGELVPDELGNAVVKRRLSEKDCEKGFILDGYPRTVAQAEFLDSFLESQNKGLTAAVLFKVPEDEVVQRLTSRLICPKCGRIYNMIFLPPKEDELCDDCKVGLVQRDDDKEETVRHRLKVYAEKTQPVIDYYSKKGILKRVDGSQGIDNVVAEVLGILGWSDK

SEQ ID NO: 1835 - DNA, 699 bp, synthetic construct
  misc_feature 1..699: note = Variant of adenylate kinase
  source 1..699: mol_type = other DNA
atgcaccatcatcaccatcacggcggctccggcatgatggcatatctggtgttcttaggtccgccgggcgcgggaaaaggtacccaatcgaaacgcattcaggaaaagactggcatcccgcatattagcacgggcgatatcttccgtgacatcgtcaagaagcaaaacgatgaactggcctcgaaaattaaagaaatcatggagaaaggtgaactcgttccagatgaactgggtaatgcggtagtaaaacgccgcctgtcggagaaagactgcgaaaaaggctttattttggatggttatccgcgtaccgtggctcaagcggaattcctggatagttttcttgaatcccagaacaaacagttgacagccgccgtggagttcaaagtccccgaagatgaagttgtgcaacgtttaacctctcgcctgatctgtccgaaatgcacgcgtatctacaacatgatttttctgccaccaaaagaagacgagctgtgtgacgattgcaaagtcggcttagtacagcgtgatgatgataaggaagaaacggttcgtcaccgcctgaaagtctaccttgagaagacccagccggtcattgactattatagtaagaaaggtattctcaaacgcgtagatgggtcgcaaggaatcgacaacgttgttgcagaagtcctggggattctgggttggagcgataagtaatga

SEQ ID NO: 1836 - protein, 231 aa, synthetic construct
  REGION 1..231: note = Variant of adenylate kinase
MHHHHHHGGSGMMAYLVFLGPPGAGKGTQSKRIQEKTGIPHISTGDIFRDIVKKQNDELASKIKEIMEKGELVPDELGNAVVKRRLSEKDCEKGFILDGYPRTVAQAEFLDSFLESQNKQLTAAVEFKVPEDEVVQRLTSRLICPKCTRIYNMIFLPPKEDELCDDCKVGLVQRDDDKEETVRHRLKVYLEKTQPVIDYYSKKGILKRVDGSQGIDNVVAEVLGILGWSDK

SEQ ID NO: 1837 - DNA, 699 bp, synthetic construct
  misc_feature 1..699: note = Variant of adenylate kinase
  source 1..699: mol_type = other DNA
atgcaccatcatcaccatcacgggggctccggcatgatggcatatctggtgttcttaggtccgccgggcgcgggaaaaggtacccaatcgaaacgcattcaggaaaagactggcatcccgcatattagcacgggcgatatcttccgtgacatcgtcaagaagcaaaacgatgaactggcctcgaaaattaaagaaatcatggagaaaggtgaactcgttccagatgaactgggtaatgcggtagtaaaacgccgcctgtcggagaaagactgcgaaaaaggctttattttggatggttatccgcgtaccgtggctcaagcggaattcctggatagttttcttgaatcccagaacaaacaattgacagccgccgtgctgttcaaagtccccgaagatgaagttgtgcaacgtttaacctctcgcctgatctgtccgaaatgcgggcgtatctacaacatgatttttctgccaccaaaagaagacgagctgtgtgacgattgcaaagtcggcttagtacagcgtgatgatgataaggaagaaacggttcgtcaccgcctgaaagtctacgcagagaagacccagccggtcattgactattatagtaagaaaggtattctcaaacgcgtagatgggtcgcaaggaatcgacaacgttgttgcagaagtcctggggattctgggttggagcgataagtaatga

SEQ ID NO: 1838 - protein, 231 aa, synthetic construct
  REGION 1..231: note = Variant of adenylate kinase
MHHHHHHGGSGMMAYLVFLGPPGAGKGTQSKRIQEKTGIPHISTGDIFRDIVKKQNDELASKIKEIMEKGELVPDELGNAVVKRRLSEKDCEKGFILDGYPRTVAQAEFLDSFLESQNKQLTAAVLFKVPEDEVVQRLTSRLICPKCGRIYNMIFLPPKEDELCDDCKVGLVQRDDDKEETVRHRLKVYAEKTQPVIDYYSKKGILKRVDGSQGIDNVVAEVLGILGWSDK

SEQ ID NO: 1839 - DNA, 699 bp, synthetic construct
  misc_feature 1..699: note = Variant of adenylate kinase
  source 1..699: mol_type = other DNA
atgcaccatcatcaccatcacgggggctccggcatgatggcatatctggtgttcttaggtccgccgggcgcgggaaaaggtacccaatcgaaacgcattcaggaaaagactggcatcccgcatattagcacgggcgatatcttccgtgacatcgtcaagaagcaaaacgatgaactggcctcgaaaattaaagaaatcatggagaaaggtgaactcgttccagatgaactgggtaatgcggtagtaaaacgccgcctgtcggagaaagactgcgaaaaaggctttattttggatggttatccgcgtaccgtggctcaagcgcgtttcctggatagttttcttgaatcccagaacaaacagttgacagccgccgtggagttcaaagtccccgaagatgaagttgtgcaacgtttaacctctcgcctgatctgtccgaaatgcgggcgtatctacaacatgatttttctgccaccaaaagaagacgagctgtgtgacgattgcaaagtcggcttagtacaacgtgatgatgataaggaagaaacggttcgtcaccgcctgaaagtctacctggagaagacccagccggtcattgactattatagtaagaaaggtattctcaaacgcgtagatgggtcgcaaggaatcgacaacgttgttgcagaagtcctggggattctgggttggagcgataagtaatga

SEQ ID NO: 1840 - protein, 231 aa, synthetic construct
  REGION 1..231: note = Variant of adenylate kinase
MHHHHHHGGSGMMAYLVFLGPPGAGKGTQSKRIQEKTGIPHISTGDIFRDIVKKQNDELASKIKEIMEKGELVPDELGNAVVKRRLSEKDCEKGFILDGYPRTVAQARFLDSFLESQNKQLTAAVEFKVPEDEVVQRLTSRLICPKCGRIYNMIFLPPKEDELCDDCKVGLVQRDDDKEETVRHRLKVYLEKTQPVIDYYSKKGILKRVDGSQGIDNVVAEVLGILGWSDK

SEQ ID NO: 1841 - DNA, 699 bp, synthetic construct
  misc_feature 1..699: note = Variant of adenylate kinase
  source 1..699: mol_type = other DNA
atgcaccatcatcaccatcacgggggctccggcatgatggcatatctggtgttcttaggtccgccgggcgcgggaaaaggtacccaaggccgtcgcattcaggaaaagactggcatcccgcatattagcacgggcgatatcttccgtgacatcgtcaagaagcaaaacgatgaactggcctcgaaaattaaagaaatcatggagaaaggtgaactcgttccagatgaactgggtaatgcggtagtaaaacgccgcctgtcggagaaagactgcgaaaaaggctttattttggatggttatccgcgtaccgtggctcaagcggaatttctggatagttttcttgaatcccagaacaagcagttgacagccgccgtgctgttcaaagtccccgaagatgaagttgtgcaacgtttaacctctcgcctgatctgtccgaaatgcgggcgtatctacaacatgatttttctgccaccaaaagaagacgagctgtgtgacgattgcaaggtcggcttagtacagcgtgatgatgataaggaagaaacggttcgtcaccgcctgaaagtctaccttgagaagacccagccggtcattgactattatagtaagaaaggtattctcaaacgcgtagatgggtcgcaaggaatcgacaacgttgttgcagaagtcctggggattctgggttggagcgataagtaatga

SEQ ID NO: 1842 - protein, 231 aa, synthetic construct
  REGION 1..231: note = Variant of adenylate kinase
MHHHHHHGGSGMMAYLVFLGPPGAGKGTQGRRIQEKTGIPHISTGDIFRDIVKKQNDELASKIKEIMEKGELVPDELGNAVVKRRLSEKDCEKGFILDGYPRTVAQAEFLDSFLESQNKQLTAAVLFKVPEDEVVQRLTSRLICPKCGRIYNMIFLPPKEDELCDDCKVGLVQRDDDKEETVRHRLKVYLEKTQPVIDYYSKKGILKRVDGSQGIDNVVAEVLGILGWSDK

SEQ ID NO: 1843 - DNA, 699 bp, synthetic construct
  misc_feature 1..699: note = Variant of adenylate kinase
  source 1..699: mol_type = other DNA
atgcaccatcatcaccatcacgggggctccggcatgggggcatatctggtgttcttaggtccgccgggcgcgggaaaaggtacccaatcgaaacgcattcaggaaaagactggcatcccgcatattagcacgggcgatatcttccgtgacatcgtcaagaagcaaaacgatgaactggcctcgaaaattaaagaaatcatggagaaaggtgaactcgttccagatgaactgggtaatgcggtagtaaaacgccgcctgtcggagaaagactgcgaaaaaggctttattttggatggttatccgcgtaccgtggctcaagcggaattcctggatagttttcttgaatcccaggcaaagcagttgacagccgccgtgctgttcaaagtccccgaagatgaagttgtgcaacgtttaacctctcgcctgatctgtccgaaatgcgggcgtatctacaacatgatttttctgccaccaaaagaagacgagctgtgtgacgattgcaaagtcggcttagtacagcgtgatgatgataaggaagaaacgatccgtcaccgcctgaaagtctaccttgagaagacccagccggtcattgactattatagtaagaaaggtattctcaaacgcgtagatgggtcgcaaggaatcgacaacgttgttgcagaagtcctggggattctgggttggagcgataagtaatga

SEQ ID NO: 1844 - protein, 231 aa, synthetic construct
  REGION 1..231: note = Variant of adenylate kinase
MHHHHHHGGSGMGAYLVFLGPPGAGKGTQSKRIQEKTGIPHISTGDIFRDIVKKQNDELASKIKEIMEKGELVPDELGNAVVKRRLSEKDCEKGFILDGYPRTVAQAEFLDSFLESQAKQLTAAVLFKVPEDEVVQRLTSRLICPKCGRIYNMIFLPPKEDELCDDCKVGLVQRDDDKEETIRHRLKVYLEKTQPVIDYYSKKGILKRVDGSQGIDNVVAEVLGILGWSDK

SEQ ID NO: 1845 - DNA, 699 bp, synthetic construct
  misc_feature 1..699: note = Variant of adenylate kinase
  source 1..699: mol_type = other DNA
atgcaccatcatcaccatcacgggggctccggcatgatggcatatctggtgttcttaggtccgccgggcgcgggaaaaggtacccaaagccgtcgcattcaggaaaagactggcatcccgcatattagcacgggcgatatcttccgtgacatcgtcgctaagcaaaacgatgaactggcctcgaaaattaaagaaatcatggagaaaggtgaactcgttccagatgaactgggtaatgcggtagtaaaacgccgcctgtcggagaaagactgcgaaaaaggctttattttggatggttatccgcgtaccgtggctcaagcggaattcctggatagttttcttgaatcccagaataagcagttgacagccgccgtgctgttcaaagtccccgaagatgaagttgtgcaacgtttaacctctcgcctgatctgtccgaaatgcgggcgtatctacaacatgatttttctgccaccaaaagaagacgagctgtgtgacgattgcaaagtcggcttagtacagcgtgatgatgataaggaagaaacggttcgtcaccgcctgaaagtctaccttgagaagacccagccggtcattgactattatagtaagaaaggtattctcaaacgcgtagatgggtcgcaaggaatcgacaacgttgttgcagaagtcctggggattctgggttggagcgataagtaatga

SEQ ID NO: 1846 - protein, 231 aa, synthetic construct
  REGION 1..231: note = Variant of adenylate kinase
MHHHHHHGGSGMMAYLVFLGPPGAGKGTQSRRIQEKTGIPHISTGDIFRDIVAKQNDELASKIKEIMEKGELVPDELGNAVVKRRLSEKDCEKGFILDGYPRTVAQAEFLDSFLESQNKQLTAAVLFKVPEDEVVQRLTSRLICPKCGRIYNMIFLPPKEDELCDDCKVGLVQRDDDKEETVRHRLKVYLEKTQPVIDYYSKKGILKRVDGSQGIDNVVAEVLGILGWSDK

SEQ ID NO: 1847 - DNA, 699 bp, synthetic construct
  misc_feature 1..699: note = Variant of adenylate kinase
  source 1..699: mol_type = other DNA
atgcaccatcatcaccatcacgggggctccggcatgatggcatatctggtgttcttaggtccgccgggcgcgggaaaaggtacccaatcgaaacgcattcaggaaaaaactggcatgccgcatattagcacgggcgatatcttccgtgacatcgtcaagaagcaaaacgatgaactggcctcgaaaattaaagaaatcatggagaaaggtgaactcgttccagatgaactgggtaatgcggtagtaaaacgccgcctgtcggagaaagactgcgaaaaaggctttattttggatggttatccgcgtaccgtggctcaagcggaattcctggatagttttcttgaatcccagaacaaacaattgacagccgccgtgctgttcaaagtccccgaagatgaagttgtgcaacgtttaacctctcgcctgatctgtccgaaatgcgggcgtatctacaacatgatttttctgccaccaaaagaagacgagctgtgtgacgattgcaaagtcggcttagtacagcgtgatgatgataaggaagaaacggttcgtcaccgcctgaaagtctaccttgagaagacccagccggtcattgactattatagtaagaaaggtattctcaaacgcgtagatgggtcgcaaggaatcgacaacgttgttgcagaagtcctggggattctgggttggagcgataagtaatga

SEQ ID NO: 1848 - protein, 231 aa, synthetic construct
  REGION 1..231: note = Variant of adenylate kinase
MHHHHHHGGSGMMAYLVFLGPPGAGKGTQSKRIQEKTGMPHISTGDIFRDIVKKQNDELASKIKEIMEKGELVPDELGNAVVKRRLSEKDCEKGFILDGYPRTVAQAEFLDSFLESQNKQLTAAVLFKVPEDEVVQRLTSRLICPKCGRIYNMIFLPPKEDELCDDCKVGLVQRDDDKEETVRHRLKVYLEKTQPVIDYYSKKGILKRVDGSQGIDNVVAEVLGILGWSDK

SEQ ID NO: 1849 - DNA, 699 bp, synthetic construct
  misc_feature 1..699: note = Variant of adenylate kinase
  source 1..699: mol_type = other DNA
atgcaccatcatcaccatcacgggggctccggcatgatggcatatctggtgttcttaggtccgccgggcgcgggaaaaggtacccaatcgaaacgcattcaggaaaagactggcatcccgcatattagcacgggcgatatcttccgtgacatcgtcaagaagcaaaacgatgaactggcctcgaaaattaaagaaatcatggagaaaggtgaactcgttccagatgaactgggtaatgcggtagtaaaacgccgcctgtcggagaaagactgcgaaaaaggctttattttggatggttatccgcgtaccgtggctcaagcggaattcctggatagttttcttgaatcccagaatcgccagttgacagccgccgtgctgttcaaagtccccgaagatgaagttgtgcaacgtttaacctctcgcctgatctgtccgaaatgcgggcgtatctacaacatgatttttctgccaccaaaagaagacgagctgtgtgacgattgcaaggtcggcttagtacagcgtgatgatgataaggaagaaacggttcgtcaccgcctgaaagtctaccttgagaagacccagccggtcattgactattatagtaagaaaggtattctcaaacgcgtagatgggtcgcaaggaatcgacaacgttgttgcagaagtcctggggattctgggttggagcgataagtaatga

SEQ ID NO: 1850 - protein, 231 aa, synthetic construct
  REGION 1..231: note = Variant of adenylate kinase
MHHHHHHGGSGMMAYLVFLGPPGAGKGTQSKRIQEKTGIPHISTGDIFRDIVKKQNDELASKIKEIMEKGELVPDELGNAVVKRRLSEKDCEKGFILDGYPRTVAQAEFLDSFLESQNRQLTAAVLFKVPEDEVVQRLTSRLICPKCGRIYNMIFLPPKEDELCDDCKVGLVQRDDDKEETVRHRLKVYLEKTQPVIDYYSKKGILKRVDGSQGIDNVVAEVLGILGWSDK

SEQ ID NO: 1851 - DNA, 699 bp, synthetic construct
  misc_feature 1..699: note = Variant of adenylate kinase
  source 1..699: mol_type = other DNA
atgcaccatcatcaccatcacgggggctccggcatgggggcatatctggtgttcttaggtccgccgggcgcgggaaaaggtacccaatcgaaacgcattcaggaaaagactggcatcccgcatattagcacgggcgatatcttccgtgacatcgtcaaaaagcaaaacgatgaactggcctcgaaaattaaagaaatcatggagaaaggtgaactcgttccagatgaactgggtaatgcggtagtaaaacgccgcctgtcggagaaagactgcgaaaaaggctttattttggatggttatccgcgtaccgtggctcaagcggaattcctggatagttttcttgaatcccagaatcgccagttgacagccgccgtgctgttcaaagtccccgaagatgaagttgtgcaacgtttaacctctcgcctgatctgtccgaaatgcgggcgtatctacaacatgatttttctgccaccaaaagaagacgagctgtgtgacgattgcggtgtcggcttagtacagcgtgatgatgataaggaagaaacggttcgtcaccgcctgaaagtctaccttgagaagacccagccggtcattgactattatagtaagaaaggtattctcaaacgcgtagatgggtcgcaaggaatcgacaacgttgttgcagaagtcctggggattctgggttggagcgataagtaatga

SEQ ID NO: 1852 - protein, 231 aa, synthetic construct
  REGION 1..231: note = Variant of adenylate kinase
MHHHHHHGGSGMGAYLVFLGPPGAGKGTQSKRIQEKTGIPHISTGDIFRDIVKKQNDELASKIKEIMEKGELVPDELGNAVVKRRLSEKDCEKGFILDGYPRTVAQAEFLDSFLESQNRQLTAAVLFKVPEDEVVQRLTSRLICPKCGRIYNMIFLPPKEDELCDDCGVGLVQRDDDKEETVRHRLKVYLEKTQPVIDYYSKKGILKRVDGSQGIDNVVAEVLGILGWSDK

SEQ ID NO: 1853 - DNA, 699 bp, synthetic construct
  misc_feature 1..699: note = Variant of adenylate kinase
  source 1..699: mol_type = other DNA
atgcaccatcatcaccatcacgggggctccggcatgatggcatatctggtgttcttaggtccgccgggcgcgggaaaaggtacccaaagcaagcgcattcaggaaaagactggcatcccgcatattagcacgggcgatatcttccgtgacatcgtcgctaagcaaaacgatgaactggcctcgaaaattaaagaaatcatggagaaaggtgaactcgttccagatgaactgggtaatgcggtagtaaaacgccgcctgtcggagaaagactgcgaaaaaggctttattttggatggttatccgcgtaccgtggctcaagcggaattcctggatagttttcttgaatcccagaacaaacagttgacagccgccgtgctgttcaaagtccccgaagatgaagttgtgcaacgtttaacctctcgcctgatctgtccgaaatgcgggcgtatctacaacatgatttttctgccaccaaaagaagacgagctgtgtgacgattgcggtgtcggcttagtacagcgtgatgatgataaggaagaaacggttcgtcaccgcctgaaagtctaccttgagaagacccagccggtcattgactattatagtaagaaaggtattctcaaacgcgtagatgggtcgcaaggaatcgacaacgttgttgcagaagtcctggggattctgggttggagcgataagtaatga

SEQ ID NO: 1854 - protein, 231 aa, synthetic construct
  REGION 1..231: note = Variant of adenylate kinase
MHHHHHHGGSGMMAYLVFLGPPGAGKGTQSKRIQEKTGIPHISTGDIFRDIVAKQNDELASKIKEIMEKGELVPDELGNAVVKRRLSEKDCEKGFILDGYPRTVAQAEFLDSFLESQNKQLTAAVLFKVPEDEVVQRLTSRLICPKCGRIYNMIFLPPKEDELCDDCGVGLVQRDDDKEETVRHRLKVYLEKTQPVIDYYSKKGILKRVDGSQGIDNVVAEVLGILGWSDK

SEQ ID NO: 1855 - DNA, 699 bp, synthetic construct
  misc_feature 1..699: note = Variant of adenylate kinase
  source 1..699: mol_type = other DNA
atgcaccatcatcaccatcacgggggctccggcatgatggcatatctggtgttcttaggtcctccgggcgcgggaaaaggtacccaatcgaaacgcatttcggaaaagactggcatcccgcatattagcacgggcgatatcttccgtgacatcgtcaagaagcaaaacgatgaactggcctcgaaaattaaagaaatcatggagaaaggtgaactcgttccagatgaactgggtaatgcggtagtaaaacgccgcctgtcggagaaagactgcgaaaaaggctttattttggatggttatccgcgtaccgtggctcaagcggaattcctggatagctttcttgaatcccagaacaaacagttgacagccgccgtgctgttcaaagtccccgaagatgaagttgtgcaacgtttaacctctcgcctgatctgtccgaaatgcgggcgtatctacaacatgatttttctgccaccaaaagaagacgagctgtgtgacgattgcaaagtcggcttagtacagcgtgatgatgataaggaagaaacggttcgtcaccgcctgaaagtctaccttgagaagacccagccggtcattgactattatagtaagaaaggtattctcaaacgcgtagatgggtcgcaaggaatcgacaacgttgttgcagaagtcctggggattctgggttggagcgataagtaatga

SEQ ID NO: 1856 - protein, 231 aa, synthetic construct
  REGION 1..231: note = Variant of adenylate kinase
MHHHHHHGGSGMMAYLVFLGPPGAGKGTQSKRISEKTGIPHISTGDIFRDIVKKQNDELASKIKEIMEKGELVPDELGNAVVKRRLSEKDCEKGFILDGYPRTVAQAEFLDSFLESQNKQLTAAVLFKVPEDEVVQRLTSRLICPKCGRIYNMIFLPPKEDELCDDCKVGLVQRDDDKEETVRHRLKVYLEKTQPVIDYYSKKGILKRVDGSQGIDNVVAEVLGILGWSDK

SEQ ID NO: 1857 - DNA, 699 bp, synthetic construct
  misc_feature 1..699: note = Variant of adenylate kinase
  source 1..699: mol_type = other DNA
atgcaccatcatcaccatcacgggggctccggcatgatggcatatctggtgttcttaggtcctccgggcgcgggaaaaggtacccaatcgaaacgcatttcggaaaagactggcatcccgcatattagcacgggcgatatcttccgtgacatcgtcaagaagcaaaacgatgaactggcctcgaaaattaaagcaatcatggagaaaggtgaactcgttccagatgaactgggtaatgcggtagtaaaacgccgcctgtcggagaaagactgcgaaaaaggctttattttggatggttatccgcgtaccgtagctcaagcggaattcctggatagttttcttgaatcccagaacaaacagctgactgccgccgtgctgttcaaagtccccgaagatgaagttgtgcaacgtttaacctctcgcctgatctgtccggactgcgggcgtatctacaacatgatttttctgccaccaaaagaagacgagctgtgtgacgattgcaaagtcggcttagtacagcgtgatgatgataaggaagaaacggttcgtcaccgcctgaaagtctaccttgagaagacccagccggtcattgactattatagtaagaaaggtattctcaaacgcgtagatgggtcgcaaggaatcgacaacgttgttgcagaagtcctggggattctgggttggagcgataagtaatga

SEQ ID NO: 1858 - protein, 231 aa, synthetic construct
  REGION 1..231: note = Variant of adenylate kinase
MHHHHHHGGSGMMAYLVFLGPPGAGKGTQSKRISEKTGIPHISTGDIFRDIVKKQNDELASKIKAIMEKGELVPDELGNAVVKRRLSEKDCEKGFILDGYPRTVAQAEFLDSFLESQNKQLTAAVLFKVPEDEVVQRLTSRLICPDCGRIYNMIFLPPKEDELCDDCKVGLVQRDDDKEETVRHRLKVYLEKTQPVIDYYSKKGILKRVDGSQGIDNVVAEVLGILGWSDK

SEQ ID NO: 1859 - DNA, 699 bp, synthetic construct
  misc_feature 1..699: note = Variant of adenylate kinase
  source 1..699: mol_type = other DNA
atgcaccatcatcaccatcacgggggctccggcatgatggcatatctggtgttcttaggtccgccgggcgcgggaaaaggtacccaatcgaaacgcattcaggaacaaactggcatgccgcatattagcacgggcgatatcttccgtgacatcgtcaagaagcaaaacgatgaactggcctcgaaaattaaagaaatcatggagaaaggtgaactcgttccagatgaactgggtaatgcggtagtaaaacgccgcctgtcggagaaagactgcgaaaaaggctttattttggatggttatccgcgtaccgtggctcaagcggaattcctggatagttttcttgaatcccagaacaaacagttgacagccgccgtgctgttcaaagtccccgaagatgaagttgtgcaacgtttaacctctcgcctgatctgtccgaaatgcgggcgtatctacaacatgatttttctgccaccaaaagaagacgagctgtgtgacgattgcaaagtcggcttagtacagcgtgatgatgataaggaagaaacggttcgtcaccgcctgaaagtctaccttgagaagacccagccggtcattgactattatagtaagaaaggtattctcaaacgcgtagatgggtcgcaaggaatcgacaacgttgttgcagaagtcctggggattctgggttggagcgataagtaatga

SEQ ID NO: 1860 - protein, 231 aa, synthetic construct
  REGION 1..231: note = Variant of adenylate kinase
MHHHHHHGGSGMMAYLVFLGPPGAGKGTQSKRIQEQTGMPHISTGDIFRDIVKKQNDELASKIKEIMEKGELVPDELGNAVVKRRLSEKDCEKGFILDGYPRTVAQAEFLDSFLESQNKQLTAAVLFKVPEDEVVQRLTSRLICPKCGRIYNMIFLPPKEDELCDDCKVGLVQRDDDKEETVRHRLKVYLEKTQPVIDYYSKKGILKRVDGSQGIDNVVAEVLGILGWSDK

SEQ ID NO: 1861 - DNA, 699 bp, synthetic construct
  misc_feature 1..699: note = Variant of adenylate kinase
  source 1..699: mol_type = other DNA
atgcaccatcatcaccatcacgggggctccggcatgatggcatatctggtgttcttaggtccgccgggcgcgggaaaaggtacccaatcgaaacgcattcaggaaaagactggcatcccgcatattagcacgggcgatatcttccgtgacatcgtcaaaaagcaaaacgatgaactggcctcgaaaattaaagaaatcatggagaaaggtgaactcgttccagatgaactgggtaatgcggtagtaaaacgccgcctgtcggagaaagactgcgaaaaaggctttattttggatggttatccgcgtaccgtggctcaagcggaattcctggatagttttcttgaatcccagaatcgccagttgacagccgccgtgctgttcaaagtccccgaagatgaagttgtgcaacgtttaacctctcgcctgatctgtccgaaatgcgggcgtatctacaacatgatttttctgccaccaaaagaagacgagctgtgtgacgattgcggtgtcggcttagtacagcgtgatgatgataaggaagaaacggttcgtcaccgcctgaaagtctaccttgagaagacccagccggtcattgactattatagtaagaaaggtattctcaaacgcgtagatgggtcgcaaggaatcgacaacgttgttgcagaagtcctggggattctgggttggagcgataagtaatga

SEQ ID NO: 1862 - protein, 231 aa, synthetic construct
  REGION 1..231: note = Variant of adenylate kinase
MHHHHHHGGSGMMAYLVFLGPPGAGKGTQSKRIQEKTGIPHISTGDIFRDIVKKQNDELASKIKEIMEKGELVPDELGNAVVKRRLSEKDCEKGFILDGYPRTVAQAEFLDSFLESQNRQLTAAVLFKVPEDEVVQRLTSRLICPKCGRIYNMIFLPPKEDELCDDCGVGLVQRDDDKEETVRHRLKVYLEKTQPVIDYYSKKGILKRVDGSQGIDNVVAEVLGILGWSDK

SEQ ID NO: 1863 - DNA, 699 bp, synthetic construct
  misc_feature 1..699: note = Variant of adenylate kinase
  source 1..699: mol_type = other DNA
atgcaccatcatcaccatcacgggggctccggcatgatggcatatctggtgttcttaggtcctccgggcgcgggaaaaggtacccaatcgaaacgcatttcggaaaagactggcatcccgcatattagcacgggcgatatcttccgtgacatcgtcaagaagcaaaacgatgaactggcctcgaaaattaaagaaatcatggagaaaggtgaactcgttccagatgaactgggtaatgcggtagtaaaacgccgcctgtcggagaaagactgcgaaaaaggctttattttggatggttatccgcgtaccgtggctcaagcggaattcctggatcgctttcttgaatcccagaacaaacagttgacagccgccgtgctgttcaaagtccccgaagatgaagttgtgcaacgtttaacctctcgcctgatctgtccgaaatgcgggcgtatctacaacatgatttttctgccaccaaaagaagacgagctgtgtgacgattgcaaagtcggcttagtacagcgtgatgatgataaggaagaaacggttcgtcaccgcctgaaagtctaccttgagaagacccagccggtcattgactattatagtaagaaaggtattctcaaacgcgtagatgggtcgcaaggaatcgacaacgttgttgcagaagtcctggggattctgggttggagcgataagtaatga

SEQ ID NO: 1864 - protein, 231 aa, synthetic construct
  REGION 1..231: note = Variant of adenylate kinase
MHHHHHHGGSGMMAYLVFLGPPGAGKGTQSKRISEKTGIPHISTGDIFRDIVKKQNDELASKIKEIMEKGELVPDELGNAVVKRRLSEKDCEKGFILDGYPRTVAQAEFLDRFLESQNKQLTAAVLFKVPEDEVVQRLTSRLICPKCGRIYNMIFLPPKEDELCDDCKVGLVQRDDDKEETVRHRLKVYLEKTQPVIDYYSKKGILKRVDGSQGIDNVVAEVLGILGWSDK

SEQ ID NO: 1865 - DNA, 699 bp, synthetic construct
  misc_feature 1..699: note = Variant of adenylate kinase
  source 1..699: mol_type = other DNA
atgcaccatcatcaccatcacgggggctccggcatgatggcatatctggtgttcttaggtccgccgggcgcgggaaaaggtacccaatcgaaacgcattcaggaatacactggcatgccgcatattagcacgggcgatatcttccgtgacatcgtcaagaagcaaaacgatgaactggcctcgaaaattaaagaaatcatggagaaaggtgaactcgttccagatgaactgggtaatgcggtagtaaaacgccgcctgtcggagaaagactgcgaaaaaggctttattttggatggttatccgcgtaccgtggctcaagcggaattcctggatagttttcttgaatcccagaacaaacaattgacagccgccgtgctgttcaaagtccccgaagatgaagttgtgcaacgtttaacctctcgcctgatctgtccgaaatgcgggcgtatctacaacatgatttttctgccaccaaaagaagacgagctgtgtgacgattgcaaagtcggcttagtacagcgtgatgatgataaggaagaaacggttcgtcaccgcctgaaagtctacctggagaagacccagccggtcattgactattatagtaagaaaggtattctcaaacgcgtagatgggtcgcaaggaatcgacaacgttgttgcagaagtcctggggattctgggttggagcgataagtaatga

SEQ ID NO: 1866 - protein, 231 aa, synthetic construct
  REGION 1..231: note = Variant of adenylate kinase
MHHHHHHGGSGMMAYLVFLGPPGAGKGTQSKRIQEYTGMPHISTGDIFRDIVKKQNDELASKIKEIMEKGELVPDELGNAVVKRRLSEKDCEKGFILDGYPRTVAQAEFLDSFLESQNKQLTAAVLFKVPEDEVVQRLTSRLICPKCGRIYNMIFLPPKEDELCDDCKVGLVQRDDDKEETVRHRLKVYLEKTQPVIDYYSKKGILKRVDGSQGIDNVVAEVLGILGWSDK

SEQ ID NO: 1867 - DNA, 699 bp, synthetic construct
  misc_feature 1..699: note = Variant of adenylate kinase
  source 1..699: mol_type = other DNA
atgcaccatcatcaccatcacgggggctccggcatgatggcatatctggtgttcttaggtccgccgggcgcgggaaaaggtacccaatcgaaacgcattcaggaaaagactggcatcccgcatattagcacgggcgatatcttccgtgacatcgtcaagaagcaaaacgatgaactggcctcgaaaattaaagaaatcatggagaaaggtgaactcgttccagatgaactgggtaatgcggtagtaaaacgccgcctgtcggagaaagactgcgaaaaaggctttattttggatggttatccgcgtaccgtggctcaagcggaattcctggatagttttcttgaatcccagaacaaacagttgacagccgccgtgctgttcaaagtccccgaagatgaagttgtgcaacgtttaacctctcgcctgatctgtccgaaatgcgggcgtatctacaacatgatttttctgccaccaaaagaagacgagctgtgtgacgattgcaaagtcggcttagtaaaacgtgatgatgataaggaagaaacggttcgtcaccgcctgaaagtctacctggagaagacccagccggtcattgactattatagtaagaaaggtattctcaaacgcgtagatgggtcgcaaggaatcgacaacgttgttgcagaagtcctggggattctgggttggagcgataagtaatga

SEQ ID NO: 1868 - protein, 231 aa, synthetic construct
  REGION 1..231: note = Variant of adenylate kinase
MHHHHHHGGSGMMAYLVFLGPPGAGKGTQSKRIQEKTGIPHISTGDIFRDIVKKQNDELASKIKEIMEKGELVPDELGNAVVKRRLSEKDCEKGFILDGYPRTVAQAEFLDSFLESQNKQLTAAVLFKVPEDEVVQRLTSRLICPKCGRIYNMIFLPPKEDELCDDCKVGLVKRDDDKEETVRHRLKVYLEKTQPVIDYYSKKGILKRVDGSQGIDNVVAEVLGILGWSDK

SEQ ID NO: 1869 - DNA, 699 bp, synthetic construct
  misc_feature 1..699: note = Variant of adenylate kinase
  source 1..699: mol_type = other DNA
atgcaccatcatcaccatcacgggggctccggcatgggggcatatctggtgttcttaggtccgccgggcgcgggaaaaggtacccaaggccgtcgcattcaggaaaagactggcatcccgcatattagcacgggcgatatcttccgtgacatcgtcgctaagcaaaacgatgaactggcctcgaaaattaaagaaatcatggagaaaggtgaactcgttccagatgaactgggtaatgcggtagtaaaacgccgcctgtcggagaaagactgcgaaaaaggctttattttggatggttatccgcgtaccgtggctcaagcggaatatctggatagttttcttgagtcccagaatcgccagttgacagccgccgtgctgttcaaagtccccgaagatgaagttgtgcaacgtttaacctctcgcctgatctgtccgaaatgcgggcgtatctacaacatgatttttctgccaccaaaagaagacgagctgtgtgacgattgcggtgtcggcttagtacagcgtgatgatgataaggaagaaacggtccgtcaccgcctgaaagtctacgctgagaagacccagccggtcattgactattatagtaagaaaggtattctcaaacgcgtagatgggtcgcaaggaatcgacaacgttgttgcagaagtcctggggattctgggttggagcgataagtaatga

SEQ ID NO: 1870 - protein, 231 aa, synthetic construct
  REGION 1..231: note = Variant of adenylate kinase
MHHHHHHGGSGMGAYLVFLGPPGAGKGTQGRRIQEKTGIPHISTGDIFRDIVAKQNDELASKIKEIMEKGELVPDELGNAVVKRRLSEKDCEKGFILDGYPRTVAQAEYLDSFLESQNRQLTAAVLFKVPEDEVVQRLTSRLICPKCGRIYNMIFLPPKEDELCDDCGVGLVQRDDDKEETVRHRLKVYAEKTQPVIDYYSKKGILKRVDGSQGIDNVVAEVLGILGWSDK

SEQ ID NO: 1871 - DNA, 699 bp, synthetic construct
  misc_feature 1..699: note = Variant of adenylate kinase
  source 1..699: mol_type = other DNA
atgcaccatcatcaccatcacgggggctccggcatgggggcatatctggtgttcttaggtccgccgggcgcgggaaaaggtacccaaggccgtcgcattcaggaaaagactggcatcccgcatattagcacgggcgatatcttccgtgacatcgtcgctaagcaaaacgatgaactggcctcgaaaattaaagaaatcatggagaaaggtgaactcgttccagatgaactgggtaatgcggtagtaaaacgccgcctgtcggagaaagactgcgaaaaaggctttattttggatggttatccgcgtaccgtggctcaagcggaatatctggatagttttcttaagtcccagaatcgccagttgacagccgccgtggaattcaaagtccccgaagatgaagttgtgcaacgtttaacctctcgcctgatctgtccgaaatgcgggcgtatctacaacatgatttttctgccaccaaaagaagacgagctgtgtgacgattgcggtgtcggcttagtacagcgtgatgatgataaggaagaaacggtccgtcaccgcctgaaagtctacgctgagaagacccagccggtcattgactattatagtaagaaaggtattctcaaacgcgtagatgggtcgcaaggaatcgacaacgttgttgcagaagtcctggggattctgggttggagcgataagtaatga

SEQ ID NO: 1872 - protein, 231 aa, synthetic construct
  REGION 1..231: note = Variant of adenylate kinase
MHHHHHHGGSGMGAYLVFLGPPGAGKGTQGRRIQEKTGIPHISTGDIFRDIVAKQNDELASKIKEIMEKGELVPDELGNAVVKRRLSEKDCEKGFILDGYPRTVAQAEYLDSFLKSQNRQLTAAVEFKVPEDEVVQRLTSRLICPKCGRIYNMIFLPPKEDELCDDCGVGLVQRDDDKEETVRHRLKVYAEKTQPVIDYYSKKGILKRVDGSQGIDNVVAEVLGILGWSDK

SEQ ID NO: 1873 - DNA, 699 bp, synthetic construct
  misc_feature 1..699: note = Variant of adenylate kinase
  source 1..699: mol_type = other DNA
atgcaccatcatcaccatcacgggggctccggcatgggggcatatctggtgttcttaggtccgccgggcgcgggaaaaggtacccaaggccgtcgcattcaggaaaagactggcatcccgcatattagcacgggcgatatcttccgtgacatcgtcgctaagcaaaacgatgaactggcctcgaaaattaaagaaatcatggagaaaggtgaactcgttccagatgaactgggtaatgcggtagtaaaacgccgcctgtcggagaaagactgcgaaaaaggctttattttggatggttatccgcgtaccgtggctcaagcggaatatctggatagttttcttgaatcccagaatcgccagttgacagccgccgtggaattcaaagtccccgaagatgaagttgtgcaacgtttaacctctcgcctgatctgtccgaaatgcgggcgtatctacaacatgatttttctgccaccaaaagaagacgagctgtgtgacgattgcggtgtcggcttagtacagcgtgatgatgataaggaagaaacggtccgtcaccgcctgaaagtctacgctgagaagacccagccggtcattgactattatagtaagaaaggtattctcaaacgcgtagatgggtcgcaaggaatcgacaacgttgttgcagaagtcctggggattctgggttggagcgataagtaatga

SEQ ID NO: 1874 - protein, 231 aa, synthetic construct
  REGION 1..231: note = Variant of adenylate kinase
MHHHHHHGGSGMGAYLVFLGPPGAGKGTQGRRIQEKTGIPHISTGDIFRDIVAKQNDELASKIKEIMEKGELVPDELGNAVVKRRLSEKDCEKGFILDGYPRTVAQAEYLDSFLESQNRQLTAAVEFKVPEDEVVQRLTSRLICPKCGRIYNMIFLPPKEDELCDDCGVGLVQRDDDKEETVRHRLKVYAEKTQPVIDYYSKKGILKRVDGSQGIDNVVAEVLGILGWSDK

SEQ ID NO: 1875 - DNA, 699 bp, synthetic construct
  misc_feature 1..699: note = Variant of adenylate kinase
  source 1..699: mol_type = other DNA
atgcaccatcatcaccatcacgggggctccggcatgggggcatatctggtgttcttaggtccgccgggcgcgggaaaaggtacccaaggccgtcgcatttcggcaaagactggcatcccgcatattagcacgggcgatatcttccgtgacatcgtcgctaagcaaaacgatgaactggcctcgaaaattaaagagatcatggagaaaggtgaactcgttccagatgaactgggtaatgcggtagtaaaacgccgcctgtcggagaaagactgcgaaaaaggctttattttggatggttatccgcgtaccgtgcgccaagcggaatatctggatagttttcttgaaagccagaatcgccagttgacagccgccgtgctgttcaaagtccccgaagatgaagttgtgcaacgtttaacctctcgcctgatctgtccgaaatgcgggcgtatctacaacatgatttttctgccaccaaaagaagacgagctgtgtgacgattgcggtgtcggcttagtacagcgtgatgatgataaggaagaaacggtccgtcaccgcctgaaagtctaccttgagaagacccagccggtcattgactattatagtaagaaaggtattctcaaacgcgtagatgggtcgcaaggaatcgacaacgttgttgcagaagtcctggggattctgggttggagcgataagtaatga

SEQ ID NO: 1876 - protein, 231 aa, synthetic construct
  REGION 1..231: note = Variant of adenylate kinase
MHHHHHHGGSGMGAYLVFLGPPGAGKGTQGRRISAKTGIPHISTGDIFRDIVAKQNDELASKIKEIMEKGELVPDELGNAVVKRRLSEKDCEKGFILDGYPRTVRQAEYLDSFLESQNRQLTAAVLFKVPEDEVVQRLTSRLICPKCGRIYNMIFLPPKEDELCDDCGVGLVQRDDDKEETVRHRLKVYLEKTQPVIDYYSKKGILKRVDGSQGIDNVVAEVLGILGWSDK

SEQ ID NO: 1877 - DNA, 699 bp, synthetic construct
  misc_feature 1..699: note = Variant of adenylate kinase
  source 1..699: mol_type = other DNA
atgcaccatcatcaccatcacgggggctccggcatgggggcatatctggtgttcttaggtccgccgggcgcgggaaaaggtacccaaggccgtcgcattcaggaaaagactggcatcccgcatattagcacgggcgatatcttccgtgacatcgtcgctaagcaaaacgatgaactggcctcgaaaattaaagaaatcatggagaaaggtgaactcgttccagatgaactgggtaatgcggtagtaaaacgccgcctgtcggagaaagactgcgaaaaaggctttattttggatggttatccgcgtaccgtggctcaagcggaatatctggatagttttcttgaatcccagaatcgccagttgacagccgccgtggaattcaaagtccccgaagatgaagttgtgcaacgtttaacctctcgcctgatctgtccgaaatgcgggcgtatctacaacatgatttttctgccaccaaaagaagacgagctgtgtgacgattgcggtgtcggcttagtacagcgtgatgatgataaggaagaaacggtccgtcaccgcctgaaagtctacctggagaagacccagccggtcattgactattatagtaagaaaggtattctcaaacgcgtagatgggtcgcaaggaatcgacaacgttgttgcagaagtcctggggattctgggttggagcgataagtaatga

SEQ ID NO: 1878 - protein, 231 aa, synthetic construct
  REGION 1..231: note = Variant of adenylate kinase
MHHHHHHGGSGMGAYLVFLGPPGAGKGTQGRRIQEKTGIPHISTGDIFRDIVAKQNDELASKIKEIMEKGELVPDELGNAVVKRRLSEKDCEKGFILDGYPRTVAQAEYLDSFLESQNRQLTAAVEFKVPEDEVVQRLTSRLICPKCGRIYNMIFLPPKEDELCDDCGVGLVQRDDDKEETVRHRLKVYLEKTQPVIDYYSKKGILKRVDGSQGIDNVVAEVLGILGWSDK

SEQ ID NO: 1879 - DNA, 699 bp, synthetic construct
  misc_feature 1..699: note = Variant of adenylate kinase
  source 1..699: mol_type = other DNA
atgcaccatcatcaccatcacgggggctccggcatgggggcatatctggtgttcttaggtccgccgggcgcgggaaaaggtacccaaggccgtcgcattcaggaaaagactggcatcccgcatattagcacgggcgatatcttccgtgacatcgtcgctaagcaaaacgatgaagaggcctcgaaaattaaagaaatcatggagaaaggtgaactcgttccagatgaactgggtaatgcggtagtaaaacgccgcctgtcggagaaagactgcgaaaaaggctttattttggatggttatccgcgtaccgtggctcaagcggaatatctggatagttttcttgaatcccagaatcgccagttgacagccgccgtggaattcaaagtccccgaagatgaagttgtgcaacgtttaacctctcgcctgatctgtccgaaatgcgggcgtatctacaacatgatttttctgccaccaaaagaagacgagctgtgtgacgattgcggtgtcggcttagtacagcgtgatgatgataaggaagaaacggtccgtcaccgcctgaaagtctaccttgagaagacccagccggtcattgactattatagtaagaaaggtattctcaaacgcgtagatgggtcgcaaggaatcgacaacgttgttgcagaagtcctggggattctgggttggagcgataagtaatga

SEQ ID NO: 1880 - protein, 231 aa, synthetic construct
  REGION 1..231: note = Variant of adenylate kinase
MHHHHHHGGSGMGAYLVFLGPPGAGKGTQGRRIQEKTGIPHISTGDIFRDIVAKQNDEEASKIKEIMEKGELVPDELGNAVVKRRLSEKDCEKGFILDGYPRTVAQAEYLDSFLESQNRQLTAAVEFKVPEDEVVQRLTSRLICPKCGRIYNMIFLPPKEDELCDDCGVGLVQRDDDKEETVRHRLKVYLEKTQPVIDYYSKKGILKRVDGSQGIDNVVAEVLGILGWSDK

SEQ ID NO: 1881 - DNA, 699 bp, synthetic construct
  misc_feature 1..699: note = Variant of adenylate kinase
  source 1..699: mol_type = other DNA
atgcaccatcatcaccatcacgggggctccggcatgggggcatatctggtgttcttaggtccgccgggcgcgggaaaaggtacccaaggccgtcgcatttcggaaaagactggcatcccgcatattagcacgggcgatatcttccgtgacatcgtcgctaagcaaaacgatgaactggcctcgaaaattaaagaaatcatggagaaaggtgaactcgttccagatgaactgggtaatgcggtagtaaaacgccgcctgtcggagaaagactgcgaaaaaggctttattttggatggttatccgcgtaccgtgcgccaagcggaatatctggatagttttcttgaagagcagaatcgccagttgacagccgccgtgctgttcaaagtccccgaagatgaagttgtgcaacgtttaacctctcgcctgatctgtccggattgcgggcgtatctacaacatgatttttctgccaccaaaagaagacgagctgtgtgacgattgcggtgtcggcttagtacagcgtgatgatgataaggaagaaacggtccgtcaccgcctgaaagtctaccttgagaagacccagccggtcattgactattatagtaagaaaggtattctcaaacgcgtagatgggtcgcaaggaatcgacaacgttgttgcagaagtcctggggattctgggttggagcgataagtaatga

SEQ ID NO: 1882 - protein, 231 aa, synthetic construct
  REGION 1..231: note = Variant of adenylate kinase
MHHHHHHGGSGMGAYLVFLGPPGAGKGTQGRRISEKTGIPHISTGDIFRDIVAKQNDELASKIKEIMEKGELVPDELGNAVVKRRLSEKDCEKGFILDGYPRTVRQAEYLDSFLEEQNRQLTAAVLFKVPEDEVVQRLTSRLICPDCGRIYNMIFLPPKEDELCDDCGVGLVQRDDDKEETVRHRLKVYLEKTQPVIDYYSKKGILKRVDGSQGIDNVVAEVLGILGWSDK

SEQ ID NO: 1883 - DNA, 699 bp, synthetic construct
  misc_feature 1..699: note = Variant of adenylate kinase
  source 1..699: mol_type = other DNA
atgcaccatcatcaccatcacgggggctccggcatgggggcatatctggtgttcttaggtccgccgggcgcgggaaaaggtacccaaggccgtcgcattcaggaaaagactggcatcccgcatattagcacgggcgatatcctgcgtgacatcgtcgctaagcaaaacgatgaactggcctcgaaaattaaagaaatcatggagaaaggtgaactcgttccagatgaactgggtaatgcggtagtaaaacgccgcctgtcggagaaagactgcgaaaaaggctttattttggatggttatccgcgtaccgtggctcaagcggaatatctggatagttttcttgaatcccagaatcgccagttgacagccgccgtgctgttcaaagtccccgaagatgaagttgtgcaacgtttaacctctcgcctgatctgtccgaaatgcgggcgtatctacaacatgatttttctgccaccaaaagaagacgagctgtgtgacgattgcggtgtcggcttagtacagcgtgatgatgataaggaagaaacggtccgtcaccgcctgaaagtctaccttgagaagacccagccggtcattgactattatagtaagaaaggtattctcaaacgcgtagatgggtcgcaaggaatcgacaacgttgttgcagaagtcctggggattctgggttggagcgataagtaatga

SEQ ID NO: 1884 - protein, 231 aa, synthetic construct
  REGION 1..231: note = Variant of adenylate kinase
MHHHHHHGGSGMGAYLVFLGPPGAGKGTQGRRIQEKTGIPHISTGDILRDIVAKQNDELASKIKEIMEKGELVPDELGNAVVKRRLSEKDCEKGFILDGYPRTVAQAEYLDSFLESQNRQLTAAVLFKVPEDEVVQRLTSRLICPKCGRIYNMIFLPPKEDELCDDCGVGLVQRDDDKEETVRHRLKVYLEKTQPVIDYYSKKGILKRVDGSQGIDNVVAEVLGILGWSDK

SEQ ID NO: 1885 - DNA, 699 bp, synthetic construct
  misc_feature 1..699: note = Variant of adenylate kinase
  source 1..699: mol_type = other DNA
atgcaccatcatcaccatcacgggggctccggcatgggggcatatctggtgttcttaggtccgccgggcgcgggaaaaggtacccaaggccgtcgcattcaggaaaagactggcatcccgcatattagcacgggcgatatcttccgtgacatcgtcgctaagcaaaacgatgaactggcctcgaaaattaaagaatttatggagaaaggtgaactcgttccagatgaactgggtaatgcggtagtaaaacgccgcctgtcggagaaagactgcgaaaaaggctttattttggatggttatccgcgtaccgtggctcaagcggaatatctggatagttttcttgaatcccagaatcgccagttgacagccgccgtgctgttcaaagtccccgaagatgaagttgtgcaacgtttaacctctcgcctgatctgtccgaaatgcgggcgtatctacaacatgatttttctgccaccaaaagaagacgagctgtgtgacgattgcggtgtcggcttagtacagcgtgatgatgataaggaagaaacggtccgtcaccgcctgaaagtctaccttgagaagacccagccggtcattgactattatagtaagaaaggtattctcaaacgcgtagatgggtcgcaaggaatcgacaacgttgttgcagaagtcctggggattctgggttggagcgataagtaatga

SEQ ID NO: 1886 - protein, 231 aa, synthetic construct
  REGION 1..231: note = Variant of adenylate kinase
MHHHHHHGGSGMGAYLVFLGPPGAGKGTQGRRIQEKTGIPHISTGDIFRDIVAKQNDELASKIKEFMEKGELVPDELGNAVVKRRLSEKDCEKGFILDGYPRTVAQAEYLDSFLESQNRQLTAAVLFKVPEDEVVQRLTSRLICPKCGRIYNMIFLPPKEDELCDDCGVGLVQRDDDKEETVRHRLKVYLEKTQPVIDYYSKKGILKRVDGSQGIDNVVAEVLGILGWSDK

SEQ ID NO: 1887 - DNA, 699 bp, synthetic construct
  misc_feature 1..699: note = Variant of adenylate kinase
  source 1..699: mol_type = other DNA
atgcaccatcatcaccatcacgggggctccggcatgggggcatatctggtgttcttaggtccgccgggcgcgggaaaaggtacccaaggccgtcgcattcaggaaaagactggcatcccgcatattagcacgggcgatatcttccgtgacatcgtcgctaagcaaaacgatgaaacggcctcgaaaattaaagaaatcatggagaaaggtgaactcgttccagatgaactgggtaatgcggtagtaaaacgccgcctgtcggagaaagactgcgaaaaaggctttattttggatggttatccgcgtaccgtggctcaagcggaatatctggatagttttcttgaatcccagaatcgccagttgacagccgccgtgctgttcaaagtccccgaagatgaagttgtgcaacgtttaacctctcgcctgatctgtccgaaatgcgggcgtatctacaacatgatttttctgccaccaaaagaagacgagctgtgtgacgattgcggtgtcggcttagtacagcgtgatgatgataaggaagaaacggtccgtcaccgcctgaaagtctaccttgagaagacccagccggtcattgactattatagtaagaaaggtattctcaaacgcgtagatgggtcgcaaggaatcgacaacgttgttgcagaagtcctggggattctgggttggagcgataagtaatga

SEQ ID NO: 1888 - protein, 231 aa, synthetic construct
  REGION 1..231: note = Variant of adenylate kinase
MHHHHHHGGSGMGAYLVFLGPPGAGKGTQGRRIQEKTGIPHISTGDIFRDIVAKQNDETASKIKEIMEKGELVPDELGNAVVKRRLSEKDCEKGFILDGYPRTVAQAEYLDSFLESQNRQLTAAVLFKVPEDEVVQRLTSRLICPKCGRIYNMIFLPPKEDELCDDCGVGLVQRDDDKEETVRHRLKVYLEKTQPVIDYYSKKGILKRVDGSQGIDNVVAEVLGILGWSDK

SEQ ID NO: 1889 - DNA, 699 bp, synthetic construct
  misc_feature 1..699: note = Variant of adenylate kinase
  source 1..699: mol_type = other DNA
atgcaccatcatcaccatcacgggggctccggcatgggggcatatctggtgttcttaggtccgccgggcgcgggaaaaggtacccaaggccgtcgcattcaggaaaagactggcatcccgcatattagcacgggcgatatcttccgtgacatcgtcgctaagcaaaacgatgaactggcctcgaaaattaaagaaatcatggagaaaggtgaactcgttccagatgaactgggtaatgcggtagtaaaacgccgcctgtcggagaaagactgcgaaaaaggctttattttggatggttatccgcgtaccgtggctcaagcggaatatctggatagttttcttgaatcccagaatcgccagttgacagccgccgtgctgttcaaagtccccgaagatgaagttgtgcaacgtttaacctctcgcctgatctgtccgaaatgccatcgtatctacaacatgatttttctgccaccaaaagaagacgagctgtgtgacgattgcggtgtcggcttagtacagcgtgatgatgataaggaagaaacggtccgtcaccgcctgaaagtctaccttgagaagacccagccggtcattgactattatagtaagaaaggtattctcaaacgcgtagatgggtcgcaaggaatcgacaacgttgttgcagaagtcctggggattctgggttggagcgataagtaatga

SEQ ID NO: 1890 - protein, 231 aa, synthetic construct
  REGION 1..231: note = Variant of adenylate kinase
MHHHHHHGGSGMGAYLVFLGPPGAGKGTQGRRIQEKTGIPHISTGDIFRDIVAKQNDELASKIKEIMEKGELVPDELGNAVVKRRLSEKDCEKGFILDGYPRTVAQAEYLDSFLESQNRQLTAAVLFKVPEDEVVQRLTSRLICPKCHRIYNMIFLPPKEDELCDDCGVGLVQRDDDKEETVRHRLKVYLEKTQPVIDYYSKKGILKRVDGSQGIDNVVAEVLGILGWSDK

SEQ ID NO: 1891 - DNA, 699 bp, synthetic construct
  misc_feature 1..699: note = Variant of adenylate kinase
  source 1..699: mol_type = other DNA
atgcaccatcatcaccatcacgggggctccggcatgggggcatatctggtgttcttaggtccgccgggcgcgggaaaaggtacccaaggccgtcgcattcaggaaaagactggcatcccgcatattagcacgggcgatatcttccgtgacatcgtcgctaagcaaaacgatgaactggcctcgaaaattaaagaaatcatggagaaaggtgaactcgttccagatgaactgggtaatgcggtaacgaaacgccgcctgtcggagaaagactgcgaaaaaggctttattttggatggttatccgcgtaccgtggctcaagcggaatatctggatagttttcttgaatcccagaatcgccagttgacagccgccgtgctgttcaaagtccccgaagatgaagttgtgcaacgtttaacctctcgcctgatctgtccgaaatgcgggcgtatctacaacatgatttttctgccaccaaaagaagacgagctgtgtgacgattgcggtgtcggcttagtacagcgtgatgatgataaggaagaaacggtccgtcaccgcctgaaagtctaccttgagaagacccagccggtcattgactattatagtaagaaaggtattctcaaacgcgtagatgggtcgcaaggaatcgacaacgttgttgcagaagtcctggggattctgggttggagcgataagtaatga

SEQ ID NO: 1892 - protein, 231 aa, synthetic construct
  REGION 1..231: note = Variant of adenylate kinase
MHHHHHHGGSGMGAYLVFLGPPGAGKGTQGRRIQEKTGIPHISTGDIFRDIVAKQNDELASKIKEIMEKGELVPDELGNAVTKRRLSEKDCEKGFILDGYPRTVAQAEYLDSFLESQNRQLTAAVLFKVPEDEVVQRLTSRLICPKCGRIYNMIFLPPKEDELCDDCGVGLVQRDDDKEETVRHRLKVYLEKTQPVIDYYSKKGILKRVDGSQGIDNVVAEVLGILGWSDK

SEQ ID NO: 1893 - DNA, 699 bp, synthetic construct
  misc_feature 1..699: note = Variant of adenylate kinase
  source 1..699: mol_type = other DNA
atgcaccatcatcaccatcacgggggctccggcatgggggcatatctggtgttcttaggtccgccgggcgcgggaaaaggtacccaaggccgtcgcattcaggaaaagactggcatcccgcatattagcacgggcgatatcttccgtgacatcgtcgctaagcaaaacgatgaagtggcctcgaaaattaaagaaatcatggagaaaggtgaactcgttccagatgaactgggtaatgcggtagtaaaacgccgcctgtcggagaaagactgcgaaaaaggctttattttggatggttatccgcgtaccgtggctcaagcggaatatctggatagttttcttgaatcccagaatcgccagttgacagccgccgtgctgttcaaagtccccgaagatgaagttgtgcaacgtttaacctctcgcctgatctgtccgaaatgcgggcgtatctacaacatgatttttctgccaccaaaagaagacgagctgtgtgacgattgcggtgtcggcttagtacagcgtgatgatgataaggaagaaacggtccgtcaccgcctgaaagtctaccttgagaagacccagccggtcattgactattatagtaagaaaggtattctcaaacgcgtagatgggtcgcaaggaatcgacaacgttgttgcagaagtcctggggattctgggttggagcgataagtaatga

SEQ ID NO: 1894 - protein, 231 aa, synthetic construct
  REGION 1..231: note = Variant of adenylate kinase
MHHHHHHGGSGMGAYLVFLGPPGAGKGTQGRRIQEKTGIPHISTGDIFRDIVAKQNDEVASKIKEIMEKGELVPDELGNAVVKRRLSEKDCEKGFILDGYPRTVAQAEYLDSFLESQNRQLTAAVLFKVPEDEVVQRLTSRLICPKCGRIYNMIFLPPKEDELCDDCGVGLVQRDDDKEETVRHRLKVYLEKTQPVIDYYSKKGILKRVDGSQGIDNVVAEVLGILGWSDK

SEQ ID NO: 1895 - DNA, 699 bp, synthetic construct
  misc_feature 1..699: note = Variant of adenylate kinase
  source 1..699: mol_type = other DNA
atgcaccatcatcaccatcacgggggctccggcatgggggcatatctggtgttcttaggtccgccgggcgcgggaaaaggtacccaaggccgtcgcattcaggaaaagactggcatcccgcatattagcacgggcgatatcttccgtgacatcgtcgctaagcaaaacgatgaatatgcctcgaaaattaaagaaatcatggagaaaggtgaactcgttccagatgaactgggtaatgcggtagtaaaacgccgcctgtcggagaaagactgcgaaaaaggctttattttggatggttatccgcgtaccgtggctcaagcggaatatctggatagttttcttgaatcccagaatcgccagttgacagccgccgtgctgttcaaagtccccgaagatgaagttgtgcaacgtttaacctctcgcctgatctgtccgaaatgcgggcgtatctacaacatgatttttctgccaccaaaagaagacgagctgtgtgacgattgcggtgtcggcttagtacagcgtgatgatgataaggaagaaacggtccgtcaccgcctgaaagtctaccttgagaagacccagccggtcattgactattatagtaagaaaggtattctcaaacgcgtagatgggtcgcaaggaatcgacaacgttgttgcagaagtcctggggattctgggttggagcgataagtaatga

SEQ ID NO: 1896 - protein, 231 aa, synthetic construct
  REGION 1..231: note = Variant of adenylate kinase
MHHHHHHGGSGMGAYLVFLGPPGAGKGTQGRRIQEKTGIPHISTGDIFRDIVAKQNDEYASKIKEIMEKGELVPDELGNAVVKRRLSEKDCEKGFILDGYPRTVAQAEYLDSFLESQNRQLTAAVLFKVPEDEVVQRLTSRLICPKCGRIYNMIFLPPKEDELCDDCGVGLVQRDDDKEETVRHRLKVYLEKTQPVIDYYSKKGILKRVDGSQGIDNVVAEVLGILGWSDK

SEQ ID NO: 1897 - DNA, 699 bp, synthetic construct
  misc_feature 1..699: note = Variant of adenylate kinase
  source 1..699: mol_type = other DNA
atgcaccatcatcaccatcacgggggctccggcatgggggcatatctggtgttcttaggtccgccgggcgcgggaaaaggtacccaaggccgtcgcattcaggaaaagactggcatcccgcatattagcacgggcgatatcttccgtgacatcgtcgctaagcaaaacgatgaaccggcctcgaaaattaaagaaatcatggagaaaggtgaactcgttccagatgaactgggtaatgcggtagtaaaacgccgcctgtcggagaaagactgcgaaaaaggctttattttggatggttatccgcgtaccgtggctcaagcggaatatctggatagttttcttgaatcccagaatcgccagttgacagccgccgtgctgttcaaagtccccgaagatgaagttgtgcaacgtttaacctctcgcctgatctgtccgaaatgcgggcgtatctacaacatgatttttctgccaccaaaagaagacgagctgtgtgacgattgcggtgtcggcttagtacagcgtgatgatgataaggaagaaacggtccgtcaccgcctgaaagtctaccttgagaagacccagccggtcattgactattatagtaagaaaggtattctcaaacgcgtagatgggtcgcaaggaatcgacaacgttgttgcagaagtcctggggattctgggttggagcgataagtaatga

SEQ ID NO: 1898 - protein, 231 aa, synthetic construct
  REGION 1..231: note = Variant of adenylate kinase
MHHHHHHGGSGMGAYLVFLGPPGAGKGTQGRRIQEKTGIPHISTGDIFRDIVAKQNDEPASKIKEIMEKGELVPDELGNAVVKRRLSEKDCEKGFILDGYPRTVAQAEYLDSFLESQNRQLTAAVLFKVPEDEVVQRLTSRLICPKCGRIYNMIFLPPKEDELCDDCGVGLVQRDDDKEETVRHRLKVYLEKTQPVIDYYSKKGILKRVDGSQGIDNVVAEVLGILGWSDK

SEQ ID NO: 1899 - DNA, 699 bp, synthetic construct
  misc_feature 1..699: note = Variant of adenylate kinase
  source 1..699: mol_type = other DNA
atgcaccatcatcaccatcacgggggctccggcatgggggcatatctggtgttcttaggtccgccgggcgcgggaaaaggtacccaaggccgtcgcattcaggaaaagactggcatcccgcatattagcacgggcgatatcttccgtgacatcgtcgctaagcaaaacgatgaactggcctcgaaaattaaagaaatcatggagaaaggtgaactcgttccagatgaactgggtaatgcggtagtaaaacgccgcctgtcggagaaagactgcgaaaaaggctttattttggatggttttccgcgtaccgtggctcaagcggaatatctggatagttttcttgaatcccagaatcgccagttgacagccgccgtgctgttcaaagtccccgaagatgaagttgtgcaacgtttaacctctcgcctgatctgtccgaaatgcgggcgtatctacaacatgatttttctgccaccaaaagaagacgagctgtgtgacgattgcggtgtcggcttagtacagcgtgatgatgataaggaagaaacggtccgtcaccgcctgaaagtctaccttgagaagacccagccggtcattgactattatagtaagaaaggtattctcaaacgcgtagatgggtcgcaaggaatcgacaacgttgttgcagaagtcctggggattctgggttggagcgataagtaatga

SEQ ID NO: 1900 - protein, 231 aa, synthetic construct
  REGION 1..231: note = Variant of adenylate kinase
MHHHHHHGGSGMGAYLVFLGPPGAGKGTQGRRIQEKTGIPHISTGDIFRDIVAKQNDELASKIKEIMEKGELVPDELGNAVVKRRLSEKDCEKGFILDGFPRTVAQAEYLDSFLESQNRQLTAAVLFKVPEDEVVQRLTSRLICPKCGRIYNMIFLPPKEDELCDDCGVGLVQRDDDKEETVRHRLKVYLEKTQPVIDYYSKKGILKRVDGSQGIDNVVAEVLGILGWSDK

SEQ ID NO: 1901 - DNA, 699 bp, synthetic construct
  misc_feature 1..699: note = Variant of adenylate kinase
  source 1..699: mol_type = other DNA
atgcaccatcatcaccatcacgggggctccggcatgggggcatatctggtgttcttaggtccgccgggcgcgggaaaaggtacccaaggccgtcgcattcaggaaaagactggcatcccgcatattagcacgggcgatatcttccgtgacatcgtcgctaagcaaaacgatgaactggcctcgaaaattaaagaaatcatggagaaaggtgaactcgttccagatgaactgggtaatgcggtagtaaaacgccgcctgtcggagaaagactgcgaaaaaggctttattttggatggttatccgcgtaccgtggctcaagcggaatatctggatagttttcttgaatcccagaatcgccagttgacagccgccgtgctgttcaaagtccccgaagatgaagttgtgcaacgtttaacctctcgcctgatctgtccgaaatgctttcgtatctacaacatgatttttctgccaccaaaagaagacgagctgtgtgacgattgcggtgtcggcttagtacagcgtgatgatgataaggaagaaacggtccgtcaccgcctgaaagtctaccttgagaagacccagccggtcattgactattatagtaagaaaggtattctcaaacgcgtagatgggtcgcaaggaatcgacaacgttgttgcagaagtcctggggattctgggttggagcgataagtaatga

SEQ ID NO: 1902 - protein, 231 aa, synthetic construct
  REGION 1..231: note = Variant of adenylate kinase
MHHHHHHGGSGMGAYLVFLGPPGAGKGTQGRRIQEKTGIPHISTGDIFRDIVAKQNDELASKIKEIMEKGELVPDELGNAVVKRRLSEKDCEKGFILDGYPRTVAQAEYLDSFLESQNRQLTAAVLFKVPEDEVVQRLTSRLICPKCFRIYNMIFLPPKEDELCDDCGVGLVQRDDDKEETVRHRLKVYLEKTQPVIDYYSKKGILKRVDGSQGIDNVVAEVLGILGWSDK

SEQ ID NO: 1903 - DNA, 699 bp, synthetic construct
  misc_feature 1..699: note = Variant of adenylate kinase
  source 1..699: mol_type = other DNA
atgcaccatcatcaccatcacgggggctccggcatgggggcatatctggtgttcttaggtccgccgggcgcgggaaaatctacccaaggccgtcgcattcaggaaaagactggcatcccgcatattagcacgggcgatatcttccgtgacatcgtcgctaagcaaaacgatgaactggcctcgaaaattaaagaaatcatggagaaaggtgaactcgttccagatgaactgggtaatgcggtagtaaaacgccgcctgtcggagaaagactgcgaaaaaggctttattttggatggttatccgcgtaccgtggctcaagcggaatatctggatagttttcttgaatcccagaatcgccagttgacagccgccgtgctgttcaaagtccccgaagatgaagttgtgcaacgtttaacctctcgcctgatctgtccgaaatgcgggcgtatctacaacatgatttttctgccaccaaaagaagacgagctgtgtgacgattgcggtgtcggcttagtacagcgtgatgatgataaggaagaaacggtccgtcaccgcctgaaagtctaccttgagaagacccagccggtcattgactattatagtaagaaaggtattctcaaacgcgtagatgggtcgcaaggaatcgacaacgttgttgcagaagtcctggggattctgggttggagcgataagtaatga

SEQ ID NO: 1904 - protein, 231 aa, synthetic construct
  REGION 1..231: note = Variant of adenylate kinase
MHHHHHHGGSGMGAYLVFLGPPGAGKSTQGRRIQEKTGIPHISTGDIFRDIVAKQNDELASKIKEIMEKGELVPDELGNAVVKRRLSEKDCEKGFILDGYPRTVAQAEYLDSFLESQNRQLTAAVLFKVPEDEVVQRLTSRLICPKCGRIYNMIFLPPKEDELCDDCGVGLVQRDDDKEETVRHRLKVYLEKTQPVIDYYSKKGILKRVDGSQGIDNVVAEVLGILGWSDK

SEQ ID NO: 1905 - DNA, 699 bp, synthetic construct
  misc_feature 1..699: note = Variant of adenylate kinase
  source 1..699: mol_type = other DNA
atgcaccatcatcaccatcacgggggctccggcatgggggcatatctggtgttcttaggtccgccgggcgcgggaaaaggtacccaaggccgtcgcattcaggaaaagactggcatcccgcatattagcacgggcgatatcttccgtgacatcgtcgctaagcaaaacgatgaactggcctcgaaaattaaagaaatcatggagaaaggtgaactcgttccagatgaactgggtaatgcggtagtaaaacgccgcctgtcggagaaagactgcgaaaaaggctttattttggatggttatccgcgtaccgtggctcaagcggaatatctggatagttttcttgaatcccagaatcgccagttgacagccgccgtgctgttcaaagtccccgaagatgaagttaggcaacgtttaacctctcgcctgatctgtccgaaatgcgggcgtatctacaacatgatttttctgccaccaaaagaagacgagctgtgtgacgattgcggtgtcggcttagtacagcgtgatgatgataaggaagaaacggtccgtcaccgcctgaaagtctaccttgagaagacccagccggtcattgactattatagtaagaaaggtattctcaaacgcgtagatgggtcgcaaggaatcgacaacgttgttgcagaagtcctggggattctgggttggagcgataagtaatga

SEQ ID NO: 1906 - protein, 231 aa, synthetic construct
  REGION 1..231: note = Variant of adenylate kinase
MHHHHHHGGSGMGAYLVFLGPPGAGKGTQGRRIQEKTGIPHISTGDIFRDIVAKQNDELASKIKEIMEKGELVPDELGNAVVKRRLSEKDCEKGFILDGYPRTVAQAEYLDSFLESQNRQLTAAVLFKVPEDEVRQRLTSRLICPKCGRIYNMIFLPPKEDELCDDCGVGLVQRDDDKEETVRHRLKVYLEKTQPVIDYYSKKGILKRVDGSQGIDNVVAEVLGILGWSDK

SEQ ID NO: 1907 - DNA, 699 bp, synthetic construct
  misc_feature 1..699: note = Variant of adenylate kinase
  source 1..699: mol_type = other DNA
atgcaccatcatcaccatcacgggggctccggcatgggggcatatctggtgttcttaggtccgccgggcgcgggaaaaggtacccaaggccgtcgcattcaggaaaagactggcatcccgcatattagcacgggcgatatcttccgtgacatcgtcgctaagcaaaacgatgaactggcctcgaaaattaaagaaatcatggagaaaggtgaactcgttccagatgaactgggtaatgcggtagtaaaacgccgcctgtcggagaaagactgcgaaaaaggctttattttggatggttatccgcgtaccgtggctcaagcggaatatctggatagttttcttgaatcccagaatcgccagttgacagccgccgtgctgttcaaagtccccgaagatgaagttgtgcaacgtttaacctctcgcctgatctgtccgaaatgcactcgtatctacaacatgatttttctgccaccaaaagaagacgagctgtgtgacgattgcggtgtcggcttagtacagcgtgatgatgataaggaagaaacggtccgtcaccgcctgaaagtctaccttgagaagacccagccggtcattgactattatagtaagaaaggtattctcaaacgcgtagatgggtcgcaaggaatcgacaacgttgttgcagaagtcctggggattctgggttggagcgataagtaatga

SEQ ID NO: 1908 - protein, 231 aa, synthetic construct
  REGION 1..231: note = Variant of adenylate kinase
MHHHHHHGGSGMGAYLVFLGPPGAGKGTQGRRIQEKTGIPHISTGDIFRDIVAKQNDELASKIKEIMEKGELVPDELGNAVVKRRLSEKDCEKGFILDGYPRTVAQAEYLDSFLESQNRQLTAAVLFKVPEDEVVQRLTSRLICPKCTRIYNMIFLPPKEDELCDDCGVGLVQRDDDKEETVRHRLKVYLEKTQPVIDYYSKKGILKRVDGSQGIDNVVAEVLGILGWSDK

SEQ ID NO: 1909 - DNA, 699 bp, synthetic construct
  misc_feature 1..699: note = Variant of adenylate kinase
  source 1..699: mol_type = other DNA
atgcaccatcatcaccatcacgggggctccggcatgggggcatatctggtgttcttaggtccgccgggcgcgggaaaaggtacccaaggccgtcgcattcaggaaaagactggcatcccgcatattagcacgggcgatatcttccgtgacatcgtcgctaagcaaaacgatgaactggcctcgaaaattaaagaaatcatggagaaaggtgaactcgttccagatgaaatgggtaatgcggtagtaaaacgccgcctgtcggagaaagactgcgaaaaaggctttattttggatggttatccgcgtaccgtggctcaagcggaatatctggatagttttcttgaatcccagaatcgccagttgacagccgccgtgctgttcaaagtccccgaagatgaagttgtgcaacgtttaacctctcgcctgatctgtccgaaatgcgggcgtatctacaacatgatttttctgccaccaaaagaagacgagctgtgtgacgattgcggtgtcggcttagtacagcgtgatgatgataaggaagaaacggtccgtcaccgcctgaaagtctaccttgagaagacccagccggtcattgactattatagtaagaaaggtattctcaaacgcgtagatgggtcgcaaggaatcgacaacgttgttgcagaagtcctggggattctgggttggagcgataagtaatga

SEQ ID NO: 1910 - protein, 231 aa, synthetic construct
  REGION 1..231: note = Variant of adenylate kinase
MHHHHHHGGSGMGAYLVFLGPPGAGKGTQGRRIQEKTGIPHISTGDIFRDIVAKQNDELASKIKEIMEKGELVPDEMGNAVVKRRLSEKDCEKGFILDGYPRTVAQAEYLDSFLESQNRQLTAAVLFKVPEDEVVQRLTSRLICPKCGRIYNMIFLPPKEDELCDDCGVGLVQRDDDKEETVRHRLKVYLEKTQPVIDYYSKKGILKRVDGSQGIDNVVAEVLGILGWSDK

SEQ ID NO: 1911 - DNA, 699 bp, synthetic construct
  misc_feature 1..699: note = Variant of adenylate kinase
  source 1..699: mol_type = other DNA
atgcaccatcatcaccatcacgggggctccggcatgggggcatatctggtgttcttaggtccgccgggcgcgggaaaaggtacccaaggccgtcgcattcaggaaaagactggcatcccgcatattagcacgggcgatatcttccgtgacatcgtcgctaagcaaaacgatgaactggcctcgaaaattaaagaaatcatggagaaaggtgaactcgttccagatgaactgggtaatgcggtagtaaaacgccgcctgtcggagaaagactgcgaaaaaggctttattttggatggttatccgcgtaccgtggctcaagcggaatatctggatagttttcttgaatcccagaatcgccagttgacagccgccgtgctgttcaaagtccccgaagatgaagttgtgcaacgttgtacctctcgcctgatctgtccgaaatgcgggcgtatctacaacatgatttttctgccaccaaaagaagacgagctgtgtgacgattgcggtgtcggcttagtacagcgtgatgatgataaggaagaaacggtccgtcaccgcctgaaagtctaccttgagaagacccagccggtcattgactattatagtaagaaaggtattctcaaacgcgtagatgggtcgcaaggaatcgacaacgttgttgcagaagtcctggggattctgggttggagcgataagtaatga

SEQ ID NO: 1912 - protein, 231 aa, synthetic construct
  REGION 1..231: note = Variant of adenylate kinase
MHHHHHHGGSGMGAYLVFLGPPGAGKGTQGRRIQEKTGIPHISTGDIFRDIVAKQNDELASKIKEIMEKGELVPDELGNAVVKRRLSEKDCEKGFILDGYPRTVAQAEYLDSFLESQNRQLTAAVLFKVPEDEVVQRCTSRLICPKCGRIYNMIFLPPKEDELCDDCGVGLVQRDDDKEETVRHRLKVYLEKTQPVIDYYSKKGILKRVDGSQGIDNVVAEVLGILGWSDK

SEQ ID NO: 1913 - DNA, 699 bp, synthetic construct
  misc_feature 1..699: note = Variant of adenylate kinase
  source 1..699: mol_type = other DNA
atgcaccatcatcaccatcacgggggctccggcatgggggcatatctggtgttcttaggtccgccgggcgcgggaaaaggtacccaaggccgtcgcattcaggaaaagactggcatcccgcatattagcacgggcgatatcttccgtgacatcgtcgctaagcaaaacgatgaactggcctcgaaaattaaagaaatcatggagaaaggtgaactcgttccagatgaactgggtaatgcggtagtaaaacgccgcctgtcggagaaagactgcgaaaaaggctttattttggatggttatccgcgtaccgtggctcaagcggaatatctggatagttttcttgaatcccagaatcgccagttgacagccgccgtgctgttcaaagtccccgaagatgaagttgtgcaacgtttaacctctcgcctgatctgtccgaaatgccagcgtatctacaacatgatttttctgccaccaaaagaagacgagctgtgtgacgattgcggtgtcggcttagtacagcgtgatgatgataaggaagaaacggtccgtcaccgcctgaaagtctaccttgagaagacccagccggtcattgactattatagtaagaaaggtattctcaaacgcgtagatgggtcgcaaggaatcgacaacgttgttgcagaagtcctggggattctgggttggagcgataagtaatga

SEQ ID NO: 1914 - protein, 231 aa, synthetic construct
  REGION 1..231: note = Variant of adenylate kinase
MHHHHHHGGSGMGAYLVFLGPPGAGKGTQGRRIQEKTGIPHISTGDIFRDIVAKQNDELASKIKEIMEKGELVPDELGNAVVKRRLSEKDCEKGFILDGYPRTVAQAEYLDSFLESQNRQLTAAVLFKVPEDEVVQRLTSRLICPKCQRIYNMIFLPPKEDELCDDCGVGLVQRDDDKEETVRHRLKVYLEKTQPVIDYYSKKGILKRVDGSQGIDNVVAEVLGILGWSDK

SEQ ID NO: 1915 - DNA, 699 bp, synthetic construct
  misc_feature 1..699: note = Variant of adenylate kinase
  source 1..699: mol_type = other DNA
atgcaccatcatcaccatcacgggggctccggcatgggggcatatctggtgttcttaggtccgccgggcgcgggaaaaggtacccaaggccgtcgcattcaggaaaagactggcatcccgcatattagcacgggcgatatcttccgtgacatcgtcgctaagcaaaacgatgaactggcctcgaaaattaaagaaatcatggagaaaggtgaactcgttccagatgaactgggtaatgcggtagtaaaacgccgcctgtcggagaaagactgcgaaaaaggctttattttggatggttatccgcgtaccgtggctcaagcggaatatctggatagttttcttgaatcccagaatcgccagttgacagccgccgtggctttcaaagtccccgaagatgaagttgtgcaacgtttaacctctcgcctgatctgtccgaaatgcgggcgtatctacaacatgatttttctgccaccaaaagaagacgagctgtgtgacgattgcggtgtcggcttagtacagcgtgatgatgataaggaagaaacggtccgtcaccgcctgaaagtctaccttgagaagacccagccggtcattgactattatagtaagaaaggtattctcaaacgcgtagatgggtcgcaaggaatcgacaacgttgttgcagaagtcctggggattctgggttggagcgataagtaatga

SEQ ID NO: 1916 - protein, 231 aa, synthetic construct
  REGION 1..231: note = Variant of adenylate kinase
MHHHHHHGGSGMGAYLVFLGPPGAGKGTQGRRIQEKTGIPHISTGDIFRDIVAKQNDELASKIKEIMEKGELVPDELGNAVVKRRLSEKDCEKGFILDGYPRTVAQAEYLDSFLESQNRQLTAAVAFKVPEDEVVQRLTSRLICPKCGRIYNMIFLPPKEDELCDDCGVGLVQRDDDKEETVRHRLKVYLEKTQPVIDYYSKKGILKRVDGSQGIDNVVAEVLGILGWSDK

SEQ ID NO: 1917 - DNA, 699 bp, synthetic construct
  misc_feature 1..699: note = Variant of adenylate kinase
  source 1..699: mol_type = other DNA
atgcaccatcatcaccatcacgggggctccggcatgggggcatatctggtgttcttaggtccgccgggcgcgggaaaaggtacccaaggccgtcgcattcaggaaaagactggcatcccgcatattagcacgggcgatatcttccgtgacatcgcggctaagcaaaacgatgaactggcctcgaaaattaaagaaatcatggagaaaggtgaactcgttccagatgaactgggtaatgcggtagtaaaacgccgcctgtcggagaaagactgcgaaaaaggctttattttggatggttatccgcgtaccgtggctcaagcggaatatctggatagttttcttgaatcccagaatcgccagttgacagccgccgtgctgttcaaagtccccgaagatgaagttgtgcaacgtttaacctctcgcctgatctgtccgaaatgcgggcgtatctacaacatgatttttctgccaccaaaagaagacgagctgtgtgacgattgcggtgtcggcttagtacagcgtgatgatgataaggaagaaacggtccgtcaccgcctgaaagtctaccttgagaagacccagccggtcattgactattatagtaagaaaggtattctcaaacgcgtagatgggtcgcaaggaatcgacaacgttgttgcagaagtcctggggattctgggttggagcgataagtaatga

SEQ ID NO: 1918 - protein, 231 aa, synthetic construct
  REGION 1..231: note = Variant of adenylate kinase
MHHHHHHGGSGMGAYLVFLGPPGAGKGTQGRRIQEKTGIPHISTGDIFRDIAAKQNDELASKIKEIMEKGELVPDELGNAVVKRRLSEKDCEKGFILDGYPRTVAQAEYLDSFLESQNRQLTAAVLFKVPEDEVVQRLTSRLICPKCGRIYNMIFLPPKEDELCDDCGVGLVQRDDDKEETVRHRLKVYLEKTQPVIDYYSKKGILKRVDGSQGIDNVVAEVLGILGWSDK

SEQ ID NO: 1919 - DNA, 699 bp, synthetic construct
  misc_feature 1..699: note = Variant of adenylate kinase
  source 1..699: mol_type = other DNA
atgcaccatcatcaccatcacgggggctccggcatgggggcatatctggtgttcttaggtccgccgggcgcgggaaaaggtacccaaggccgtcgcattcaggaaaagactggcatcccgcatattagcacgggcgatatcttccgtgacatcgtcgctaagcaaaacgatgaactggcctcgaaaattaaagaacagatggagaaaggtgaactcgttccagatgaactgggtaatgcggtagtaaaacgccgcctgtcggagaaagactgcgaaaaaggctttattttggatggttatccgcgtaccgtggctcaagcggaatatctggatagttttcttgaatcccagaatcgccagttgacagccgccgtgctgttcaaagtccccgaagatgaagttgtgcaacgtttaacctctcgcctgatctgtccgaaatgcgggcgtatctacaacatgatttttctgccaccaaaagaagacgagctgtgtgacgattgcggtgtcggcttagtacagcgtgatgatgataaggaagaaacggtccgtcaccgcctgaaagtctaccttgagaagacccagccggtcattgactattatagtaagaaaggtattctcaaacgcgtagatgggtcgcaaggaatcgacaacgttgttgcagaagtcctggggattctgggttggagcgataagtaatga

SEQ ID NO: 1920 - protein, 231 aa, synthetic construct
  REGION 1..231: note = Variant of adenylate kinase
MHHHHHHGGSGMGAYLVFLGPPGAGKGTQGRRIQEKTGIPHISTGDIFRDIVAKQNDELASKIKEQMEKGELVPDELGNAVVKRRLSEKDCEKGFILDGYPRTVAQAEYLDSFLESQNRQLTAAVLFKVPEDEVVQRLTSRLICPKCGRIYNMIFLPPKEDELCDDCGVGLVQRDDDKEETVRHRLKVYLEKTQPVIDYYSKKGILKRVDGSQGIDNVVAEVLGILGWSDK

SEQ ID NO: 1921 - DNA, 699 bp, synthetic construct
  misc_feature 1..699: note = Variant of adenylate kinase
  source 1..699: mol_type = other DNA
atgcaccatcatcaccatcacgggggctccggcatgggggcatatctggtgttcttaggtccgccgggcgcgggaaaaggtacccaaggccgtcgcattcaggaaaagactggcatcccgcatattagcacgggcgatatcttccgtgacatcgtcgctaagcaaaacgatgaatgggcctcgaaaattaaagaaatcatggagaaaggtgaactcgttccagatgaactgggtaatgcggtagtaaaacgccgcctgtcggagaaagactgcgaaaaaggctttattttggatggttatccgcgtaccgtggctcaagcggaatatctggatagttttcttgaatcccagaatcgccagttgacagccgccgtgctgttcaaagtccccgaagatgaagttgtgcaacgtttaacctctcgcctgatctgtccgaaatgcgggcgtatctacaacatgatttttctgccaccaaaagaagacgagctgtgtgacgattgcggtgtcggcttagtacagcgtgatgatgataaggaagaaacggtccgtcaccgcctgaaagtctaccttgagaagacccagccggtcattgactattatagtaagaaaggtattctcaaacgcgtagatgggtcgcaaggaatcgacaacgttgttgcagaagtcctggggattctgggttggagcgataagtaatga

SEQ ID NO: 1922 - protein, 231 aa, synthetic construct
  REGION 1..231: note = Variant of adenylate kinase
MHHHHHHGGSGMGAYLVFLGPPGAGKGTQGRRIQEKTGIPHISTGDIFRDIVAKQNDEWASKIKEIMEKGELVPDELGNAVVKRRLSEKDCEKGFILDGYPRTVAQAEYLDSFLESQNRQLTAAVLFKVPEDEVVQRLTSRLICPKCGRIYNMIFLPPKEDELCDDCGVGLVQRDDDKEETVRHRLKVYLEKTQPVIDYYSKKGILKRVDGSQGIDNVVAEVLGILGWSDK

SEQ ID NO: 1923 - DNA, 699 bp, synthetic construct
  misc_feature 1..699: note = Variant of adenylate kinase
  source 1..699: mol_type = other DNA
atgcaccatcatcaccatcacgggggctccggcatgggggcatatctggtgttcttaggtccgccgggcgcgggaaaaggtacccaaggccgtcgcattcaggaaaagactggcatcccgcatattagcacgggcgatatcttccgtgacatcgtcgctaagcaaaacgatgaaggggcctcgaaaattaaagaaatcatggagaaaggtgaactcgttccagatgaactgggtaatgcggtagtaaaacgccgcctgtcggagaaagactgcgaaaaaggctttattttggatggttatccgcgtaccgtggctcaagcggaatatctggatagttttcttgaatcccagaatcgccagttgacagccgccgtgctgttcaaagtccccgaagatgaagttgtgcaacgtttaacctctcgcctgatctgtccgaaatgcgggcgtatctacaacatgatttttctgccaccaaaagaagacgagctgtgtgacgattgcggtgtcggcttagtacagcgtgatgatgataaggaagaaacggtccgtcaccgcctgaaagtctaccttgagaagacccagccggtcattgactattatagtaagaaaggtattctcaaacgcgtagatgggtcgcaaggaatcgacaacgttgttgcagaagtcctggggattctgggttggagcgataagtaatga

SEQ ID NO: 1924 - protein, 231 aa, synthetic construct
  REGION 1..231: note = Variant of adenylate kinase
MHHHHHHGGSGMGAYLVFLGPPGAGKGTQGRRIQEKTGIPHISTGDIFRDIVAKQNDEGASKIKEIMEKGELVPDELGNAVVKRRLSEKDCEKGFILDGYPRTVAQAEYLDSFLESQNRQLTAAVLFKVPEDEVVQRLTSRLICPKCGRIYNMIFLPPKEDELCDDCGVGLVQRDDDKEETVRHRLKVYLEKTQPVIDYYSKKGILKRVDGSQGIDNVVAEVLGILGWSDK

SEQ ID NO: 1925 - DNA, 699 bp, synthetic construct
  misc_feature 1..699: note = Variant of adenylate kinase
  source 1..699: mol_type = other DNA
atgcaccatcatcaccatcacgggggctccggcatgggggcatatctggtgttcttaggtccgccgggcgcgggaaaaggtacccaaggccgtcgcattcaggaaaagactggcatcccgcatattagcacgggcgatatcttccgtgacatcgtcgctaagcaaaacgatgaactggcctcgaaaattaaagaaatcatggagaaaggtgaactcgttccagatgaactgggtaatgcggtagtaaaacgccgcctgtcggagaaagactgcgaaaaaggctttattttggatggttatccgcgtaccgtggctcaagcggaatatctggatagttttcttgaatcccagaatcgccagttgacagccgccgtgctgttcaaagtccccgaagatgaagttgtgcaacgtttaacctctcgcctgatctgtccgaaatgcatgcgtatctacaacatgatttttctgccaccaaaagaagacgagctgtgtgacgattgcggtgtcggcttagtacagcgtgatgatgataaggaagaaacggtccgtcaccgcctgaaagtctaccttgagaagacccagccggtcattgactattatagtaagaaaggtattctcaaacgcgtagatgggtcgcaaggaatcgacaacgttgttgcagaagtcctggggattctgggttggagcgataagtaatga

SEQ ID NO: 1926 - protein, 231 aa, synthetic construct
  REGION 1..231: note = Variant of adenylate kinase
MHHHHHHGGSGMGAYLVFLGPPGAGKGTQGRRIQEKTGIPHISTGDIFRDIVAKQNDELASKIKEIMEKGELVPDELGNAVVKRRLSEKDCEKGFILDGYPRTVAQAEYLDSFLESQNRQLTAAVLFKVPEDEVVQRLTSRLICPKCMRIYNMIFLPPKEDELCDDCGVGLVQRDDDKEETVRHRLKVYLEKTQPVIDYYSKKGILKRVDGSQGIDNVVAEVLGILGWSDK

SEQ ID NO: 1927 - DNA, 699 bp, synthetic construct
  misc_feature 1..699: note = Variant of adenylate kinase
  source 1..699: mol_type = other DNA
atgcaccatcatcaccatcacgggggctccggcatgggggcatatctggtgttcttaggtccgccgggcgcgggaaaaggtacccaaggccgtcgcattcaggaaaagactggcatcccgcatattagcacgggcgatatcttccgtgacatcgtcgctaagcaaaacgatgaaatggcctcgaaaattaaagaaatcatggagaaaggtgaactcgttccagatgaactgggtaatgcggtagtaaaacgccgcctgtcggagaaagactgcgaaaaaggctttattttggatggttatccgcgtaccgtggctcaagcggaatatctggatagttttcttgaatcccagaatcgccagttgacagccgccgtgctgttcaaagtccccgaagatgaagttgtgcaacgtttaacctctcgcctgatctgtccgaaatgcgggcgtatctacaacatgatttttctgccaccaaaagaagacgagctgtgtgacgattgcggtgtcggcttagtacagcgtgatgatgataaggaagaaacggtccgtcaccgcctgaaagtctaccttgagaagacccagccggtcattgactattatagtaagaaaggtattctcaaacgcgtagatgggtcgcaaggaatcgacaacgttgttgcagaagtcctggggattctgggttggagcgataagtaatga

SEQ ID NO: 1928 - protein, 231 aa, synthetic construct
  REGION 1..231: note = Variant of adenylate kinase
MHHHHHHGGSGMGAYLVFLGPPGAGKGTQGRRIQEKTGIPHISTGDIFRDIVAKQNDEMASKIKEIMEKGELVPDELGNAVVKRRLSEKDCEKGFILDGYPRTVAQAEYLDSFLESQNRQLTAAVLFKVPEDEVVQRLTSRLICPKCGRIYNMIFLPPKEDELCDDCGVGLVQRDDDKEETVRHRLKVYLEKTQPVIDYYSKKGILKRVDGSQGIDNVVAEVLGILGWSDK

SEQ ID NO: 1929 - DNA, 699 bp, synthetic construct
  misc_feature 1..699: note = Variant of adenylate kinase
  source 1..699: mol_type = other DNA
atgcaccatcatcaccatcacgggggctccggcatgggggcatatctggtgttcttaggtccgccgggcgcgggaaaaggtacccaaggccgtcgcattcaggaaaagactggcatcccgcatattagcacgggcgatatcttccgtgacatcgtcgctaagcaaaacgatgaactggcctcgaaaattaaagaaatcatggagaaaggtgaactcgttccagatgaactgggtaatgcggtagtaaaacgccgcctgtcggagaaagactgcgaaaaaggctttattttggatggttatccgcgtaccgtggctcaagcggaatatctggatagttttcttgaatcccagaatcgccagttgacagccgccgtgctgttcaaagtccccgaagatgaagttagtcaacgtttaacctctcgcctgatctgtccgaaatgcgggcgtatctacaacatgatttttctgccaccaaaagaagacgagctgtgtgacgattgcggtgtcggcttagtacagcgtgatgatgataaggaagaaacggtccgtcaccgcctgaaagtctaccttgagaagacccagccggtcattgactattatagtaagaaaggtattctcaaacgcgtagatgggtcgcaaggaatcgacaacgttgttgcagaagtcctggggattctgggttggagcgataagtaatga

SEQ ID NO: 1930 - protein, 231 aa, synthetic construct
  REGION 1..231: note = Variant of adenylate kinase
MHHHHHHGGSGMGAYLVFLGPPGAGKGTQGRRIQEKTGIPHISTGDIFRDIVAKQNDELASKIKEIMEKGELVPDELGNAVVKRRLSEKDCEKGFILDGYPRTVAQAEYLDSFLESQNRQLTAAVLFKVPEDEVSQRLTSRLICPKCGRIYNMIFLPPKEDELCDDCGVGLVQRDDDKEETVRHRLKVYLEKTQPVIDYYSKKGILKRVDGSQGIDNVVAEVLGILGWSDK

SEQ ID NO: 1931 - DNA, 699 bp, synthetic construct
  misc_feature 1..699: note = Variant of adenylate kinase
  source 1..699: mol_type = other DNA
atgcaccatcatcaccatcacgggggctccggcatgggggcatatctggtgttcttaggtccgccgggcgcgggaaaaggtacccaaggccgtcgcattcaggaaaagactggcatcccgcatattagcacgggcgatatcttccgtgacatcgtcgctaagcaaaacgatgaactggcctcgaaaattaaagaaatcatgttgaaaggtgaactcgttccagatgaactgggtaatgcggtagtaaaacgccgcctgtcggagaaagactgcgaaaaaggctttattttggatggttatccgcgtaccgtggctcaagcggaatatctggatagttttcttgaatcccagaatcgccagttgacagccgccgtgctgttcaaagtccccgaagatgaagttgtgcaacgtttaacctctcgcctgatctgtccgaaatgcgggcgtatctacaacatgatttttctgccaccaaaagaagacgagctgtgtgacgattgcggtgtcggcttagtacagcgtgatgatgataaggaagaaacggtccgtcaccgcctgaaagtctaccttgagaagacccagccggtcattgactattatagtaagaaaggtattctcaaacgcgtagatgggtcgcaaggaatcgacaacgttgttgcagaagtcctggggattctgggttggagcgataagtaatga

SEQ ID NO: 1932 - protein, 231 aa, synthetic construct
  REGION 1..231: note = Variant of adenylate kinase
MHHHHHHGGSGMGAYLVFLGPPGAGKGTQGRRIQEKTGIPHISTGDIFRDIVAKQNDELASKIKEIMLKGELVPDELGNAVVKRRLSEKDCEKGFILDGYPRTVAQAEYLDSFLESQNRQLTAAVLFKVPEDEVVQRLTSRLICPKCGRIYNMIFLPPKEDELCDDCGVGLVQRDDDKEETVRHRLKVYLEKTQPVIDYYSKKGILKRVDGSQGIDNVVAEVLGILGWSDK

SEQ ID NO: 1933 - DNA, 699 bp, synthetic construct
  misc_feature 1..699: note = Variant of adenylate kinase
  source 1..699: mol_type = other DNA
atgcaccatcatcaccatcacgggggctccggcatgggggcatatctggtgttcttaggtccgccgggcgcgggaaaaggtacccaaggccgtcgcattcaggaaaagactggcatcccgcatattagcacgggcgatatcttccgtgacatcgtcgctaagcaaaacgatgaactggcctcgaaaattaaagaaatcatggagaaaggtgaactcgttccagatgaactgggtaatgcggtagtaaaacgccgcctgtcggagaaagactgcgaaaaaggctttattttggatggttatccgcgtaccgtggctcaagcggaatatctggatagttttcttgaatcccagaatcgccagttgacagccgccgtgctgttcaaagtccccgaagatgaagttgtgcaacgtttagcgtctcgcctgatctgtccgaaatgcgggcgtatctacaacatgatttttctgccaccaaaagaagacgagctgtgtgacgattgcggtgtcggcttagtacagcgtgatgatgataaggaagaaacggtccgtcaccgcctgaaagtctaccttgagaagacccagccggtcattgactattatagtaagaaaggtattctcaaacgcgtagatgggtcgcaaggaatcgacaacgttgttgcagaagtcctggggattctgggttggagcgataagtaatga

SEQ ID NO: 1934 - protein, 231 aa, synthetic construct
  REGION 1..231: note = Variant of adenylate kinase
MHHHHHHGGSGMGAYLVFLGPPGAGKGTQGRRIQEKTGIPHISTGDIFRDIVAKQNDELASKIKEIMEKGELVPDELGNAVVKRRLSEKDCEKGFILDGYPRTVAQAEYLDSFLESQNRQLTAAVLFKVPEDEVVQRLASRLICPKCGRIYNMIFLPPKEDELCDDCGVGLVQRDDDKEETVRHRLKVYLEKTQPVIDYYSKKGILKRVDGSQGIDNVVAEVLGILGWSDK

SEQ ID NO: 1935 - DNA, 699 bp, synthetic construct
  misc_feature 1..699: note = Variant of adenylate kinase
  source 1..699: mol_type = other DNA
atgcaccatcatcaccatcacgggggctccggcatgggggcatatctggtgttcttaggtccgccgggcgcgggaaaaggtacccaaggccgtcgcattcaggaaaagactggcatcccgcatattagcacgggcgatatcttccgtgacatcgtcgctaagcaaaacgatgaactggcctcgaaaattaaagaaatcatggagaaaggtgaactcgttccagatgaactgggtaatgcggtagtaaaacgccgcctgtcggagaaagactgcgaaaaaggctttattttggatggttatccgcgtaccgtggctcaagcggaatatctggatagttttcttgaatcccagaatcgccagttgacagccgccgtgctgttcaaagtccccgaagatgaagttgtgcaacgtttaacctctcgcctgatctgtccgaaatgcgggcgtatctacaacatgatttttctgccaccaaaagaagacgagctgtgtgacgattgcggtgtcggcttagtacagcgtgatgatgataaggaagaaacggtccgtattcgcctgaaagtctaccttgagaagacccagccggtcattgactattatagtaagaaaggtattctcaaacgcgtagatgggtcgcaaggaatcgacaacgttgttgcagaagtcctggggattctgggttggagcgataagtaatga

SEQ ID NO: 1936 - protein, 231 aa, synthetic construct
  REGION 1..231: note = Variant of adenylate kinase
MHHHHHHGGSGMGAYLVFLGPPGAGKGTQGRRIQEKTGIPHISTGDIFRDIVAKQNDELASKIKEIMEKGELVPDELGNAVVKRRLSEKDCEKGFILDGYPRTVAQAEYLDSFLESQNRQLTAAVLFKVPEDEVVQRLTSRLICPKCGRIYNMIFLPPKEDELCDDCGVGLVQRDDDKEETVRIRLKVYLEKTQPVIDYYSKKGILKRVDGSQGIDNVVAEVLGILGWSDK

SEQ ID NO: 1937 - DNA, 699 bp, synthetic construct
  misc_feature 1..699: note = Variant of adenylate kinase
  source 1..699: mol_type = other DNA
atgcaccatcatcaccatcacgggggctccggcatgggggcatatctggtgttcttaggtccgccgggcgcgggaaaaggtacccaaggccgtcgcattcaggaaaagactggcatcccgcatattagcacgggcgatatcttccgtgacatcgtcgctaagcaaaacgatgaactggcctcgaaaattaaagaaatcatgaggaaaggtgaactcgttccagatgaactgggtaatgcggtagtaaaacgccgcctgtcggagaaagactgcgaaaaaggctttattttggatggttatccgcgtaccgtggctcaagcggaatatctggatagttttcttgaatcccagaatcgccagttgacagccgccgtgctgttcaaagtccccgaagatgaagttgtgcaacgtttaacctctcgcctgatctgtccgaaatgcgggcgtatctacaacatgatttttctgccaccaaaagaagacgagctgtgtgacgattgcggtgtcggcttagtacagcgtgatgatgataaggaagaaacggtccgtcaccgcctgaaagtctaccttgagaagacccagccggtcattgactattatagtaagaaaggtattctcaaacgcgtagatgggtcgcaaggaatcgacaacgttgttgcagaagtcctggggattctgggttggagcgataagtaatga

SEQ ID NO: 1938 - protein, 231 aa, synthetic construct
  REGION 1..231: note = Variant of adenylate kinase
MHHHHHHGGSGMGAYLVFLGPPGAGKGTQGRRIQEKTGIPHISTGDIFRDIVAKQNDELASKIKEIMRKGELVPDELGNAVVKRRLSEKDCEKGFILDGYPRTVAQAEYLDSFLESQNRQLTAAVLFKVPEDEVVQRLTSRLICPKCGRIYNMIFLPPKEDELCDDCGVGLVQRDDDKEETVRHRLKVYLEKTQPVIDYYSKKGILKRVDGSQGIDNVVAEVLGILGWSDK

SEQ ID NO: 1939 - DNA, 699 bp, synthetic construct
  misc_feature 1..699: note = Variant of adenylate kinase
  source 1..699: mol_type = other DNA
atgcaccatcatcaccatcacgggggctccggcatgggggcatatctggtgttcttaggtccgccgggcgcgggaaaaggtacccaaggccgtcgcattcaggaaaagactggcatcccgcatattagcacgggcgatatcttccgtgacatcgtcgctaagcaaaacgatgaactggcctcgaaaattaaagaaatcatggagaaaggtgaactcgttccagatgaactgggtaatgcggtagtaaaacgccgcctgtcggagaaagactgcgaaaaaggctttattttggatggttatccgcgtaccgtggctcaagcggaatatctggatagttttcttgaatcccagaatcgccagttgacagccgccgtgctgttcaaagtccccgaagatgaagttgtgcaacgtttaacctctcgcctgatctgtccgaaatgcgggcgtatctacaacatgatttttctgccaccaaaagaagacgagctgtgtgacgattgcggtgtcggcttagtacagcgtgatgatgataaggaagaaacggtccgtgttcgcctgaaagtctaccttgagaagacccagccggtcattgactattatagtaagaaaggtattctcaaacgcgtagatgggtcgcaaggaatcgacaacgttgttgcagaagtcctggggattctgggttggagcgataagtaatga

SEQ ID NO: 1940 - protein, 231 aa, synthetic construct
  REGION 1..231: note = Variant of adenylate kinase
MHHHHHHGGSGMGAYLVFLGPPGAGKGTQGRRIQEKTGIPHISTGDIFRDIVAKQNDELASKIKEIMEKGELVPDELGNAVVKRRLSEKDCEKGFILDGYPRTVAQAEYLDSFLESQNRQLTAAVLFKVPEDEVVQRLTSRLICPKCGRIYNMIFLPPKEDELCDDCGVGLVQRDDDKEETVRVRLKVYLEKTQPVIDYYSKKGILKRVDGSQGIDNVVAEVLGILGWSDK

SEQ ID NO: 1941 - DNA, 699 bp, synthetic construct
  misc_feature 1..699: note = Variant of adenylate kinase
  source 1..699: mol_type = other DNA
atgcaccatcatcaccatcacgggggctccggcatgggggcatatctggtgttcttaggtccgccgggcgcgggaaaaggtacccaaggccgtcgcattcaggaaaagactggcatcccgcatattagcacgggcgatatcttccgtgacatcgtcgctaagcaaaacgatgaactggcctcgaaaattaaagaatctatggagaaaggtgaactcgttccagatgaactgggtaatgcggtagtaaaacgccgcctgtcggagaaagactgcgaaaaaggctttattttggatggttatccgcgtaccgtggctcaagcggaatatctggatagttttcttgaatcccagaatcgccagttgacagccgccgtgctgttcaaagtccccgaagatgaagttgtgcaacgtttaacctctcgcctgatctgtccgaaatgcgggcgtatctacaacatgatttttctgccaccaaaagaagacgagctgtgtgacgattgcggtgtcggcttagtacagcgtgatgatgataaggaagaaacggtccgtcaccgcctgaaagtctaccttgagaagacccagccggtcattgactattatagtaagaaaggtattctcaaacgcgtagatgggtcgcaaggaatcgacaacgttgttgcagaagtcctggggattctgggttggagcgataagtaatga

SEQ ID NO: 1942 - protein, 231 aa, synthetic construct
  REGION 1..231: note = Variant of adenylate kinase
MHHHHHHGGSGMGAYLVFLGPPGAGKGTQGRRIQEKTGIPHISTGDIFRDIVAKQNDELASKIKESMEKGELVPDELGNAVVKRRLSEKDCEKGFILDGYPRTVAQAEYLDSFLESQNRQLTAAVLFKVPEDEVVQRLTSRLICPKCGRIYNMIFLPPKEDELCDDCGVGLVQRDDDKEETVRHRLKVYLEKTQPVIDYYSKKGILKRVDGSQGIDNVVAEVLGILGWSDK

SEQ ID NO: 1943 - DNA, 699 bp, synthetic construct
  misc_feature 1..699: note = Variant of adenylate kinase
  source 1..699: mol_type = other DNA
atgcaccatcatcaccatcacgggggctccggcatgggggcatatctggtgttcttaggtccgccgggcgcgggaaaaggtacccaaggccgtcgcattcaggaaaagactggcatcccgcatattagcacgggcgatatcttccgtgacatcgtcgctaagcaaaacgatgaactggcctcgaaaattaaagaaatcatgcagaaaggtgaactcgttccagatgaactgggtaatgcggtagtaaaacgccgcctgtcggagaaagactgcgaaaaaggctttattttggatggttatccgcgtaccgtggctcaagcggaatatctggatagttttcttgaatcccagaatcgccagttgacagccgccgtgctgttcaaagtccccgaagatgaagttgtgcaacgtttaacctctcgcctgatctgtccgaaatgcgggcgtatctacaacatgatttttctgccaccaaaagaagacgagctgtgtgacgattgcggtgtcggcttagtacagcgtgatgatgataaggaagaaacggtccgtcaccgcctgaaagtctaccttgagaagacccagccggtcattgactattatagtaagaaaggtattctcaaacgcgtagatgggtcgcaaggaatcgacaacgttgttgcagaagtcctggggattctgggttggagcgataagtaatga

SEQ ID NO: 1944 - protein, 231 aa, synthetic construct
  REGION 1..231: note = Variant of adenylate kinase
MHHHHHHGGSGMGAYLVFLGPPGAGKGTQGRRIQEKTGIPHISTGDIFRDIVAKQNDELASKIKEIMQKGELVPDELGNAVVKRRLSEKDCEKGFILDGYPRTVAQAEYLDSFLESQNRQLTAAVLFKVPEDEVVQRLTSRLICPKCGRIYNMIFLPPKEDELCDDCGVGLVQRDDDKEETVRHRLKVYLEKTQPVIDYYSKKGILKRVDGSQGIDNVVAEVLGILGWSDK

SEQ ID NO: 1945 - DNA, 699 bp, synthetic construct
  misc_feature 1..699: note = Variant of adenylate kinase
  source 1..699: mol_type = other DNA
atgcaccatcatcaccatcacgggggctccggcatgggggcatatctggtgttcttaggtccgccgggcgcgggaaaaggtacccaaggccgtcgcattcaggaaaagactggcatcccgcatattagcacgggcgatatcttccgtgacatcgtcgctaagcaaaacgatgaactggcctcgaaaattaaagaaatcatggagaaaggtgaactcgttccagatgaactgggtaatgcgattgtaaaacgccgcctgtcggagaaagactgcgaaaaaggctttattttggatggttatccgcgtaccgtggctcaagcggaatatctggatagttttcttgaatcccagaatcgccagttgacagccgccgtgctgttcaaagtccccgaagatgaagttgtgcaacgtttaacctctcgcctgatctgtccgaaatgcgggcgtatctacaacatgatttttctgccaccaaaagaagacgagctgtgtgacgattgcggtgtcggcttagtacagcgtgatgatgataaggaagaaacggtccgtcaccgcctgaaagtctaccttgagaagacccagccggtcattgactattatagtaagaaaggtattctcaaacgcgtagatgggtcgcaaggaatcgacaacgttgttgcagaagtcctggggattctgggttggagcgataagtaatga

SEQ ID NO: 1946 - protein, 231 aa, synthetic construct
  REGION 1..231: note = Variant of adenylate kinase
MHHHHHHGGSGMGAYLVFLGPPGAGKGTQGRRIQEKTGIPHISTGDIFRDIVAKQNDELASKIKEIMEKGELVPDELGNAIVKRRLSEKDCEKGFILDGYPRTVAQAEYLDSFLESQNRQLTAAVLFKVPEDEVVQRLTSRLICPKCGRIYNMIFLPPKEDELCDDCGVGLVQRDDDKEETVRHRLKVYLEKTQPVIDYYSKKGILKRVDGSQGIDNVVAEVLGILGWSDK

SEQ ID NO: 1947 - DNA, 699 bp, synthetic construct
  misc_feature 1..699: note = Variant of adenylate kinase
  source 1..699: mol_type = other DNA
atgcaccatcatcaccatcacgggggctccggcatgggggcatatctggtgttcttaggtccgccgggcgcgggaaaaggtacccaaggccgtcgcattcaggaaaagactggcatcccgcatattagcacgggcgatatcttccgtgacatcgtcgctaagcaaaacgatgaactggcctcgaaaattaaagaaatcatggttaaaggtgaactcgttccagatgaactgggtaatgcggtagtaaaacgccgcctgtcggagaaagactgcgaaaaaggctttattttggatggttatccgcgtaccgtggctcaagcggaatatctggatagttttcttgaatcccagaatcgccagttgacagccgccgtgctgttcaaagtccccgaagatgaagttgtgcaacgtttaacctctcgcctgatctgtccgaaatgcgggcgtatctacaacatgatttttctgccaccaaaagaagacgagctgtgtgacgattgcggtgtcggcttagtacagcgtgatgatgataaggaagaaacggtccgtcaccgcctgaaagtctaccttgagaagacccagccggtcattgactattatagtaagaaaggtattctcaaacgcgtagatgggtcgcaaggaatcgacaacgttgttgcagaagtcctggggattctgggttggagcgataagtaatga

SEQ ID NO: 1948 - protein, 231 aa, synthetic construct
  REGION 1..231: note = Variant of adenylate kinase
MHHHHHHGGSGMGAYLVFLGPPGAGKGTQGRRIQEKTGIPHISTGDIFRDIVAKQNDELASKIKEIMVKGELVPDELGNAVVKRRLSEKDCEKGFILDGYPRTVAQAEYLDSFLESQNRQLTAAVLFKVPEDEVVQRLTSRLICPKCGRIYNMIFLPPKEDELCDDCGVGLVQRDDDKEETVRHRLKVYLEKTQPVIDYYSKKGILKRVDGSQGIDNVVAEVLGILGWSDK

SEQ ID NO: 1949 - DNA, 699 bp, synthetic construct
  misc_feature 1..699: note = Variant of adenylate kinase
  source 1..699: mol_type = other DNA
atgcaccatcatcaccatcacgggggctccggcatgggggcatatctggtgttcttaggtccgccgggcgcgggaaaaggtacccaaggccgtcgcattcaggaaaagactggcatcccgcatattagcacgggcgatatcttccgtgacatcgtcgctaagcaaaacgatgaactggcctcgaaaattaaatttatcatggagaaaggtgaactcgttccagatgaactgggtaatgcggtagtaaaacgccgcctgtcggagaaagactgcgaaaaaggctttattttggatggttatccgcgtaccgtggctcaagcggaatatctggatagttttcttgaatcccagaatcgccagttgacagccgccgtgctgttcaaagtccccgaagatgaagttgtgcaacgtttaacctctcgcctgatctgtccgaaatgcgggcgtatctacaacatgatttttctgccaccaaaagaagacgagctgtgtgacgattgcggtgtcggcttagtacagcgtgatgatgataaggaagaaacggtccgtcaccgcctgaaagtctaccttgagaagacccagccggtcattgactattatagtaagaaaggtattctcaaacgcgtagatgggtcgcaaggaatcgacaacgttgttgcagaagtcctggggattctgggttggagcgataagtaatga

SEQ ID NO: 1950 - protein, 231 aa, synthetic construct
  REGION 1..231: note = Variant of adenylate kinase
MHHHHHHGGSGMGAYLVFLGPPGAGKGTQGRRIQEKTGIPHISTGDIFRDIVAKQNDELASKIKFIMEKGELVPDELGNAVVKRRLSEKDCEKGFILDGYPRTVAQAEYLDSFLESQNRQLTAAVLFKVPEDEVVQRLTSRLICPKCGRIYNMIFLPPKEDELCDDCGVGLVQRDDDKEETVRHRLKVYLEKTQPVIDYYSKKGILKRVDGSQGIDNVVAEVLGILGWSDK

SEQ ID NO: 1951 - DNA, 699 bp, synthetic construct
  misc_feature 1..699: note = Variant of adenylate kinase
  source 1..699: mol_type = other DNA
atgcaccatcatcaccatcacgggggctccggcatgggggcatatctggtgttcttaggtccgccgggcgcgggaaaaggtacccaaggccgtcgcattcaggaaaagactggcatcccgcatattagcacgggcgatatcttccgtgacatcgtcgctaagcaaaacgatgaactggcctcgaaaattaaagaaatcatggagaaaggtgaactcgttccagatgaactgggtaatgcggtagtaaaacgccgcctgtcggagaaagactgcgaaaaaggctttattttggatggttatccgcgtaccgtggctcaagcggaatatctggatagttttcttgaatcccagaatcgccagttgacagccgccgtgctgttcaaagtccccgaagatgaagttgtgcaacgtttaacctctcgcctgatctgtccgaaatgcgggcgtatctacaactcgatttttctgccaccaaaagaagacgagctgtgtgacgattgcggtgtcggcttagtacagcgtgatgatgataaggaagaaacggtccgtcaccgcctgaaagtctaccttgagaagacccagccggtcattgactattatagtaagaaaggtattctcaaacgcgtagatgggtcgcaaggaatcgacaacgttgttgcagaagtcctggggattctgggttggagcgataagtaatga

SEQ ID NO: 1952 - protein, 231 aa, synthetic construct
  REGION 1..231: note = Variant of adenylate kinase
MHHHHHHGGSGMGAYLVFLGPPGAGKGTQGRRIQEKTGIPHISTGDIFRDIVAKQNDELASKIKEIMEKGELVPDELGNAVVKRRLSEKDCEKGFILDGYPRTVAQAEYLDSFLESQNRQLTAAVLFKVPEDEVVQRLTSRLICPKCGRIYNSIFLPPKEDELCDDCGVGLVQRDDDKEETVRHRLKVYLEKTQPVIDYYSKKGILKRVDGSQGIDNVVAEVLGILGWSDK

SEQ ID NO: 1953 - DNA, 699 bp, synthetic construct
  misc_feature 1..699: note = Variant of adenylate kinase
  source 1..699: mol_type = other DNA
atgcaccatcatcaccatcacgggggctccggcatgggggcatatctggtgttcttaggtccgccgggcgcgggaaaaggtacccaaggccgtcgcattcaggaaaagactggcatcccgcatattagcacgggcgatatcttccgtgacatcgtcgctaagcaaaacgatgaactggcctcgaaaattaaagaaatcatggagaaaggtgaactcgttccagatgaactgggtaatgcggtagtaaaacgccgcctgtcggagaaagactgcgaaaaaggctttattttggatggttatccgcgtaccgtggctcaagcggaatatctggatagttttcttgaatcccagaatcgccagttgacagccgccgtggtgttcaaagtccccgaagatgaagttgtgcaacgtttaacctctcgcctgatctgtccgaaatgcgggcgtatctacaacatgatttttctgccaccaaaagaagacgagctgtgtgacgattgcggtgtcggcttagtacagcgtgatgatgataaggaagaaacggtccgtcaccgcctgaaagtctaccttgagaagacccagccggtcattgactattatagtaagaaaggtattctcaaacgcgtagatgggtcgcaaggaatcgacaacgttgttgcagaagtcctggggattctgggttggagcgataagtaatga

SEQ ID NO: 1954 - protein, 231 aa, synthetic construct
  REGION 1..231: note = Variant of adenylate kinase
MHHHHHHGGSGMGAYLVFLGPPGAGKGTQGRRIQEKTGIPHISTGDIFRDIVAKQNDELASKIKEIMEKGELVPDELGNAVVKRRLSEKDCEKGFILDGYPRTVAQAEYLDSFLESQNRQLTAAVVFKVPEDEVVQRLTSRLICPKCGRIYNMIFLPPKEDELCDDCGVGLVQRDDDKEETVRHRLKVYLEKTQPVIDYYSKKGILKRVDGSQGIDNVVAEVLGILGWSDK

SEQ ID NO: 1955 - DNA, 699 bp, synthetic construct
  misc_feature 1..699: note = Variant of adenylate kinase
  source 1..699: mol_type = other DNA
atgcaccatcatcaccatcacgggggctccggcatgggggcatatctggtgttcttaggtccgccgggcgcgggaaaaggtacccaaggccgtcgcattcaggaaaagactggcatcccgcatattagcacgggcgatatcttccgtgacatcgtcgctaagcaaaacgatgaactggcctcgaaaattaaagaaatcatggctaaaggtgaactcgttccagatgaactgggtaatgcggtagtaaaacgccgcctgtcggagaaagactgcgaaaaaggctttattttggatggttatccgcgtaccgtggctcaagcggaatatctggatagttttcttgaatcccagaatcgccagttgacagccgccgtgctgttcaaagtccccgaagatgaagttgtgcaacgtttaacctctcgcctgatctgtccgaaatgcgggcgtatctacaacatgatttttctgccaccaaaagaagacgagctgtgtgacgattgcggtgtcggcttagtacagcgtgatgatgataaggaagaaacggtccgtcaccgcctgaaagtctaccttgagaagacccagccggtcattgactattatagtaagaaaggtattctcaaacgcgtagatgggtcgcaaggaatcgacaacgttgttgcagaagtcctggggattctgggttggagcgataagtaatga

SEQ ID NO: 1956 - protein, 231 aa, synthetic construct
  REGION 1..231: note = Variant of adenylate kinase
MHHHHHHGGSGMGAYLVFLGPPGAGKGTQGRRIQEKTGIPHISTGDIFRDIVAKQNDELASKIKEIMAKGELVPDELGNAVVKRRLSEKDCEKGFILDGYPRTVAQAEYLDSFLESQNRQLTAAVLFKVPEDEVVQRLTSRLICPKCGRIYNMIFLPPKEDELCDDCGVGLVQRDDDKEETVRHRLKVYLEKTQPVIDYYSKKGILKRVDGSQGIDNVVAEVLGILGWSDK

SEQ ID NO: 1957 - DNA, 699 bp, synthetic construct
  misc_feature 1..699: note = Variant of adenylate kinase
  source 1..699: mol_type = other DNA
atgcaccatcatcaccatcacgggggctccggcatgggggcatatctggtgttcttaggtccgccgggcgcgggaaaaggtacccaaggccgtcgcattcaggaaaagactggcatcccgcatattagcacgggcgatatcttccgtgacatcgtcgctaagcaaaacgatgaactggcctcgaaaattaaagaaactatggagaaaggtgaactcgttccagatgaactgggtaatgcggtagtaaaacgccgcctgtcggagaaagactgcgaaaaaggctttattttggatggttatccgcgtaccgtggctcaagcggaatatctggatagttttcttgaatcccagaatcgccagttgacagccgccgtgctgttcaaagtccccgaagatgaagttgtgcaacgtttaacctctcgcctgatctgtccgaaatgcgggcgtatctacaacatgatttttctgccaccaaaagaagacgagctgtgtgacgattgcggtgtcggcttagtacagcgtgatgatgataaggaagaaacggtccgtcaccgcctgaaagtctaccttgagaagacccagccggtcattgactattatagtaagaaaggtattctcaaacgcgtagatgggtcgcaaggaatcgacaacgttgttgcagaagtcctggggattctgggttggagcgataagtaatga

SEQ ID NO: 1958 - protein, 231 aa, synthetic construct
  REGION 1..231: note = Variant of adenylate kinase
MHHHHHHGGSGMGAYLVFLGPPGAGKGTQGRRIQEKTGIPHISTGDIFRDIVAKQNDELASKIKETMEKGELVPDELGNAVVKRRLSEKDCEKGFILDGYPRTVAQAEYLDSFLESQNRQLTAAVLFKVPEDEVVQRLTSRLICPKCGRIYNMIFLPPKEDELCDDCGVGLVQRDDDKEETVRHRLKVYLEKTQPVIDYYSKKGILKRVDGSQGIDNVVAEVLGILGWSDK

SEQ ID NO: 1959 - DNA, 699 bp, synthetic construct
  misc_feature 1..699: note = Variant of adenylate kinase
  source 1..699: mol_type = other DNA
atgcaccatcatcaccatcacgggggctccggcatgggggcatatctggtgttcttaggtccgccgggcgcgggaaaaggtacccaaggccgtcgcattcaggaaaagactggcatcccgcatattagcacgggcgatatcttccgttgtatcgtcgctaagcaaaacgatgaactggcctcgaaaattaaagaaatcatggagaaaggtgaactcgttccagatgaactgggtaatgcggtagtaaaacgccgcctgtcggagaaagactgcgaaaaaggctttattttggatggttatccgcgtaccgtggctcaagcggaatatctggatagttttcttgaatcccagaatcgccagttgacagccgccgtgctgttcaaagtccccgaagatgaagttgtgcaacgtttaacctctcgcctgatctgtccgaaatgcgggcgtatctacaacatgatttttctgccaccaaaagaagacgagctgtgtgacgattgcggtgtcggcttagtacagcgtgatgatgataaggaagaaacggtccgtcaccgcctgaaagtctaccttgagaagacccagccggtcattgactattatagtaagaaaggtattctcaaacgcgtagatgggtcgcaaggaatcgacaacgttgttgcagaagtcctggggattctgggttggagcgataagtaatga

SEQ ID NO: 1960 - protein, 231 aa, synthetic construct
  REGION 1..231: note = Variant of adenylate kinase
MHHHHHHGGSGMGAYLVFLGPPGAGKGTQGRRIQEKTGIPHISTGDIFRCIVAKQNDELASKIKEIMEKGELVPDELGNAVVKRRLSEKDCEKGFILDGYPRTVAQAEYLDSFLESQNRQLTAAVLFKVPEDEVVQRLTSRLICPKCGRIYNMIFLPPKEDELCDDCGVGLVQRDDDKEETVRHRLKVYLEKTQPVIDYYSKKGILKRVDGSQGIDNVVAEVLGILGWSDK

SEQ ID NO: 1961 - DNA, 699 bp, synthetic construct
  misc_feature 1..699: note = Variant of adenylate kinase
  source 1..699: mol_type = other DNA
atgcaccatcatcaccatcacgggggctccggcatgggggcatatctggtgttcttaggtccgccgggcgcgggaaaaggtacccaaggccgtcgcattcaggaaaagactggcatcccgcatattagcacgggcgatatcttccgtgacatcgtcgctaagcaaaacgatgaactggcctcgaaaattaaagaaatcatggagaaaggtgaactcgttccagatgaactgggtaatgcggtagtaaaacgccgcctgtcggagaaagactgcgaaaaaggctttattttggatggttatccgcgtaccgtggctcaagcggaatatctggatagttttcttgaatcccagaatcgccagttgacagccgccgtgctgttcaaagtccccgaagatgaagttgtgcaacgtgtgacctctcgcctgatctgtccgaaatgcgggcgtatctacaacatgatttttctgccaccaaaagaagacgagctgtgtgacgattgcggtgtcggcttagtacagcgtgatgatgataaggaagaaacggtccgtcaccgcctgaaagtctaccttgagaagacccagccggtcattgactattatagtaagaaaggtattctcaaacgcgtagatgggtcgcaaggaatcgacaacgttgttgcagaagtcctggggattctgggttggagcgataagtaatga

SEQ ID NO: 1962 - protein, 231 aa, synthetic construct
  REGION 1..231: note = Variant of adenylate kinase
MHHHHHHGGSGMGAYLVFLGPPGAGKGTQGRRIQEKTGIPHISTGDIFRDIVAKQNDELASKIKEIMEKGELVPDELGNAVVKRRLSEKDCEKGFILDGYPRTVAQAEYLDSFLESQNRQLTAAVLFKVPEDEVVQRVTSRLICPKCGRIYNMIFLPPKEDELCDDCGVGLVQRDDDKEETVRHRLKVYLEKTQPVIDYYSKKGILKRVDGSQGIDNVVAEVLGILGWSDK

SEQ ID NO: 1963 - DNA, 699 bp, synthetic construct
  misc_feature 1..699: note = Variant of adenylate kinase
  source 1..699: mol_type = other DNA
atgcaccatcatcaccatcacgggggctccggcatgggggcatatctggtgttcttaggtccgccgggcgcgggaaaaggtacccaaggccgtcgcattcaggaaaagactggcatcccgcatattagcacgggcgatatcttccgtgacatcgtcgctaagcaaaacgatgaactggcctcgaaaattaaagaaatcatggagaaaggtgaactcgttccagatgaactgggtaatgcggtagtaaaacgccgcctgtcggagaaagactgcgaaaaaggctttattttggatggttatccgcgtaccgtggctcaagcggaatatctggatagttttcttgaatcccagaatcgccagttgacagccgccgtgctgttcaaagtccccgaagatgaagttgtgcaacgtttaacctctcgcctgatctgtccgaaatgcgggcgtatctacaacatgatttttctgccaccaaaagaagacgagctgtgtgacgattgcggtgtcggcttagtacagcgtgatgatgataaggaagaaattgtccgtcaccgcctgaaagtctaccttgagaagacccagccggtcattgactattatagtaagaaaggtattctcaaacgcgtagatgggtcgcaaggaatcgacaacgttgttgcagaagtcctggggattctgggttggagcgataagtaatga

SEQ ID NO: 1964 - protein, 231 aa, synthetic construct
  REGION 1..231: note = Variant of adenylate kinase
MHHHHHHGGSGMGAYLVFLGPPGAGKGTQGRRIQEKTGIPHISTGDIFRDIVAKQNDELASKIKEIMEKGELVPDELGNAVVKRRLSEKDCEKGFILDGYPRTVAQAEYLDSFLESQNRQLTAAVLFKVPEDEVVQRLTSRLICPKCGRIYNMIFLPPKEDELCDDCGVGLVQRDDDKEEIVRHRLKVYLEKTQPVIDYYSKKGILKRVDGSQGIDNVVAEVLGILGWSDK

SEQ ID NO: 1965 - DNA, 699 bp, synthetic construct
  misc_feature 1..699: note = Variant of adenylate kinase
  source 1..699: mol_type = other DNA
atgcaccatcatcaccatcacgggggctccggcatgggggcatatctggtgttcttaggtccgccgggcgcgggaaaaggtacccaaggccgtcgcattcaggaaaagactggcatcccgcatattagcacgggcgatatcttccgtgacatcgtcgctaagcaaaacgatgaactggcctcgaaaattaaagaaatcatggagaaaggtgaactcgttccagatgaactgggtaatgcggtagtaaaacgccgcctgtcggagaaagactgcgaaaaaggctttattttggatggttatccgcgtaccgtggctcaagcggaatatctggatagttttcttgaatcccagaatcgccagttgacagccgccgtgctgttcaaagtccccgaagatgaagttgtgcaacgtttaacctctcgcctgatctgtccgaaatgcgggcgtatctacaacatgatttttctgccaccaaaagaagacgagctgtgtgacgattgcggtgtcggcttagtacagcgtgatgatgataaggaagaaacggtccgtcaccgcctgaaagtctaccttgagaagacccagccggtcattgactattatagtaagaaaggtattctcaaacgcgtagatgggtcgcaaactatcgacaacgttgttgcagaagtcctggggattctgggttggagcgataagtaatga

SEQ ID NO: 1966 - protein, 231 aa, synthetic construct
  REGION 1..231: note = Variant of adenylate kinase
MHHHHHHGGSGMGAYLVFLGPPGAGKGTQGRRIQEKTGIPHISTGDIFRDIVAKQNDELASKIKEIMEKGELVPDELGNAVVKRRLSEKDCEKGFILDGYPRTVAQAEYLDSFLESQNRQLTAAVLFKVPEDEVVQRLTSRLICPKCGRIYNMIFLPPKEDELCDDCGVGLVQRDDDKEETVRHRLKVYLEKTQPVIDYYSKKGILKRVDGSQTIDNVVAEVLGILGWSDK

SEQ ID NO: 1967 - DNA, 699 bp, synthetic construct
  misc_feature 1..699: note = Variant of adenylate kinase
  source 1..699: mol_type = other DNA
atgcaccatcatcaccatcacgggggctccggcatgggggcatatctggtgttcttaggtccgccgggcgcgggaaaaggtacccaaggccgtcgcattcaggaaaagactggcatcccgcatattagcacgggcgatatcttccgtgacatcgtcgctaagcaaaacgatgaactggcctcgaaaattaaagaaatcatggagaaaggtgaactcgttccagatgaactgggtaatgcggtagtaaaacgccgcctgtcggagaaagactgcgaaaaaggctttattttggatggttatccgcgtaccgtggctcaagcggaatatctggatagttttcttgaatcccagaatcgccagttgacagccgccgtgctgttcaaagtccccgaagatgaagttgtgcaacgtttactttctcgcctgatctgtccgaaatgcgggcgtatctacaacatgatttttctgccaccaaaagaagacgagctgtgtgacgattgcggtgtcggcttagtacagcgtgatgatgataaggaagaaacggtccgtcaccgcctgaaagtctaccttgagaagacccagccggtcattgactattatagtaagaaaggtattctcaaacgcgtagatgggtcgcaaggaatcgacaacgttgttgcagaagtcctggggattctgggttggagcgataagtaatga

SEQ ID NO: 1968 - protein, 231 aa, synthetic construct
  REGION 1..231: note = Variant of adenylate kinase
MHHHHHHGGSGMGAYLVFLGPPGAGKGTQGRRIQEKTGIPHISTGDIFRDIVAKQNDELASKIKEIMEKGELVPDELGNAVVKRRLSEKDCEKGFILDGYPRTVAQAEYLDSFLESQNRQLTAAVLFKVPEDEVVQRLLSRLICPKCGRIYNMIFLPPKEDELCDDCGVGLVQRDDDKEETVRHRLKVYLEKTQPVIDYYSKKGILKRVDGSQGIDNVVAEVLGILGWSDK

SEQ ID NO: 1969 - DNA, 699 bp, synthetic construct
  misc_feature 1..699: note = Variant of adenylate kinase
  source 1..699: mol_type = other DNA
atgcaccatcatcaccatcacgggggctccggcatgggggcatatctggtgttcttaggtccgccgggcgcgggaaaaggtacccaaggccgtcgcattcaggaaaagactggcatcccgcatattagcacgggcgatatcttccgtgacatcgtcgctaagcaaaacgatgaactggcctcgaaaattaaagaaatcatgacgaaaggtgaactcgttccagatgaactgggtaatgcggtagtaaaacgccgcctgtcggagaaagactgcgaaaaaggctttattttggatggttatccgcgtaccgtggctcaagcggaatatctggatagttttcttgaatcccagaatcgccagttgacagccgccgtgctgttcaaagtccccgaagatgaagttgtgcaacgtttaacctctcgcctgatctgtccgaaatgcgggcgtatctacaacatgatttttctgccaccaaaagaagacgagctgtgtgacgattgcggtgtcggcttagtacagcgtgatgatgataaggaagaaacggtccgtcaccgcctgaaagtctaccttgagaagacccagccggtcattgactattatagtaagaaaggtattctcaaacgcgtagatgggtcgcaaggaatcgacaacgttgttgcagaagtcctggggattctgggttggagcgataagtaatga

SEQ ID NO: 1970 - protein, 231 aa, synthetic construct
  REGION 1..231: note = Variant of adenylate kinase
MHHHHHHGGSGMGAYLVFLGPPGAGKGTQGRRIQEKTGIPHISTGDIFRDIVAKQNDELASKIKEIMTKGELVPDELGNAVVKRRLSEKDCEKGFILDGYPRTVAQAEYLDSFLESQNRQLTAAVLFKVPEDEVVQRLTSRLICPKCGRIYNMIFLPPKEDELCDDCGVGLVQRDDDKEETVRHRLKVYLEKTQPVIDYYSKKGILKRVDGSQGIDNVVAEVLGILGWSDK

SEQ ID NO: 1971 - DNA, 699 bp, synthetic construct
  misc_feature 1..699: note = Variant of adenylate kinase
  source 1..699: mol_type = other DNA
atgcaccatcatcaccatcacgggggctccggcatgggggcatatctggtgttcttaggtccgccgggcgcgggaaaaggtacccaaggccgtcgcattcaggaaaagactggcatcccgcatattagcacgggcgatatcttccgtgacatcgtcgctaagcaaaacgatgaactggcctcgaaaattaaagaaatcatggagaaaggtgaactcgttccagatgaactgggtaatgcggtagtaaaacgccgcctgtcggagaaagactgcgaaaaaggctttattttggatggttatccgcgtaccgtggctcaagcggaatatctggatagttttcttgaatcccagaatcgccagttgacagccgccgtgctgttcaaagtccccgaagatgaagttgtgcaacgtttaacctctcgcctgatctgtccgaaatgctcgcgtatctacaacatgatttttctgccaccaaaagaagacgagctgtgtgacgattgcggtgtcggcttagtacagcgtgatgatgataaggaagaaacggtccgtcaccgcctgaaagtctaccttgagaagacccagccggtcattgactattatagtaagaaaggtattctcaaacgcgtagatgggtcgcaaggaatcgacaacgttgttgcagaagtcctggggattctgggttggagcgataagtaatga

SEQ ID NO: 1972 - protein, 231 aa, synthetic construct
  REGION 1..231: note = Variant of adenylate kinase
MHHHHHHGGSGMGAYLVFLGPPGAGKGTQGRRIQEKTGIPHISTGDIFRDIVAKQNDELASKIKEIMEKGELVPDELGNAVVKRRLSEKDCEKGFILDGYPRTVAQAEYLDSFLESQNRQLTAAVLFKVPEDEVVQRLTSRLICPKCSRIYNMIFLPPKEDELCDDCGVGLVQRDDDKEETVRHRLKVYLEKTQPVIDYYSKKGILKRVDGSQGIDNVVAEVLGILGWSDK

SEQ ID NO: 1973 - DNA, 699 bp, synthetic construct
  misc_feature 1..699: note = Variant of adenylate kinase
  source 1..699: mol_type = other DNA
atgcaccatcatcaccatcacgggggctccggcatgggggcatatctggtgttcttaggtccgccgggcgcgggaaaaggtacccaaggccgtcgcattcaggaaaagactggcatcccgcatattagcacgggcgatatcttccgtgacatcgtcgctaagcaaaacgatgaactggcctcgaaaattaaagaaatcatggagaaaggtgaactcgttccagatgaactgggtaatgcggtagtaaaacgccgcctgtcggagaaagactgcgaaaaaggctttattttggatggttatccgcgtaccgtggctcaagcggaatatctggatagttttcttgaatcccagaatcgccagttgacagccgccgtgctgttcaaagtccccgaagatgaagttgtgcaacgtttaacctctcgcctgatctgtccgaaatgcgggcgtatctacaacatgatttttctgccaccaaaagaagacgagctgtgtgacgattgcggtgtcggcttacatcagcgtgatgatgataaggaagaaacggtccgtcaccgcctgaaagtctaccttgagaagacccagccggtcattgactattatagtaagaaaggtattctcaaacgcgtagatgggtcgcaaggaatcgacaacgttgttgcagaagtcctggggattctgggttggagcgataagtaatga

SEQ ID NO: 1974 - protein, 231 aa, synthetic construct
  REGION 1..231: note = Variant of adenylate kinase
MHHHHHHGGSGMGAYLVFLGPPGAGKGTQGRRIQEKTGIPHISTGDIFRDIVAKQNDELASKIKEIMEKGELVPDELGNAVVKRRLSEKDCEKGFILDGYPRTVAQAEYLDSFLESQNRQLTAAVLFKVPEDEVVQRLTSRLICPKCGRIYNMIFLPPKEDELCDDCGVGLHQRDDDKEETVRHRLKVYLEKTQPVIDYYSKKGILKRVDGSQGIDNVVAEVLGILGWSDK

SEQ ID NO: 1975 - DNA, 699 bp, synthetic construct
  misc_feature 1..699: note = Variant of adenylate kinase
  source 1..699: mol_type = other DNA
atgcaccatcatcaccatcacgggggctccggcatgggggcatatctggtgttcttaggtccgccgggcgcgggaaaaggtacccaaggccgtcgcattcaggaaaagactggcatcccgcatattagcacgggcgatatcttccgtgacatcgtcgctaagcaaaacgatgaactggcctcgaaaattaaagaaatcatggagaaaggtgaactcgttccagatgaactgggtaatgcggtagtaaaacgccgcctgtcggagaaagactgcgaaaaaggctttattttggatggttatccgcgtaccgtggctcaagcggaatatctggatagttttcttgaatcccagaatcgccagttgacagccgccgtgctgttcaaagtccccgaagatgaagttgtgcaacgtattacctctcgcctgatctgtccgaaatgcgggcgtatctacaacatgatttttctgccaccaaaagaagacgagctgtgtgacgattgcggtgtcggcttagtacagcgtgatgatgataaggaagaaacggtccgtcaccgcctgaaagtctaccttgagaagacccagccggtcattgactattatagtaagaaaggtattctcaaacgcgtagatgggtcgcaaggaatcgacaacgttgttgcagaagtcctggggattctgggttggagcgataagtaatga

SEQ ID NO: 1976 - protein, 231 aa, synthetic construct
  REGION 1..231: note = Variant of adenylate kinase
MHHHHHHGGSGMGAYLVFLGPPGAGKGTQGRRIQEKTGIPHISTGDIFRDIVAKQNDELASKIKEIMEKGELVPDELGNAVVKRRLSEKDCEKGFILDGYPRTVAQAEYLDSFLESQNRQLTAAVLFKVPEDEVVQRITSRLICPKCGRIYNMIFLPPKEDELCDDCGVGLVQRDDDKEETVRHRLKVYLEKTQPVIDYYSKKGILKRVDGSQGIDNVVAEVLGILGWSDK

SEQ ID NO: 1977 - DNA, 699 bp, synthetic construct
  misc_feature 1..699: note = Variant of adenylate kinase
  source 1..699: mol_type = other DNA
atgcaccatcatcaccatcacgggggctccggcatgggggcatatctggtgttcttaggtccgccgggcgcgggaaaaggtacccaaggccgtcgcattcaggaaaagactggcatcccgcatattagcacgggcgatatcttccgtgacatcgtcgctaagcaaaacgatgaactggcctcgaaaattaaagaaatcatggagttgggtgaactcgttccagatgaactgggtaatgcggtagtaaaacgccgcctgtcggagaaagactgcgaaaaaggctttattttggatggttatccgcgtaccgtggctcaagcggaatatctggatagttttcttgaatcccagaatcgccagttgacagccgccgtgctgttcaaagtccccgaagatgaagttgtgcaacgtttaacctctcgcctgatctgtccgaaatgcgggcgtatctacaacatgatttttctgccaccaaaagaagacgagctgtgtgacgattgcggtgtcggcttagtacagcgtgatgatgataaggaagaaacggtccgtcaccgcctgaaagtctaccttgagaagacccagccggtcattgactattatagtaagaaaggtattctcaaacgcgtagatgggtcgcaaggaatcgacaacgttgttgcagaagtcctggggattctgggttggagcgataagtaatga

SEQ ID NO: 1978 - protein, 231 aa, synthetic construct
  REGION 1..231: note = Variant of adenylate kinase
MHHHHHHGGSGMGAYLVFLGPPGAGKGTQGRRIQEKTGIPHISTGDIFRDIVAKQNDELASKIKEIMELGELVPDELGNAVVKRRLSEKDCEKGFILDGYPRTVAQAEYLDSFLESQNRQLTAAVLFKVPEDEVVQRLTSRLICPKCGRIYNMIFLPPKEDELCDDCGVGLVQRDDDKEETVRHRLKVYLEKTQPVIDYYSKKGILKRVDGSQGIDNVVAEVLGILGWSDK

SEQ ID NO: 1979 - DNA, 699 bp, synthetic construct
  misc_feature 1..699: note = Variant of adenylate kinase
  source 1..699: mol_type = other DNA
atgcaccatcatcaccatcacgggggctccggcatgggggcatatctggtgttcttaggtccgccgggcgcgggaaaaggtacccaaggccgtcgcattcaggaaaagactggcatcccgcatattagcacgggcgatatcttccgtgacatcgtcgctaagcaaaacgatgaactggcctcgaaaattaaagaaatcatggagaaaggtgaactcgttccagatgaactgggtaatgcgcaggtaaaacgccgcctgtcggagaaagactgcgaaaaaggctttattttggatggttatccgcgtaccgtggctcaagcggaatatctggatagttttcttgaatcccagaatcgccagttgacagccgccgtgctgttcaaagtccccgaagatgaagttgtgcaacgtttaacctctcgcctgatctgtccgaaatgcgggcgtatctacaacatgatttttctgccaccaaaagaagacgagctgtgtgacgattgcggtgtcggcttagtacagcgtgatgatgataaggaagaaacggtccgtcaccgcctgaaagtctaccttgagaagacccagccggtcattgactattatagtaagaaaggtattctcaaacgcgtagatgggtcgcaaggaatcgacaacgttgttgcagaagtcctggggattctgggttggagcgataagtaatga

SEQ ID NO: 1980 - protein, 231 aa, synthetic construct
  REGION 1..231: note = Variant of adenylate kinase
MHHHHHHGGSGMGAYLVFLGPPGAGKGTQGRRIQEKTGIPHISTGDIFRDIVAKQNDELASKIKEIMEKGELVPDELGNAQVKRRLSEKDCEKGFILDGYPRTVAQAEYLDSFLESQNRQLTAAVLFKVPEDEVVQRLTSRLICPKCGRIYNMIFLPPKEDELCDDCGVGLVQRDDDKEETVRHRLKVYLEKTQPVIDYYSKKGILKRVDGSQGIDNVVAEVLGILGWSDK

SEQ ID NO: 1981 - DNA, 699 bp, synthetic construct
  misc_feature 1..699: note = Variant of adenylate kinase
  source 1..699: mol_type = other DNA
atgcaccatcatcaccatcacgggggctccggcatgggggcatatctggtgttcttaggtccgccgggcgcgggaaaaggtacccaaggccgtcgcattcaggaaaagactggcatcccgcatattagcacgggcgatatcttccgtgacatcgtcgctaagcaaaacgatgaactggcctcgaaaattaaagaaatcatggagaaaggtgaactcgttccagatgaactgggtaatgcggtagtaaaacgccgcctgtcggagaaagactgcgaaaaaggctttattttggatggttatccgcgtaccgtggctcaagcggaatatctggatagttttcttgaatcccagaatcgccagttgacagccgccgtgctgttcaaagtccccgaagatgaagttgtgcaacgtttaacctctcgcctgatctgtccgaaatgcgggcgtatctacaacatgaggtttctgccaccaaaagaagacgagctgtgtgacgattgcggtgtcggcttagtacagcgtgatgatgataaggaagaaacggtccgtcaccgcctgaaagtctaccttgagaagacccagccggtcattgactattatagtaagaaaggtattctcaaacgcgtagatgggtcgcaaggaatcgacaacgttgttgcagaagtcctggggattctgggttggagcgataagtaatga

SEQ ID NO: 1982 - protein, 231 aa, synthetic construct
  REGION 1..231: note = Variant of adenylate kinase
MHHHHHHGGSGMGAYLVFLGPPGAGKGTQGRRIQEKTGIPHISTGDIFRDIVAKQNDELASKIKEIMEKGELVPDELGNAVVKRRLSEKDCEKGFILDGYPRTVAQAEYLDSFLESQNRQLTAAVLFKVPEDEVVQRLTSRLICPKCGRIYNMRFLPPKEDELCDDCGVGLVQRDDDKEETVRHRLKVYLEKTQPVIDYYSKKGILKRVDGSQGIDNVVAEVLGILGWSDK

SEQ ID NO: 1983 - DNA, 699 bp, synthetic construct
  misc_feature 1..699: note = Variant of adenylate kinase
  source 1..699: mol_type = other DNA
atgcaccatcatcaccatcacgggggctccggcatgggggcatatctggtgttcttaggtccgccgggcgcgggaaaaggtacccaaggccgtcgcatttcggcaaagactggcatcccgcatattagcacgggcgatatcttccgtgacatcgtcgctaagcaaaacgatgaactggcctcgaaaattaaagagatcatggagaaaggtgaactcgttccagatgaactgggtaatgcgattgtaaaacgccgcctgtcggagaaagactgcgaaaaaggctttattttggatggttatccgcgtaccgtgcgccaagcggaatatctggatagttttcttgaaagccagaatcgccagttgacagccgccgtgctgttcaaagtccccgaagatgaagttgtgcaacgtttaacctctcgcctgatctgtccgaaatgcacgcgtatctacaacatgatttttctgccaccaaaagaagacgagctgtgtgacgattgcggtgtcggcttagtacagcgtgatgatgataaggaagaaacggtccgtcaccgcctgaaagtctaccttgagaagacccagccggtcattgactattatagtaagaaaggtattctcaaacgcgtagatgggtcgcaaggaatcgacaacgttctggcagaagtcctggggattctgggttggagcgataagtaatga

SEQ ID NO: 1984 - protein, 231 aa, synthetic construct
  REGION 1..231: note = Variant of adenylate kinase
MHHHHHHGGSGMGAYLVFLGPPGAGKGTQGRRISAKTGIPHISTGDIFRDIVAKQNDELASKIKEIMEKGELVPDELGNAIVKRRLSEKDCEKGFILDGYPRTVRQAEYLDSFLESQNRQLTAAVLFKVPEDEVVQRLTSRLICPKCTRIYNMIFLPPKEDELCDDCGVGLVQRDDDKEETVRHRLKVYLEKTQPVIDYYSKKGILKRVDGSQGIDNVLAEVLGILGWSDK

SEQ ID NO: 1985 - DNA, 699 bp, synthetic construct
  misc_feature 1..699: note = Variant of adenylate kinase
  source 1..699: mol_type = other DNA
atgcaccatcatcaccatcacgggggctccggcatgggggcatatctggtgttcttaggtccgccgggcgcgggaaaaggtacccaaggccgtcgcatttcggcaaagactggcatcccgcatattagcacgggcgatatcttccgtgacatcgtcgctaagcaaaacgatgaactggcctcgaaaattaaagagatcatggcgaaaggtgaactcgttccagatgaactgggtaatgcggttgtaaaacgccgcctgtcggagaaagactgcgaaaaaggctttattttggatggttatccgcgtaccgtgcgccaagcggaatatctggatagttttcttgaaagccagaatcgccagttgacagccgccgtgctgttcaaagtccccgaagatgaagttgtgcaacgtttaacctctcgcctgatctgtccgaaatgccaccgtatctacaacatgatttttctgccaccaaaagaagacgagctgtgtgacgattgcggtgtcggcttagtacagcgtgatgatgataaggaagaaacggtccgtcaccgcctgaaagtctaccttgagaagacccagccggtcattgactattatagtaagaaaggtattctcaaacgcgtagatgggtcgcaaggaatcgacaacgttctggcagaagtcctggggattctgggttggagcgataagtaatga

SEQ ID NO: 1986 - protein, 231 aa, synthetic construct
  REGION 1..231: note = Variant of adenylate kinase
MHHHHHHGGSGMGAYLVFLGPPGAGKGTQGRRISAKTGIPHISTGDIFRDIVAKQNDELASKIKEIMAKGELVPDELGNAVVKRRLSEKDCEKGFILDGYPRTVRQAEYLDSFLESQNRQLTAAVLFKVPEDEVVQRLTSRLICPKCHRIYNMIFLPPKEDELCDDCGVGLVQRDDDKEETVRHRLKVYLEKTQPVIDYYSKKGILKRVDGSQGIDNVLAEVLGILGWSDK

SEQ ID NO: 1987 - DNA, 699 bp, synthetic construct
  misc_feature 1..699: note = Variant of adenylate kinase
  source 1..699: mol_type = other DNA
atgcaccatcatcaccatcacgggggctccggcatgggggcatatctggtgttcttaggtccgccgggcgcgggaaaaggtacccaaggccgtcgcatttcggcaaagactggcatcccgcatattagcacgggcgatatcttccgtgacatcgtcgctaagcaaaacgatgaactggcctcgaaaattaaagagatcatggcgaaaggtgaactcgttccagatgaactgggtaatgcgattgtaaaacgccgcctgtcggagaaagactgcgaaaaaggctttattttggatggttatccgcgtaccgtgcgccaagcggaatatctggatagttttcttgaaagccagaatcgccagttgacagccgccgtgctgttcaaagtccccgaagatgaagttgtgcaacgtttaacctctcgcctgatctgtccgaaatgcgggcgtatctacaacatgatttttctgccaccaaaagaagacgagctgtgtgacgattgcggtgtcggcttagtacagcgtgatgatgataaggaagaaacggtccgtcaccgcctgaaagtctaccttgagaagacccagccggtcattgactattatagtaagaaaggtattctcaaacgcgtagatgggtcgcaaggaatcgacaacgttctggcagaagtcctggggattctgggttggagcgataagtaatga

SEQ ID NO: 1988 - protein, 231 aa, synthetic construct
  REGION 1..231: note = Variant of adenylate kinase
MHHHHHHGGSGMGAYLVFLGPPGAGKGTQGRRISAKTGIPHISTGDIFRDIVAKQNDELASKIKEIMAKGELVPDELGNAIVKRRLSEKDCEKGFILDGYPRTVRQAEYLDSFLESQNRQLTAAVLFKVPEDEVVQRLTSRLICPKCGRIYNMIFLPPKEDELCDDCGVGLVQRDDDKEETVRHRLKVYLEKTQPVIDYYSKKGILKRVDGSQGIDNVLAEVLGILGWSDK

SEQ ID NO: 1989 - DNA, 699 bp, synthetic construct
  misc_feature 1..699: note = Variant of adenylate kinase
  source 1..699: mol_type = other DNA
atgcaccatcatcaccatcacgggggctccggcatgggggcatatctggtgttcttaggtccgccgggcgcgggaaaaggtacccaaggccgtcgcatttcggcaaagactggcatcccgcatattagcacgggcgatatcttccgtgacatcgtcgctaagcaaaacgatgaactggcctcgaaaattaaagagatcatggagaaaggtgaactcgttccagatgaactgggtaatgcggtagtaaaacgccgcctgtcggagaaagactgcgaaaaaggctttattttggatggttatccgcgtaccgtgcgccaagcggaatatctggatagttttcttgaaagccagaatcgccagttgacagccgccgtgctgttcaaagtccccgaagatgaagttgtgcaacgtttaacctctcgcctgatctgtccgaaatgccaccgtatctacaacatgatttttctgccaccaaaagaagacgagctgtgtgacgattgcggtgtcggcttagtacagcgtgatgatgataaggaagaaacggtccgtcaccgcctgaaagtctaccttgagaagacccagccggtcattgactattatagtaagaaaggtattctcaaacgcgtagatgggtcgcaaggaatcgacaacgttttcgcagaagtcctggggattctgggttggagcgataagtaatga

SEQ ID NO: 1990 - protein, 231 aa, synthetic construct
  REGION 1..231: note = Variant of adenylate kinase
MHHHHHHGGSGMGAYLVFLGPPGAGKGTQGRRISAKTGIPHISTGDIFRDIVAKQNDELASKIKEIMEKGELVPDELGNAVVKRRLSEKDCEKGFILDGYPRTVRQAEYLDSFLESQNRQLTAAVLFKVPEDEVVQRLTSRLICPKCHRIYNMIFLPPKEDELCDDCGVGLVQRDDDKEETVRHRLKVYLEKTQPVIDYYSKKGILKRVDGSQGIDNVFAEVLGILGWSDK

SEQ ID NO: 1991 - DNA, 699 bp, synthetic construct
  misc_feature 1..699: note = Variant of adenylate kinase
  source 1..699: mol_type = other DNA
atgcaccatcatcaccatcacgggggctccggcatgggggcatatctggtgttcttaggtccgccgggcgcgggaaaaggtacccaaggccgtcgcatttcggcaaagactggcatcccgcatattagcacgggcgatatcttccgtgacatcgtcgctaagcaaaacgatgaactggcctcgaaaattaaagagatcatggcgaaaggtgaactcgttccagatgaactgggtaatgcggtagtaaaacgccgcctgtcggagaaagactgcgaaaaaggctttattttggatggttatccgcgtaccgtgcgccaagcggaatatctggatagttttcttgaaagccagaatcgccagttgacagccgccgtgctgttcaaagtccccgaagatgaagttgtgcaacgtttaacctctcgcctgatctgtccgaaatgcacgcgtatctacaacatgatttttctgccaccaaaagaagacgagctgtgtgacgattgcggtgtcggcttagtacagcgtgatgatgataaggaagaaacggtccgtcaccgcctgaaagtctaccttgagaagacccagccggtcattgactattatagtaagaaaggtattctcaaacgcgtagatgggtcgcaaggaatcgacaacgttctggcagaagtcctggggattctgggttggagcgataagtaatga

SEQ ID NO: 1992 - protein, 231 aa, synthetic construct
  REGION 1..231: note = Variant of adenylate kinase
MHHHHHHGGSGMGAYLVFLGPPGAGKGTQGRRISAKTGIPHISTGDIFRDIVAKQNDELASKIKEIMAKGELVPDELGNAVVKRRLSEKDCEKGFILDGYPRTVRQAEYLDSFLESQNRQLTAAVLFKVPEDEVVQRLTSRLICPKCTRIYNMIFLPPKEDELCDDCGVGLVQRDDDKEETVRHRLKVYLEKTQPVIDYYSKKGILKRVDGSQGIDNVLAEVLGILGWSDK

SEQ ID NO: 1993 - DNA, 699 bp, synthetic construct
  misc_feature 1..699: note = Variant of adenylate kinase
  source 1..699: mol_type = other DNA
atgcaccatcatcaccatcacgggggctccggcatgggggcatatctggtgttcttaggtccgccgggcgcgggaaaaggtacccaaggccgtcgcatttcggcaaagactggcatcccgcatattagcacgggcgatatcttccgtgacatcgtcgctaagcaaaacgatgaactggcctcgaaaattaaagagatcatggagaaaggtgaactcgttccagatgaactgggtaatgcgattgtaaaacgccgcctgtcggagaaagactgcgaaaaaggctttattttggatggttatccgcgtaccgtgcgccaagcggaatatctggatagttttcttgaaagccagaatcgccagttgacagccgccgtgctgttcaaagtccccgaagatgaagttgtgcaacgtttaacctctcgcctgatctgtccgaaatgcgggcgtatctacaacatgatttttctgccaccaaaagaagacgagctgtgtgacgattgcggtgtcggcttagtacagcgtgatgatgataaggaagaaacggtccgtcaccgcctgaaagtctaccttgagaagacccagccggtcattgactattatagtaagaaaggtattctcaaacgcgtagatgggtcgcaaggaatcgacaacgttctggcagaagtcctggggattctgggttggagcgataagtaatga

SEQ ID NO: 1994 - protein, 231 aa, synthetic construct
  REGION 1..231: note = Variant of adenylate kinase
MHHHHHHGGSGMGAYLVFLGPPGAGKGTQGRRISAKTGIPHISTGDIFRDIVAKQNDELASKIKEIMEKGELVPDELGNAIVKRRLSEKDCEKGFILDGYPRTVRQAEYLDSFLESQNRQLTAAVLFKVPEDEVVQRLTSRLICPKCGRIYNMIFLPPKEDELCDDCGVGLVQRDDDKEETVRHRLKVYLEKTQPVIDYYSKKGILKRVDGSQGIDNVLAEVLGILGWSDK

SEQ ID NO: 1995 - DNA, 699 bp, synthetic construct
  misc_feature 1..699: note = Variant of adenylate kinase
  source 1..699: mol_type = other DNA
atgcaccatcatcaccatcacgggggctccggcatgggggcatatctggtgttcttaggtccgccgggcgcgggaaaaggtacccaaggccgtcgcatttcggcaaagactggcatcccgcatattagcacgggcgatatcttccgtgacatcgtcgctaagcaaaacgatgaactggcctcgaaaattaaagagatcatggagaaaggtgaactcgttccagatgaactgggtaatgcggtagtaaaacgccgcctgtcggagaaagactgcgaaaaaggctttattttggatggttatccgcgtaccgtgcgccaagcggaatatctggatagttttcttgaaagccagaatcgccagttgacagccgccgtgctgttcaaagtccccgaagatgaagttgttctgcgtgtgctgtctcgcctgatctgtccgaaatgcgggcgtatctacaacatgatttttctgccaccaaaagaagacgagctgtgtgacgattgcggtgtcggcttagtacagcgtgatgatgataaggaagaaacggtccgtcaccgcctgaaagtctaccttgagaagacccagccggtcattgactattatagtaagaaaggtattctcaaacgcgtagatgggtcgcaaggaatcgacaacgttgttgcagaagtcctggggattctgggttggagcgataagtaatga

SEQ ID NO: 1996 - protein, 231 aa, synthetic construct
  REGION 1..231: note = Variant of adenylate kinase
MHHHHHHGGSGMGAYLVFLGPPGAGKGTQGRRISAKTGIPHISTGDIFRDIVAKQNDELASKIKEIMEKGELVPDELGNAVVKRRLSEKDCEKGFILDGYPRTVRQAEYLDSFLESQNRQLTAAVLFKVPEDEVVLRVLSRLICPKCGRIYNMIFLPPKEDELCDDCGVGLVQRDDDKEETVRHRLKVYLEKTQPVIDYYSKKGILKRVDGSQGIDNVVAEVLGILGWSDK

SEQ ID NO: 1997 - DNA, 699 bp, synthetic construct
  misc_feature 1..699: note = Variant of adenylate kinase
  source 1..699: mol_type = other DNA
atgcaccatcatcaccatcacgggggctccggcatgggggcatatctggtgttcttaggtccgccgggcgcgggaaaaggtacccaaggccgtcgcatttcggcaaagactggcatcccgcatattagcacgggcgatatcttccgtgacatcgtcgctaagcaaaacgatgaactggcctcgaaaattaaagagatcatggagaaaggtgaactcgttccagatgaactgggtaatgcggtagtaaaacgccgcctgtcggagaaagactgcgaaaaaggctttattttggatggttatccgcgtaccgtgcgccaagcggaatatctggatagttttcttgaaagccagaatcgccagttgacagccgccgtgctgttcaaagtccccgaagatgaagttgtgcaacgtttaacctctcgcctgatctgtccgaaatgcacgcgtatctacaacatgatttttctgccaccaaaagaagacgagctgtgtgacgattgcggtgtcggcttagtacagcgtgatgatgataaggaagaaacggtccgtcaccgcctgaaagtctaccttgagaagacccagccggtcattgactattatagtaagaaaggtattctcaaacgcgtagatgggtcgcaaggaatcgacaacgttttcgcagaagtcctggggattctgggttggagcgataagtaatga

SEQ ID NO: 1998 - protein, 231 aa, synthetic construct
  REGION 1..231: note = Variant of adenylate kinase
MHHHHHHGGSGMGAYLVFLGPPGAGKGTQGRRISAKTGIPHISTGDIFRDIVAKQNDELASKIKEIMEKGELVPDELGNAVVKRRLSEKDCEKGFILDGYPRTVRQAEYLDSFLESQNRQLTAAVLFKVPEDEVVQRLTSRLICPKCTRIYNMIFLPPKEDELCDDCGVGLVQRDDDKEETVRHRLKVYLEKTQPVIDYYSKKGILKRVDGSQGIDNVFAEVLGILGWSDK

SEQ ID NO: 1999 - DNA, 699 bp, synthetic construct
  misc_feature 1..699: note = Variant of adenylate kinase
  source 1..699: mol_type = other DNA
atgcaccatcatcaccatcacgggggctccggcatgggggcatatctggtgttcttaggtccgccgggcgcgggaaaaggtacccaaggccgtcgcatttcggcaaagactggcatcccgcatattagcacgggcgatatcttccgtgacatcgtcgctaagcaaaacgatgaactggcctcgaaaattaaagagatcatggagaaaggtgaactcgttccagatgaactgggtaatgcggtagtaaaacgccgcctgtcggagaaagactgcgaaaaaggctttattttggatggttatccgcgtaccgtgcgccaagcggaatatctggatagttttcttgaaagccagaatcgccagttgacagccgccgtgctgttcaaagtccccgaagatgaagttgtgcaacgtttaacctctcgcctgatctgtccgaaatgccaccgtatctacaacatgatttttctgccaccaaaagaagacgagctgtgtgacgattgcggtgtcggcttagtacagcgtgatgatgataaggaagaaacggtccgtcaccgcctgaaagtctaccttgagaagacccagccggtcattgactattatagtaagaaaggtattctcaaacgcgtagatgggtcgcaaggaatcgacaacgttctggcagaagtcctggggattctgggttggagcgataagtaatga

SEQ ID NO: 2000 - protein, 231 aa, synthetic construct
  REGION 1..231: note = Variant of adenylate kinase
MHHHHHHGGSGMGAYLVFLGPPGAGKGTQGRRISAKTGIPHISTGDIFRDIVAKQNDELASKIKEIMEKGELVPDELGNAVVKRRLSEKDCEKGFILDGYPRTVRQAEYLDSFLESQNRQLTAAVLFKVPEDEVVQRLTSRLICPKCHRIYNMIFLPPKEDELCDDCGVGLVQRDDDKEETVRHRLKVYLEKTQPVIDYYSKKGILKRVDGSQGIDNVLAEVLGILGWSDK

SEQ ID NO: 2001 - DNA, 699 bp, synthetic construct
  misc_feature 1..699: note = Variant of adenylate kinase
  source 1..699: mol_type = other DNA
atgcaccatcatcaccatcacgggggctccggcatgggggcatatctggtgttcttaggtccgccgggcgcgggaaaaggtacccaaggccgtcgcatttcggcaaagactggcatcccgcatattagcacgggcgatatcttccgtgacatcgtcgctaagcaaaacgatgaactggcctcgaaaattaaagagatcatggcgaaaggtgaactcgttccagatgaactgggtaatgcggtagtaaaacgccgcctgtcggagaaagactgcgaaaaaggctttattttggatggttatccgcgtaccgtgcgccaagcggaatatctggatagttttcttgaaagccagaatcgccagttgacagccgccgtgctgttcaaagtccccgaagatgaagttgtgcaacgtttaacctctcgcctgatctgtccgaaatgcgggcgtatctacaacatgatttttctgccaccaaaagaagacgagctgtgtgacgattgcggtgtcggcttagtacagcgtgatgatgataaggaagaaacggtccgtcaccgcctgaaagtctaccttgagaagacccagccggtcattgactattatagtaagaaaggtattctcaaacgcgtagatgggtcgcaaggaatcgacaacgttctggcagaagtcctggggattctgggttggagcgataagtaatga

SEQ ID NO: 2002 - protein, 231 aa, synthetic construct
  REGION 1..231: note = Variant of adenylate kinase
MHHHHHHGGSGMGAYLVFLGPPGAGKGTQGRRISAKTGIPHISTGDIFRDIVAKQNDELASKIKEIMAKGELVPDELGNAVVKRRLSEKDCEKGFILDGYPRTVRQAEYLDSFLESQNRQLTAAVLFKVPEDEVVQRLTSRLICPKCGRIYNMIFLPPKEDELCDDCGVGLVQRDDDKEETVRHRLKVYLEKTQPVIDYYSKKGILKRVDGSQGIDNVLAEVLGILGWSDK

SEQ ID NO: 2003 - DNA, 699 bp, synthetic construct
  misc_feature 1..699: note = Variant of adenylate kinase
  source 1..699: mol_type = other DNA
atgcaccatcatcaccatcacgggggctccggcatgggggcatatctggtgttcttaggtccgccgggcgcgggaaaaggtacccaaggccgtcgcatttcggcaaagactggcatcccgcatattagcacgggcgatatcttccgtgacatcgtcgctaagcaaaacgatgaactggcctcgaaaattaaagagaccatggcgaaaggtgaactcgttccagatgaactgggtaatgcggttgtaaaacgccgcctgtcggagaaagactgcgaaaaaggctttattttggatggttatccgcgtaccgtgcgccaagcggaatatctggatagttttcttgaaagccagaatcgccagttgacagccgccgtgctgttcaaagtccccgaagatgaagttgtgcaacgtttaacctctcgcctgatctgtccgaaatgcgggcgtatctacaacatgatttttctgccaccaaaagaagacgagctgtgtgacgattgcggtgtcggcttagtacagcgtgatgatgataaggaagaaacggtccgtcaccgcctgaaagtctaccttgagaagacccagccggtcattgactattatagtaagaaaggtattctcaaacgcgtagatgggtcgcaaggaatcgacaacgttctggcagaagtcctggggattctgggttggagcgataagtaatga

SEQ ID NO: 2004 - protein, 231 aa, synthetic construct
  REGION 1..231: note = Variant of adenylate kinase
MHHHHHHGGSGMGAYLVFLGPPGAGKGTQGRRISAKTGIPHISTGDIFRDIVAKQNDELASKIKETMAKGELVPDELGNAVVKRRLSEKDCEKGFILDGYPRTVRQAEYLDSFLESQNRQLTAAVLFKVPEDEVVQRLTSRLICPKCGRIYNMIFLPPKEDELCDDCGVGLVQRDDDKEETVRHRLKVYLEKTQPVIDYYSKKGILKRVDGSQGIDNVLAEVLGILGWSDK

SEQ ID NO: 2005 - DNA, 699 bp, synthetic construct
  misc_feature 1..699: note = Variant of adenylate kinase
  source 1..699: mol_type = other DNA
atgcaccatcatcaccatcacgggggctccggcatgggggcatatctggtgttcttaggtccgccgggcgcgggaaaaggtacccaaggccgtcgcatttcggcaaagactggcatcccgcatattagcacgggcgatatcttccgtgacatcgtcgctaagcaaaacgatgaactggcctcgaaaattaaagagcaaatggagaaaggtgaactcgttccagatgaactgggtaatgcggtagtaaaacgccgcctgtcggagaaagactgcgaaaaaggctttattttggatggttatccgcgtaccgtgcgccaagcggaatatctggatagttttcttgaaagccagaatcgccagttgacagccgccgtgctgttcaaagtccccgaagatgaagttgtgcaacgtttaacctctcgcctgatctgtccgaaatgccaccgtatctacaacatgatttttctgccaccaaaagaagacgagctgtgtgacgattgcggtgtcggcttagtacagcgtgatgatgataaggaagaaacggtccgtcaccgcctgaaagtctaccttgagaagacccagccggtcattgactattatagtaagaaaggtattctcaaacgcgtagatgggtcgcaaggaatcgacaacgttttcgcagaagtcctggggattctgggttggagcgataagtaatga

SEQ ID NO: 2006 - protein, 231 aa, synthetic construct
  REGION 1..231: note = Variant of adenylate kinase
MHHHHHHGGSGMGAYLVFLGPPGAGKGTQGRRISAKTGIPHISTGDIFRDIVAKQNDELASKIKEQMEKGELVPDELGNAVVKRRLSEKDCEKGFILDGYPRTVRQAEYLDSFLESQNRQLTAAVLFKVPEDEVVQRLTSRLICPKCHRIYNMIFLPPKEDELCDDCGVGLVQRDDDKEETVRHRLKVYLEKTQPVIDYYSKKGILKRVDGSQGIDNVFAEVLGILGWSDK

SEQ ID NO: 2007 - DNA, 699 bp, synthetic construct
  misc_feature 1..699: note = Variant of adenylate kinase
  source 1..699: mol_type = other DNA
atgcaccatcatcaccatcacgggggctccggcatgggggcatatctggtgttcttaggtccgccgggcgcgggaaaaggtacccaaggccgtcgcatttcggcaaagactggcatcccgcatattagcacgggcgatatcttccgtgacatcgtcgctaagcaaaacgatgaactggcctcgaaaattaaagagatcatggagaaaggtgaactcgttccagatgaactgggtaatgcggtagtaaaacgccgcctgtcggagaaagactgcgaaaaaggctttattttggatggttatccgcgtaccgtgcgccaagcggaatatctggatagttttcttgaaagccagaatcgccagttgacagccgccgtgctgttcaaagtccccgaagatgaagttgtgcaacgtttaacctctcgcctgatctgtccgaaatgcacgcgtatctacaacatgatttttctgccaccaaaagaagacgagctgtgtgacgattgcggtgtcggcttagtacagcgtgatgatgataaggaagaaacggtccgtcaccgcctgaaagtctaccttgagaagacccagccggtcattgactattatagtaagaaaggtattctcaaacgcgtagatgggtcgcaaggaatcgacaacgttctggcagaagtcctggggattctgggttggagcgataagtaatga

SEQ ID NO: 2008 - protein, 231 aa, synthetic construct
  REGION 1..231: note = Variant of adenylate kinase
MHHHHHHGGSGMGAYLVFLGPPGAGKGTQGRRISAKTGIPHISTGDIFRDIVAKQNDELASKIKEIMEKGELVPDELGNAVVKRRLSEKDCEKGFILDGYPRTVRQAEYLDSFLESQNRQLTAAVLFKVPEDEVVQRLTSRLICPKCTRIYNMIFLPPKEDELCDDCGVGLVQRDDDKEETVRHRLKVYLEKTQPVIDYYSKKGILKRVDGSQGIDNVLAEVLGILGWSDK

SEQ ID NO: 2009 - DNA, 699 bp, synthetic construct
  misc_feature 1..699: note = Variant of adenylate kinase
  source 1..699: mol_type = other DNA
atgcaccatcatcaccatcacgggggctccggcatgggggcatatctggtgttcttaggtccgccgggcgcgggaaaaggtacccaaggccgtcgcatttcggcaaagactggcatcccgcatattagcacgggcgatatcttccgtgacatcgtcgctaagcaaaacgatgaactggcctcgaaaattaaagagaccatggcgaaaggtgaactcgttccagatgaactgggtaatgcggttgtaaaacgccgcctgtcggagaaagactgcgaaaaaggctttattttggatggttatccgcgtaccgtgcgccaagcggaatatctggatagttttcttgaaagccagaatcgccagttgacagccgccgtgctgttcaaagtccccgaagatgaagttgtgcaacgtttaacctctcgcctgatctgtccgaaatgccaccgtatctacaacatgatttttctgccaccaaaagaagacgagctgtgtgacgattgcggtgtcggcttagtacagcgtgatgatgataaggaagaaacggtccgtcaccgcctgaaagtctaccttgagaagacccagccggtcattgactattatagtaagaaaggtattctcaaacgcgtagatgggtcgcaaggaatcgacaacgttgttgcagaagtcctggggattctgggttggagcgataagtaatga

SEQ ID NO: 2010 - protein, 231 aa, synthetic construct
  REGION 1..231: note = Variant of adenylate kinase
MHHHHHHGGSGMGAYLVFLGPPGAGKGTQGRRISAKTGIPHISTGDIFRDIVAKQNDELASKIKETMAKGELVPDELGNAVVKRRLSEKDCEKGFILDGYPRTVRQAEYLDSFLESQNRQLTAAVLFKVPEDEVVQRLTSRLICPKCHRIYNMIFLPPKEDELCDDCGVGLVQRDDDKEETVRHRLKVYLEKTQPVIDYYSKKGILKRVDGSQGIDNVVAEVLGILGWSDK

SEQ ID NO: 2011 - DNA, 699 bp, synthetic construct
  misc_feature 1..699: note = Variant of adenylate kinase
  source 1..699: mol_type = other DNA
atgcaccatcatcaccatcacgggggctccggcatgggggcatatctggtgttcctgggtccgccgggcgcgggaaaaggtacccaaggccgtcgcatttcggcaaagactggcatcccgcatattagcacgggcgatatcttccgtgacatcgtcgctaagcaaaacgatgaagttgcctcgaaaattaaagagatcatggagaaaggtgaactcgttccagatgaactgggtaatgcggtagtaaaacgccgcctgtcggagaaagactgcgaaaaaggctttattttggatggttatccgcgtaccgtgcgccaagcggaatatctggatagttttcttgaaagccagaatcgccagttgacagccgccgtgctgttcaaagtccccgaagatgaagttgtgcaacgtttaacctctcgcctgatctgtccgaaatgcgggcgtatctacaacatgatttttctgccaccaaaagaagacgagctgtgtgacgattgcggtgtcggcttagtacagcgtgatgatgataaggaagaaaccgtccgtcaccgcctgaaagtctaccttgagaagacccagccggtcattgactattatagtaagaaaggtattctcaaacgcgtagatgggtcgcaaggaatcgacaacgttgttgcagaagtcctggggattctgggttggagcgataagtaatga

SEQ ID NO: 2012 - protein, 231 aa, synthetic construct
  REGION 1..231: note = Variant of adenylate kinase
MHHHHHHGGSGMGAYLVFLGPPGAGKGTQGRRISAKTGIPHISTGDIFRDIVAKQNDEVASKIKEIMEKGELVPDELGNAVVKRRLSEKDCEKGFILDGYPRTVRQAEYLDSFLESQNRQLTAAVLFKVPEDEVVQRLTSRLICPKCGRIYNMIFLPPKEDELCDDCGVGLVQRDDDKEETVRHRLKVYLEKTQPVIDYYSKKGILKRVDGSQGIDNVVAEVLGILGWSDK

SEQ ID NO: 2013 - DNA, 699 bp, synthetic construct
  misc_feature 1..699: note = Variant of adenylate kinase
  source 1..699: mol_type = other DNA
atgcaccatcatcaccatcacgggggctccggcatgggggcatatctggtgttcctgggtccgccgggcgcgggaaaaggtacccaaggccgtcgcatttcggcaaagactggcatcccgcatattagcacgggcgatatcttccgtgacatcgtcgctaagcaaaacgatgaagttgcctcgaaaattaaagagatcatggagaaaggtgaactcgttccagatgaactgggtaatgcggtagtaaaacgccgcctgtcggagaaagactgcgaaaaaggctttattttggatggttatccgcgtaccgtgcgccaagcggaatatctggatagttttcttgaaagccagaatcgccagttgacagccgccgtgctgttcaaagtccccgaagatgaagttcgtcagcgtctgacctctcgcctgatctgtccgaaatgcgggcgtatctacaacatgatttttctgccaccaaaagaagacgagctgtgtgacgattgcggtgtcggcttagtacagcgtgatgatgataaggaagaaacggtccgtcaccgcctgaaagtctaccttgagaagacccagccggtcattgactattatagtaagaaaggtattctcaaacgcgtagatgggtcgcaaggaatcgacaacgttgttgcagaagtcctggggattctgggttggagcgataagtaatga

SEQ ID NO: 2014 - protein, 231 aa, synthetic construct
  REGION 1..231: note = Variant of adenylate kinase
MHHHHHHGGSGMGAYLVFLGPPGAGKGTQGRRISAKTGIPHISTGDIFRDIVAKQNDEVASKIKEIMEKGELVPDELGNAVVKRRLSEKDCEKGFILDGYPRTVRQAEYLDSFLESQNRQLTAAVLFKVPEDEVRQRLTSRLICPKCGRIYNMIFLPPKEDELCDDCGVGLVQRDDDKEETVRHRLKVYLEKTQPVIDYYSKKGILKRVDGSQGIDNVVAEVLGILGWSDK

SEQ ID NO: 2015 - DNA, 699 bp, synthetic construct
  misc_feature 1..699: note = Variant of adenylate kinase
  source 1..699: mol_type = other DNA
atgcaccatcatcaccatcacgggggctccggcatgggggcatatctggtgttcttaggtccgccgggcgcgggaaaaggtacccaaggccgtcgcatttcggcaaagactggcatcccgcatattagcacgggcgatatcttccgtgacatcgtcgctaagcaaaacgatgaactggcctcgaaaattaaagagatcatggagaaaggtgaactcgttccagatgaactgggtaatgcggtagtaaaacgccgcctgtcggagaaagactgcgaaaaaggctttattttggatggttatccgcgtaccgtgcgccaagcggaatatctggatagttttcttgaaagccagaatcgccagttgacagccgccgtgctgttcaaagtccccgaagatgaagttgtgcaacgtttaacctctcgcctgatctgtccgaaatgcgggcgtatctacaacatgatttttctgccaccaaaagaagacgagctgtgtgacgattgcggtgtcggcttagtacagcgtgatgatgataaggaagaaacggtccgtcaccgcctgaaagtctaccttgagaagacccagccggtcattgactattatagtaagaaaggtattctcaaacgcgtagatgggtcgcaaggaatcgacaacgttttcgcagaagtcctggggattctgggttggagcgataagtaatga

SEQ ID NO: 2016 - protein, 231 aa, synthetic construct
  REGION 1..231: note = Variant of adenylate kinase
MHHHHHHGGSGMGAYLVFLGPPGAGKGTQGRRISAKTGIPHISTGDIFRDIVAKQNDELASKIKEIMEKGELVPDELGNAVVKRRLSEKDCEKGFILDGYPRTVRQAEYLDSFLESQNRQLTAAVLFKVPEDEVVQRLTSRLICPKCGRIYNMIFLPPKEDELCDDCGVGLVQRDDDKEETVRHRLKVYLEKTQPVIDYYSKKGILKRVDGSQGIDNVFAEVLGILGWSDK

SEQ ID NO: 2017 - DNA, 699 bp, synthetic construct
  misc_feature 1..699: note = Variant of adenylate kinase
  source 1..699: mol_type = other DNA
atgcaccatcatcaccatcacgggggctccggcatgggggcatatctggtgttcttaggtccgccgggcgcgggaaaaggtacccaaggccgtcgcatttcggcaaagactggcatcccgcatattagcacgggcgatatcttccgtgacatcgtcgctaagcaaaacgatgaagttgcctcgaaaattaaagagatcatggagaaaggtgaactcgttccagatgaactgggtaatgcggtagtaaaacgccgcctgtcggagaaagactgcgaaaaaggctttattttggatggttatccgcgtaccgtgcgccaagcggaatatctggatagttttcttgaaagccagaatcgccagttgacagccgccgtgctgttcaaagtccccgaagatgaagttgttcagcgtctgctgtctcgcctgatctgtccgaaatgcgggcgtatctacaacatgatttttctgccaccaaaagaagacgagctgtgtgacgattgcggtgtcggcttagtacagcgtgatgatgataaggaagaaacggtccgtcaccgcctgaaagtctaccttgagaagacccagccggtcattgactattatagtaagaaaggtattctcaaacgcgtagatgggtcgcaaggaatcgacaacgttgttgcagaagtcctggggattctgggttggagcgataagtaatga

SEQ ID NO: 2018 - protein, 231 aa, synthetic construct
  REGION 1..231: note = Variant of adenylate kinase
MHHHHHHGGSGMGAYLVFLGPPGAGKGTQGRRISAKTGIPHISTGDIFRDIVAKQNDEVASKIKEIMEKGELVPDELGNAVVKRRLSEKDCEKGFILDGYPRTVRQAEYLDSFLESQNRQLTAAVLFKVPEDEVVQRLLSRLICPKCGRIYNMIFLPPKEDELCDDCGVGLVQRDDDKEETVRHRLKVYLEKTQPVIDYYSKKGILKRVDGSQGIDNVVAEVLGILGWSDK

SEQ ID NO: 2019 - DNA, 699 bp, synthetic construct
  misc_feature 1..699: note = Variant of adenylate kinase
  source 1..699: mol_type = other DNA
atgcaccatcatcaccatcacgggggctccggcatgggggcatatctggtgttcctgggtccgccgggcgcgggaaaaggtacccaaggccgtcgcatttcggcaaagactggcatcccgcatattagcacgggcgatatcttccgtgacatcgtcgctaagcaaaacgatgaactggcctcgaaaattaaagagatcatggagaaaggtgaactcgttccagatgaactgggtaatgcggtagtaaaacgccgcctgtcggagaaagactgcgaaaaaggctttattttggatggttatccgcgtaccgtgcgccaagcggaatatctggatagttttcttgaaagccagaatcgccagttgacagccgccgtgctgttcaaagtccccgaagatgaagttgttcagcgtgtgacctctcgcctgatctgtccgaaatgcgggcgtatctacaacatgatttttctgccaccaaaagaagacgagctgtgtgacgattgcggtgtcggcttagtacagcgtgatgatgataaggaagaaacggtccgtcaccgcctgaaagtctaccttgagaagacccagccggtcattgactattatagtaagaaaggtattctcaaacgcgtagatgggtcgcaaggaatcgacaacgttgttgcagaagtcctggggattctgggttggagcgataagtaatga

SEQ ID NO: 2020 - protein, 231 aa, synthetic construct
  REGION 1..231: note = Variant of adenylate kinase
MHHHHHHGGSGMGAYLVFLGPPGAGKGTQGRRISAKTGIPHISTGDIFRDIVAKQNDELASKIKEIMEKGELVPDELGNAVVKRRLSEKDCEKGFILDGYPRTVRQAEYLDSFLESQNRQLTAAVLFKVPEDEVVQRVTSRLICPKCGRIYNMIFLPPKEDELCDDCGVGLVQRDDDKEETVRHRLKVYLEKTQPVIDYYSKKGILKRVDGSQGIDNVVAEVLGILGWSDK

SEQ ID NO: 2021 - DNA, 699 bp, synthetic construct
  misc_feature 1..699: note = Variant of adenylate kinase
  source 1..699: mol_type = other DNA
atgcaccatcatcaccatcacgggggctccggcatgggggcatatctggtgttcttaggtccgccgggcgcgggaaaaggtacccaaggccgtcgcatttcggcaaagactggcatcccgcatattagcacgggcgatatcttccgtgacatcgtcgctaagcaaaacgatgaactggcctcgaaaattaaagagatcatggagaaaggtgaactcgttccagatgaactgggtaatgcggtagtaaaacgccgcctgtcggagaaagactgcgaaaaaggctttattttggatggttatccgcgtaccgtgcgccaagcggaatatctggatagttttcttgaaagccagaatcgccagttgacagccgccgtggctttcaaagtccccgaagatgaagttgtgcaacgtttaacctctcgcctgatctgtccgaaatgcacgcgtatctacaacatgatttttctgccaccaaaagaagacgagctgtgtgacgattgcggtgtcggcttagtacagcgtgatgatgataaggaagaaacggtccgtcaccgcctgaaagtctaccttgagaagacccagccggtcattgactattatagtaagaaaggtattctcaaacgcgtagatgggtcgcaaggaatcgacaacgttctggcagaagtcctggggattctgggttggagcgataagtaatga

SEQ ID NO: 2022 - protein, 231 aa, synthetic construct
  REGION 1..231: note = Variant of adenylate kinase
MHHHHHHGGSGMGAYLVFLGPPGAGKGTQGRRISAKTGIPHISTGDIFRDIVAKQNDELASKIKEIMEKGELVPDELGNAVVKRRLSEKDCEKGFILDGYPRTVRQAEYLDSFLESQNRQLTAAVAFKVPEDEVVQRLTSRLICPKCTRIYNMIFLPPKEDELCDDCGVGLVQRDDDKEETVRHRLKVYLEKTQPVIDYYSKKGILKRVDGSQGIDNVLAEVLGILGWSDK

SEQ ID NO: 2023 - DNA, 699 bp, synthetic construct
  misc_feature 1..699: note = Variant of adenylate kinase
  source 1..699: mol_type = other DNA
atgcaccatcatcaccatcacgggggctccggcatgggggcatatctggtgttcctgggtccgccgggcgcgggaaaaggtacccaaggccgtcgcatttcggcaaagactggcatcccgcatattagcacgggcgatatcttccgtgacatcgtcgctaagcaaaacgatgaagttgcctcgaaaattaaagagatcatggagaaaggtgaactcgttccagatgaactgggtaatgcggtagtaaaacgccgcctgtcggagaaagactgcgaaaaaggctttattttggatggttatccgcgtaccgtgcgccaagcggaatatctggatagttttcttgaaagccagaatcgccagttgacagccgccgtgctgttcaaagtccccgaagatgaagttgtgcaacgtttaacctctcgcctgatctgtccgaaatgcgggcgtatctacaacatgatttttctgccaccaaaagaagacgagctgtgtgacgattgcggtgtcggcttagtacagcgtgatgatgataaggaagaaatcgtccgtcaccgcctgaaagtctaccttgagaagacccagccggtcattgactattatagtaagaaaggtattctcaaacgcgtagatgggtcgcaaggaatcgacaacgttgttgcagaagtcctggggattctgggttggagcgataagtaatga

SEQ ID NO: 2024 - protein, 231 aa, synthetic construct
  REGION 1..231: note = Variant of adenylate kinase
MHHHHHHGGSGMGAYLVFLGPPGAGKGTQGRRISAKTGIPHISTGDIFRDIVAKQNDEVASKIKEIMEKGELVPDELGNAVVKRRLSEKDCEKGFILDGYPRTVRQAEYLDSFLESQNRQLTAAVLFKVPEDEVVQRLTSRLICPKCGRIYNMIFLPPKEDELCDDCGVGLVQRDDDKEEIVRHRLKVYLEKTQPVIDYYSKKGILKRVDGSQGIDNVVAEVLGILGWSDK

SEQ ID NO: 2025 - DNA, 699 bp, synthetic construct
  misc_feature 1..699: note = Variant of adenylate kinase
  source 1..699: mol_type = other DNA
atgcaccatcatcaccatcacgggggctccggcatgggggcatatctggtgttcttaggtccgccgggcgcgggaaaaggtacccaaggccgtcgcatttcggcaaagactggcatcccgcatattagcacgggcgatatcttccgtgacatcgtcgctaagcaaaacgatgaactggcctcgaaaattaaagagatcatggagaaaggtgaactcgttccagatgaactgggtaatgcgattgtaaaacgccgcctgtcggagaaagactgcgaaaaaggctttattttggatggttatccgcgtaccgtgcgccaagcggaatatctggatagttttcttgaaagccagaatcgccagttgacagccgccgtgctgttcaaagtccccgaagatgaagttgtgcaacgtttaacctctcgcctgatctgtccgaaatgcgggcgtatctacaacatgatttttctgccaccaaaagaagacgagctgtgtgacgattgcggtgtcggcttagtacagcgtgatgatgataaggaagaaacggtccgtcaccgcctgaaagtctaccttgagaagacccagccggtcattgactattatagtaagaaaggtattctcaaacgcgtagatgggtcgcaaggaatcgacaacgttgttgcagaagtcctggggattctgggttggagcgataagtaatga

SEQ ID NO: 2026 - protein, 231 aa, synthetic construct
  REGION 1..231: note = Variant of adenylate kinase
MHHHHHHGGSGMGAYLVFLGPPGAGKGTQGRRISAKTGIPHISTGDIFRDIVAKQNDELASKIKEIMEKGELVPDELGNAIVKRRLSEKDCEKGFILDGYPRTVRQAEYLDSFLESQNRQLTAAVLFKVPEDEVVQRLTSRLICPKCGRIYNMIFLPPKEDELCDDCGVGLVQRDDDKEETVRHRLKVYLEKTQPVIDYYSKKGILKRVDGSQGIDNVVAEVLGILGWSDK

SEQ ID NO: 2027 - DNA, 699 bp, synthetic construct
  misc_feature 1..699: note = Variant of adenylate kinase
  source 1..699: mol_type = other DNA
atgcaccatcatcaccatcacgggggctccggcatgggggcatatctggtgttcttaggtccgccgggcgcgggaaaaggtacccaaggccgtcgcatttcggcaaagactggcatcccgcatattagcacgggcgatatcttccgtgacatcgtcgctaagcaaaacgatgaactggcctcgaaaattaaagagcaaatggagaaaggtgaactcgttccagatgaactgggtaatgcgattgtaaaacgccgcctgtcggagaaagactgcgaaaaaggctttattttggatggttatccgcgtaccgtgcgccaagcggaatatctggatagttttcttgaaagccagaatcgccagttgacagccgccgtgctgttcaaagtccccgaagatgaagttgtgcaacgtttaacctctcgcctgatctgtccgaaatgcgggcgtatctacaacatgatttttctgccaccaaaagaagacgagctgtgtgacgattgcggtgtcggcttagtacagcgtgatgatgataaggaagaaacggtccgtcaccgcctgaaagtctaccttgagaagacccagccggtcattgactattatagtaagaaaggtattctcaaacgcgtagatgggtcgcaaggaatcgacaacgttctggcagaagtcctggggattctgggttggagcgataagtaatga

SEQ ID NO: 2028 - protein, 231 aa, synthetic construct
  REGION 1..231: note = Variant of adenylate kinase
MHHHHHHGGSGMGAYLVFLGPPGAGKGTQGRRISAKTGIPHISTGDIFRDIVAKQNDELASKIKEQMEKGELVPDELGNAIVKRRLSEKDCEKGFILDGYPRTVRQAEYLDSFLESQNRQLTAAVLFKVPEDEVVQRLTSRLICPKCGRIYNMIFLPPKEDELCDDCGVGLVQRDDDKEETVRHRLKVYLEKTQPVIDYYSKKGILKRVDGSQGIDNVLAEVLGILGWSDK

SEQ ID NO: 2029 - DNA, 699 bp, synthetic construct
  misc_feature 1..699: note = Variant of adenylate kinase
  source 1..699: mol_type = other DNA
atgcaccatcatcaccatcacgggggctccggcatgggggcatatctggtgttcttaggtccgccgggcgcgggaaaaggtacccaaggccgtcgcatttcggcaaagactggcatcccgcatattagcacgggcgatatcttccgtgacatcgtcgctaagcaaaacgatgaactggcctcgaaaattaaagagatcatggagaaaggtgaactcgttccagatgaactgggtaatgcggttgtaaaacgccgcctgtcggagaaagactgcgaaaaaggctttattttggatggttatccgcgtaccgtgcgccaagcggaatatctggatagttttcttgaaagccagaatcgccagttgacagccgccgtgctgttcaaagtccccgaagatgaagttgtgcaacgtttaacctctcgcctgatctgtccgaaatgcgggcgtatctacaacatgatttttctgccaccaaaagaagacgagctgtgtgacgattgcggtgtcggcttagtacagcgtgatgatgataaggaagaaacggtccgtcaccgcctgaaagtctaccttgagaagacccagccggtcattgactattatagtaagaaaggtattctcaaacgcgtagatgggtcgcaaggaatcgacaacgttctggcagaagtcctggggattctgggttggagcgataagtaatga

SEQ ID NO: 2030 - protein, 231 aa, synthetic construct
  REGION 1..231: note = Variant of adenylate kinase
MHHHHHHGGSGMGAYLVFLGPPGAGKGTQGRRISAKTGIPHISTGDIFRDIVAKQNDELASKIKEIMEKGELVPDELGNAVVKRRLSEKDCEKGFILDGYPRTVRQAEYLDSFLESQNRQLTAAVLFKVPEDEVVQRLTSRLICPKCGRIYNMIFLPPKEDELCDDCGVGLVQRDDDKEETVRHRLKVYLEKTQPVIDYYSKKGILKRVDGSQGIDNVLAEVLGILGWSDK

SEQ ID NO: 2031 - DNA, 699 bp, synthetic construct
  misc_feature 1..699: note = Variant of adenylate kinase
  source 1..699: mol_type = other DNA
atgcaccatcatcaccatcacgggggctccggcatgggggcatatctggtgttcttaggtccgccgggcgcgggaaaaggtacccaaggccgtcgcatttcggcaaagactggcatcccgcatattagcacgggcgatatcttccgtgacatcgtcgctaagcaaaacgatgaactggcctcgaaaattaaagagatcatggagaaaggtgaactcgttccagatgaactgggtaatgcggtagtaaaacgccgcctgtcggagaaagactgcgaaaaaggctttattttggatggttatccgcgtaccgtgcgccaagcggaatatctggatagttttcttgaaagccagaatcgccagttgacagccgccgtggctttcaaagtccccgaagatgaagttgtgcaacgtttaacctctcgcctgatctgtccgaaatgcgggcgtatctacaacatgatttttctgccaccaaaagaagacgagctgtgtgacgattgcggtgtcggcttagtacagcgtgatgatgataaggaagaaacggtccgtcaccgcctgaaagtctaccttgagaagacccagccggtcattgactattatagtaagaaaggtattctcaaacgcgtagatgggtcgcaaggaatcgacaacgttctggcagaagtcctggggattctgggttggagcgataagtaatga

SEQ ID NO: 2032 - protein, 231 aa, synthetic construct
  REGION 1..231: note = Variant of adenylate kinase
MHHHHHHGGSGMGAYLVFLGPPGAGKGTQGRRISAKTGIPHISTGDIFRDIVAKQNDELASKIKEIMEKGELVPDELGNAVVKRRLSEKDCEKGFILDGYPRTVRQAEYLDSFLESQNRQLTAAVAFKVPEDEVVQRLTSRLICPKCGRIYNMIFLPPKEDELCDDCGVGLVQRDDDKEETVRHRLKVYLEKTQPVIDYYSKKGILKRVDGSQGIDNVLAEVLGILGWSDK

SEQ ID NO: 2033 - DNA, 699 bp, synthetic construct
  misc_feature 1..699: note = Variant of adenylate kinase
  source 1..699: mol_type = other DNA
atgcaccatcatcaccatcacgggggctccggcatgggggcatatctggtgttcttaggtccgccgggcgcgggaaaaggtacccaaggccgtcgcatttcggcaaagactggcatcccgcatattagcacgggcgatatcttccgtgacatcgtcgctaagcaaaacgatgaactggcctcgaaaattaaagagcaaatggcgaaaggtgaactcgttccagatgaactgggtaatgcgattgtaaaacgccgcctgtcggagaaagactgcgaaaaaggctttattttggatggttatccgcgtaccgtgcgccaagcggaatatctggatagttttcttgaaagccagaatcgccagttgacagccgccgtgctgttcaaagtccccgaagatgaagttgtgcaacgtttaacctctcgcctgatctgtccgaaatgcacgcgtatctacaacatgatttttctgccaccaaaagaagacgagctgtgtgacgattgcggtgtcggcttagtacagcgtgatgatgataaggaagaaacggtccgtcaccgcctgaaagtctaccttgagaagacccagccggtcattgactattatagtaagaaaggtattctcaaacgcgtagatgggtcgcaaggaatcgacaacgttctggcagaagtcctggggattctgggttggagcgataagtaatga

SEQ ID NO: 2034 - protein, 231 aa, synthetic construct
  REGION 1..231: note = Variant of adenylate kinase
MHHHHHHGGSGMGAYLVFLGPPGAGKGTQGRRISAKTGIPHISTGDIFRDIVAKQNDELASKIKEQMAKGELVPDELGNAIVKRRLSEKDCEKGFILDGYPRTVRQAEYLDSFLESQNRQLTAAVLFKVPEDEVVQRLTSRLICPKCTRIYNMIFLPPKEDELCDDCGVGLVQRDDDKEETVRHRLKVYLEKTQPVIDYYSKKGILKRVDGSQGIDNVLAEVLGILGWSDK

SEQ ID NO: 2035 - DNA, 699 bp, synthetic construct
  misc_feature 1..699: note = Variant of adenylate kinase
  source 1..699: mol_type = other DNA
atgcaccatcatcaccatcacgggggctccggcatgggggcatatctggtgttcttaggtccgccgggcgcgggaaaaggtacccaaggccgtcgcatttcggcaaagactggcatcccgcatattagcacgggcgatatcttccgtgacatcgtcgctaagcaaaacgatgaactggcctcgaaaattaaagagatcatggagaaaggtgaactcgttccagatgaactgggtaatgcggtagtaaaacgccgcctgtcggagaaagactgcgaaaaaggctttattttggatggttatccgcgtaccgtgcgccaagcggaatatctggatagttttcttgaaagccagaatcgccagttgacagccgccgtgctgttcaaagtccccgaagatgaagttgtgcaacgtttaacctctcgcctgatctgtccgaaatgcgggcgtatctacaacatgatttttctgccaccaaaagaagacgagctgtgtgacgattgcggtgtcggcttagtacagcgtgatgatgataaggaagaaatcgtccgtcaccgcctgaaagtctaccttgagaagacccagccggtcattgactattatagtaagaaaggtattctcaaacgcgtagatgggtcgcaaggaatcgacaacgttgttgcagaagtcctggggattctgggttggagcgataagtaatga

SEQ ID NO: 2036 - protein, 231 aa, synthetic construct
  REGION 1..231: note = Variant of adenylate kinase
MHHHHHHGGSGMGAYLVFLGPPGAGKGTQGRRISAKTGIPHISTGDIFRDIVAKQNDELASKIKEIMEKGELVPDELGNAVVKRRLSEKDCEKGFILDGYPRTVRQAEYLDSFLESQNRQLTAAVLFKVPEDEVVQRLTSRLICPKCGRIYNMIFLPPKEDELCDDCGVGLVQRDDDKEEIVRHRLKVYLEKTQPVIDYYSKKGILKRVDGSQGIDNVVAEVLGILGWSDK

SEQ ID NO: 2037 - DNA, 699 bp, synthetic construct
  misc_feature 1..699: note = Variant of adenylate kinase
  source 1..699: mol_type = other DNA
atgcaccatcatcaccatcacgggggctccggcatgggggcatatctggtgttcttaggtccgccgggcgcgggaaaaagtacccaaggccgtcgcatttcggcaaagactggcatcccgcatattagcacgggcgatatcttccgtgacatcgtcgctaagcaaaacgatgaactggcctcgaaaattaaagagatcatggagaaaggtgaactcgttccagatgaactgggtaatgcggtagtaaaacgccgcctgtcggagaaagactgcgaaaaaggctttattttggatggttatccgcgtaccgtgcgccaagcggaatatctggatagttttcttgaaagccagaatcgccagttgacagccgccgtgctgttcaaagtccccgaagatgaagttgtgcaacgtttaacctctcgcctgatctgtccgaaatgccaccgtatctacaacatgatttttctgccaccaaaagaagacgagctgtgtgacgattgcggtgtcggcttagtacagcgtgatgatgataaggaagaaacggtccgtcaccgcctgaaagtctaccttgagaagacccagccggtcattgactattatagtaagaaaggtattctcaaacgcgtagatgggtcgcaaggaatcgacaacgttgttgcagaagtcctggggattctgggttggagcgataagtaatga

SEQ ID NO: 2038 - protein, 231 aa, synthetic construct
  REGION 1..231: note = Variant of adenylate kinase
MHHHHHHGGSGMGAYLVFLGPPGAGKSTQGRRISAKTGIPHISTGDIFRDIVAKQNDELASKIKEIMEKGELVPDELGNAVVKRRLSEKDCEKGFILDGYPRTVRQAEYLDSFLESQNRQLTAAVLFKVPEDEVVQRLTSRLICPKCHRIYNMIFLPPKEDELCDDCGVGLVQRDDDKEETVRHRLKVYLEKTQPVIDYYSKKGILKRVDGSQGIDNVVAEVLGILGWSDK

SEQ ID NO: 2039 - DNA, 699 bp, synthetic construct
  misc_feature 1..699: note = Variant of adenylate kinase
  source 1..699: mol_type = other DNA
atgcaccatcatcaccatcacgggggctccggcatgggggcatatctggtgttcctgggtccgccgggcgcgggaaaaggtacccaaggccgtcgcatttcggcaaagactggcatcccgcatattagcacgggcgatatcttccgtgacatcgtcgctaagcaaaacgatgaactggcctcgaaaattaaagagatcatggagaaaggtgaactcgttccagatgaactgggtaatgcggtagtaaaacgccgcctgtcggagaaagactgcgaaaaaggctttattttggatggttatccgcgtaccgtgcgccaagcggaatatctggatagttttcttgaaagccagaatcgccagttgacagccgccgtgctgttcaaagtccccgaagatgaagttcgtctgcgtctgcgttctcgcctgatctgtccgaaatgcgggcgtatctacaacatgatttttctgccaccaaaagaagacgagctgtgtgacgattgcggtgtcggcttagtacagcgtgatgatgataaggaagaaacggtccgtcaccgcctgaaagtctaccttgagaagacccagccggtcattgactattatagtaagaaaggtattctcaaacgcgtagatgggtcgcaaggaatcgacaacgttgttgcagaagtcctggggattctgggttggagcgataagtaatga

SEQ ID NO: 2040 - protein, 231 aa, synthetic construct
  REGION 1..231: note = Variant of adenylate kinase
MHHHHHHGGSGMGAYLVFLGPPGAGKGTQGRRISAKTGIPHISTGDIFRDIVAKQNDELASKIKEIMEKGELVPDELGNAVVKRRLSEKDCEKGFILDGYPRTVRQAEYLDSFLESQNRQLTAAVLFKVPEDEVRLRLRSRLICPKCGRIYNMIFLPPKEDELCDDCGVGLVQRDDDKEETVRHRLKVYLEKTQPVIDYYSKKGILKRVDGSQGIDNVVAEVLGILGWSDK

SEQ ID NO: 2041 - DNA, 699 bp, synthetic construct
  misc_feature 1..699: note = Variant of adenylate kinase
  source 1..699: mol_type = other DNA
atgcaccatcatcaccatcacgggggctccggcatgggggcatatctggtgttcctgggtccgccgggcgcgggaaaaggtacccaaggccgtcgcatttcggcaaagactggcatcccgcatattagcacgggcgatatcttccgtgacatcgtcgctaagcaaaacgatgaactggcctcgaaaattaaagagatcatggagaaaggtgaactcgttccagatgaactgggtaatgcggtagtaaaacgccgcctgtcggagaaagactgcgaaaaaggctttattttggatggttatccgcgtaccgtgcgccaagcggaatatctggatagttttcttgaaagccagaatcgccagttgacagccgccgtgctgttcaaagtccccgaagatgaagttgttctgcgtgtgcgttctcgcctgatctgtccgaaatgcgggcgtatctacaacatgatttttctgccaccaaaagaagacgagctgtgtgacgattgcggtgtcggcttagtacagcgtgatgatgataaggaagaaacggtccgtcaccgcctgaaagtctaccttgagaagacccagccggtcattgactattatagtaagaaaggtattctcaaacgcgtagatgggtcgcaaggaatcgacaacgttgttgcagaagtcctggggattctgggttggagcgataagtaatga

SEQ ID NO: 2042 - protein, 231 aa, synthetic construct
  REGION 1..231: note = Variant of adenylate kinase
MHHHHHHGGSGMGAYLVFLGPPGAGKGTQGRRISAKTGIPHISTGDIFRDIVAKQNDELASKIKEIMEKGELVPDELGNAVVKRRLSEKDCEKGFILDGYPRTVRQAEYLDSFLESQNRQLTAAVLFKVPEDEVVLRVRSRLICPKCGRIYNMIFLPPKEDELCDDCGVGLVQRDDDKEETVRHRLKVYLEKTQPVIDYYSKKGILKRVDGSQGIDNVVAEVLGILGWSDK

SEQ ID NO: 2043 - DNA, 699 bp, synthetic construct
  misc_feature 1..699: note = Variant of adenylate kinase
  source 1..699: mol_type = other DNA
atgcaccatcatcaccatcacgggggctccggcatgggggcatatctggtgttcttaggtccgccgggcgcgggaaaaggtacccaaggccgtcgcatttcggcaaagactggcatcccgcatattagcacgggcgatatcttccgtgacatcgtcgctaagcaaaacgatgaactggcctcgaaaattaaagagatcatggagaaaggtgaactcgttccagatgaactgggtaatgcggtagtaaaacgccgcctgtcggagaaagactgcgaaaaaggctttattttggatggttatccgcgtaccgtgcgccaagcggaatatctggatagttttcttgaaagccagaatcgccagttgacagccgccgtgctgttcaaagtccccgaagatgaagttgtgcaacgtttaacctctcgcctgatctgtccgaaatgcacgcgtatctacaacatgatttttctgccaccaaaagaagacgagctgtgtgacgattgcggtgtcggcttagtacagcgtgatgatgataaggaagaaacggtccgtcaccgcctgaaagtctaccttgagaagacccagccggtcattgactattatagtaagaaaggtattctcaaacgcgtagatgggtcgcaaggaatcgacaacgttgttgcagaagtcctggggattctgggttggagcgataagtaatga

SEQ ID NO: 2044 - protein, 231 aa, synthetic construct
  REGION 1..231: note = Variant of adenylate kinase
MHHHHHHGGSGMGAYLVFLGPPGAGKGTQGRRISAKTGIPHISTGDIFRDIVAKQNDELASKIKEIMEKGELVPDELGNAVVKRRLSEKDCEKGFILDGYPRTVRQAEYLDSFLESQNRQLTAAVLFKVPEDEVVQRLTSRLICPKCTRIYNMIFLPPKEDELCDDCGVGLVQRDDDKEETVRHRLKVYLEKTQPVIDYYSKKGILKRVDGSQGIDNVVAEVLGILGWSDK

SEQ ID NO: 2045 - DNA, 699 bp, synthetic construct
  misc_feature 1..699: note = Variant of adenylate kinase
  source 1..699: mol_type = other DNA
atgcaccatcatcaccatcacgggggctccggcatgggggcatatctggtgttcttaggtccgccgggcgcgggaaaaggtacccaaggccgtcgcatttcggcaaagactggcatcccgcatattagcacgggcgatatcttccgtgacatcgtcgctaagcaaaacgatgaagttgcctcgaaaattaaagagatcatggagaaaggtgaactcgttccagatgaactgggtaatgcggtagtaaaacgccgcctgtcggagaaagactgcgaaaaaggctttattttggatggttatccgcgtaccgtgcgccaagcggaatatctggatagttttcttgaaagccagaatcgccagttgacagccgccgtgctgttcaaagtccccgaagatgaagttcgtcagcgtgtgacctctcgcctgatctgtccgaaatgcgggcgtatctacaacatgatttttctgccaccaaaagaagacgagctgtgtgacgattgcggtgtcggcttagtacagcgtgatgatgataaggaagaaatcgtccgtcaccgcctgaaagtctaccttgagaagacccagccggtcattgactattatagtaagaaaggtattctcaaacgcgtagatgggtcgcaaggaatcgacaacgttgttgcagaagtcctggggattctgggttggagcgataagtaatga

SEQ ID NO: 2046 - protein, 231 aa, synthetic construct
  REGION 1..231: note = Variant of adenylate kinase
MHHHHHHGGSGMGAYLVFLGPPGAGKGTQGRRISAKTGIPHISTGDIFRDIVAKQNDEVASKIKEIMEKGELVPDELGNAVVKRRLSEKDCEKGFILDGYPRTVRQAEYLDSFLESQNRQLTAAVLFKVPEDEVRQRVTSRLICPKCGRIYNMIFLPPKEDELCDDCGVGLVQRDDDKEEIVRHRLKVYLEKTQPVIDYYSKKGILKRVDGSQGIDNVVAEVLGILGWSDK

SEQ ID NO: 2047 - DNA, 699 bp, synthetic construct
  misc_feature 1..699: note = Variant of adenylate kinase
  source 1..699: mol_type = other DNA
atgcaccatcatcaccatcacgggggctccggcatgggggcatatctggtgttcttaggtccgccgggcgcgggaaaaggtacccaaggccgtcgcatttcggcaaagactggcatcccgcatattagcacgggcgatatcttccgtgacatcgtcgctaagcaaaacgatgaagttgcctcgaaaattaaagagatcatggagaaaggtgaactcgttccagatgaactgggtaatgcggtagtaaaacgccgcctgtcggagaaagactgcgaaaaaggctttattttggatggttatccgcgtaccgtgcgccaagcggaatatctggatagttttcttgaaagccagaatcgccagttgacagccgccgtgctgttcaaagtccccgaagatgaagttcgtctgcgtgtgcgttctcgcctgatctgtccgaaatgcgggcgtatctacaacatgatttttctgccaccaaaagaagacgagctgtgtgacgattgcggtgtcggcttagtacagcgtgatgatgataaggaagaaacggtccgtcaccgcctgaaagtctaccttgagaagacccagccggtcattgactattatagtaagaaaggtattctcaaacgcgtagatgggtcgcaaggaatcgacaacgttgttgcagaagtcctggggattctgggttggagcgataagtaatga

SEQ ID NO: 2048 - protein, 231 aa, synthetic construct
  REGION 1..231: note = Variant of adenylate kinase
MHHHHHHGGSGMGAYLVFLGPPGAGKGTQGRRISAKTGIPHISTGDIFRDIVAKQNDEVASKIKEIMEKGELVPDELGNAVVKRRLSEKDCEKGFILDGYPRTVRQAEYLDSFLESQNRQLTAAVLFKVPEDEVRLRVRSRLICPKCGRIYNMIFLPPKEDELCDDCGVGLVQRDDDKEETVRHRLKVYLEKTQPVIDYYSKKGILKRVDGSQGIDNVVAEVLGILGWSDK

SEQ ID NO: 2049 - DNA, 699 bp, synthetic construct
  misc_feature 1..699: note = Variant of adenylate kinase
  source 1..699: mol_type = other DNA
atgcaccatcatcaccatcacgggggctccggcatgggggcatatctggtgttcttaggtccgccgggcgcgggaaaaggtacccaaggccgtcgcatttcggcaaagactggcatcccgcatattagcacgggcgatatcttccgtgacatcgtcgctaagcaaaacgatgaagttgcctcgaaaattaaagagatcatggagaaaggtgaactcgttccagatgaactgggtaatgcggtagtaaaacgccgcctgtcggagaaagactgcgaaaaaggctttattttggatggttatccgcgtaccgtgcgccaagcggaatatctggatagttttcttgaaagccagaatcgccagttgacagccgccgtgctgttcaaagtccccgaagatgaagttcgtctgcgtgtgacctctcgcctgatctgtccgaaatgcgggcgtatctacaacatgatttttctgccaccaaaagaagacgagctgtgtgacgattgcggtgtcggcttagtacagcgtgatgatgataaggaagaaatcgtccgtcaccgcctgaaagtctaccttgagaagacccagccggtcattgactattatagtaagaaaggtattctcaaacgcgtagatgggtcgcaaggaatcgacaacgttgttgcagaagtcctggggattctgggttggagcgataagtaatga

SEQ ID NO: 2050 - protein, 231 aa, synthetic construct
  REGION 1..231: note = Variant of adenylate kinase
MHHHHHHGGSGMGAYLVFLGPPGAGKGTQGRRISAKTGIPHISTGDIFRDIVAKQNDEVASKIKEIMEKGELVPDELGNAVVKRRLSEKDCEKGFILDGYPRTVRQAEYLDSFLESQNRQLTAAVLFKVPEDEVRLRVTSRLICPKCGRIYNMIFLPPKEDELCDDCGVGLVQRDDDKEEIVRHRLKVYLEKTQPVIDYYSKKGILKRVDGSQGIDNVVAEVLGILGWSDK

SEQ ID NO: 2051 - DNA, 699 bp, synthetic construct
  misc_feature 1..699: note = Variant of adenylate kinase
  source 1..699: mol_type = other DNA
atgcaccatcatcaccatcacgggggctccggcatgggggcatatctggtgttcttaggtccgccgggcgcgggaaaaggtacccaaggccgtcgcatttcggcaaagactggcatcccgcatattagcacgggcgatatcttccgtgacatcgtcgctaagcaaaacgatgaactggcctcgaaaattaaagagcaaatggggaaaggtgaactcgttccagatgaactgggtaatgcgattgtaaaacgccgcctgtcggagaaagactgcgaaaaaggctttattttggatggttatccgcgtaccgtgcgccaagcggaatatctggatagttttcttgaaagccagaatcgccagttgacagccgccgtgctgttcaaagtccccgaagatgaagttgtgcaacgtttaacctctcgcctgatctgtccgaaatgccaccgtatctacaacatgatttttctgccaccaaaagaagacgagctgtgtgacgattgcggtgtcggcttagtacagcgtgatgatgataaggaagaaacggtccgtcaccgcctgaaagtctaccttgagaagacccagccggtcattgactattatagtaagaaaggtattctcaaacgcgtagatgggtcgcaaggaatcgacaacgttctggcagaagtcctggggattctgggttggagcgataagtaatga

SEQ ID NO: 2052 - protein, 231 aa, synthetic construct
  REGION 1..231: note = Variant of adenylate kinase
MHHHHHHGGSGMGAYLVFLGPPGAGKGTQGRRISAKTGIPHISTGDIFRDIVAKQNDELASKIKEQMGKGELVPDELGNAIVKRRLSEKDCEKGFILDGYPRTVRQAEYLDSFLESQNRQLTAAVLFKVPEDEVVQRLTSRLICPKCHRIYNMIFLPPKEDELCDDCGVGLVQRDDDKEETVRHRLKVYLEKTQPVIDYYSKKGILKRVDGSQGIDNVLAEVLGILGWSDK

SEQ ID NO: 2053 - DNA, 699 bp, synthetic construct
  misc_feature 1..699: note = Variant of adenylate kinase
  source 1..699: mol_type = other DNA
atgcaccatcatcaccatcacgggggctccggcatgggggcatatctggtgttcttaggtccgccgggcgcgggaaaaagtacccaaggccgtcgcatttcggcaaagactggcatcccgcatattagcacgggcgatatcttccgtgacatcgtcgctaagcaaaacgatgaactggcctcgaaaattaaagagatcatggagaaaggtgaactcgttccagatgaactgggtaatgcggtagtaaaacgccgcctgtcggagaaagactgcgaaaaaggctttattttggatggttatccgcgtaccgtgcgccaagcggaatatctggatagttttcttgaaagccagaatcgccagttgacagccgccgtgctgttcaaagtccccgaagatgaagttgtgcaacgtttaacctctcgcctgatctgtccgaaatgcgggcgtatctacaacatgatttttctgccaccaaaagaagacgagctgtgtgacgattgcggtgtcggcttagtacagcgtgatgatgataaggaagaaacggtccgtcaccgcctgaaagtctaccttgagaagacccagccggtcattgactattatagtaagaaaggtattctcaaacgcgtagatgggtcgcaaggaatcgacaacgttgtcgcagaagtcctggggattctgggttggagcgataagtaatga

SEQ ID NO: 2054 - protein, 231 aa, synthetic construct
  REGION 1..231: note = Variant of adenylate kinase
MHHHHHHGGSGMGAYLVFLGPPGAGKSTQGRRISAKTGIPHISTGDIFRDIVAKQNDELASKIKEIMEKGELVPDELGNAVVKRRLSEKDCEKGFILDGYPRTVRQAEYLDSFLESQNRQLTAAVLFKVPEDEVVQRLTSRLICPKCGRIYNMIFLPPKEDELCDDCGVGLVQRDDDKEETVRHRLKVYLEKTQPVIDYYSKKGILKRVDGSQGIDNVVAEVLGILGWSDK

SEQ ID NO: 2055 - DNA, 699 bp, synthetic construct
  misc_feature 1..699: note = Variant of adenylate kinase
  source 1..699: mol_type = other DNA
atgcaccatcatcaccatcacgggggctccggcatgggggcatatctggtgttcttaggtccgccgggcgcgggaaaaagtacccaaggccgtcgcatttcggcaaagactggcatcccgcatattagcacgggcgatatcttccgtgacatcgtcgctaagcaaaacgatgaactggcctcgaaaattaaagagatcatggagaaaggtgaactcgttccagatgaactgggtaatgcggttgtaaaacgccgcctgtcggagaaagactgcgaaaaaggctttattttggatggttatccgcgtaccgtgcgccaagcggaatatctggatagttttcttgaaagccagaatcgccagttgacagccgccgtggctttcaaagtccccgaagatgaagttgtgcaacgtttaacctctcgcctgatctgtccgaaatgcacgcgtatctacaacatgatttttctgccaccaaaagaagacgagctgtgtgacgattgcggtgtcggcttagtacagcgtgatgatgataaggaagaaacggtccgtcaccgcctgaaagtctaccttgagaagacccagccggtcattgactattatagtaagaaaggtattctcaaacgcgtagatgggtcgcaaggaatcgacaacgttgttgcagaagtcctggggattctgggttggagcgataagtaatga

SEQ ID NO: 2056 - protein, 231 aa, synthetic construct
  REGION 1..231: note = Variant of adenylate kinase
MHHHHHHGGSGMGAYLVFLGPPGAGKSTQGRRISAKTGIPHISTGDIFRDIVAKQNDELASKIKEIMEKGELVPDELGNAVVKRRLSEKDCEKGFILDGYPRTVRQAEYLDSFLESQNRQLTAAVAFKVPEDEVVQRLTSRLICPKCTRIYNMIFLPPKEDELCDDCGVGLVQRDDDKEETVRHRLKVYLEKTQPVIDYYSKKGILKRVDGSQGIDNVVAEVLGILGWSDK

SEQ ID NO: 2057 - DNA, 699 bp, synthetic construct
  misc_feature 1..699: note = Variant of adenylate kinase
  source 1..699: mol_type = other DNA
atgcaccatcatcaccatcacgggggctccggcatgggggcatatctggtgttcctgggtccgccgggcgcgggaaaaggtacccaaggccgtcgcatttcggcaaagactggcatcccgcatattagcacgggcgatatcttccgtgacatcgtcgctaagcaaaacgatgaactggcctcgaaaattaaagagatcatggagaaaggtgaactcgttccagatgaactgggtaatgcggtagtaaaacgccgcctgtcggagaaagactgcgaaaaaggctttattttggatggttatccgcgtaccgtgcgccaagcggaatatctggatagttttcttgaaagccagaatcgccagttgacagccgccgtgctgttcaaagtccccgaagatgaagttcgtctgcgtgtgacctctcgcctgatctgtccgaaatgcgggcgtatctacaacatgatttttctgccaccaaaagaagacgagctgtgtgacgattgcggtgtcggcttagtacagcgtgatgatgataaggaagaaaccgtccgtcaccgcctgaaagtctaccttgagaagacccagccggtcattgactattatagtaagaaaggtattctcaaacgcgtagatgggtcgcaaggaatcgacaacgttgttgcagaagtcctggggattctgggttggagcgataagtaatga

SEQ ID NO: 2058 - protein, 231 aa, synthetic construct
  REGION 1..231: note = Variant of adenylate kinase
MHHHHHHGGSGMGAYLVFLGPPGAGKGTQGRRISAKTGIPHISTGDIFRDIVAKQNDELASKIKEIMEKGELVPDELGNAVVKRRLSEKDCEKGFILDGYPRTVRQAEYLDSFLESQNRQLTAAVLFKVPEDEVRLRVTSRLICPKCGRIYNMIFLPPKEDELCDDCGVGLVQRDDDKEETVRHRLKVYLEKTQPVIDYYSKKGILKRVDGSQGIDNVVAEVLGILGWSDK

SEQ ID NO: 2059 - DNA, 699 bp, synthetic construct
  misc_feature 1..699: note = Variant of adenylate kinase
  source 1..699: mol_type = other DNA
atgcaccatcatcaccatcacgggggctccggcatgggggcatatctggtgttcttaggtccgccgggcgcgggaaaaggtacccaaggccgtcgcatttcggcaaagactggcatcccgcatattagcacgggcgatatcttccgtgacatcgtcgctaagcaaaacgatgaactggcctcgaaaattaaagagatcatggggaaaggtgaactcgttccagatgaactgggtaatgcgattgtaaaacgccgcctgtcggagaaagactgcgaaaaaggctttattttggatggttatccgcgtaccgtgcgccaagcggaatatctggatagttttcttgaaagccagaatcgccagttgacagccgccgtggctttcaaagtccccgaagatgaagttgtgcaacgtttaacctctcgcctgatctgtccgaaatgccaccgtatctacaacatgatttttctgccaccaaaagaagacgagctgtgtgacgattgcggtgtcggcttagtacagcgtgatgatgataaggaagaaacggtccgtcaccgcctgaaagtctaccttgagaagacccagccggtcattgactattatagtaagaaaggtattctcaaacgcgtagatgggtcgcaaggaatcgacaacgttctggcagaagtcctggggattctgggttggagcgataagtaatga

SEQ ID NO: 2060 - protein, 231 aa, synthetic construct
  REGION 1..231: note = Variant of adenylate kinase
MHHHHHHGGSGMGAYLVFLGPPGAGKGTQGRRISAKTGIPHISTGDIFRDIVAKQNDELASKIKEIMGKGELVPDELGNAIVKRRLSEKDCEKGFILDGYPRTVRQAEYLDSFLESQNRQLTAAVAFKVPEDEVVQRLTSRLICPKCHRIYNMIFLPPKEDELCDDCGVGLVQRDDDKEETVRHRLKVYLEKTQPVIDYYSKKGILKRVDGSQGIDNVLAEVLGILGWSDK

SEQ ID NO: 2061 - DNA, 699 bp, synthetic construct
  misc_feature 1..699: note = Variant of adenylate kinase
  source 1..699: mol_type = other DNA
atgcaccatcatcaccatcacgggggctccggcatgggggcatatctggtgttcctgggtccgccgggcgcgggaaaaggtacccaaggccgtcgcatttcggcaaagactggcatcccgcatattagcacgggcgatatcttccgtgacatcgtcgctaagcaaaacgatgaactggcctcgaaaattaaagagatcatggagaaaggtgaactcgttccagatgaactgggtaatgcggtagtaaaacgccgcctgtcggagaaagactgcgaaaaaggctttattttggatggttatccgcgtaccgtgcgccaagcggaatatctggatagttttcttgaaagccagaatcgccagttgacagccgccgtgctgttcaaagtccccgaagatgaagttgttctgcgtctgacctctcgcctgatctgtccgaaatgcgggcgtatctacaacatgatttttctgccaccaaaagaagacgagctgtgtgacgattgcggtgtcggcttagtacagcgtgatgatgataaggaagaaacggtccgtcaccgcctgaaagtctaccttgagaagacccagccggtcattgactattatagtaagaaaggtattctcaaacgcgtagatgggtcgcaaggaatcgacaacgttgttgcagaagtcctggggattctgggttggagcgataagtaatga

SEQ ID NO: 2062 - protein, 231 aa, synthetic construct
  REGION 1..231: note = Variant of adenylate kinase
MHHHHHHGGSGMGAYLVFLGPPGAGKGTQGRRISAKTGIPHISTGDIFRDIVAKQNDELASKIKEIMEKGELVPDELGNAVVKRRLSEKDCEKGFILDGYPRTVRQAEYLDSFLESQNRQLTAAVLFKVPEDEVVLRLTSRLICPKCGRIYNMIFLPPKEDELCDDCGVGLVQRDDDKEETVRHRLKVYLEKTQPVIDYYSKKGILKRVDGSQGIDNVVAEVLGILGWSDK

SEQ ID NO: 2063 - DNA, 699 bp, synthetic construct
  misc_feature 1..699: note = Variant of adenylate kinase
  source 1..699: mol_type = other DNA
atgcaccatcatcaccatcacgggggctccggcatgggggcatatctggtgttcttaggtccgccgggcgcgggaaaaagtacccaaggccgtcgcatttcggcaaagactggcatcccgcatattagcacgggcgatatcttccgtgacatcgtcgctaagcaaaacgatgaactggcctcgaaaattaaagagatcatggagaaaggtgaactcgttccagatgaactgggtaatgcggtagtaaaacgccgcctgtcggagaaagactgcgaaaaaggctttattttggatggttatccgcgtaccgtgcgccaagcggaatatctggatagttttcttgaaagccagaatcgccagttgacagccgccgtggctttcaaagtccccgaagatgaagttgtgcaacgtttaacctctcgcctgatctgtccgaaatgccaccgtatctacaacatgatttttctgccaccaaaagaagacgagctgtgtgacgattgcggtgtcggcttagtacagcgtgatgatgataaggaagaaacggtccgtcaccgcctgaaagtctaccttgagaagacccagccggtcattgactattatagtaagaaaggtattctcaaacgcgtagatgggtcgcaaggaatcgacaacgttgtcgcagaagtcctggggattctgggttggagcgataagtaatga

SEQ ID NO: 2064 - protein, 231 aa, synthetic construct
  REGION 1..231: note = Variant of adenylate kinase
MHHHHHHGGSGMGAYLVFLGPPGAGKSTQGRRISAKTGIPHISTGDIFRDIVAKQNDELASKIKEIMEKGELVPDELGNAVVKRRLSEKDCEKGFILDGYPRTVRQAEYLDSFLESQNRQLTAAVAFKVPEDEVVQRLTSRLICPKCHRIYNMIFLPPKEDELCDDCGVGLVQRDDDKEETVRHRLKVYLEKTQPVIDYYSKKGILKRVDGSQGIDNVVAEVLGILGWSDK

SEQ ID NO: 2065 - DNA, 699 bp, synthetic construct
  misc_feature 1..699: note = Variant of adenylate kinase
  source 1..699: mol_type = other DNA
atgcaccatcatcaccatcacgggggctccggcatgggggcatatctggtgttcttaggtccgccgggcgcgggaaaaggtacccaaggccgtcgcatttcggcaaagactggcatcccgcatattagcacgggcgatatcttccgtgacatcgtcgctaagcaaaacgatgaactggcctcgaaaattaaagagatcatggggaaaggtgaactcgttccagatgaactgggtaatgcggtagtaaaacgccgcctgtcggagaaagactgcgaaaaaggctttattttggatggttatccgcgtaccgtgcgccaagcggaatatctggatagttttcttgaaagccagaatcgccagttgacagccgccgtgctgttcaaagtccccgaagatgaagttgtgcaacgtttaacctctcgcctgatctgtccgaaatgcgggcgtatctacaacatgatttttctgccaccaaaagaagacgagctgtgtgacgattgcggtgtcggcttagtacagcgtgatgatgataaggaagaaacggtccgtcaccgcctgaaagtctaccttgagaagacccagccggtcattgactattatagtaagaaaggtattctcaaacgcgtagatgggtcgcaaggaatcgacaacgttgttgcagaagtcctggggattctgggttggagcgataagtaatga

SEQ ID NO: 2066 - protein, 231 aa, synthetic construct
  REGION 1..231: note = Variant of adenylate kinase
MHHHHHHGGSGMGAYLVFLGPPGAGKGTQGRRISAKTGIPHISTGDIFRDIVAKQNDELASKIKEIMGKGELVPDELGNAVVKRRLSEKDCEKGFILDGYPRTVRQAEYLDSFLESQNRQLTAAVLFKVPEDEVVQRLTSRLICPKCGRIYNMIFLPPKEDELCDDCGVGLVQRDDDKEETVRHRLKVYLEKTQPVIDYYSKKGILKRVDGSQGIDNVVAEVLGILGWSDK

SEQ ID NO: 2067 - DNA, 699 bp, synthetic construct
  misc_feature 1..699: note = Variant of adenylate kinase
  source 1..699: mol_type = other DNA
atgcaccatcatcaccatcacgggggctccggcatgggggcatatctggtgttcttaggtccgccgggcgcgggaaaaggtacccaaggccgtcgcatttcggcaaagactggcatcccgcatattagcacgggcgatatcttccgtgacatcgtcgctaagcaaaacgatgaactggcctcgaaaattaaagagatcatggagaaaggtgaactcgttccagatgaactgggtaatgcggtagtaaaacgccgcctgtcggagaaagactgcgaaaaaggctttattttggatggttatccgcgtaccgtgcgccaagcggaatatctggatagttttcttgaaagccagaatcgccagttgacagccgccgtggctttcaaagtccccgaagatgaagttgtgcaacgtttaacctctcgcctgatctgtccgaaatgcacgcgtatctacaacatgatttttctgccaccaaaagaagacgagctgtgtgacgattgcggtgtcggcttagtacagcgtgatgatgataaggaagaaacggtccgtcaccgcctgaaagtctaccttgagaagacccagccggtcattgactattatagtaagaaaggtattctcaaacgcgtagatgggtcgcaaggaatcgacaacgttgttgcagaagtcctggggattctgggttggagcgataagtaatga

SEQ ID NO: 2068 - protein, 231 aa, synthetic construct
  REGION 1..231: note = Variant of adenylate kinase
MHHHHHHGGSGMGAYLVFLGPPGAGKGTQGRRISAKTGIPHISTGDIFRDIVAKQNDELASKIKEIMEKGELVPDELGNAVVKRRLSEKDCEKGFILDGYPRTVRQAEYLDSFLESQNRQLTAAVAFKVPEDEVVQRLTSRLICPKCTRIYNMIFLPPKEDELCDDCGVGLVQRDDDKEETVRHRLKVYLEKTQPVIDYYSKKGILKRVDGSQGIDNVVAEVLGILGWSDK

SEQ ID NO: 2069 - DNA, 699 bp, synthetic construct
  misc_feature 1..699: note = Variant of adenylate kinase
  source 1..699: mol_type = other DNA
atgcaccatcatcaccatcacgggggctccggcatgggggcatatctggtgttcttaggtccgccgggcgcgggaaaaggtacccaaggccgtcgcatttcggcaaagactggcatcccgcatattagcacgggcgatatcttccgtgacatcgtcgctaagcaaaacgatgaactggcctcgaaaattaaagagatcatggagaaaggtgaactcgttccagatgaactgggtaatgcggtagtaaaacgccgcctgtcggagaaagactgcgaaaaaggctttattttggatggttatccgcgtaccgtgcgccaagcggaatatctggatagttttcttgaaagccagaatcgccagttgacagccgccgtgctgttcaaagtccccgaagatgaagttgttcagcgtgtgcgttctcgcctgatctgtccgaaatgcgggcgtatctacaacatgatttttctgccaccaaaagaagacgagctgtgtgacgattgcggtgtcggcttagtacagcgtgatgatgataaggaagaaaccgtccgtcaccgcctgaaagtctaccttgagaagacccagccggtcattgactattatagtaagaaaggtattctcaaacgcgtagatgggtcgcaaggaatcgacaacgttgttgcagaagtcctggggattctgggttggagcgataagtaatga

SEQ ID NO: 2070 - protein, 231 aa, synthetic construct
  REGION 1..231: note = Variant of adenylate kinase
MHHHHHHGGSGMGAYLVFLGPPGAGKGTQGRRISAKTGIPHISTGDIFRDIVAKQNDELASKIKEIMEKGELVPDELGNAVVKRRLSEKDCEKGFILDGYPRTVRQAEYLDSFLESQNRQLTAAVLFKVPEDEVVQRVRSRLICPKCGRIYNMIFLPPKEDELCDDCGVGLVQRDDDKEETVRHRLKVYLEKTQPVIDYYSKKGILKRVDGSQGIDNVVAEVLGILGWSDK

SEQ ID NO: 2071 - DNA, 699 bp, synthetic construct
  misc_feature 1..699: note = Variant of adenylate kinase
  source 1..699: mol_type = other DNA
atgcaccatcatcaccatcacgggggctccggcatgggggcatatctggtgttcttaggtccgccgggcgcgggaaaaggtacccaaggccgtcgcatttcggcaaagactggcatcccgcatattagcacgggcgatatcctgcgtgacatcgtcgctaagcaaaacgatgaagttgcctcgaaaattaaagagatcatggagaaaggtgaactcgttccagatgaactgggtaatgcggtagtaaaacgccgcctgtcggagaaagactgcgaaaaaggctttattttggatggtttcccgcgtaccgtgcgccaagcggaatatctggatagttttcttgaaagccagaatcgccagttgacagccgccgtgctgttcaaagtccccgaagatgaagttgttcagcgtctgctgtctcgcctgatctgtccgaaatgccaccgtatctacaacatgatttttctgccaccaaaagaagacgagctgtgtgacgattgcggtgtcggcttagtacagcgtgatgatgataaggaagaaacggtccgtcaccgcctgaaagtctaccttgagaagacccagccggtcattgactattatagtaagaaaggtattctcaaacgcgtagatgggtcgcaaggaatcgacaacgttgtggcagaagtcctggggattctgggttggagcgataagtaatga

SEQ ID NO: 2072 - protein, 231 aa, synthetic construct
  REGION 1..231: note = Variant of adenylate kinase
MHHHHHHGGSGMGAYLVFLGPPGAGKGTQGRRISAKTGIPHISTGDILRDIVAKQNDEVASKIKEIMEKGELVPDELGNAVVKRRLSEKDCEKGFILDGFPRTVRQAEYLDSFLESQNRQLTAAVLFKVPEDEVVQRLLSRLICPKCHRIYNMIFLPPKEDELCDDCGVGLVQRDDDKEETVRHRLKVYLEKTQPVIDYYSKKGILKRVDGSQGIDNVVAEVLGILGWSDK

SEQ ID NO: 2073 - DNA, 699 bp, synthetic construct
  misc_feature 1..699: note = Variant of adenylate kinase
  source 1..699: mol_type = other DNA
atgcaccatcatcaccatcacgggggctccggcatgggggcatatctggtgttcttaggtccgccgggcgcgggaaaaggtacccaaggccgtcgcatttcggcaaagactggcatcccgcatattagcacgggcgatatcctgcgtgacatcgtcgctaagcaaaacgatgaagttgcctcgaaaattaaagagttcatggagaaaggtgaactcgttccagatgaactgggtaatgcggtagtaaaacgccgcctgtcggagaaagactgcgaaaaaggctttattttggatggttatccgcgtaccgtgcgccaagcggaatatctggatagttttcttgaaagccagaatcgccagttgacagccgccgtgctgttcaaagtccccgaagatgaagttgttcagcgtctgctgtctcgcctgatctgtccgaaatgcttccgtatctacaacatgatttttctgccaccaaaagaagacgagctgtgtgacgattgcggtgtcggcttagtacagcgtgatgatgataaggaagaaacggtccgtcaccgcctgaaagtctaccttgagaagacccagccggtcattgactattatagtaagaaaggtattctcaaacgcgtagatgggtcgcaaggaatcgacaacgttctggcagaagtcctggggattctgggttggagcgataagtaatga

SEQ ID NO: 2074 - protein, 231 aa, synthetic construct
  REGION 1..231: note = Variant of adenylate kinase
MHHHHHHGGSGMGAYLVFLGPPGAGKGTQGRRISAKTGIPHISTGDILRDIVAKQNDEVASKIKEFMEKGELVPDELGNAVVKRRLSEKDCEKGFILDGYPRTVRQAEYLDSFLESQNRQLTAAVLFKVPEDEVVQRLLSRLICPKCFRIYNMIFLPPKEDELCDDCGVGLVQRDDDKEETVRHRLKVYLEKTQPVIDYYSKKGILKRVDGSQGIDNVLAEVLGILGWSDK

SEQ ID NO: 2075 - DNA, 699 bp, synthetic construct
  misc_feature 1..699: note = Variant of adenylate kinase
  source 1..699: mol_type = other DNA
atgcaccatcatcaccatcacgggggctccggcatgggggcatatctggtgttcttaggtccgccgggcgcgggaaaaggtacccaaggccgtcgcatttcggcaaagactggcatcccgcatattagcacgggcgatatcctgcgtgacatcgtcgctaagcaaaacgatgaagttgcctcgaaaattaaagagatcatggagaaaggtgaactcgttccagatgaactgggtaatgcggtagtaaaacgccgcctgtcggagaaagactgcgaaaaaggctttattttggatggtttcccgcgtaccgtgcgccaagcggaatatctggatagttttcttgaaagccagaatcgccagttgacagccgccgtgctgttcaaagtccccgaagatgaagttgttcagcgtctgctgtctcgcctgatctgtccgaaatgcgggcgtatctacaacatgatttttctgccaccaaaagaagacgagctgtgtgacgattgcggtgtcggcttagtacagcgtgatgatgataaggaagaaacggtccgtcaccgcctgaaagtctaccttgagaagacccagccggtcattgactattatagtaagaaaggtattctcaaacgcgtagatgggtcgcaaggaatcgacaacgttgtggcagaagtcctggggattctgggttggagcgataagtaatga

SEQ ID NO: 2076 - protein, 231 aa, synthetic construct
  REGION 1..231: note = Variant of adenylate kinase
MHHHHHHGGSGMGAYLVFLGPPGAGKGTQGRRISAKTGIPHISTGDILRDIVAKQNDEVASKIKEIMEKGELVPDELGNAVVKRRLSEKDCEKGFILDGFPRTVRQAEYLDSFLESQNRQLTAAVLFKVPEDEVVQRLLSRLICPKCGRIYNMIFLPPKEDELCDDCGVGLVQRDDDKEETVRHRLKVYLEKTQPVIDYYSKKGILKRVDGSQGIDNVVAEVLGILGWSDK

SEQ ID NO: 2077 - DNA, 699 bp, synthetic construct
  misc_feature 1..699: note = Variant of adenylate kinase
  source 1..699: mol_type = other DNA
atgcaccatcatcaccatcacgggggctccggcatgggggcatatctggtgttcttaggtccgccgggcgcgggaaaaggtacccaaggccgtcgcatttcggcaaagactggcatcccgcatattagcacgggcgatatcctgcgtgacatcgtcgctaagcaaaacgatgaagttgcctcgaaaattaaagagatcatggagaaaggtgaactcgttccagatgaactgggtaatgcggtagtaaaacgccgcctgtcggagaaagactgcgaaaaaggctttattttggatggtttcccgcgtaccgtgcgccaagcggaatatctggatagttttcttgaaagccagaatcgccagttgacagccgccgtgctgttcaaagtccccgaagatgaagttcgcctgcgtctgctgtctcgcctgatctgtccgaaatgcgggcgtatctacaacatgatttttctgccaccaaaagaagacgagctgtgtgacgattgcggtgtcggcttagtacagcgtgatgatgataaggaagaaacggtccgtcaccgcctgaaagtctaccttgagaagacccagccggtcattgactattatagtaagaaaggtattctcaaacgcgtagatgggtcgcaaggaatcgacaacgttgttgcagaagtcctggggattctgggttggagcgataagtaatga

SEQ ID NO: 2078 - protein, 231 aa, synthetic construct
  REGION 1..231: note = Variant of adenylate kinase
MHHHHHHGGSGMGAYLVFLGPPGAGKGTQGRRISAKTGIPHISTGDILRDIVAKQNDEVASKIKEIMEKGELVPDELGNAVVKRRLSEKDCEKGFILDGFPRTVRQAEYLDSFLESQNRQLTAAVLFKVPEDEVRLRLLSRLICPKCGRIYNMIFLPPKEDELCDDCGVGLVQRDDDKEETVRHRLKVYLEKTQPVIDYYSKKGILKRVDGSQGIDNVVAEVLGILGWSDK

SEQ ID NO: 2079 - DNA, 699 bp, synthetic construct
  misc_feature 1..699: note = Variant of adenylate kinase
  source 1..699: mol_type = other DNA
atgcaccatcatcaccatcacgggggctccggcatgggggcatatctggtgttcttaggtccgccgggcgcgggaaaaggtacccaaggccgtcgcatttcggcaaagactggcatcccgcatattagcacgggcgatatcctgcgtgacatcgtcgctaagcaaaacgatgaagttgcctcgaaaattaaagagttcatggagaaaggtgaactcgttccagatgaaatgggtaatgcggtagtaaaacgccgcctgtcggagaaagactgcgaaaaaggctttattttggatggtttcccgcgtaccgtgcgccaagcggaatatctggatagttttcttgaaagccagaatcgccagttgacagccgccgtgctgttcaaagtccccgaagatgaagttcgcctgcgtctgctgtctcgcctgatctgtccgaaatgccaccgtatctacaacatgatttttctgccaccaaaagaagacgagctgtgtgacgattgcggtgtcggcttagtacagcgtgatgatgataaggaagaaacggtccgtcaccgcctgaaagtctaccttgagaagacccagccggtcattgactattatagtaagaaaggtattctcaaacgcgtagatgggtcgcaaggaatcgacaacgttgtggcagaagtcctggggattctgggttggagcgataagtaatga

SEQ ID NO: 2080 - protein, 231 aa, synthetic construct
  REGION 1..231: note = Variant of adenylate kinase
MHHHHHHGGSGMGAYLVFLGPPGAGKGTQGRRISAKTGIPHISTGDILRDIVAKQNDEVASKIKEFMEKGELVPDEMGNAVVKRRLSEKDCEKGFILDGFPRTVRQAEYLDSFLESQNRQLTAAVLFKVPEDEVRLRLLSRLICPKCHRIYNMIFLPPKEDELCDDCGVGLVQRDDDKEETVRHRLKVYLEKTQPVIDYYSKKGILKRVDGSQGIDNVVAEVLGILGWSDK

SEQ ID NO: 2081 - DNA, 699 bp, synthetic construct
  misc_feature 1..699: note = Variant of adenylate kinase
  source 1..699: mol_type = other DNA
atgcaccatcatcaccatcacgggggctccggcatgggggcatatctggtgttcttaggtccgccgggcgcgggaaaaggtacccaaggccgtcgcatttcggcaaagactggcatcccgcatattagcacgggcgatatcctgcgtgacatcgtcgctaagcaaaacgatgaagttgcctcgaaaattaaagagatcatggagaaaggtgaactcgttccagatgaactgggtaatgcggtagtaaaacgccgcctgtcggagaaagactgcgaaaaaggctttattttggatggtttcccgcgtaccgtgcgccaagcggaatatctggatagttttcttgaaagccagaatcgccagttgacagccgccgtgctgttcaaagtccccgaagatgaagttgttctgcgtctgctgtctcgcctgatctgtccgaaatgcggtcgtatctacaacatgatttttctgccaccaaaagaagacgagctgtgtgacgattgcggtgtcggcttagtacagcgtgatgatgataaggaagaaacggtccgtcaccgcctgaaagtctaccttgagaagacccagccggtcattgactattatagtaagaaaggtattctcaaacgcgtagatgggtcgcaaggaatcgacaacgttgtggcagaagtcctggggattctgggttggagcgataagtaatga

SEQ ID NO: 2082 - protein, 231 aa, synthetic construct
  REGION 1..231: note = Variant of adenylate kinase
MHHHHHHGGSGMGAYLVFLGPPGAGKGTQGRRISAKTGIPHISTGDILRDIVAKQNDEVASKIKEIMEKGELVPDELGNAVVKRRLSEKDCEKGFILDGFPRTVRQAEYLDSFLESQNRQLTAAVLFKVPEDEVVLRLLSRLICPKCGRIYNMIFLPPKEDELCDDCGVGLVQRDDDKEETVRHRLKVYLEKTQPVIDYYSKKGILKRVDGSQGIDNVVAEVLGILGWSDK

SEQ ID NO: 2083 - DNA, 699 bp, synthetic construct
  misc_feature 1..699: note = Variant of adenylate kinase
  source 1..699: mol_type = other DNA
atgcaccatcatcaccatcacgggggctccggcatgggggcatatctggtgttcttaggtccgccgggcgcgggaaaaggtacccaaggccgtcgcatttcggcaaagactggcatcccgcatattagcacgggcgatatcctgcgtgacatcgtcgctaagcaaaacgatgaagttgcctcgaaaattaaagagatcatggagaaaggtgaactcgttccagatgaactgggtaatgcggtagtaaaacgccgcctgtcggagaaagactgcgaaaaaggctttattttggatggttatccgcgtaccgtgcgccaagcggaatatctggatagttttcttgaaagccagaatcgccagttgacagccgccgtgctgttcaaagtccccgaagatgaagttcgccagcgtctgctgtctcgcctgatctgtccgaaatgcttccgtatctacaacatgatttttctgccaccaaaagaagacgagctgtgtgacgattgcggtgtcggcttagtacagcgtgatgatgataaggaagaaacggtccgtcaccgcctgaaagtctaccttgagaagacccagccggtcattgactattatagtaagaaaggtattctcaaacgcgtagatgggtcgcaaggaatcgacaacgttgttgcagaagtcctggggattctgggttggagcgataagtaatga

SEQ ID NO: 2084 - protein, 231 aa, synthetic construct
  REGION 1..231: note = Variant of adenylate kinase
MHHHHHHGGSGMGAYLVFLGPPGAGKGTQGRRISAKTGIPHISTGDILRDIVAKQNDEVASKIKEIMEKGELVPDELGNAVVKRRLSEKDCEKGFILDGYPRTVRQAEYLDSFLESQNRQLTAAVLFKVPEDEVRQRLLSRLICPKCFRIYNMIFLPPKEDELCDDCGVGLVQRDDDKEETVRHRLKVYLEKTQPVIDYYSKKGILKRVDGSQGIDNVVAEVLGILGWSDK

SEQ ID NO: 2085 - DNA, 699 bp, synthetic construct
  misc_feature 1..699: note = Variant of adenylate kinase
  source 1..699: mol_type = other DNA
atgcaccatcatcaccatcacgggggctccggcatgggggcatatctggtgttcttaggtccgccgggcgcgggaaaaggtacccaaggccgtcgcatttcggcaaagactggcatcccgcatattagcacgggcgatatcctgcgtgacatcgtcgctaagcaaaacgatgaagttgcctcgaaaattaaagagatcatggagaaaggtgaactcgttccagatgaactgggtaatgcggtagtaaaacgccgcctgtcggagaaagactgcgaaaaaggctttattttggatggttatccgcgtaccgtgcgccaagcggaatatctggatagttttcttgaaagccagaatcgccagttgacagccgccgtgctgttcaaagtccccgaagatgaagttgttcagcgtctgctgtctcgcctgatctgtccgaaatgcttccgtatctacaacatgatttttctgccaccaaaagaagacgagctgtgtgacgattgcggtgtcggcttagtacagcgtgatgatgataaggaagaaacggtccgtcaccgcctgaaagtctaccttgagaagacccagccggtcattgactattatagtaagaaaggtattctcaaacgcgtagatgggtcgcaaggaatcgacaacgttgtggcagaagtcctggggattctgggttggagcgataagtaatga

SEQ ID NO: 2086 - protein, 231 aa, synthetic construct
  REGION 1..231: note = Variant of adenylate kinase
MHHHHHHGGSGMGAYLVFLGPPGAGKGTQGRRISAKTGIPHISTGDILRDIVAKQNDEVASKIKEIMEKGELVPDELGNAVVKRRLSEKDCEKGFILDGYPRTVRQAEYLDSFLESQNRQLTAAVLFKVPEDEVVQRLLSRLICPKCFRIYNMIFLPPKEDELCDDCGVGLVQRDDDKEETVRHRLKVYLEKTQPVIDYYSKKGILKRVDGSQGIDNVVAEVLGILGWSDK

SEQ ID NO: 2087 - DNA, 699 bp, synthetic construct
  misc_feature 1..699: note = Variant of adenylate kinase
  source 1..699: mol_type = other DNA
atgcaccatcatcaccatcacgggggctccggcatgggggcatatctggtgttcttaggtccgccgggcgcgggaaaaggtacccaaggccgtcgcatttcggcaaagactggcatcccgcatattagcacgggcgatatcctgcgtgacatcgtcgctaagcaaaacgatgaagttgcctcgaaaattaaagagatcatggagaaaggtgaactcgttccagatgaactgggtaatgcggtagtaaaacgccgcctgtcggagaaagactgcgaaaaaggctttattttggatggttatccgcgtaccgtgcgccaagcggaatatctggatagttttcttgaaagccagaatcgccagttgacagccgccgtgctgttcaaagtccccgaagatgaagttgttctgcgtctgctgtctcgcctgatctgtccgaaatgcttccgtatctacaacatgatttttctgccaccaaaagaagacgagctgtgtgacgattgcggtgtcggcttagtacagcgtgatgatgataaggaagaaacggtccgtcaccgcctgaaagtctaccttgagaagacccagccggtcattgactattatagtaagaaaggtattctcaaacgcgtagatgggtcgcaaggaatcgacaacgttgttgcagaagtcctggggattctgggttggagcgataagtaatga

SEQ ID NO: 2088 - protein, 231 aa, synthetic construct
  REGION 1..231: note = Variant of adenylate kinase
MHHHHHHGGSGMGAYLVFLGPPGAGKGTQGRRISAKTGIPHISTGDILRDIVAKQNDEVASKIKEIMEKGELVPDELGNAVVKRRLSEKDCEKGFILDGYPRTVRQAEYLDSFLESQNRQLTAAVLFKVPEDEVVLRLLSRLICPKCFRIYNMIFLPPKEDELCDDCGVGLVQRDDDKEETVRHRLKVYLEKTQPVIDYYSKKGILKRVDGSQGIDNVVAEVLGILGWSDK

SEQ ID NO: 2089 - DNA, 699 bp, synthetic construct
  misc_feature 1..699: note = Variant of adenylate kinase
  source 1..699: mol_type = other DNA
atgcaccatcatcaccatcacgggggctccggcatgggggcatatctggtgttcttaggtccgccgggcgcgggaaaaggtacccaaggccgtcgcatttcggcaaagactggcatcccgcatattagcacgggcgatatcctgcgtgacatcgtcgctaagcaaaacgatgaagttgcctcgaaaattaaagagatcatggagaaaggtgaactcgttccagatgaactgggtaatgcggtagtaaaacgccgcctgtcggagaaagactgcgaaaaaggctttattttggatggttatccgcgtaccgtgcgccaagcggaatatctggatagttttcttgaaagccagaatcgccagttgacagccgccgtgctgttcaaagtccccgaagatgaagttcgccagcgtctgctgtctcgcctgatctgtccgaaatgcgggcgtatctacaacatgatttttctgccaccaaaagaagacgagctgtgtgacgattgcggtgtcggcttagtacagcgtgatgatgataaggaagaaacggtccgtcaccgcctgaaagtctaccttgagaagacccagccggtcattgactattatagtaagaaaggtattctcaaacgcgtagatgggtcgcaaggaatcgacaacgttgtggcagaagtcctggggattctgggttggagcgataagtaatga

SEQ ID NO: 2090 - protein, 231 aa, synthetic construct
  REGION 1..231: note = Variant of adenylate kinase
MHHHHHHGGSGMGAYLVFLGPPGAGKGTQGRRISAKTGIPHISTGDILRDIVAKQNDEVASKIKEIMEKGELVPDELGNAVVKRRLSEKDCEKGFILDGYPRTVRQAEYLDSFLESQNRQLTAAVLFKVPEDEVRQRLLSRLICPKCGRIYNMIFLPPKEDELCDDCGVGLVQRDDDKEETVRHRLKVYLEKTQPVIDYYSKKGILKRVDGSQGIDNVVAEVLGILGWSDK

SEQ ID NO: 2091 - DNA, 699 bp, synthetic construct
  misc_feature 1..699: note = Variant of adenylate kinase
  source 1..699: mol_type = other DNA
atgcaccatcatcaccatcacgggggctccggcatgggggcatatctggtgttcttaggtccgccgggcgcgggaaaaggtacccaaggccgtcgcatttcggcaaagactggcatcccgcatattagcacgggcgatatcctgcgtgacatcgtcgctaagcaaaacgatgaagttgcctcgaaaattaaagagatcatggagaaaggtgaactcgttccagatgaactgggtaatgcggtagtaaaacgccgcctgtcggagaaagactgcgaaaaaggctttattttggatggttatccgcgtaccgtgcgccaagcggaatatctggatagttttcttgaaagccagaatcgccagttgacagccgccgtgctgttcaaagtccccgaagatgaagttcgcctgcgtctgctgtctcgcctgatctgtccgaaatgcggtcgtatctacaacatgatttttctgccaccaaaagaagacgagctgtgtgacgattgcggtgtcggcttagtacagcgtgatgatgataaggaagaaacggtccgtcaccgcctgaaagtctaccttgagaagacccagccggtcattgactattatagtaagaaaggtattctcaaacgcgtagatgggtcgcaaggaatcgacaacgttgttgcagaagtcctggggattctgggttggagcgataagtaatga

SEQ ID NO: 2092 - protein, 231 aa, synthetic construct
  REGION 1..231: note = Variant of adenylate kinase
MHHHHHHGGSGMGAYLVFLGPPGAGKGTQGRRISAKTGIPHISTGDILRDIVAKQNDEVASKIKEIMEKGELVPDELGNAVVKRRLSEKDCEKGFILDGYPRTVRQAEYLDSFLESQNRQLTAAVLFKVPEDEVRLRLLSRLICPKCGRIYNMIFLPPKEDELCDDCGVGLVQRDDDKEETVRHRLKVYLEKTQPVIDYYSKKGILKRVDGSQGIDNVVAEVLGILGWSDK

SEQ ID NO: 2093 - DNA, 699 bp, synthetic construct
  misc_feature 1..699: note = Variant of adenylate kinase
  source 1..699: mol_type = other DNA
atgcaccatcatcaccatcacgggggctccggcatgggggcatatctggtgttcttaggtccgccgggcgcgggaaaaggtacccaaggccgtcgcatttcggcaaagactggcatcccgcatattagcacgggcgatatctttcgtgacatcgtcgctaagcaaaacgatgaagttgcctcgaaaattaaagagttcatggagaaaggtgaactcgttccagatgaactgggtaatgcggtagtaaaacgccgcctgtcggagaaagactgcgaaaaaggctttattttggatggtttcccgcgtaccgtgcgccaagcggaatatctggatagttttcttgaaagccagaatcgccagttgacagccgccgtgctgttcaaagtccccgaagatgaagttgttcagcgtctgctgtctcgcctgatctgtccgaaatgcgggcgtatctacaacatgatttttctgccaccaaaagaagacgagctgtgtgacgattgcggtgtcggcttagtacagcgtgatgatgataaggaagaaacggtccgtcaccgcctgaaagtctaccttgagaagacccagccggtcattgactattatagtaagaaaggtattctcaaacgcgtagatgggtcgcaaggaatcgacaacgttgttgcagaagtcctggggattctgggttggagcgataagtaatga

SEQ ID NO: 2094 - protein, 231 aa, synthetic construct
  REGION 1..231: note = Variant of adenylate kinase
MHHHHHHGGSGMGAYLVFLGPPGAGKGTQGRRISAKTGIPHISTGDIFRDIVAKQNDEVASKIKEFMEKGELVPDELGNAVVKRRLSEKDCEKGFILDGFPRTVRQAEYLDSFLESQNRQLTAAVLFKVPEDEVVQRLLSRLICPKCGRIYNMIFLPPKEDELCDDCGVGLVQRDDDKEETVRHRLKVYLEKTQPVIDYYSKKGILKRVDGSQGIDNVVAEVLGILGWSDK

SEQ ID NO: 2095 - DNA, 699 bp, synthetic construct
  misc_feature 1..699: note = Variant of adenylate kinase
  source 1..699: mol_type = other DNA
atgcaccatcatcaccatcacgggggctccggcatgggggcatatctggtgttcttaggtccgccgggcgcgggaaaaggtacccaaggccgtcgcatttcggcaaagactggcatcccgcatattagcacgggcgatatcctgcgtgacatcgtcgctaagcaaaacgatgaagttgcctcgaaaattaaagagcaaatggagaaaggtgaactcgttccagatgaactgggtaatgcggtagtaaaacgccgcctgtcggagaaagactgcgaaaaaggctttattttggatggttatccgcgtaccgtgcgccaagcggaatatctggatagttttcttgaaagccagaatcgccagttgacagccgccgtgctgttcaaagtccccgaagatgaagttgttcagcgtctgctgtctcgcctgatctgtccgaaatgcgggcgtatctacaacatgatttttctgccaccaaaagaagacgagctgtgtgacgattgcggtgtcggcttagtacagcgtgatgatgataaggaagaaacggtccgtcaccgcctgaaagtctaccttgagaagacccagccggtcattgactattatagtaagaaaggtattctcaaacgcgtagatgggtcgcaaggaatcgacaacgttctggcagaagtcctggggattctgggttggagcgataagtaatga

SEQ ID NO: 2096 - protein, 231 aa, synthetic construct
  REGION 1..231: note = Variant of adenylate kinase
MHHHHHHGGSGMGAYLVFLGPPGAGKGTQGRRISAKTGIPHISTGDILRDIVAKQNDEVASKIKEQMEKGELVPDELGNAVVKRRLSEKDCEKGFILDGYPRTVRQAEYLDSFLESQNRQLTAAVLFKVPEDEVVQRLLSRLICPKCGRIYNMIFLPPKEDELCDDCGVGLVQRDDDKEETVRHRLKVYLEKTQPVIDYYSKKGILKRVDGSQGIDNVLAEVLGILGWSDK

SEQ ID NO: 2097 - DNA, 699 bp, synthetic construct
  misc_feature 1..699: note = Variant of adenylate kinase
  source 1..699: mol_type = other DNA
atgcaccatcatcaccatcacgggggctccggcatgggggcatatctggtgttcttaggtccgccgggcgcgggaaaaggtacccaaggccgtcgcatttcggcaaagactggcatcccgcatattagcacgggcgatatcctgcgtgacatcgtcgctaagcaaaacgatgaagttgcctcgaaaattaaagagatcatggagaaaggtgaactcgttccagatgaactgggtaatgcggtagtaaaacgccgcctgtcggagaaagactgcgaaaaaggctttattttggatggttatccgcgtaccgtgcgccaagcggaatatctggatagttttcttgaaagccagaatcgccagttgacagccgccgtgctgttcaaagtccccgaagatgaagttcgccagcgtctgctgtctcgcctgatctgtccgaaatgcgggcgtatctacaacatgatttttctgccaccaaaagaagacgagctgtgtgacgattgcggtgtcggcttagtacagcgtgatgatgataaggaagaaacggtccgtcaccgcctgaaagtctaccttgagaagacccagccggtcattgactattatagtaagaaaggtattctcaaacgcgtagatgggtcgcaaggaatcgacaacgttctggcagaagtcctggggattctgggttggagcgataagtaatga

SEQ ID NO: 2098 - protein, 231 aa, synthetic construct
  REGION 1..231: note = Variant of adenylate kinase
MHHHHHHGGSGMGAYLVFLGPPGAGKGTQGRRISAKTGIPHISTGDILRDIVAKQNDEVASKIKEIMEKGELVPDELGNAVVKRRLSEKDCEKGFILDGYPRTVRQAEYLDSFLESQNRQLTAAVLFKVPEDEVRQRLLSRLICPKCGRIYNMIFLPPKEDELCDDCGVGLVQRDDDKEETVRHRLKVYLEKTQPVIDYYSKKGILKRVDGSQGIDNVLAEVLGILGWSDK

SEQ ID NO: 2099 - DNA, 699 bp, synthetic construct
  misc_feature 1..699: note = Variant of adenylate kinase
  source 1..699: mol_type = other DNA
atgcaccatcatcaccatcacgggggctccggcatgggggcatatctggtgttcttaggtccgccgggcgcgggaaaaggtacccaaggccgtcgcatttcggcaaagactggcatcccgcatattagcacgggcgatatctttcgtgacatcgtcgctaagcaaaacgatgaagttgcctcgaaaattaaagagatcatggagaaaggtgaactcgttccagatgaactgggtaatgcggtagtaaaacgccgcctgtcggagaaagactgcgaaaaaggctttattttggatggtttcccgcgtaccgtgcgccaagcggaatatctggatagttttcttgaaagccagaatcgccagttgacagccgccgtgctgttcaaagtccccgaagatgaagttgttcagcgtctgctgtctcgcctgatctgtccgaaatgccaccgtatctacaacatgatttttctgccaccaaaagaagacgagctgtgtgacgattgcggtgtcggcttagtacagcgtgatgatgataaggaagaaacggtccgtcaccgcctgaaagtctaccttgagaagacccagccggtcattgactattatagtaagaaaggtattctcaaacgcgtagatgggtcgcaaggaatcgacaacgttgtggcagaagtcctggggattctgggttggagcgataagtaatga

SEQ ID NO: 2100 - protein, 231 aa, synthetic construct
  REGION 1..231: note = Variant of adenylate kinase
MHHHHHHGGSGMGAYLVFLGPPGAGKGTQGRRISAKTGIPHISTGDIFRDIVAKQNDEVASKIKEIMEKGELVPDELGNAVVKRRLSEKDCEKGFILDGFPRTVRQAEYLDSFLESQNRQLTAAVLFKVPEDEVVQRLLSRLICPKCHRIYNMIFLPPKEDELCDDCGVGLVQRDDDKEETVRHRLKVYLEKTQPVIDYYSKKGILKRVDGSQGIDNVVAEVLGILGWSDK

SEQ ID NO: 2101 - DNA, 699 bp, synthetic construct
  misc_feature 1..699: note = Variant of adenylate kinase
  source 1..699: mol_type = other DNA
atgcaccatcatcaccatcacgggggctccggcatgggggcatatctggtgttcttaggtccgccgggcgcgggaaaaggtacccaaggccgtcgcatttcggcaaagactggcatcccgcatattagcacgggcgatatcctgcgtgacatcgtcgctaagcaaaacgatgaagttgcctcgaaaattaaagagatcatggagaaaggtgaactcgttccagatgaactgggtaatgcggtagtaaaacgccgcctgtcggagaaagactgcgaaaaaggctttattttggatggttatccgcgtaccgtgcgccaagcggaatatctggatagttttcttgaaagccagaatcgccagttgacagccgccgtgctgttcaaagtccccgaagatgaagttgttctgcgtctgctgtctcgcctgatctgtccgaaatgcgggcgtatctacaacatgatttttctgccaccaaaagaagacgagctgtgtgacgattgcggtgtcggcttagtacagcgtgatgatgataaggaagaaacggtccgtcaccgcctgaaagtctaccttgagaagacccagccggtcattgactattatagtaagaaaggtattctcaaacgcgtagatgggtcgcaaggaatcgacaacgttctggcagaagtcctggggattctgggttggagcgataagtaatga

SEQ ID NO: 2102 - protein, 231 aa, synthetic construct
  REGION 1..231: note = Variant of adenylate kinase
MHHHHHHGGSGMGAYLVFLGPPGAGKGTQGRRISAKTGIPHISTGDILRDIVAKQNDEVASKIKEIMEKGELVPDELGNAVVKRRLSEKDCEKGFILDGYPRTVRQAEYLDSFLESQNRQLTAAVLFKVPEDEVVLRLLSRLICPKCGRIYNMIFLPPKEDELCDDCGVGLVQRDDDKEETVRHRLKVYLEKTQPVIDYYSKKGILKRVDGSQGIDNVLAEVLGILGWSDK

SEQ ID NO: 2103 - DNA, 699 bp, synthetic construct
  misc_feature 1..699: note = Variant of adenylate kinase
  source 1..699: mol_type = other DNA
atgcaccatcatcaccatcacgggggctccggcatgggggcatatctggtgttcttaggtccgccgggcgcgggaaaaggtacccaaggccgtcgcatttcggcaaagactggcatcccgcatattagcacgggcgatatcctgcgtgacatcgtcgctaagcaaaacgatgaagttgcctcgaaaattaaagagatcatggagaaaggtgaactcgttccagatgaactgggtaatgcggtagtaaaacgccgcctgtcggagaaagactgcgaaaaaggctttattttggatggttatccgcgtaccgtgcgccaagcggaatatctggatagttttcttgaaagccagaatcgccagttgacagccgccgtgctgttcaaagtccccgaagatgaagttgttcagcgtctgctgtctcgcctgatctgtccgaaatgcgggcgtatctacaacatgatttttctgccaccaaaagaagacgagctgtgtgacgattgcggtgtcggcttagtacagcgtgatgatgataaggaagaaacggtccgtcaccgcctgaaagtctaccttgagaagacccagccggtcattgactattatagtaagaaaggtattctcaaacgcgtagatgggtcgcaaggaatcgacaacgttctggcagaagtcctggggattctgggttggagcgataagtaatga

SEQ ID NO: 2104 - protein, 231 aa, synthetic construct
  REGION 1..231: note = Variant of adenylate kinase
MHHHHHHGGSGMGAYLVFLGPPGAGKGTQGRRISAKTGIPHISTGDILRDIVAKQNDEVASKIKEIMEKGELVPDELGNAVVKRRLSEKDCEKGFILDGYPRTVRQAEYLDSFLESQNRQLTAAVLFKVPEDEVVQRLLSRLICPKCGRIYNMIFLPPKEDELCDDCGVGLVQRDDDKEETVRHRLKVYLEKTQPVIDYYSKKGILKRVDGSQGIDNVLAEVLGILGWSDK

SEQ ID NO: 2105 - DNA, 699 bp, synthetic construct
  misc_feature 1..699: note = Variant of adenylate kinase
  source 1..699: mol_type = other DNA
atgcaccatcatcaccatcacgggggctccggcatgggggcatatctggtgttcttaggtccgccgggcgcgggaaaaggtacccaaggccgtcgcatttcggcaaagactggcatcccgcatattagcacgggcgatatcctgcgtgacatcgtcgctaagcaaaacgatgaagttgcctcgaaaattaaagagatcatggagaaaggtgaactcgttccagatgaactgggtaatgcggtagtaaaacgccgcctgtcggagaaagactgcgaaaaaggctttattttggatggttatccgcgtaccgtgcgccaagcggaatatctggatagttttcttgaaagccagaatcgccagttgacagccgccgtgctgttcaaagtccccgaagatgaagttcgccagcgtctgctgtctcgcctgatctgtccgaaatgcttccgtatctacaacatgatttttctgccaccaaaagaagacgagctgtgtgacgattgcggtgtcggcttagtacagcgtgatgatgataaggaagaaacggtccgtcaccgcctgaaagtctaccttgagaagacccagccggtcattgactattatagtaagaaaggtattctcaaacgcgtagatgggtcgcaaggaatcgacaacgttctggcagaagtcctggggattctgggttggagcgataagtaatga

SEQ ID NO: 2106 - protein, 231 aa, synthetic construct
  REGION 1..231: note = Variant of adenylate kinase
MHHHHHHGGSGMGAYLVFLGPPGAGKGTQGRRISAKTGIPHISTGDILRDIVAKQNDEVASKIKEIMEKGELVPDELGNAVVKRRLSEKDCEKGFILDGYPRTVRQAEYLDSFLESQNRQLTAAVLFKVPEDEVRQRLLSRLICPKCFRIYNMIFLPPKEDELCDDCGVGLVQRDDDKEETVRHRLKVYLEKTQPVIDYYSKKGILKRVDGSQGIDNVLAEVLGILGWSDK

SEQ ID NO: 2107 - DNA, 699 bp, synthetic construct
  misc_feature 1..699: note = Variant of adenylate kinase
  source 1..699: mol_type = other DNA
atgcaccatcatcaccatcacgggggctccggcatgggggcatatctggtgttcttaggtccgccgggcgcgggaaaaggtacccaaggccgtcgcatttcggcaaagactggcatcccgcatattagcacgggcgatatctttcgtgacatcgtcgctaagcaaaacgatgaagttgcctcgaaaattaaagagatcatggagaaaggtgaactcgttccagatgaactgggtaatgcggtagtaaaacgccgcctgtcggagaaagactgcgaaaaaggctttattttggatggtttcccgcgtaccgtgcgccaagcggaatatctggatagttttcttgaaagccagaatcgccagttgacagccgccgtgctgttcaaagtccccgaagatgaagttcgcctgcgtctgctgtctcgcctgatctgtccgaaatgcgggcgtatctacaacatgatttttctgccaccaaaagaagacgagctgtgtgacgattgcggtgtcggcttagtacagcgtgatgatgataaggaagaaacggtccgtcaccgcctgaaagtctaccttgagaagacccagccggtcattgactattatagtaagaaaggtattctcaaacgcgtagatgggtcgcaaggaatcgacaacgttgttgcagaagtcctggggattctgggttggagcgataagtaatga

SEQ ID NO: 2108 - protein, 231 aa, synthetic construct
  REGION 1..231: note = Variant of adenylate kinase
MHHHHHHGGSGMGAYLVFLGPPGAGKGTQGRRISAKTGIPHISTGDIFRDIVAKQNDEVASKIKEIMEKGELVPDELGNAVVKRRLSEKDCEKGFILDGFPRTVRQAEYLDSFLESQNRQLTAAVLFKVPEDEVRLRLLSRLICPKCGRIYNMIFLPPKEDELCDDCGVGLVQRDDDKEETVRHRLKVYLEKTQPVIDYYSKKGILKRVDGSQGIDNVVAEVLGILGWSDK

SEQ ID NO: 2109 - DNA, 699 bp, synthetic construct
  misc_feature 1..699: note = Variant of adenylate kinase
  source 1..699: mol_type = other DNA
atgcaccatcatcaccatcacgggggctccggcatgggggcatatctggtgttcttaggtccgccgggcgcgggaaaaggtacccaaggccgtcgcatttcggcaaagactggcatcccgcatattagcacgggcgatatctttcgtgacatcgtcgctaagcaaaacgatgaagttgcctcgaaaattaaagagatcatggagaaaggtgaactcgttccagatgaactgggtaatgcggtagtaaaacgccgcctgtcggagaaagactgcgaaaaaggctttattttggatggtttcccgcgtaccgtgcgccaagcggaatatctggatagttttcttgaaagccagaatcgccagttgacagccgccgtgctgttcaaagtccccgaagatgaagttgttctgcgtctgctgtctcgcctgatctgtccgaaatgcgggcgtatctacaacatgatttttctgccaccaaaagaagacgagctgtgtgacgattgcggtgtcggcttagtacagcgtgatgatgataaggaagaaacggtccgtcaccgcctgaaagtctaccttgagaagacccagccggtcattgactattatagtaagaaaggtattctcaaacgcgtagatgggtcgcaaggaatcgacaacgttgttgcagaagtcctggggattctgggttggagcgataagtaatga

SEQ ID NO: 2110 - protein, 231 aa, synthetic construct
  REGION 1..231: note = Variant of adenylate kinase
MHHHHHHGGSGMGAYLVFLGPPGAGKGTQGRRISAKTGIPHISTGDIFRDIVAKQNDEVASKIKEIMEKGELVPDELGNAVVKRRLSEKDCEKGFILDGFPRTVRQAEYLDSFLESQNRQLTAAVLFKVPEDEVVLRLLSRLICPKCGRIYNMIFLPPKEDELCDDCGVGLVQRDDDKEETVRHRLKVYLEKTQPVIDYYSKKGILKRVDGSQGIDNVVAEVLGILGWSDK

SEQ ID NO: 2111 - DNA, 699 bp, synthetic construct
  misc_feature 1..699: note = Variant of adenylate kinase
  source 1..699: mol_type = other DNA
atgcaccatcatcaccatcacgggggctccggcatgggggcatatctggtgttcttaggtccgccgggcgcgggaaaaggtacccaaggccgtcgcatttcggcaaagactggcatcccgcatattagcacgggcgatatctttcgtgacatcgtcgctaagcaaaacgatgaagttgcctcgaaaattaaagagttcatggagaaaggtgaactcgttccagatgaaatgggtaatgcggtagtaaaacgccgcctgtcggagaaagactgcgaaaaaggctttattttggatggtttcccgcgtaccgtgcgccaagcggaatatctggatagttttcttgaaagccagaatcgccagttgacagccgccgtgctgttcaaagtccccgaagatgaagttgttctgcgtctgctgtctcgcctgatctgtccgaaatgcggtcgtatctacaacatgatttttctgccaccaaaagaagacgagctgtgtgacgattgcggtgtcggcttagtacagcgtgatgatgataaggaagaaacggtccgtcaccgcctgaaagtctaccttgagaagacccagccggtcattgactattatagtaagaaaggtattctcaaacgcgtagatgggtcgcaaggaatcgacaacgttctggcagaagtcctggggattctgggttggagcgataagtaatga

SEQ ID NO: 2112 - protein, 231 aa, synthetic construct
  REGION 1..231: note = Variant of adenylate kinase
MHHHHHHGGSGMGAYLVFLGPPGAGKGTQGRRISAKTGIPHISTGDIFRDIVAKQNDEVASKIKEFMEKGELVPDEMGNAVVKRRLSEKDCEKGFILDGFPRTVRQAEYLDSFLESQNRQLTAAVLFKVPEDEVVLRLLSRLICPKCGRIYNMIFLPPKEDELCDDCGVGLVQRDDDKEETVRHRLKVYLEKTQPVIDYYSKKGILKRVDGSQGIDNVLAEVLGILGWSDK

SEQ ID NO: 2113 - DNA, 699 bp, synthetic construct
  misc_feature 1..699: note = Variant of adenylate kinase
  source 1..699: mol_type = other DNA
atgcaccatcatcaccatcacgggggctccggcatgggggcatatctggtgttcttaggtccgccgggcgcgggaaaaggtacccaaggccgtcgcatttcggcaaagactggcatcccgcatattagcacgggcgatatcttccgtgacatcgtcgctaagcaaaacgatgaagttgcctcgaaaattaaagagatcatggagaaaggtgaactcgttccagatgaactgggtaatgcggtagtaaaacgccgcctgtcggagaaagactgcgaaaaaggctttattttggatggtttcccgcgtaccgtgcgccaagcggaatatctggatagttttcttgaaagccagaatcgccagttgacagccgccgtgctgttcaaagtccccgaagatgaagttcgccagcgtctgctgtctcgcctgatctgtccgaaatgcgggcgtatctacaacatgatttttctgccaccaaaagaagacgagctgtgtgacgattgcggtgtcggcttagtacagcgtgatgatgataaggaagaaacggtccgtcaccgcctgaaagtctaccttgagaagacccagccggtcattgactattatagtaagaaaggtattctcaaacgcgtagatgggtcgcaaggaatcgacaacgttgtggcagaagtcctggggattctgggttggagcgataagtaatga

SEQ ID NO: 2114 - protein, 231 aa, synthetic construct
  REGION 1..231: note = Variant of adenylate kinase
MHHHHHHGGSGMGAYLVFLGPPGAGKGTQGRRISAKTGIPHISTGDIFRDIVAKQNDEVASKIKEIMEKGELVPDELGNAVVKRRLSEKDCEKGFILDGFPRTVRQAEYLDSFLESQNRQLTAAVLFKVPEDEVRQRLLSRLICPKCGRIYNMIFLPPKEDELCDDCGVGLVQRDDDKEETVRHRLKVYLEKTQPVIDYYSKKGILKRVDGSQGIDNVVAEVLGILGWSDK

SEQ ID NO: 2115 - DNA, 699 bp, synthetic construct
  misc_feature 1..699: note = Variant of adenylate kinase
  source 1..699: mol_type = other DNA
atgcaccatcatcaccatcacgggggctccggcatgggggcatatctggtgttcttaggtccgccgggcgcgggaaaaggtacccaaggccgtcgcatttcggcaaagactggcatcccgcatattagcacgggcgatatcctgcgtgacatcgtcgctaagcaaaacgatgaagttgcctcgaaaattaaagagatcatggagaaaggtgaactcgttccagatgaaatgggtaatgcggtagtaaaacgccgcctgtcggagaaagactgcgaaaaaggctttattttggatggtttcccgcgtaccgtgcgccaagcggaatatctggatagttttcttgaaagccagaatcgccagttgacagccgccgtgctgttcaaagtccccgaagatgaagttcgcctgcgtctgctgtctcgcctgatctgtccgaaatgcgggcgtatctacaacatgatttttctgccaccaaaagaagacgagctgtgtgacgattgcggtgtcggcttagtacagcgtgatgatgataaggaagaaacggtccgtcaccgcctgaaagtctaccttgagaagacccagccggtcattgactattatagtaagaaaggtattctcaaacgcgtagatgggtcgcaaggaatcgacaacgttgtggcagaagtcctggggattctgggttggagcgataagtaatga

SEQ ID NO: 2116 - protein, 231 aa, synthetic construct
  REGION 1..231: note = Variant of adenylate kinase
MHHHHHHGGSGMGAYLVFLGPPGAGKGTQGRRISAKTGIPHISTGDILRDIVAKQNDEVASKIKEIMEKGELVPDEMGNAVVKRRLSEKDCEKGFILDGFPRTVRQAEYLDSFLESQNRQLTAAVLFKVPEDEVRLRLLSRLICPKCGRIYNMIFLPPKEDELCDDCGVGLVQRDDDKEETVRHRLKVYLEKTQPVIDYYSKKGILKRVDGSQGIDNVVAEVLGILGWSDK

SEQ ID NO: 2117 - DNA, 699 bp, synthetic construct
  misc_feature 1..699: note = Variant of adenylate kinase
  source 1..699: mol_type = other DNA
atgcaccatcatcaccatcacgggggctccggcatgggggcatatctggtgttcttaggtccgccgggcgcgggaaaaggtacccaaggccgtcgcatttcggcaaagactggcatcccgcatattagcacgggcgatatctttcgtgacatcgtcgctaagcaaaacgatgaagttgcctcgaaaattaaagagatcatggagaaaggtgaactcgttccagatgaactgggtaatgcggtagtaaaacgccgcctgtcggagaaagactgcgaaaaaggctttattttggatggtttcccgcgtaccgtgcgccaagcggaatatctggatagttttcttgaaagccagaatcgccagttgacagccgccgtgctgttcaaagtccccgaagatgaagttgttcagcgtctgctgtctcgcctgatctgtccgaaatgcgggcgtatctacaacatgatttttctgccaccaaaagaagacgagctgtgtgacgattgcggtgtcggcttagtacagcgtgatgatgataaggaagaaacggtccgtcaccgcctgaaagtctaccttgagaagacccagccggtcattgactattatagtaagaaaggtattctcaaacgcgtagatgggtcgcaaggaatcgacaacgttgtggcagaagtcctggggattctgggttggagcgataagtaatga

SEQ ID NO: 2118 - protein, 231 aa, synthetic construct
  REGION 1..231: note = Variant of adenylate kinase
MHHHHHHGGSGMGAYLVFLGPPGAGKGTQGRRISAKTGIPHISTGDIFRDIVAKQNDEVASKIKEIMEKGELVPDELGNAVVKRRLSEKDCEKGFILDGFPRTVRQAEYLDSFLESQNRQLTAAVLFKVPEDEVVQRLLSRLICPKCGRIYNMIFLPPKEDELCDDCGVGLVQRDDDKEETVRHRLKVYLEKTQPVIDYYSKKGILKRVDGSQGIDNVVAEVLGILGWSDK

SEQ ID NO: 2119 - DNA, 699 bp, synthetic construct
  misc_feature 1..699: note = Variant of adenylate kinase
  source 1..699: mol_type = other DNA
atgcaccatcatcaccatcacgggggctccggcatgggggcatatctggtgttcttaggtccgccgggcgcgggaaaaggtacccaaggccgtcgcatttcggcaaagactggcatcccgcatattagcacgggcgatatcttccgtgacatcgtcgctaagcaaaacgatgaagttgcctcgaaaattaaagagatcatggagaaaggtgaactcgttccagatgaaatgggtaatgcggtagtaaaacgccgcctgtcggagaaagactgcgaaaaaggctttattttggatggtttcccgcgtaccgtgcgccaagcggaatatctggatagttttcttgaaagccagaatcgccagttgacagccgccgtgctgttcaaagtccccgaagatgaagttcgccagcgtctgctgtctcgcctgatctgtccgaaatgcggtcgtatctacaacatgatttttctgccaccaaaagaagacgagctgtgtgacgattgcggtgtcggcttagtacagcgtgatgatgataaggaagaaacggtccgtcaccgcctgaaagtctaccttgagaagacccagccggtcattgactattatagtaagaaaggtattctcaaacgcgtagatgggtcgcaaggaatcgacaacgttgtggcagaagtcctggggattctgggttggagcgataagtaatga

SEQ ID NO: 2120 - protein, 231 aa, synthetic construct
  REGION 1..231: note = Variant of adenylate kinase
MHHHHHHGGSGMGAYLVFLGPPGAGKGTQGRRISAKTGIPHISTGDIFRDIVAKQNDEVASKIKEIMEKGELVPDEMGNAVVKRRLSEKDCEKGFILDGFPRTVRQAEYLDSFLESQNRQLTAAVLFKVPEDEVRQRLLSRLICPKCGRIYNMIFLPPKEDELCDDCGVGLVQRDDDKEETVRHRLKVYLEKTQPVIDYYSKKGILKRVDGSQGIDNVVAEVLGILGWSDK

SEQ ID NO: 2121 - DNA, 699 bp, synthetic construct
  misc_feature 1..699: note = Variant of adenylate kinase
  source 1..699: mol_type = other DNA
atgcaccatcatcaccatcacgggggctccggcatgggggcatatctggtgttcttaggtccgccgggcgcgggaaaaggtacccaaggccgtcgcatttcggcaaagactggcatcccgcatattagcacgggcgatatcctgcgtgacatcgtcgctaagcaaaacgatgaagttgcctcgaaaattaaagagttcatggagaaaggtgaactcgttccagatgaactgggtaatgcggtagtaaaacgccgcctgtcggagaaagactgcgaaaaaggctttattttggatggtttcccgcgtaccgtgcgccaagcggaatatctggatagttttcttgaaagccagaatcgccagttgacagccgccgtgctgttcaaagtccccgaagatgaagttcgcctgcgtctgctgtctcgcctgatctgtccgaaatgcttccgtatctacaacatgatttttctgccaccaaaagaagacgagctgtgtgacgattgcggtgtcggcttagtacagcgtgatgatgataaggaagaaacggtccgtcaccgcctgaaagtctaccttgagaagacccagccggtcattgactattatagtaagaaaggtattctcaaacgcgtagatgggtcgcaaggaatcgacaacgttctggcagaagtcctggggattctgggttggagcgataagtaatga

SEQ ID NO: 2122 - protein, 231 aa, synthetic construct
  REGION 1..231: note = Variant of adenylate kinase
MHHHHHHGGSGMGAYLVFLGPPGAGKGTQGRRISAKTGIPHISTGDILRDIVAKQNDEVASKIKEFMEKGELVPDELGNAVVKRRLSEKDCEKGFILDGFPRTVRQAEYLDSFLESQNRQLTAAVLFKVPEDEVRLRLLSRLICPKCFRIYNMIFLPPKEDELCDDCGVGLVQRDDDKEETVRHRLKVYLEKTQPVIDYYSKKGILKRVDGSQGIDNVLAEVLGILGWSDK

SEQ ID NO: 2123 - DNA, 699 bp, synthetic construct
  misc_feature 1..699: note = Variant of adenylate kinase
  source 1..699: mol_type = other DNA
atgcaccatcatcaccatcacgggggctccggcatgggggcatatctggtgttcttaggtccgccgggcgcgggaaaaggtacccaaggccgtcgcatttcggcaaagactggcatcccgcatattagcacgggcgatatcttccgtgacatcgcagctaagcaaaacgatgaagttgcctcgaaaattaaagagatcatggagaaaggtgaactcgttccagatgaactgggtaatgcggtagtaaaacgccgcctgtcggagaaagactgcgaaaaaggctttattttggatggttatccgcgtaccgtgcgccaagcggaatatctggatagttttcttgaaagccagaatcgccagttgacagccgccgtgctgttcaaagtccccgaagatgaagttgttcagcgtctgctgtctcgcctgatctgtccgaaatgcgggcgtatctacaacatgatttttctgccaccaaaagaagacgagctgtgtgacgattgcggtgtcggcttagtacagcgtgatgatgataaggaagaaacggtccgtattcgcctgaaagtctaccttgagaagacccagccggtcattgactattatagtaagaaaggtattctcaaacgcgtagatgggtcgcaaggaatcgacaacgttgttgcagaagtcctggggattctgggttggagcgataagtaatga

SEQ ID NO: 2124 - protein, 231 aa, synthetic construct
  REGION 1..231: note = Variant of adenylate kinase
MHHHHHHGGSGMGAYLVFLGPPGAGKGTQGRRISAKTGIPHISTGDIFRDIAAKQNDEVASKIKEIMEKGELVPDELGNAVVKRRLSEKDCEKGFILDGYPRTVRQAEYLDSFLESQNRQLTAAVLFKVPEDEVVQRLLSRLICPKCGRIYNMIFLPPKEDELCDDCGVGLVQRDDDKEETVRIRLKVYLEKTQPVIDYYSKKGILKRVDGSQGIDNVVAEVLGILGWSDK

SEQ ID NO: 2125 - DNA, 699 bp, synthetic construct
  misc_feature 1..699: note = Variant of adenylate kinase
  source 1..699: mol_type = other DNA
atgcaccatcatcaccatcacgggggctccggcatgggggcatatctggtgttcttaggtccgccgggcgcgggaaaaggtacccaaggccgtcgcatttcggcaaagactggcatcccgcatattagcacgggcgatatctttcgtgacatcgtcgctaagcaaaacgatgaagttgcctcgaaaattaaagagttcatggagaaaggtgaactcgttccagatgaactgggtaatgcggtagtaaaacgccgcctgtcggagaaagactgcgaaaaaggctttattttggatggttatccgcgtaccgtgcgccaagcggaatatctggatagttttcttgaaagccagaatcgccagttgacagccgccgtgctgttcaaagtccccgaagatgaagttgttcagcgtctgctgtctcgcctgatctgtccgaaatgcggtcgtatctacaacatgatttttctgccaccaaaagaagacgagctgtgtgacgattgcggtgtcggcttagtacagcgtgatgatgataaggaagaaacggtccgtcaccgcctgaaagtctaccttgagaagacccagccggtcattgactattatagtaagaaaggtattctcaaacgcgtagatgggtcgcaaggaatcgacaacgttgtggcagaagtcctggggattctgggttggagcgataagtaatga

SEQ ID NO: 2126 - protein, 231 aa, synthetic construct
  REGION 1..231: note = Variant of adenylate kinase
MHHHHHHGGSGMGAYLVFLGPPGAGKGTQGRRISAKTGIPHISTGDIFRDIVAKQNDEVASKIKEFMEKGELVPDELGNAVVKRRLSEKDCEKGFILDGYPRTVRQAEYLDSFLESQNRQLTAAVLFKVPEDEVVQRLLSRLICPKCGRIYNMIFLPPKEDELCDDCGVGLVQRDDDKEETVRHRLKVYLEKTQPVIDYYSKKGILKRVDGSQGIDNVVAEVLGILGWSDK

SEQ ID NO: 2127 - DNA, 699 bp, synthetic construct
  misc_feature 1..699: note = Variant of adenylate kinase
  source 1..699: mol_type = other DNA
atgcaccatcatcaccatcacgggggctccggcatgggggcatatctggtgttcttaggtccgccgggcgcgggaaaaggtacccaaggccgtcgcatttcggcaaagactggcatcccgcatattagcacgggcgatatcttccgtgacatcgcagctaagcaaaacgatgaagttgcctcgaaaattaaagagatcatgctgaaaggtgaactcgttccagatgaactgggtaatgcggtagtaaaacgccgcctgtcggagaaagactgcgaaaaaggctttattttggatggttatccgcgtaccgtgcgccaagcggaatatctggatagttttcttgaaagccagaatcgccagttgacagccgccgtgctgttcaaagtccccgaagatgaagttgttcagcgtctgctgtctcgcctgatctgtccgaaatgcgggcgtatctacaacatgatttttctgccaccaaaagaagacgagctgtgtgacgattgcggtgtcggcttagtacagcgtgatgatgataaggaagaaacggtccgtcaccgcctgaaagtctaccttgagaagacccagccggtcattgactattatagtaagaaaggtattctcaaacgcgtagatgggtcgcaaggaatcgacaacgttgttgcagaagtcctggggattctgggttggagcgataagtaatga

SEQ ID NO: 2128 - protein, 231 aa, synthetic construct
  REGION 1..231: note = Variant of adenylate kinase
MHHHHHHGGSGMGAYLVFLGPPGAGKGTQGRRISAKTGIPHISTGDIFRDIAAKQNDEVASKIKEIMLKGELVPDELGNAVVKRRLSEKDCEKGFILDGYPRTVRQAEYLDSFLESQNRQLTAAVLFKVPEDEVVQRLLSRLICPKCGRIYNMIFLPPKEDELCDDCGVGLVQRDDDKEETVRHRLKVYLEKTQPVIDYYSKKGILKRVDGSQGIDNVVAEVLGILGWSDK

SEQ ID NO: 2129 - DNA, 699 bp, synthetic construct
  misc_feature 1..699: note = Variant of adenylate kinase
  source 1..699: mol_type = other DNA
atgcaccatcatcaccatcacgggggctccggcatgggggcatatctggtgttcttaggtccgccgggcgcgggaaaaggtacccaaggccgtcgcatttcggcaaagactggcatcccgcatattagcacgggcgatatctttcgtgacatcgtcgctaagcaaaacgatgaagttgcctcgaaaattaaagagatcatggagaaaggtgaactcgttccagatgaactgggtaatgcggtagtaaaacgccgcctgtcggagaaagactgcgaaaaaggctttattttggatggttatccgcgtaccgtgcgccaagcggaatatctggatagttttcttgaaagccagaatcgccagttgacagccgccgtgctgttcaaagtccccgaagatgaagttgttctgcgtctgctgtctcgcctgatctgtccgaaatgcttccgtatctacaacatgatttttctgccaccaaaagaagacgagctgtgtgacgattgcggtgtcggcttagtacagcgtgatgatgataaggaagaaacggtccgtcaccgcctgaaagtctaccttgagaagacccagccggtcattgactattatagtaagaaaggtattctcaaacgcgtagatgggtcgcaaggaatcgacaacgttgttgcagaagtcctggggattctgggttggagcgataagtaatga

SEQ ID NO: 2130 - protein, 231 aa, synthetic construct
  REGION 1..231: note = Variant of adenylate kinase
MHHHHHHGGSGMGAYLVFLGPPGAGKGTQGRRISAKTGIPHISTGDIFRDIVAKQNDEVASKIKEIMEKGELVPDELGNAVVKRRLSEKDCEKGFILDGYPRTVRQAEYLDSFLESQNRQLTAAVLFKVPEDEVVLRLLSRLICPKCFRIYNMIFLPPKEDELCDDCGVGLVQRDDDKEETVRHRLKVYLEKTQPVIDYYSKKGILKRVDGSQGIDNVVAEVLGILGWSDK

SEQ ID NO: 2131 - DNA, 699 bp, synthetic construct
  misc_feature 1..699: note = Variant of adenylate kinase
  source 1..699: mol_type = other DNA
atgcaccatcatcaccatcacgggggctccggcatgggggcatatctggtgttcttaggtccgccgggcgcgggaaaaggtacccaaggccgtcgcatttcggcaaagactggcatcccgcatattagcacgggcgatatcttccgtgacatcgtagctaagcaaaacgatgaagttgcctcgaaaattaaagagatcatggagaaaggtgaactcgttccagatgaactgggtaatgcggtagtaaaacgccgcctgtcggagaaagactgcgaaaaaggctttattttggatggttatccgcgtaccgtgcgccaagcggaatatctggatagttttcttgaaagccagaatcgccagttgacagccgccgtggccttcaaagtccccgaagatgaagttgttcagcgtctgctgtctcgcctgatctgtccgaaatgcgggcgtatctacaacatgatttttctgccaccaaaagaagacgagctgtgtgacgattgcggtgtcggcttagtacagcgtgatgatgataaggaagaaacggtccgtattcgcctgaaagtctaccttgagaagacccagccggtcattgactattatagtaagaaaggtattctcaaacgcgtagatgggtcgcaaggaatcgacaacgttgttgcagaagtcctggggattctgggttggagcgataagtaatga

SEQ ID NO: 2132 - protein, 231 aa, synthetic construct
  REGION 1..231: note = Variant of adenylate kinase
MHHHHHHGGSGMGAYLVFLGPPGAGKGTQGRRISAKTGIPHISTGDIFRDIVAKQNDEVASKIKEIMEKGELVPDELGNAVVKRRLSEKDCEKGFILDGYPRTVRQAEYLDSFLESQNRQLTAAVAFKVPEDEVVQRLLSRLICPKCGRIYNMIFLPPKEDELCDDCGVGLVQRDDDKEETVRIRLKVYLEKTQPVIDYYSKKGILKRVDGSQGIDNVVAEVLGILGWSDK

SEQ ID NO: 2133 - DNA, 699 bp, synthetic construct
  misc_feature 1..699: note = Variant of adenylate kinase
  source 1..699: mol_type = other DNA
atgcaccatcatcaccatcacgggggctccggcatgggggcatatctggtgttcttaggtccgccgggcgcgggaaaaggtacccaaggccgtcgcatttcggcaaagactggcatcccgcatattagcacgggcgatatcttccgtgacatcgtcgctaagcaaaacgatgaagttgcctcgaaaattaaagagatcatggagaaaggtgaactcgttccagatgaactgggtaatgcggtagtaaaacgccgcctgtcggagaaagactgcgaaaaaggctttattttggatggttatccgcgtaccgtgcgccaagcggaatatctggatagttttcttgaaagccagaatcgccagttgacagccgccgtgctgttcaaagtccccgaagatgaagttgttcagcgtctgctgtctcgcctgatctgtccgaaatgcttccgtatctacaacatgatttttctgccaccaaaagaagacgagctgtgtgacgattgcggtgtcggcttagtacagcgtgatgatgataaggaagaaacggtccgtcaccgcctgaaagtctaccttgagaagacccagccggtcattgactattatagtaagaaaggtattctcaaacgcgtagatgggtcgcaaggaatcgacaacgttgtggcagaagtcctggggattctgggttggagcgataagtaatga

SEQ ID NO: 2134 - protein, 231 aa, synthetic construct
  REGION 1..231: note = Variant of adenylate kinase
MHHHHHHGGSGMGAYLVFLGPPGAGKGTQGRRISAKTGIPHISTGDIFRDIVAKQNDEVASKIKEIMEKGELVPDELGNAVVKRRLSEKDCEKGFILDGYPRTVRQAEYLDSFLESQNRQLTAAVLFKVPEDEVVQRLLSRLICPKCFRIYNMIFLPPKEDELCDDCGVGLVQRDDDKEETVRHRLKVYLEKTQPVIDYYSKKGILKRVDGSQGIDNVVAEVLGILGWSDK

SEQ ID NO: 2135 - DNA, 699 bp, synthetic construct
  misc_feature 1..699: note = Variant of adenylate kinase
  source 1..699: mol_type = other DNA
atgcaccatcatcaccatcacgggggctccggcatgggggcatatctggtgttcttaggtccgccgggcgcgggaaaaggtacccaaggccgtcgcatttcggcaaagactggcatcccgcatattagcacgggcgatatcttccgtgacatcgtcgctaagcaaaacgatgaagttgcctcgaaaattaaagagatcatggagaaaggtgaactcgttccagatgaactgggtaatgcggtagtaaaacgccgcctgtcggagaaagactgcgaaaaaggctttattttggatggttatccgcgtaccgtgcgccaagcggaatatctggatagttttcttgaaagccagaatcgccagttgacagccgccgtggccttcaaagtccccgaagatgaagttgttcagcgtctgctgtctcgcctgatctgtccgaaatgcgggcgtatctacaacatgatttttctgccaccaaaagaagacgagctgtgtgacgattgcggtgtcggcttagtacagcgtgatgatgataaggaagaaacggtccgtgttcgcctgaaagtctaccttgagaagacccagccggtcattgactattatagtaagaaaggtattctcaaacgcgtagatgggtcgcaaggaatcgacaacgttgttgcagaagtcctggggattctgggttggagcgataagtaatga

SEQ ID NO: 2136 - protein, 231 aa, synthetic construct
  REGION 1..231: note = Variant of adenylate kinase
MHHHHHHGGSGMGAYLVFLGPPGAGKGTQGRRISAKTGIPHISTGDIFRDIVAKQNDEVASKIKEIMEKGELVPDELGNAVVKRRLSEKDCEKGFILDGYPRTVRQAEYLDSFLESQNRQLTAAVAFKVPEDEVVQRLLSRLICPKCGRIYNMIFLPPKEDELCDDCGVGLVQRDDDKEETVRVRLKVYLEKTQPVIDYYSKKGILKRVDGSQGIDNVVAEVLGILGWSDK

SEQ ID NO: 2137 - DNA, 699 bp, synthetic construct
  misc_feature 1..699: note = Variant of adenylate kinase
  source 1..699: mol_type = other DNA
atgcaccatcatcaccatcacgggggctccggcatgggggcatatctggtgttcttaggtccgccgggcgcgggaaaaggtacccaaggccgtcgcatttcggcaaagactggcatcccgcatattagcacgggcgatatcttccgtgacatcgtcgctaagcaaaacgatgaagttgcctcgaaaattaaagagatcatggagaaaggtgaactcgttccagatgaactgggtaatgcggtagtaaaacgccgcctgtcggagaaagactgcgaaaaaggctttattttggatggttatccgcgtaccgtgcgccaagcggaatatctggatagttttcttgaaagccagaatcgccagttgacagccgccgtgctgttcaaagtccccgaagatgaagttgttcagcgtctgctgtctcgcctgatctgtccgaaatgcgggcgtatctacaacatgatttttctgccaccaaaagaagacgagctgtgtgacgattgcggtgtcggcttagtacagcgtgatgatgataaggaagaaacggtccgtgttcgcctgaaagtctaccttgagaagacccagccggtcattgactattatagtaagaaaggtattctcaaacgcgtagatgggtcgcaaggaatcgacaacgttgttgcagaagtcctggggattctgggttggagcgataagtaatga

SEQ ID NO: 2138 - protein, 231 aa, synthetic construct
  REGION 1..231: note = Variant of adenylate kinase
MHHHHHHGGSGMGAYLVFLGPPGAGKGTQGRRISAKTGIPHISTGDIFRDIVAKQNDEVASKIKEIMEKGELVPDELGNAVVKRRLSEKDCEKGFILDGYPRTVRQAEYLDSFLESQNRQLTAAVLFKVPEDEVVQRLLSRLICPKCGRIYNMIFLPPKEDELCDDCGVGLVQRDDDKEETVRVRLKVYLEKTQPVIDYYSKKGILKRVDGSQGIDNVVAEVLGILGWSDK

SEQ ID NO: 2139 - DNA, 699 bp, synthetic construct
  misc_feature 1..699: note = Variant of adenylate kinase
  source 1..699: mol_type = other DNA
atgcaccatcatcaccatcacgggggctccggcatgggggcatatctggtgttcttaggtccgccgggcgcgggaaaaggtacccaaggccgtcgcatttcggcaaagactggcatcccgcatattagcacgggcgatatcttccgtgacatcgcagctaagcaaaacgatgaagttgcctcgaaaattaaagagatcatggagaaaggtgaactcgttccagatgaactgggtaatgcggtagtaaaacgccgcctgtcggagaaagactgcgaaaaaggctttattttggatggttatccgcgtaccgtgcgccaagcggaatatctggatagttttcttgaaagccagaatcgccagttgacagccgccgtgctgttcaaagtccccgaagatgaagttgttcagcgtctgctgtctcgcctgatctgtccgaaatgcgggcgtatctacaacatgatttttctgccaccaaaagaagacgagctgtgtgacgattgcggtgtcggcttagtacagcgtgatgatgataaggaagaaacggtccgtcaccgcctgaaagtctaccttgagaagacccagccggtcattgactattatagtaagaaaggtattctcaaacgcgtagatgggtcgcaaggaatcgacaacgttgttgcagaagtcctggggattctgggttggagcgataagtaatga

SEQ ID NO: 2140 - protein, 231 aa, synthetic construct
  REGION 1..231: note = Variant of adenylate kinase
MHHHHHHGGSGMGAYLVFLGPPGAGKGTQGRRISAKTGIPHISTGDIFRDIAAKQNDEVASKIKEIMEKGELVPDELGNAVVKRRLSEKDCEKGFILDGYPRTVRQAEYLDSFLESQNRQLTAAVLFKVPEDEVVQRLLSRLICPKCGRIYNMIFLPPKEDELCDDCGVGLVQRDDDKEETVRHRLKVYLEKTQPVIDYYSKKGILKRVDGSQGIDNVVAEVLGILGWSDK

SEQ ID NO: 2141 - DNA, 699 bp, synthetic construct
  misc_feature 1..699: note = Variant of adenylate kinase
  source 1..699: mol_type = other DNA
atgcaccatcatcaccatcacgggggctccggcatgggggcatatctggtgttcttaggtccgccgggcgcgggaaaaggtacccaaggccgtcgcatttcggcaaagactggcatcccgcatattagcacgggcgatatctttcgtgacatcgtcgctaagcaaaacgatgaagttgcctcgaaaattaaagagatcatggagaaaggtgaactcgttccagatgaactgggtaatgcggtagtaaaacgccgcctgtcggagaaagactgcgaaaaaggctttattttggatggttacccgcgtaccgtgcgccaagcggaatatctggatagttttcttgaaagccagaatcgccagttgacagccgccgtgctgttcaaagtccccgaagatgaagttcgcctgcgtctgctgtctcgcctgatctgtccgaaatgcttccgtatctacaacatgatttttctgccaccaaaagaagacgagctgtgtgacgattgcggtgtcggcttagtacagcgtgatgatgataaggaagaaacggtccgtcaccgcctgaaagtctaccttgagaagacccagccggtcattgactattatagtaagaaaggtattctcaaacgcgtagatgggtcgcaaggaatcgacaacgttgtggcagaagtcctggggattctgggttggagcgataagtaatga

SEQ ID NO: 2142 - protein, 231 aa, synthetic construct
  REGION 1..231: note = Variant of adenylate kinase
MHHHHHHGGSGMGAYLVFLGPPGAGKGTQGRRISAKTGIPHISTGDIFRDIVAKQNDEVASKIKEIMEKGELVPDELGNAVVKRRLSEKDCEKGFILDGYPRTVRQAEYLDSFLESQNRQLTAAVLFKVPEDEVRLRLLSRLICPKCFRIYNMIFLPPKEDELCDDCGVGLVQRDDDKEETVRHRLKVYLEKTQPVIDYYSKKGILKRVDGSQGIDNVVAEVLGILGWSDK

SEQ ID NO: 2143 - DNA, 699 bp, synthetic construct
  misc_feature 1..699: note = Variant of adenylate kinase
  source 1..699: mol_type = other DNA
atgcaccatcatcaccatcacgggggctccggcatgggggcatatctggtgttcttaggtccgccgggcgcgggaaaaggtacccaaggccgtcgcatttcggcaaagactggcatcccgcatattagcacgggcgatatcttccgtgacatcgtcgctaagcaaaacgatgaagttgcctcgaaaattaaagagatcatggagaaaggtgaactcgttccagatgaactgggtaatgcggtagtaaaacgccgcctgtcggagaaagactgcgaaaaaggctttattttggatggttatccgcgtaccgtgcgccaagcggaatatctggatagttttcttgaaagccagaatcgccagttgacagccgccgtggccttcaaagtccccgaagatgaagttgttcagcgtgtgctgtctcgcctgatctgtccgaaatgcgggcgtatctacaacatgatttttctgccaccaaaagaagacgagctgtgtgacgattgcggtgtcggcttagtacagcgtgatgatgataaggaagaaacggtccgtgttcgcctgaaagtctaccttgagaagacccagccggtcattgactattatagtaagaaaggtattctcaaacgcgtagatgggtcgcaaggaatcgacaacgttgttgcagaagtcctggggattctgggttggagcgataagtaatga

SEQ ID NO: 2144 - protein, 231 aa, synthetic construct
  REGION 1..231: note = Variant of adenylate kinase
MHHHHHHGGSGMGAYLVFLGPPGAGKGTQGRRISAKTGIPHISTGDIFRDIVAKQNDEVASKIKEIMEKGELVPDELGNAVVKRRLSEKDCEKGFILDGYPRTVRQAEYLDSFLESQNRQLTAAVAFKVPEDEVVQRVLSRLICPKCGRIYNMIFLPPKEDELCDDCGVGLVQRDDDKEETVRVRLKVYLEKTQPVIDYYSKKGILKRVDGSQGIDNVVAEVLGILGWSDK

SEQ ID NO: 2145 - DNA, 699 bp, synthetic construct
  misc_feature 1..699: note = Variant of adenylate kinase
  source 1..699: mol_type = other DNA
atgcaccatcatcaccatcacgggggctccggcatgggggcatatctggtgttcttaggtccgccgggcgcgggaaaaggtacccaaggccgtcgcatttcggcaaagactggcatcccgcatattagcacgggcgatatcttccgtgacatcgtcgctaagcaaaacgatgaagttgcctcgaaaattaaagagatcatggagaaaggtgaactcgttccagatgaactgggtaatgcggtagtaaaacgccgcctgtcggagaaagactgcgaaaaaggctttattttggatggttatccgcgtaccgtgcgccaagcggaatatctggatagttttcttgaaagccagaatcgccagttgacagccgccgtgctgttcaaagtccccgaagatgaagttgttcagcgtctgctgtctcgcctgatctgtccgaaatgcgggcgtatctacaacatgatttttctgccaccaaaagaagacgagctgtgtgacgattgcggtgtcggcttagtacagcgtgatgatgataaggaagaaacggtccgtattcgcctgaaagtctaccttgagaagacccagccggtcattgactattatagtaagaaaggtattctcaaacgcgtagatgggtcgcaaggaatcgacaacgttgttgcagaagtcctggggattctgggttggagcgataagtaatga

SEQ ID NO: 2146 - protein, 231 aa, synthetic construct
  REGION 1..231: note = Variant of adenylate kinase
MHHHHHHGGSGMGAYLVFLGPPGAGKGTQGRRISAKTGIPHISTGDIFRDIVAKQNDEVASKIKEIMEKGELVPDELGNAVVKRRLSEKDCEKGFILDGYPRTVRQAEYLDSFLESQNRQLTAAVLFKVPEDEVVQRLLSRLICPKCGRIYNMIFLPPKEDELCDDCGVGLVQRDDDKEETVRIRLKVYLEKTQPVIDYYSKKGILKRVDGSQGIDNVVAEVLGILGWSDK

SEQ ID NO: 2147 - DNA, 699 bp, synthetic construct
  misc_feature 1..699: note = Variant of adenylate kinase
  source 1..699: mol_type = other DNA
atgcaccatcatcaccatcacgggggctccggcatgggggcatatctggtgttcttaggtccgccgggcgcgggaaaaagtacccaaggccgtcgcatttcggcaaagactggcatcccgcatattagcacgggcgatatcttccgtgacatcgtagctaagcaaaacgatgaagttgcctcgaaaattaaagagatcatggagaaaggtgaactcgttccagatgaactgggtaatgcggtagtaaaacgccgcctgtcggagaaagactgcgaaaaaggctttattttggatggttatccgcgtaccgtgcgccaagcggaatatctggatagttttcttgaaagccagaatcgccagttgacagccgccgtgctgttcaaagtccccgaagatgaagttgttcagcgtctgctgtctcgcctgatctgtccgaaatgcgggcgtatctacaacatgatttttctgccaccaaaagaagacgagctgtgtgacgattgcggtgtcggcttagtacagcgtgatgatgataaggaagaaacggtccgtgttcgcctgaaagtctaccttgagaagacccagccggtcattgactattatagtaagaaaggtattctcaaacgcgtagatgggtcgcaaggaatcgacaacgttgttgcagaagtcctggggattctgggttggagcgataagtaatga

SEQ ID NO: 2148 - protein, 231 aa, synthetic construct
  REGION 1..231: note = Variant of adenylate kinase
MHHHHHHGGSGMGAYLVFLGPPGAGKSTQGRRISAKTGIPHISTGDIFRDIVAKQNDEVASKIKEIMEKGELVPDELGNAVVKRRLSEKDCEKGFILDGYPRTVRQAEYLDSFLESQNRQLTAAVLFKVPEDEVVQRLLSRLICPKCGRIYNMIFLPPKEDELCDDCGVGLVQRDDDKEETVRVRLKVYLEKTQPVIDYYSKKGILKRVDGSQGIDNVVAEVLGILGWSDK

SEQ ID NO: 2149 - DNA, 699 bp, synthetic construct
  misc_feature 1..699: note = Variant of adenylate kinase
  source 1..699: mol_type = other DNA
atgcaccatcatcaccatcacgggggctccggcatgggggcatatctggtgttcttaggtccgccgggcgcgggaaaaagtacccaaggccgtcgcatttcggcaaagactggcatcccgcatattagcacgggcgatatcttccgtgacatcgtagctaagcaaaacgatgaagttgcctcgaaaattaaagagatcatggagaaaggtgaactcgttccagatgaactgggtaatgcggtagtaaaacgccgcctgtcggagaaagactgcgaaaaaggctttattttggatggttatccgcgtaccgtgcgccaagcggaatatctggatagttttcttgaaagccagaatcgccagttgacagccgccgtggccttcaaagtccccgaagatgaagttgttcagcgtctgctgtctcgcctgatctgtccgaaatgcgggcgtatctacaacatgatttttctgccaccaaaagaagacgagctgtgtgacgattgcggtgtcggcttagtacagcgtgatgatgataaggaagaaacggtccgtcatcgcctgaaagtctaccttgagaagacccagccggtcattgactattatagtaagaaaggtattctcaaacgcgtagatgggtcgcaaggaatcgacaacgttgttgcagaagtcctggggattctgggttggagcgataagtaatga

SEQ ID NO: 2150 - protein, 231 aa, synthetic construct
  REGION 1..231: note = Variant of adenylate kinase
MHHHHHHGGSGMGAYLVFLGPPGAGKSTQGRRISAKTGIPHISTGDIFRDIVAKQNDEVASKIKEIMEKGELVPDELGNAVVKRRLSEKDCEKGFILDGYPRTVRQAEYLDSFLESQNRQLTAAVAFKVPEDEVVQRLLSRLICPKCGRIYNMIFLPPKEDELCDDCGVGLVQRDDDKEETVRHRLKVYLEKTQPVIDYYSKKGILKRVDGSQGIDNVVAEVLGILGWSDK

SEQ ID NO: 2151 - DNA, 699 bp, synthetic construct
  misc_feature 1..699: note = Variant of adenylate kinase
  source 1..699: mol_type = other DNA
atgcaccatcatcaccatcacgggggctccggcatgggggcatatctggtgttcttaggtccgccgggcgcgggaaaaagtacccaaggccgtcgcatttcggcaaagactggcatcccgcatattagcacgggcgatatcttccgtgacatcgtagctaagcaaaacgatgaagttgcctcgaaaattaaagagatcatggagaaaggtgaactcgttccagatgaactgggtaatgcggtagtaaaacgccgcctgtcggagaaagactgcgaaaaaggctttattttggatggttatccgcgtaccgtgcgccaagcggaatatctggatagttttcttgaaagccagaatcgccagttgacagccgccgtggccttcaaagtccccgaagatgaagttgttcagcgtctgctgtctcgcctgatctgtccgaaatgcaggcgtatctacaacatgatttttctgccaccaaaagaagacgagctgtgtgacgattgcggtgtcggcttagtacagcgtgatgatgataaggaagaaacggtccgtcaccgcctgaaagtctaccttgagaagacccagccggtcattgactattatagtaagaaaggtattctcaaacgcgtagatgggtcgcaaggaatcgacaacgttgttgcagaagtcctggggattctgggttggagcgataagtaatga

SEQ ID NO: 2152 - protein, 231 aa, synthetic construct
  REGION 1..231: note = Variant of adenylate kinase
MHHHHHHGGSGMGAYLVFLGPPGAGKSTQGRRISAKTGIPHISTGDIFRDIVAKQNDEVASKIKEIMEKGELVPDELGNAVVKRRLSEKDCEKGFILDGYPRTVRQAEYLDSFLESQNRQLTAAVAFKVPEDEVVQRLLSRLICPKCRRIYNMIFLPPKEDELCDDCGVGLVQRDDDKEETVRHRLKVYLEKTQPVIDYYSKKGILKRVDGSQGIDNVVAEVLGILGWSDK

SEQ ID NO: 2153 - DNA, 699 bp, synthetic construct
  misc_feature 1..699: note = Variant of adenylate kinase
  source 1..699: mol_type = other DNA
atgcaccatcatcaccatcacgggggctccggcatgggggcatatctggtgttcttaggtccgccgggcgcgggaaaaagtacccaaggccgtcgcatttcggcaaagactggcatcccgcatattagcacgggcgatatcttccgtgacatcgtagctaagcaaaacgatgaagttgcctcgaaaattaaagagatcatggagaaaggtgaactcgttccagatgaactgggtaatgcggtggtcaaacgccgcctgtcggagaaagactgcgaaaaaggctttattttggatggttatccgcgtaccgtgcgccaagcggaatatctggatagttttcttgaaagccagaatcgccagttgacagccgccgtgctgttcaaagtccccgaagatgaagttgttcagcgtctgctgtctcgcctgatctgtccgaaatgcgggcgtatctacaacatgatttttctgccaccaaaagaagacgagctgtgtgacgattgcggtgtcggcttagtacagcgtgatgatgataaggaagaaacggtccgtcaccgcctgaaagtctaccttgagaagacccagccggtcattgactattatagtaagaaaggtattctcaaacgcgtagatgggtcgcaaggaatcgacaacgttgttgcagaagtcctggggattctgggttggagcgataagtaatga

SEQ ID NO: 2154 - protein, 231 aa, synthetic construct
  REGION 1..231: note = Variant of adenylate kinase
MHHHHHHGGSGMGAYLVFLGPPGAGKSTQGRRISAKTGIPHISTGDIFRDIVAKQNDEVASKIKEIMEKGELVPDELGNAVVKRRLSEKDCEKGFILDGYPRTVRQAEYLDSFLESQNRQLTAAVLFKVPEDEVVQRLLSRLICPKCGRIYNMIFLPPKEDELCDDCGVGLVQRDDDKEETVRHRLKVYLEKTQPVIDYYSKKGILKRVDGSQGIDNVVAEVLGILGWSDK

SEQ ID NO: 2155 - DNA, 699 bp, synthetic construct
  misc_feature 1..699: note = Variant of adenylate kinase
  source 1..699: mol_type = other DNA
atgcaccatcatcaccatcacgggggctccggcatgggggcatatctggtgttcttaggtccgccgggcgcgggaaaaagtacccaaggccgtcgcatttcggcaaagactggcatcccgcatattagcacgggcgatatcttccgtgacatcgtcgctaagcaaaacgatgaagttgcctcgaaaattaaagagatcatggagaaaggtgaactcgttccagatgaactgggtaatgcggtagtaaaacgccgcctgtcggagaaagactgcgaaaaaggctttattttggatggttatccgcgtaccgtgcgccaagcggaatatctggatagttttcttgaaagccagaatcgccagttgacagccgccgtggccttcaaagtccccgaagatgaagttgttcagcgtctgctgtctcgcctgatctgtccgaaatgcgggcgtatctacaacatgatttttctgccaccaaaagaagacgagctgtgtgacgattgcggtgtcggcttagtacagcgtgatgatgataaggaagaaacggtccgtgttcgcctgaaagtctaccttgagaagacccagccggtcattgactattatagtaagaaaggtattctcaaacgcgtagatgggtcgcaaggaatcgacaacgttgttgcagaagtcctggggattctgggttggagcgataagtaatga

SEQ ID NO: 2156 - protein, 231 aa, synthetic construct
  REGION 1..231: note = Variant of adenylate kinase
MHHHHHHGGSGMGAYLVFLGPPGAGKSTQGRRISAKTGIPHISTGDIFRDIVAKQNDEVASKIKEIMEKGELVPDELGNAVVKRRLSEKDCEKGFILDGYPRTVRQAEYLDSFLESQNRQLTAAVAFKVPEDEVVQRLLSRLICPKCGRIYNMIFLPPKEDELCDDCGVGLVQRDDDKEETVRVRLKVYLEKTQPVIDYYSKKGILKRVDGSQGIDNVVAEVLGILGWSDK

SEQ ID NO: 2157 - DNA, 699 bp, synthetic construct
  misc_feature 1..699: note = Variant of adenylate kinase
  source 1..699: mol_type = other DNA
atgcaccatcatcaccatcacgggggctccggcatgggggcatatctggtgttcttaggtccgccgggcgcgggaaaaggtacccaaggccgtcgcatttcggcaaagactggcatcccgcatattagcacgggcgatatctttcgtgacatcgtcgctaagcaaaacgatgaagttgcctcgaaaattaaagagcaaatggagaaaggtgaactcgttccagatgaactgggtaatgcggtagtaaaacgccgcctgtcggagaaagactgcgaaaaaggctttattttggatggtttcccgcgtaccgtgcgccaagcggaatatctggatagttttcttgaaagccagaatcgccagttgacagccgccgtgctgttcaaagtccccgaagatgaagttcgccagcgtctgctgtctcgcctgatctgtccgaaatgcggtcgtatctacaacatgatttttctgccaccaaaagaagacgagctgtgtgacgattgcggtgtcggcttagtacagcgtgatgatgataaggaagaaacggtccgtcaccgcctgaaagtctaccttgagaagacccagccggtcattgactattatagtaagaaaggtattctcaaacgcgtagatgggtcgcaaggaatcgacaacgttctggcagaagtcctggggattctgggttggagcgataagtaatga

SEQ ID NO: 2158 - protein, 231 aa, synthetic construct
  REGION 1..231: note = Variant of adenylate kinase
MHHHHHHGGSGMGAYLVFLGPPGAGKGTQGRRISAKTGIPHISTGDIFRDIVAKQNDEVASKIKEQMEKGELVPDELGNAVVKRRLSEKDCEKGFILDGFPRTVRQAEYLDSFLESQNRQLTAAVLFKVPEDEVRQRLLSRLICPKCGRIYNMIFLPPKEDELCDDCGVGLVQRDDDKEETVRHRLKVYLEKTQPVIDYYSKKGILKRVDGSQGIDNVLAEVLGILGWSDK

SEQ ID NO: 2159 - DNA, 699 bp, synthetic construct
  misc_feature 1..699: note = Variant of adenylate kinase
  source 1..699: mol_type = other DNA
atgcaccatcatcaccatcacgggggctccggcatgggggcatatctggtgttcttaggtccgccgggcgcgggaaaaagtacccaaggccgtcgcatttcggcaaagactggcatcccgcatattagcacgggcgatatcttccgtgacatcgtagctaagcaaaacgatgaagttgcctcgaaaattaaagagatcatggcgaaaggtgaactcgttccagatgaactgggtaatgcggtagtaaaacgccgcctgtcggagaaagactgcgaaaaaggctttattttggatggttatccgcgtaccgtgcgccaagcggaatatctggatagttttcttgaaagccagaatcgccagttgacagccgccgtgctgttcaaagtccccgaagatgaagttgttcagcgtctgctgtctcgcctgatctgtccgaaatgcgggcgtatctacaacatgatttttctgccaccaaaagaagacgagctgtgtgacgattgcggtgtcggcttagtacagcgtgatgatgataaggaagaaacggtccgtcatcgcctgaaagtctaccttgagaagacccagccggtcattgactattatagtaagaaaggtattctcaaacgcgtagatgggtcgcaaggaatcgacaacgttgttgcagaagtcctggggattctgggttggagcgataagtaatga

SEQ ID NO: 2160 - protein, 231 aa, synthetic construct
  REGION 1..231: note = Variant of adenylate kinase
MHHHHHHGGSGMGAYLVFLGPPGAGKSTQGRRISAKTGIPHISTGDIFRDIVAKQNDEVASKIKEIMAKGELVPDELGNAVVKRRLSEKDCEKGFILDGYPRTVRQAEYLDSFLESQNRQLTAAVLFKVPEDEVVQRLLSRLICPKCGRIYNMIFLPPKEDELCDDCGVGLVQRDDDKEETVRHRLKVYLEKTQPVIDYYSKKGILKRVDGSQGIDNVVAEVLGILGWSDK

SEQ ID NO: 2161 - DNA, 699 bp, synthetic construct
  misc_feature 1..699: note = Variant of adenylate kinase
  source 1..699: mol_type = other DNA
atgcaccatcatcaccatcacgggggctccggcatgggggcatatctggtgttcttaggtccgccgggcgcgggaaaaggtacccaaggccgtcgcatttcggcaaagactggcatcccgcatattagcacgggcgatatcttccgtgacatcgcagctaagcaaaacgatgaagttgcctcgaaaattaaagagatcatggcgaaaggtgaactcgttccagatgaactgggtaatgcgctggtcaaacgccgcctgtcggagaaagactgcgaaaaaggctttattttggatggttatccgcgtaccgtgcgccaagcggaatatctggatagttttcttgaaagccagaatcgccagttgacagccgccgtggccttcaaagtccccgaagatgaagttgttcagcgtctgctgtctcgcctgatctgtccgaaatgcgggcgtatctacaacatgatttttctgccaccaaaagaagacgagctgtgtgacgattgcggtgtcggcttagtacagcgtgatgatgataaggaagaaacggtccgtcatcgcctgaaagtctaccttgagaagacccagccggtcattgactattatagtaagaaaggtattctcaaacgcgtagatgggtcgcaaggaatcgacaacgttgttgcagaagtcctggggattctgggttggagcgataagtaatga

SEQ ID NO: 2162 - protein, 231 aa, synthetic construct
  REGION 1..231: note = Variant of adenylate kinase
MHHHHHHGGSGMGAYLVFLGPPGAGKGTQGRRISAKTGIPHISTGDIFRDIAAKQNDEVASKIKEIMAKGELVPDELGNALVKRRLSEKDCEKGFILDGYPRTVRQAEYLDSFLESQNRQLTAAVAFKVPEDEVVQRLLSRLICPKCGRIYNMIFLPPKEDELCDDCGVGLVQRDDDKEETVRHRLKVYLEKTQPVIDYYSKKGILKRVDGSQGIDNVVAEVLGILGWSDK

SEQ ID NO: 2163 - DNA, 699 bp, synthetic construct
  misc_feature 1..699: note = Variant of adenylate kinase
  source 1..699: mol_type = other DNA
atgcaccatcatcaccatcacgggggctccggcatgggggcatatctggtgttcttaggtccgccgggcgcgggaaaaggtacccaaggccgtcgcatttcggcaaagactggcatcccgcatattagcacgggcgatatctttcgtgacatcgtcgctaagcaaaacgatgaagttgcctcgaaaattaaagagcaaatggagaaaggtgaactcgttccagatgaactgggtaatgcggtagtaaaacgccgcctgtcggagaaagactgcgaaaaaggctttattttggatggttatccgcgtaccgtgcgccaagcggaatatctggatagttttcttgaaagccagaatcgccagttgacagccgccgtgctgttcaaagtccccgaagatgaagttgttcagcgtctgctgtctcgcctgatctgtccgaaatgcgggcgtatctacaacatgatttttctgccaccaaaagaagacgagctgtgtgacgattgcggtgtcggcttagtacagcgtgatgatgataaggaagaaacggtccgtcaccgcctgaaagtctaccttgagaagacccagccggtcattgactattatagtaagaaaggtattctcaaacgcgtagatgggtcgcaaggaatcgacaacgttgtggcagaagtcctggggattctgggttggagcgataagtaatga

SEQ ID NO: 2164 - protein, 231 aa, synthetic construct
  REGION 1..231: note = Variant of adenylate kinase
MHHHHHHGGSGMGAYLVFLGPPGAGKGTQGRRISAKTGIPHISTGDIFRDIVAKQNDEVASKIKEQMEKGELVPDELGNAVVKRRLSEKDCEKGFILDGYPRTVRQAEYLDSFLESQNRQLTAAVLFKVPEDEVVQRLLSRLICPKCGRIYNMIFLPPKEDELCDDCGVGLVQRDDDKEETVRHRLKVYLEKTQPVIDYYSKKGILKRVDGSQGIDNVVAEVLGILGWSDK

SEQ ID NO: 2165 - DNA, 699 bp, synthetic construct
  misc_feature 1..699: note = Variant of adenylate kinase
  source 1..699: mol_type = other DNA
atgcaccatcatcaccatcacgggggctccggcatgggggcatatctggtgttcttaggtccgccgggcgcgggaaaaggtacccaaggccgtcgcatttcggcaaagactggcatcccgcatattagcacgggcgatatcctgcgtgacatcgtcgctaagcaaaacgatgaagttgcctcgaaaattaaagagcaaatggagaaaggtgaactcgttccagatgaactgggtaatgcggtagtaaaacgccgcctgtcggagaaagactgcgaaaaaggctttattttggatggttacccgcgtaccgtgcgccaagcggaatatctggatagttttcttgaaagccagaatcgccagttgacagccgccgtgctgttcaaagtccccgaagatgaagttgttctgcgtctgctgtctcgcctgatctgtccgaaatgcttccgtatctacaacatgatttttctgccaccaaaagaagacgagctgtgtgacgattgcggtgtcggcttagtacagcgtgatgatgataaggaagaaacggtccgtcaccgcctgaaagtctaccttgagaagacccagccggtcattgactattatagtaagaaaggtattctcaaacgcgtagatgggtcgcaaggaatcgacaacgttgtggcagaagtcctggggattctgggttggagcgataagtaatga

SEQ ID NO: 2166 - protein, 231 aa, synthetic construct
  REGION 1..231: note = Variant of adenylate kinase
MHHHHHHGGSGMGAYLVFLGPPGAGKGTQGRRISAKTGIPHISTGDILRDIVAKQNDEVASKIKEQMEKGELVPDELGNAVVKRRLSEKDCEKGFILDGYPRTVRQAEYLDSFLESQNRQLTAAVLFKVPEDEVVLRLLSRLICPKCFRIYNMIFLPPKEDELCDDCGVGLVQRDDDKEETVRHRLKVYLEKTQPVIDYYSKKGILKRVDGSQGIDNVVAEVLGILGWSDK

SEQ ID NO: 2167 - DNA, 699 bp, synthetic construct
  misc_feature 1..699: note = Variant of adenylate kinase
  source 1..699: mol_type = other DNA
atgcaccatcatcaccatcacgggggctccggcatgggggcatatctggtgttcttaggtccgccgggcgcgggaaaaggtacccaaggccgtcgcatttcggcaaagactggcatcccgcatattagcacgggcgatatctttcgtgacatcgtcgctaagcaaaacgatgaagttgcctcgaaaattaaagagttcatggagaaaggtgaactcgttccagatgaactgggtaatgcggtagtaaaacgccgcctgtcggagaaagactgcgaaaaaggctttattttggatggttatccgcgtaccgtgcgccaagcggaatatctggatagttttcttgaaagccagaatcgccagttgacagccgccgtgctgttcaaagtccccgaagatgaagttgttctgcgtctgctgtctcgcctgatctgtccgaaatgccaccgtatctacaacatgatttttctgccaccaaaagaagacgagctgtgtgacgattgcggtgtcggcttagtacagcgtgatgatgataaggaagaaacggtccgtcaccgcctgaaagtctaccttgagaagacccagccggtcattgactattatagtaagaaaggtattctcaaacgcgtagatgggtcgcaaggaatcgacaacgttgtggcagaagtcctggggattctgggttggagcgataagtaatga

SEQ ID NO: 2168 - protein, 231 aa, synthetic construct
  REGION 1..231: note = Variant of adenylate kinase
MHHHHHHGGSGMGAYLVFLGPPGAGKGTQGRRISAKTGIPHISTGDIFRDIVAKQNDEVASKIKEFMEKGELVPDELGNAVVKRRLSEKDCEKGFILDGYPRTVRQAEYLDSFLESQNRQLTAAVLFKVPEDEVVLRLLSRLICPKCHRIYNMIFLPPKEDELCDDCGVGLVQRDDDKEETVRHRLKVYLEKTQPVIDYYSKKGILKRVDGSQGIDNVVAEVLGILGWSDK

SEQ ID NO: 2169 - DNA, 699 bp, synthetic construct
  misc_feature 1..699: note = Variant of adenylate kinase
  source 1..699: mol_type = other DNA
atgcaccatcatcaccatcacgggggctccggcatgggggcatatctggtgttcttaggtccgccgggcgcgggaaaaggtacccaaggccgtcgcatttcggcaaagactggcatcccgcatattagcacgggcgatatctttcgtgacatcgtcgctaagcaaaacgatgaagttgcctcgaaaattaaagagcaaatggagaaaggtgaactcgttccagatgaactgggtaatgcggtagtaaaacgccgcctgtcggagaaagactgcgaaaaaggctttattttggatggttacccgcgtaccgtgcgccaagcggaatatctggatagttttcttgaaagccagaatcgccagttgacagccgccgtgctgttcaaagtccccgaagatgaagttcgccagcgtctgctgtctcgcctgatctgtccgaaatgcggtcgtatctacaacatgatttttctgccaccaaaagaagacgagctgtgtgacgattgcggtgtcggcttagtacagcgtgatgatgataaggaagaaacggtccgtcaccgcctgaaagtctaccttgagaagacccagccggtcattgactattatagtaagaaaggtattctcaaacgcgtagatgggtcgcaaggaatcgacaacgttgtggcagaagtcctggggattctgggttggagcgataagtaatga

SEQ ID NO: 2170 - protein, 231 aa, synthetic construct
  REGION 1..231: note = Variant of adenylate kinase
MHHHHHHGGSGMGAYLVFLGPPGAGKGTQGRRISAKTGIPHISTGDIFRDIVAKQNDEVASKIKEQMEKGELVPDELGNAVVKRRLSEKDCEKGFILDGYPRTVRQAEYLDSFLESQNRQLTAAVLFKVPEDEVRQRLLSRLICPKCGRIYNMIFLPPKEDELCDDCGVGLVQRDDDKEETVRHRLKVYLEKTQPVIDYYSKKGILKRVDGSQGIDNVVAEVLGILGWSDK

SEQ ID NO: 2171 - DNA, 699 bp, synthetic construct
  misc_feature 1..699: note = Variant of adenylate kinase
  source 1..699: mol_type = other DNA
atgcaccatcatcaccatcacgggggctccggcatgggggcatatctggtgttcttaggtccgccgggcgcgggaaaaggtacccaaggccgtcgcatttcggcaaagactggcatcccgcatattagcacgggcgatatctttcgtgacatcgtcgctaagcaaaacgatgaagttgcctcgaaaattaaagagcaaatggagaaaggtgaactcgttccagatgaactgggtaatgcggtagtaaaacgccgcctgtcggagaaagactgcgaaaaaggctttattttggatggttatccgcgtaccgtgcgccaagcggaatatctggatagttttcttgaaagccagaatcgccagttgacagccgccgtgctgttcaaagtccccgaagatgaagttgttctgcgtctgctgtctcgcctgatctgtccgaaatgcgggcgtatctacaacatgatttttctgccaccaaaagaagacgagctgtgtgacgattgcggtgtcggcttagtacagcgtgatgatgataaggaagaaacggtccgtcaccgcctgaaagtctaccttgagaagacccagccggtcattgactattatagtaagaaaggtattctcaaacgcgtagatgggtcgcaaggaatcgacaacgttgttgcagaagtcctggggattctgggttggagcgataagtaatga

SEQ ID NO: 2172 - protein, 231 aa, synthetic construct
  REGION 1..231: note = Variant of adenylate kinase
MHHHHHHGGSGMGAYLVFLGPPGAGKGTQGRRISAKTGIPHISTGDIFRDIVAKQNDEVASKIKEQMEKGELVPDELGNAVVKRRLSEKDCEKGFILDGYPRTVRQAEYLDSFLESQNRQLTAAVLFKVPEDEVVLRLLSRLICPKCGRIYNMIFLPPKEDELCDDCGVGLVQRDDDKEETVRHRLKVYLEKTQPVIDYYSKKGILKRVDGSQGIDNVVAEVLGILGWSDK

SEQ ID NO: 2173 - DNA, 699 bp, synthetic construct
  misc_feature 1..699: note = Variant of adenylate kinase
  source 1..699: mol_type = other DNA
atgcaccatcatcaccatcacgggggctccggcatgggggcatatctggtgttcttaggtccgccgggcgcgggaaaaggtacccaaggccgtcgcatttcggcaaagactggcatcccgcatattagcacgggcgatatctttcgtgacatcgtcgctaagcaaaacgatgaagttgcctcgaaaattaaagagttcatggagaaaggtgaactcgttccagatgaactgggtaatgcggtagtaaaacgccgcctgtcggagaaagactgcgaaaaaggctttattttggatggttatccgcgtaccgtgcgccaagcggaatatctggatagttttcttgaaagccagaatcgccagttgacagccgccgtgctgttcaaagtccccgaagatgaagttcgccagcgtctgctgtctcgcctgatctgtccgaaatgcgggcgtatctacaacatgatttttctgccaccaaaagaagacgagctgtgtgacgattgcggtgtcggcttagtacagcgtgatgatgataaggaagaaacggtccgtcaccgcctgaaagtctaccttgagaagacccagccggtcattgactattatagtaagaaaggtattctcaaacgcgtagatgggtcgcaaggaatcgacaacgttctggcagaagtcctggggattctgggttggagcgataagtaatga

SEQ ID NO: 2174 - protein, 231 aa, synthetic construct
  REGION 1..231: note = Variant of adenylate kinase
MHHHHHHGGSGMGAYLVFLGPPGAGKGTQGRRISAKTGIPHISTGDIFRDIVAKQNDEVASKIKEFMEKGELVPDELGNAVVKRRLSEKDCEKGFILDGYPRTVRQAEYLDSFLESQNRQLTAAVLFKVPEDEVRQRLLSRLICPKCGRIYNMIFLPPKEDELCDDCGVGLVQRDDDKEETVRHRLKVYLEKTQPVIDYYSKKGILKRVDGSQGIDNVLAEVLGILGWSDK

SEQ ID NO: 2175 - DNA, 699 bp, synthetic construct
  misc_feature 1..699: note = Variant of adenylate kinase
  source 1..699: mol_type = other DNA
atgcaccatcatcaccatcacgggggctccggcatgggggcatatctggtgttcttaggtccgccgggcgcgggaaaaggtacccaaggccgtcgcatttcggcaaagactggcatcccgcatattagcacgggcgatatctttcgtgacatcgtcgctaagcaaaacgatgaagttgcctcgaaaattaaagagatcatggagaaaggtgaactcgttccagatgaactgggtaatgcggtagtaaaacgccgcctgtcggagaaagactgcgaaaaaggctttattttggatggttatccgcgtaccgtgcgccaagcggaatatctggatagttttcttgaaagccagaatcgccagttgacagccgccgtgctgttcaaagtccccgaagatgaagttgttctgcgtctgctgtctcgcctgatctgtccgaaatgcgggcgtatctacaacatgatttttctgccaccaaaagaagacgagctgtgtgacgattgcggtgtcggcttagtacagcgtgatgatgataaggaagaaacggtccgtcaccgcctgaaagtctaccttgagaagacccagccggtcattgactattatagtaagaaaggtattctcaaacgcgtagatgggtcgcaaggaatcgacaacgttgttgcagaagtcctggggattctgggttggagcgataagtaatga

SEQ ID NO: 2176 - protein, 231 aa, synthetic construct
  REGION 1..231: note = Variant of adenylate kinase
MHHHHHHGGSGMGAYLVFLGPPGAGKGTQGRRISAKTGIPHISTGDIFRDIVAKQNDEVASKIKEIMEKGELVPDELGNAVVKRRLSEKDCEKGFILDGYPRTVRQAEYLDSFLESQNRQLTAAVLFKVPEDEVVLRLLSRLICPKCGRIYNMIFLPPKEDELCDDCGVGLVQRDDDKEETVRHRLKVYLEKTQPVIDYYSKKGILKRVDGSQGIDNVVAEVLGILGWSDK

SEQ ID NO: 2177 - DNA, 699 bp, synthetic construct
  misc_feature 1..699: note = Variant of adenylate kinase
  source 1..699: mol_type = other DNA
atgcaccatcatcaccatcacgggggctccggcatgggggcatatctggtgttcttaggtccgccgggcgcgggaaaaggtacccaaggccgtcgcatttcggcaaagactggcatcccgcatattagcacgggcgatatctttcgtgacatcgtcgctaagcaaaacgatgaagttgcctcgaaaattaaagagatcatggagaaaggtgaactcgttccagatgaactgggtaatgcggtagtaaaacgccgcctgtcggagaaagactgcgaaaaaggctttattttggatggttacccgcgtaccgtgcgccaagcggaatatctggatagttttcttgaaagccagaatcgccagttgacagccgccgtgctgttcaaagtccccgaagatgaagttcgccagcgtctgctgtctcgcctgatctgtccgaaatgcttccgtatctacaacatgatttttctgccaccaaaagaagacgagctgtgtgacgattgcggtgtcggcttagtacagcgtgatgatgataaggaagaaacggtccgtcaccgcctgaaagtctaccttgagaagacccagccggtcattgactattatagtaagaaaggtattctcaaacgcgtagatgggtcgcaaggaatcgacaacgttctggcagaagtcctggggattctgggttggagcgataagtaatga

SEQ ID NO: 2178 - protein, 231 aa, synthetic construct
  REGION 1..231: note = Variant of adenylate kinase
MHHHHHHGGSGMGAYLVFLGPPGAGKGTQGRRISAKTGIPHISTGDIFRDIVAKQNDEVASKIKEIMEKGELVPDELGNAVVKRRLSEKDCEKGFILDGYPRTVRQAEYLDSFLESQNRQLTAAVLFKVPEDEVRQRLLSRLICPKCFRIYNMIFLPPKEDELCDDCGVGLVQRDDDKEETVRHRLKVYLEKTQPVIDYYSKKGILKRVDGSQGIDNVLAEVLGILGWSDK

SEQ ID NO: 2179 - DNA, 699 bp, synthetic construct
  misc_feature 1..699: note = Variant of adenylate kinase
  source 1..699: mol_type = other DNA
atgcaccatcatcaccatcacgggggctccggcatgggggcatatctggtgttcttaggtccgccgggcgcgggaaaaggtacccaaggccgtcgcatttcggcaaagactggcatcccgcatattagcacgggcgatatcttccgtgacatcgtagctaagcaaaacgatgaagttgcctcgaaaattaaagagatcatggcgaaaggtgaactcgttccagatgaactgggtaatgcggtagtaaaacgccgcctgtcggagaaagactgcgaaaaaggctttattttggatggttatccgcgtaccgtgcgccaagcggaatatctggatagttttcttgaaagccagaatcgccagttgacagccgccgtggccttcaaagtccccgaagatgaagttgttcagcgtctgctgtctcgcctgatctgtccgaaatgcgggcgtatctacaacatgatttttctgccaccaaaagaagacgagctgtgtgacgattgcggtgtcggcttagtacagcgtgatgatgataaggaagaaacggtccgtcatcgcctgaaagtctaccttgagaagacccagccggtcattgactattatagtaagaaaggtattctcaaacgcgtagatgggtcgcaaggaatcgacaacgttgttgcagaagtcctggggattctgggttggagcgataagtaatga

SEQ ID NO: 2180 - protein, 231 aa, synthetic construct
  REGION 1..231: note = Variant of adenylate kinase
MHHHHHHGGSGMGAYLVFLGPPGAGKGTQGRRISAKTGIPHISTGDIFRDIVAKQNDEVASKIKEIMAKGELVPDELGNAVVKRRLSEKDCEKGFILDGYPRTVRQAEYLDSFLESQNRQLTAAVAFKVPEDEVVQRLLSRLICPKCGRIYNMIFLPPKEDELCDDCGVGLVQRDDDKEETVRHRLKVYLEKTQPVIDYYSKKGILKRVDGSQGIDNVVAEVLGILGWSDK

SEQ ID NO: 2181 - DNA, 699 bp, synthetic construct
  misc_feature 1..699: note = Variant of adenylate kinase
  source 1..699: mol_type = other DNA
atgcaccatcatcaccatcacgggggctccggcatgggggcatatctggtgttcttaggtccgccgggcgcgggaaaaggtacccaaggccgtcgcatttcggcaaagactggcatcccgcatattagcacgggcgatatctttcgtgacatcgtcgctaagcaaaacgatgaagttgcctcgaaaattaaagagttcatggagaaaggtgaactcgttccagatgaactgggtaatgcggtagtaaaacgccgcctgtcggagaaagactgcgaaaaaggctttattttggatggttacccgcgtaccgtgcgccaagcggaatatctggatagttttcttgaaagccagaatcgccagttgacagccgccgtgctgttcaaagtccccgaagatgaagttgttcagcgtctgctgtctcgcctgatctgtccgaaatgccaccgtatctacaacatgatttttctgccaccaaaagaagacgagctgtgtgacgattgcggtgtcggcttagtacagcgtgatgatgataaggaagaaacggtccgtcaccgcctgaaagtctaccttgagaagacccagccggtcattgactattatagtaagaaaggtattctcaaacgcgtagatgggtcgcaaggaatcgacaacgttctggcagaagtcctggggattctgggttggagcgataagtaatga

SEQ ID NO: 2182 - protein, 231 aa, synthetic construct
  REGION 1..231: note = Variant of adenylate kinase
MHHHHHHGGSGMGAYLVFLGPPGAGKGTQGRRISAKTGIPHISTGDIFRDIVAKQNDEVASKIKEFMEKGELVPDELGNAVVKRRLSEKDCEKGFILDGYPRTVRQAEYLDSFLESQNRQLTAAVLFKVPEDEVVQRLLSRLICPKCHRIYNMIFLPPKEDELCDDCGVGLVQRDDDKEETVRHRLKVYLEKTQPVIDYYSKKGILKRVDGSQGIDNVLAEVLGILGWSDK

SEQ ID NO: 2183 - DNA, 699 bp, synthetic construct
  misc_feature 1..699: note = Variant of adenylate kinase
  source 1..699: mol_type = other DNA
atgcaccatcatcaccatcacgggggctccggcatgggggcatatctggtgttcttaggtccgccgggcgcgggaaaaagtacccaaggccgtcgcatttcggcaaagactggcatcccgcatattagcacgggcgatatcttccgtgacatcgtagctaagcaaaacgatgaagttgcctcgaaaattaaagagatcatgctgaaaggtgaactcgttccagatgaactgggtaatgcggtagtaaaacgccgcctgtcggagaaagactgcgaaaaaggctttattttggatggttatccgcgtaccgtgcgccaagcggaatatctggatagttttcttgaaagccagaatcgccagttgacagccgccgtggccttcaaagtccccgaagatgaagttgttcagcgtctgctgtctcgcctgatctgtccgaaatgcgggcgtatctacaacatgatttttctgccaccaaaagaagacgagctgtgtgacgattgcggtgtcggcttagtacagcgtgatgatgataaggaagaaacggtccgtcatcgcctgaaagtctaccttgagaagacccagccggtcattgactattatagtaagaaaggtattctcaaacgcgtagatgggtcgcaaggaatcgacaacgttgttgcagaagtcctggggattctgggttggagcgataagtaatga

SEQ ID NO: 2184 - protein, 231 aa, synthetic construct
  REGION 1..231: note = Variant of adenylate kinase
MHHHHHHGGSGMGAYLVFLGPPGAGKSTQGRRISAKTGIPHISTGDIFRDIVAKQNDEVASKIKEIMLKGELVPDELGNAVVKRRLSEKDCEKGFILDGYPRTVRQAEYLDSFLESQNRQLTAAVAFKVPEDEVVQRLLSRLICPKCGRIYNMIFLPPKEDELCDDCGVGLVQRDDDKEETVRHRLKVYLEKTQPVIDYYSKKGILKRVDGSQGIDNVVAEVLGILGWSDK

SEQ ID NO: 2185 - DNA, 699 bp, synthetic construct
  misc_feature 1..699: note = Variant of adenylate kinase
  source 1..699: mol_type = other DNA
atgcaccatcatcaccatcacgggggctccggcatgggggcatatctggtgttcttaggtccgccgggcgcgggaaaaagtacccaaggccgtcgcatttcggcaaagactggcatcccgcatattagcacgggcgatatcttccgtgacatcgtcgctaagcaaaacgatgaagttgcctcgaaaattaaagagatcatgctgaaaggtgaactcgttccagatgaactgggtaatgcggtggtcaaacgccgcctgtcggagaaagactgcgaaaaaggctttattttggatggttatccgcgtaccgtgcgccaagcggaatatctggatagttttcttgaaagccagaatcgccagttgacagccgccgtgctgttcaaagtccccgaagatgaagttgttcagcgtctgctgtctcgcctgatctgtccgaaatgcgggcgtatctacaacatgatttttctgccaccaaaagaagacgagctgtgtgacgattgcggtgtcggcttagtacagcgtgatgatgataaggaagaaacggtccgtgttcgcctgaaagtctaccttgagaagacccagccggtcattgactattatagtaagaaaggtattctcaaacgcgtagatgggtcgcaaggaatcgacaacgttgttgcagaagtcctggggattctgggttggagcgataagtaatga

SEQ ID NO: 2186 - protein, 231 aa, synthetic construct
  REGION 1..231: note = Variant of adenylate kinase
MHHHHHHGGSGMGAYLVFLGPPGAGKSTQGRRISAKTGIPHISTGDIFRDIVAKQNDEVASKIKEIMLKGELVPDELGNAVVKRRLSEKDCEKGFILDGYPRTVRQAEYLDSFLESQNRQLTAAVLFKVPEDEVVQRLLSRLICPKCGRIYNMIFLPPKEDELCDDCGVGLVQRDDDKEETVRVRLKVYLEKTQPVIDYYSKKGILKRVDGSQGIDNVVAEVLGILGWSDK

SEQ ID NO: 2187 - DNA, 699 bp, synthetic construct
  misc_feature 1..699: note = Variant of adenylate kinase
  source 1..699: mol_type = other DNA
atgcaccatcatcaccatcacgggggctccggcatgggggcatatctggtgttcttaggtccgccgggcgcgggaaaaggtacccaaggccgtcgcatttcggcaaagactggcatcccgcatattagcacgggcgatatcttccgtgacatcgtcgctaagcaaaacgatgaagttgcctcgaaaattaaagagatcatggagaaaggtgaactcgttccagatgaactgggtaatgcggtggtcaaacgccgcctgtcggagaaagactgcgaaaaaggctttattttggatggttatccgcgtaccgtgcgccaagcggaatatctggatagttttcttgaaagccagaatcgccagttgacagccgccgtggccttcaaagtccccgaagatgaagttgttcagcgtctgctgtctcgcctgatctgtccgaaatgcgggcgtatctacaacatgatttttctgccaccaaaagaagacgagctgtgtgacgattgcggtgtcggcttagtacagcgtgatgatgataaggaagaaacggtccgtcaccgcctgaaagtctaccttgagaagacccagccggtcattgactattatagtaagaaaggtattctcaaacgcgtagatgggtcgcaaggaatcgacaacgttgttgcagaagtcctggggattctgggttggagcgataagtaatga

SEQ ID NO: 2188 - protein, 231 aa, synthetic construct
  REGION 1..231: note = Variant of adenylate kinase
MHHHHHHGGSGMGAYLVFLGPPGAGKGTQGRRISAKTGIPHISTGDIFRDIVAKQNDEVASKIKEIMEKGELVPDELGNAVVKRRLSEKDCEKGFILDGYPRTVRQAEYLDSFLESQNRQLTAAVAFKVPEDEVVQRLLSRLICPKCGRIYNMIFLPPKEDELCDDCGVGLVQRDDDKEETVRHRLKVYLEKTQPVIDYYSKKGILKRVDGSQGIDNVVAEVLGILGWSDK

SEQ ID NO: 2189 - DNA, 699 bp, synthetic construct
  misc_feature 1..699: note = Variant of adenylate kinase
  source 1..699: mol_type = other DNA
atgcaccatcatcaccatcacgggggctccggcatgggggcatatctggtgttcttaggtccgccgggcgcgggaaaaggtacccaaggccgtcgcatttcggcaaagactggcatcccgcatattagcacgggcgatatcttccgtgacatcgtcgctaagcaaaacgatgaagttgcctcgaaaattaaagagatcatgctgaaaggtgaactcgttccagatgaactgggtaatgcgctggtcaaacgccgcctgtcggagaaagactgcgaaaaaggctttattttggatggttatccgcgtaccgtgcgccaagcggaatatctggatagttttcttgaaagccagaatcgccagttgacagccgccgtggccttcaaagtccccgaagatgaagttgttcagcgtctgctgtctcgcctgatctgtccgaaatgcgggcgtatctacaacatgatttttctgccaccaaaagaagacgagctgtgtgacgattgcggtgtcggcttagtacagcgtgatgatgataaggaagaaacggtccgtcaccgcctgaaagtctaccttgagaagacccagccggtcattgactattatagtaagaaaggtattctcaaacgcgtagatgggtcgcaaggaatcgacaacgttgttgcagaagtcctggggattctgggttggagcgataagtaatga

SEQ ID NO: 2190 - protein, 231 aa, synthetic construct
  REGION 1..231: note = Variant of adenylate kinase
MHHHHHHGGSGMGAYLVFLGPPGAGKGTQGRRISAKTGIPHISTGDIFRDIVAKQNDEVASKIKEIMLKGELVPDELGNALVKRRLSEKDCEKGFILDGYPRTVRQAEYLDSFLESQNRQLTAAVAFKVPEDEVVQRLLSRLICPKCGRIYNMIFLPPKEDELCDDCGVGLVQRDDDKEETVRHRLKVYLEKTQPVIDYYSKKGILKRVDGSQGIDNVVAEVLGILGWSDK

SEQ ID NO: 2191 - DNA, 699 bp, synthetic construct
  misc_feature 1..699: note = Variant of adenylate kinase
  source 1..699: mol_type = other DNA
atgcaccatcatcaccatcacgggggctccggcatgggggcatatctggtgttcttaggtccgccgggcgcgggaaaaggtacccaaggccgtcgcatttcggcaaagactggcatcccgcatattagcacgggcgatatctttcgtgacatcgtcgctaagcaaaacgatgaagttgcctcgaaaattaaagagatcatggagaaaggtgaactcgttccagatgaaatgggtaatgcggtagtaaaacgccgcctgtcggagaaagactgcgaaaaaggctttattttggatggttatccgcgtaccgtgcgccaagcggaatatctggatagttttcttgaaagccagaatcgccagttgacagccgccgtgctgttcaaagtccccgaagatgaagttcgccagcgtctgctgtctcgcctgatctgtccgaaatgcgggcgtatctacaacatgatttttctgccaccaaaagaagacgagctgtgtgacgattgcggtgtcggcttagtacagcgtgatgatgataaggaagaaacggtccgtcaccgcctgaaagtctaccttgagaagacccagccggtcattgactattatagtaagaaaggtattctcaaacgcgtagatgggtcgcaaggaatcgacaacgttgtggcagaagtcctggggattctgggttggagcgataagtaatga

SEQ ID NO: 2192 - protein, 231 aa, synthetic construct
  REGION 1..231: note = Variant of adenylate kinase
MHHHHHHGGSGMGAYLVFLGPPGAGKGTQGRRISAKTGIPHISTGDIFRDIVAKQNDEVASKIKEIMEKGELVPDEMGNAVVKRRLSEKDCEKGFILDGYPRTVRQAEYLDSFLESQNRQLTAAVLFKVPEDEVRQRLLSRLICPKCGRIYNMIFLPPKEDELCDDCGVGLVQRDDDKEETVRHRLKVYLEKTQPVIDYYSKKGILKRVDGSQGIDNVVAEVLGILGWSDK

SEQ ID NO: 2193 - DNA, 699 bp, synthetic construct
  misc_feature 1..699: note = Variant of adenylate kinase
  source 1..699: mol_type = other DNA
atgcaccatcatcaccatcacgggggctccggcatgggggcatatctggtgttcttaggtccgccgggcgcgggaaaaggtacccaaggccgtcgcatttcggcaaagactggcatcccgcatattagcacgggcgatatctttcgtgacatcgtcgctaagcaaaacgatgaagttgcctcgaaaattaaagagatcatggagaaaggtgaactcgttccagatgaactgggtaatgcggtagtaaaacgccgcctgtcggagaaagactgcgaaaaaggctttattttggatggttatccgcgtaccgtgcgccaagcggaatatctggatagttttcttgaaagccagaatcgccagttgacagccgccgtgctgttcaaagtccccgaagatgaagttcgcctgcgtctgctgtctcgcctgatctgtccgaaatgcgggcgtatctacaacatgatttttctgccaccaaaagaagacgagctgtgtgacgattgcggtgtcggcttagtacagcgtgatgatgataaggaagaaacggtccgtcaccgcctgaaagtctaccttgagaagacccagccggtcattgactattatagtaagaaaggtattctcaaacgcgtagatgggtcgcaaggaatcgacaacgttgtggcagaagtcctggggattctgggttggagcgataagtaatga

SEQ ID NO: 2194 - protein, 231 aa, synthetic construct
  REGION 1..231: note = Variant of adenylate kinase
MHHHHHHGGSGMGAYLVFLGPPGAGKGTQGRRISAKTGIPHISTGDIFRDIVAKQNDEVASKIKEIMEKGELVPDELGNAVVKRRLSEKDCEKGFILDGYPRTVRQAEYLDSFLESQNRQLTAAVLFKVPEDEVRLRLLSRLICPKCGRIYNMIFLPPKEDELCDDCGVGLVQRDDDKEETVRHRLKVYLEKTQPVIDYYSKKGILKRVDGSQGIDNVVAEVLGILGWSDK

SEQ ID NO: 2195 - DNA, 699 bp, synthetic construct
  misc_feature 1..699: note = Variant of adenylate kinase
  source 1..699: mol_type = other DNA
atgcaccatcatcaccatcacgggggctccggcatgggggcatatctggtgttcttaggtccgccgggcgcgggaaaaggtacccaaggccgtcgcatttcggcaaagactggcatcccgcatattagcacgggcgatatctttcgtgacatcgtcgctaagcaaaacgatgaagttgcctcgaaaattaaagagatcatggagaaaggtgaactcgttccagatgaaatgggtaatgcggtagtaaaacgccgcctgtcggagaaagactgcgaaaaaggctttattttggatggttatccgcgtaccgtgcgccaagcggaatatctggatagttttcttgaaagccagaatcgccagttgacagccgccgtgctgttcaaagtccccgaagatgaagttgttctgcgtctgctgtctcgcctgatctgtccgaaatgcgggcgtatctacaacatgatttttctgccaccaaaagaagacgagctgtgtgacgattgcggtgtcggcttagtacagcgtgatgatgataaggaagaaacggtccgtcaccgcctgaaagtctaccttgagaagacccagccggtcattgactattatagtaagaaaggtattctcaaacgcgtagatgggtcgcaaggaatcgacaacgttgttgcagaagtcctggggattctgggttggagcgataagtaatga

SEQ ID NO: 2196 - protein, 231 aa, synthetic construct
  REGION 1..231: note = Variant of adenylate kinase
MHHHHHHGGSGMGAYLVFLGPPGAGKGTQGRRISAKTGIPHISTGDIFRDIVAKQNDEVASKIKEIMEKGELVPDEMGNAVVKRRLSEKDCEKGFILDGYPRTVRQAEYLDSFLESQNRQLTAAVLFKVPEDEVVLRLLSRLICPKCGRIYNMIFLPPKEDELCDDCGVGLVQRDDDKEETVRHRLKVYLEKTQPVIDYYSKKGILKRVDGSQGIDNVVAEVLGILGWSDK

SEQ ID NO: 2197 - DNA, 699 bp, synthetic construct
  misc_feature 1..699: note = Variant of adenylate kinase
  source 1..699: mol_type = other DNA
atgcaccatcatcaccatcacgggggctccggcatgggggcatatctggtgttcttaggtccgccgggcgcgggaaaaggtacccaaggccgtcgcatttcggcaaagactggcatcccgcatattagcacgggcgatatctttcgtgacatcgtcgctaagcaaaacgatgaagttgcctcgaaaattaaagagatcatggagaaaggtgaactcgttccagatgaaatgggtaatgcggtagtaaaacgccgcctgtcggagaaagactgcgaaaaaggctttattttggatggttatccgcgtaccgtgcgccaagcggaatatctggatagttttcttgaaagccagaatcgccagttgacagccgccgtgctgttcaaagtccccgaagatgaagttgttcagcgtctgctgtctcgcctgatctgtccgaaatgcttccgtatctacaacatgatttttctgccaccaaaagaagacgagctgtgtgacgattgcggtgtcggcttagtacagcgtgatgatgataaggaagaaacggtccgtcaccgcctgaaagtctaccttgagaagacccagccggtcattgactattatagtaagaaaggtattctcaaacgcgtagatgggtcgcaaggaatcgacaacgttgttgcagaagtcctggggattctgggttggagcgataagtaatga

SEQ ID NO: 2198 - protein, 231 aa, synthetic construct
  REGION 1..231: note = Variant of adenylate kinase
MHHHHHHGGSGMGAYLVFLGPPGAGKGTQGRRISAKTGIPHISTGDIFRDIVAKQNDEVASKIKEIMEKGELVPDEMGNAVVKRRLSEKDCEKGFILDGYPRTVRQAEYLDSFLESQNRQLTAAVLFKVPEDEVVQRLLSRLICPKCFRIYNMIFLPPKEDELCDDCGVGLVQRDDDKEETVRHRLKVYLEKTQPVIDYYSKKGILKRVDGSQGIDNVVAEVLGILGWSDK

SEQ ID NO: 2199 - DNA, 699 bp, synthetic construct
  misc_feature 1..699: note = Variant of adenylate kinase
  source 1..699: mol_type = other DNA
atgcaccatcatcaccatcacgggggctccggcatgggggcatatctggtgttcttaggtccgccgggcgcgggaaaaggtacccaaggccgtcgcatttcggcaaagactggcatcccgcatattagcacgggcgatatcttccgtgacatcgtagctaagcaaaacgatgaagttgcctcgaaaattaaagagatcatggagaaaggtgaactcgttccagatgaactgggtaatgcggtgaccaaacgccgcctgtcggagaaagactgcgaaaaaggctttattttggatggttatccgcgtaccgtgcgccaagcggaatatctggatagttttcttgaaagccagaatcgccagttgacagccgccgtgctgttcaaagtccccgaagatgaagttgttcagcgtctgctgtctcgcctgatctgtccgaaatgcgggcgtatctacaacatgatttttctgccaccaaaagaagacgagctgtgtgacgattgcggtgtcggcttagtacagcgtgatgatgataaggaagaaacggtccgtcaccgcctgaaagtctaccttgagaagacccagccggtcattgactattatagtaagaaaggtattctcaaacgcgtagatgggtcgcaaggaatcgacaacgttgttgcagaagtcctggggattctgggttggagcgataagtaatga

SEQ ID NO: 2200 - protein, 231 aa, synthetic construct
  REGION 1..231: note = Variant of adenylate kinase
MHHHHHHGGSGMGAYLVFLGPPGAGKGTQGRRISAKTGIPHISTGDIFRDIVAKQNDEVASKIKEIMEKGELVPDELGNAVTKRRLSEKDCEKGFILDGYPRTVRQAEYLDSFLESQNRQLTAAVLFKVPEDEVVQRLLSRLICPKCGRIYNMIFLPPKEDELCDDCGVGLVQRDDDKEETVRHRLKVYLEKTQPVIDYYSKKGILKRVDGSQGIDNVVAEVLGILGWSDK

SEQ ID NO: 2201 - DNA, 699 bp, synthetic construct
  misc_feature 1..699: note = Variant of adenylate kinase
  source 1..699: mol_type = other DNA
atgcaccatcatcaccatcacgggggctccggcatgggggcatatctggtgttcttaggtccgccgggcgcgggaaaaggtacccaaggccgtcgcatttcggcaaagactggcatcccgcatattagcacgggcgatatcttccgtgacatcgtcgctaagcaaaacgatgaagttgcctcgaaaattaaagagatcatggagaaaggtgaactcgttccagatgaactgggtaatgcggtagtaaaacgccgcctgtcggagaaagactgcgaaaaaggctttattttggatggttatccgcgtaccgtgcgccaagcggaatatctggatagttttcttgaaagccagaatcgccagttgacagccgccgtgctgttcaaagtccccgaagatgaagttgttcagcgtgtgctgtctcgcctgatctgtccgaaatgcgggcgtatctacaacatgatttttctgccaccaaaagaagacgagctgtgtgacgattgcggtgtcggcttagtacagcgtgatgatgataaggaagaaacggtccgtgttcgcctgaaagtctaccttgagaagacccagccggtcattgactattatagtaagaaaggtattctcaaacgcgtagatgggtcgcaaggaatcgacaacgttgttgcagaagtcctggggattctgggttggagcgataagtaatga

SEQ ID NO: 2202 - protein, 231 aa, synthetic construct
  REGION 1..231: note = Variant of adenylate kinase
MHHHHHHGGSGMGAYLVFLGPPGAGKGTQGRRISAKTGIPHISTGDIFRDIVAKQNDEVASKIKEIMEKGELVPDELGNAVVKRRLSEKDCEKGFILDGYPRTVRQAEYLDSFLESQNRQLTAAVLFKVPEDEVVQRVLSRLICPKCGRIYNMIFLPPKEDELCDDCGVGLVQRDDDKEETVRVRLKVYLEKTQPVIDYYSKKGILKRVDGSQGIDNVVAEVLGILGWSDK

SEQ ID NO: 2203 - DNA, 699 bp, synthetic construct
  misc_feature 1..699: note = Variant of adenylate kinase
  source 1..699: mol_type = other DNA
atgcaccatcatcaccatcacgggggctccggcatgggggcatatctggtgttcttaggtccgccgggcgcgggaaaaggtacccaaggccgtcgcatttcggcaaagactggcatcccgcatattagcacgggcgatatctttcgtgacatcgtcgctaagcaaaacgatgaagttgcctcgaaaattaaagagatcatggagaaaggtgaactcgttccagatgaaatgggtaatgcggtagtaaaacgccgcctgtcggagaaagactgcgaaaaaggctttattttggatggttatccgcgtaccgtgcgccaagcggaatatctggatagttttcttgaaagccagaatcgccagttgacagccgccgtgctgttcaaagtccccgaagatgaagttcgcctgcgtctgctgtctcgcctgatctgtccgaaatgcgggcgtatctacaacatgatttttctgccaccaaaagaagacgagctgtgtgacgattgcggtgtcggcttagtacagcgtgatgatgataaggaagaaacggtccgtcaccgcctgaaagtctaccttgagaagacccagccggtcattgactattatagtaagaaaggtattctcaaacgcgtagatgggtcgcaaggaatcgacaacgttgttgcagaagtcctggggattctgggttggagcgataagtaatga

SEQ ID NO: 2204 - protein, 231 aa, synthetic construct
  REGION 1..231: note = Variant of adenylate kinase
MHHHHHHGGSGMGAYLVFLGPPGAGKGTQGRRISAKTGIPHISTGDIFRDIVAKQNDEVASKIKEIMEKGELVPDEMGNAVVKRRLSEKDCEKGFILDGYPRTVRQAEYLDSFLESQNRQLTAAVLFKVPEDEVRLRLLSRLICPKCGRIYNMIFLPPKEDELCDDCGVGLVQRDDDKEETVRHRLKVYLEKTQPVIDYYSKKGILKRVDGSQGIDNVVAEVLGILGWSDK

SEQ ID NO: 2205 - DNA, 699 bp, synthetic construct
  misc_feature 1..699: note = Variant of adenylate kinase
  source 1..699: mol_type = other DNA
atgcaccatcatcaccatcacgggggctccggcatgggggcatatctggtgttcttaggtccgccgggcgcgggaaaaagtacccaaggccgtcgcatttcggcaaagactggcatcccgcatattagcacgggcgatatcttccgtgacatcgtcgctaagcaaaacgatgaagttgcctcgaaaattaaagagatcatggagaaaggtgaactcgttccagatgaactgggtaatgcggtagtaaaacgccgcctgtcggagaaagactgcgaaaaaggctttattttggatggttatccgcgtaccgtgcgccaagcggaatatctggatagttttcttgaaagccagaatcgccagttgacagccgccgtgctgttcaaagtccccgaagatgaagttgttcagcgtgtgctgtctcgcctgatctgtccgaaatgcgggcgtatctacaacatgatttttctgccaccaaaagaagacgagctgtgtgacgattgcggtgtcggcttagtacagcgtgatgatgataaggaagaaacggtccgtcaccgcctgaaagtctaccttgagaagacccagccggtcattgactattatagtaagaaaggtattctcaaacgcgtagatgggtcgcaaggaatcgacaacgttgttgcagaagtcctggggattctgggttggagcgataagtaatga

SEQ ID NO: 2206 - protein, 231 aa, synthetic construct
  REGION 1..231: note = Variant of adenylate kinase
MHHHHHHGGSGMGAYLVFLGPPGAGKSTQGRRISAKTGIPHISTGDIFRDIVAKQNDEVASKIKEIMEKGELVPDELGNAVVKRRLSEKDCEKGFILDGYPRTVRQAEYLDSFLESQNRQLTAAVLFKVPEDEVVQRVLSRLICPKCGRIYNMIFLPPKEDELCDDCGVGLVQRDDDKEETVRHRLKVYLEKTQPVIDYYSKKGILKRVDGSQGIDNVVAEVLGILGWSDK

SEQ ID NO: 2207 - DNA, 699 bp, synthetic construct
  misc_feature 1..699: note = Variant of adenylate kinase
  source 1..699: mol_type = other DNA
atgcaccatcatcaccatcacgggggctccggcatgggggcatatctggtgttcttaggtccgccgggcgcgggaaaaggtacccaaggccgtcgcatttcggcaaagactggcatcccgcatattagcacgggcgatatcttccgtgacatcgtcgctaagcaaaacgatgaagttgcctcgaaaattaaagagatcatggagaaaggtgaactcgttccagatgaactgggtaatgcgctggtcaaacgccgcctgtcggagaaagactgcgaaaaaggctttattttggatggttatccgcgtaccgtgcgccaagcggaatatctggatagttttcttgaaagccagaatcgccagttgacagccgccgtgctgttcaaagtccccgaagatgaagttgttcagcgtctgctgtctcgcctgatctgtccgaaatgcgggcgtatctacaacatgatttttctgccaccaaaagaagacgagctgtgtgacgattgcggtgtcggcttagtacagcgtgatgatgataaggaagaaacggtccgtcaccgcctgaaagtctaccttgagaagacccagccggtcattgactattatagtaagaaaggtattctcaaacgcgtagatgggtcgcaaggaatcgacaacgttgttgcagaagtcctggggattctgggttggagcgataagtaatga

SEQ ID NO: 2208 - protein, 231 aa, synthetic construct
  REGION 1..231: note = Variant of adenylate kinase
MHHHHHHGGSGMGAYLVFLGPPGAGKGTQGRRISAKTGIPHISTGDIFRDIVAKQNDEVASKIKEIMEKGELVPDELGNALVKRRLSEKDCEKGFILDGYPRTVRQAEYLDSFLESQNRQLTAAVLFKVPEDEVVQRLLSRLICPKCGRIYNMIFLPPKEDELCDDCGVGLVQRDDDKEETVRHRLKVYLEKTQPVIDYYSKKGILKRVDGSQGIDNVVAEVLGILGWSDK

SEQ ID NO: 2209 - DNA, 699 bp, synthetic construct
  misc_feature 1..699: note = Variant of adenylate kinase
  source 1..699: mol_type = other DNA
atgcaccatcatcaccatcacgggggctccggcatgggggcatatctggtgttcttaggtccgccgggcgcgggaaaaggtacccaaggccgtcgcatttcggcaaagactggcatcccgcatattagcacgggcgatatcttccgtgacatcgtagctaagcaaaacgatgaagttgcctcgaaaattaaagagatcatggagaaaggtgaactcgttccagatgaactgggtaatgcgctggtcaaacgccgcctgtcggagaaagactgcgaaaaaggctttattttggatggttatccgcgtaccgtgcgccaagcggaatatctggatagttttcttgaaagccagaatcgccagttgacagccgccgtggccttcaaagtccccgaagatgaagttgttcagcgtctgctgtctcgcctgatctgtccgaaatgcgggcgtatctacaacatgatttttctgccaccaaaagaagacgagctgtgtgacgattgcggtgtcggcttagtacagcgtgatgatgataaggaagaaacggtccgtcaccgcctgaaagtctaccttgagaagacccagccggtcattgactattatagtaagaaaggtattctcaaacgcgtagatgggtcgcaaggaatcgacaacgttgttgcagaagtcctggggattctgggttggagcgataagtaatga

SEQ ID NO: 2210 - protein, 231 aa, synthetic construct
  REGION 1..231: note = Variant of adenylate kinase
MHHHHHHGGSGMGAYLVFLGPPGAGKGTQGRRISAKTGIPHISTGDIFRDIVAKQNDEVASKIKEIMEKGELVPDELGNALVKRRLSEKDCEKGFILDGYPRTVRQAEYLDSFLESQNRQLTAAVAFKVPEDEVVQRLLSRLICPKCGRIYNMIFLPPKEDELCDDCGVGLVQRDDDKEETVRHRLKVYLEKTQPVIDYYSKKGILKRVDGSQGIDNVVAEVLGILGWSDK

SEQ ID NO: 2211 - DNA, 699 bp, synthetic construct
  misc_feature 1..699: note = Variant of adenylate kinase
  source 1..699: mol_type = other DNA
atgcaccatcatcaccatcacgggggctccggcatgggggcatatctggtgttcttaggtccgccgggcgcgggaaaaagtacccaaggccgtcgcatttcggcaaagactggcatcccgcatattagcacgggcgatatcttccgtgacatcgtcgctaagcaaaacgatgaagttgcctcgaaaattaaagagatcatggagaaaggtgaactcgttccagatgaactgggtaatgcggtagtaaaacgccgcctgtcggagaaagactgcgaaaaaggctttattttggatggttatccgcgtaccgtgcgccaagcggaatatctggatagttttcttgaaagccagaatcgccagttgacagccgccgtggccttcaaagtccccgaagatgaagttgttcagcgtgtgctgtctcgcctgatctgtccgaaatgcgggcgtatctacaacatgatttttctgccaccaaaagaagacgagctgtgtgacgattgcggtgtcggcttagtacagcgtgatgatgataaggaagaaacggtccgtcatcgcctgaaagtctaccttgagaagacccagccggtcattgactattatagtaagaaaggtattctcaaacgcgtagatgggtcgcaaggaatcgacaacgttgttgcagaagtcctggggattctgggttggagcgataagtaatga

SEQ ID NO: 2212 - protein, 231 aa, synthetic construct
  REGION 1..231: note = Variant of adenylate kinase
MHHHHHHGGSGMGAYLVFLGPPGAGKSTQGRRISAKTGIPHISTGDIFRDIVAKQNDEVASKIKEIMEKGELVPDELGNAVVKRRLSEKDCEKGFILDGYPRTVRQAEYLDSFLESQNRQLTAAVAFKVPEDEVVQRVLSRLICPKCGRIYNMIFLPPKEDELCDDCGVGLVQRDDDKEETVRHRLKVYLEKTQPVIDYYSKKGILKRVDGSQGIDNVVAEVLGILGWSDK

SEQ ID NO: 2213 - DNA, 699 bp, synthetic construct
  misc_feature 1..699: note = Variant of adenylate kinase
  source 1..699: mol_type = other DNA
atgcaccatcatcaccatcacgggggctccggcatgggggcatatctggtgttcttaggtccgccgggcgcgggaaaaggtacccaaggccgtcgcatttcggcaaagactggcatcccgcatattagcacgggcgatatcttccgtgacatcgtcgctaagcaaaacgatgaagttgcctcgaaaattaaagagatcatggcgaaaggtgaactcgttccagatgaactgggtaatgcggtggtcaaacgccgcctgtcggagaaagactgcgaaaaaggctttattttggatggttatccgcgtaccgtgcgccaagcggaatatctggatagttttcttgaaagccagaatcgccagttgacagccgccgtgctgttcaaagtccccgaagatgaagttgttcagcgtctgctgtctcgcctgatctgtccgaaatgcgggcgtatctacaacatgatttttctgccaccaaaagaagacgagctgtgtgacgattgcggtgtcggcttagtacagcgtgatgatgataaggaagaaacggtccgtcaccgcctgaaagtctaccttgagaagacccagccggtcattgactattatagtaagaaaggtattctcaaacgcgtagatgggtcgcaaggaatcgacaacgttgttgcagaagtcctggggattctgggttggagcgataagtaatga

SEQ ID NO: 2214 - protein, 231 aa, synthetic construct
  REGION 1..231: note = Variant of adenylate kinase
MHHHHHHGGSGMGAYLVFLGPPGAGKGTQGRRISAKTGIPHISTGDIFRDIVAKQNDEVASKIKEIMAKGELVPDELGNAVVKRRLSEKDCEKGFILDGYPRTVRQAEYLDSFLESQNRQLTAAVLFKVPEDEVVQRLLSRLICPKCGRIYNMIFLPPKEDELCDDCGVGLVQRDDDKEETVRHRLKVYLEKTQPVIDYYSKKGILKRVDGSQGIDNVVAEVLGILGWSDK

SEQ ID NO: 2215 - DNA, 699 bp, synthetic construct
  misc_feature 1..699: note = Variant of adenylate kinase
  source 1..699: mol_type = other DNA
atgcaccatcatcaccatcacgggggctccggcatgggggcatatctggtgttcttaggtccgccgggcgcgggaaaaggtacccaaggccgtcgcatttcggcaaagactggcatcccgcatattagcacgggcgatatcttccgtgacatcgtcgctaagcaaaacgatgaagttgcctcgaaaattaaagagatcatggagaaaggtgaactcgttccagatgaactgggtaatgcgctggtcaaacgccgcctgtcggagaaagactgcgaaaaaggctttattttggatggttatccgcgtaccgtgcgccaagcggaatatctggatagttttcttgaaagccagaatcgccagttgacagccgccgtgctgttcaaagtccccgaagatgaagttgttcagcgtgtgctgtctcgcctgatctgtccgaaatgcgggcgtatctacaacatgatttttctgccaccaaaagaagacgagctgtgtgacgattgcggtgtcggcttagtacagcgtgatgatgataaggaagaaacggtccgtcatcgcctgaaagtctaccttgagaagacccagccggtcattgactattatagtaagaaaggtattctcaaacgcgtagatgggtcgcaaggaatcgacaacgttgttgcagaagtcctggggattctgggttggagcgataagtaatga

SEQ ID NO: 2216 - protein, 231 aa, synthetic construct
  REGION 1..231: note = Variant of adenylate kinase
MHHHHHHGGSGMGAYLVFLGPPGAGKGTQGRRISAKTGIPHISTGDIFRDIVAKQNDEVASKIKEIMEKGELVPDELGNALVKRRLSEKDCEKGFILDGYPRTVRQAEYLDSFLESQNRQLTAAVLFKVPEDEVVQRVLSRLICPKCGRIYNMIFLPPKEDELCDDCGVGLVQRDDDKEETVRHRLKVYLEKTQPVIDYYSKKGILKRVDGSQGIDNVVAEVLGILGWSDK

SEQ ID NO: 2217 - DNA, 699 bp, synthetic construct
  misc_feature 1..699: note = Variant of adenylate kinase
  source 1..699: mol_type = other DNA
atgcaccatcatcaccatcacgggggctccggcatgggggcatatctggtgttcttaggtccgccgggcgcgggaaaaggtacccaaggccgtattatttcggcaaagactggcatcccgcatattagcacgggcgatatcctgcgtgacatcgtcgctaagcaaaacgatgaagtttcgtcgaaaattaaagagatcatggagaaaggtgaactcgttccagatgaactgggtaatgcggtggtaaaacgccgcctgtcggagaaagactgcgaaaaaggctttattttggatggtttcccgcgtaccgtgcgccaagcggaatatctggatagttttcttgaaagccagaatcgccagttgacagccgccgtgctgttcaaagtccccgaagatgaagttaaacagcgtctgctgtctcgcctgatctgtccgaaatgcgggcgtatctacaacatgatttttctgccaccaaaagaagacgagctgtgtgacgattgcggtgtcggcttagtacagcgtttagatgataaggaagaaacggtccgtcaccgcctgaaagtctaccttgagaagacccagccggtcattgactattatagtaagaaaggtattctcaaacgcgtagatgggtcgcaaggaatcgacaacgttgtggcagaagtcctgggggcgctgggttggagcgataagtaatga

SEQ ID NO: 2218 - protein, 231 aa, synthetic construct
  REGION 1..231: note = Variant of adenylate kinase
MHHHHHHGGSGMGAYLVFLGPPGAGKGTQGRIISAKTGIPHISTGDILRDIVAKQNDEVSSKIKEIMEKGELVPDELGNAVVKRRLSEKDCEKGFILDGFPRTVRQAEYLDSFLESQNRQLTAAVLFKVPEDEVKQRLLSRLICPKCGRIYNMIFLPPKEDELCDDCGVGLVQRLDDKEETVRHRLKVYLEKTQPVIDYYSKKGILKRVDGSQGIDNVVAEVLGALGWSDK

SEQ ID NO: 2219 - DNA, 699 bp, synthetic construct
  misc_feature 1..699: note = Variant of adenylate kinase
  source 1..699: mol_type = other DNA
atgcaccatcatcaccatcacgggggctccggcatgggggcatatctggtgttcttaggtccgccgggcgcgggaaaaggtacccaaggccgtattatttcggcaaagactggcatcccgcatattagcacgggcgatatcctgcgtgacatcgtcgctaagcaaaacgatgaagttgcgtcgaaaattaaagagatcatggagaaaggtgaactcgttccagatgaactgggtaatgcgctggtaaaacgccgcctgtcggagaaagactgcgaaaaaggctttattttggatggtttcccgcgtaccgtgcgccaagcggaatatctggatagttttcttgaaagccagaatcgccagttgacagccgccgtgctgattaacgtccccgaagatgaagttaaacagcgtctgctgtctcgcctgatctgtccgaaatgcgggcgtatctacaacatgatttttctgccaccaaaagaagacgagctgtgtgacgattgcggtgtcggcttagtacagcgtttagatgataaggaagaaacggtccgtcaccgcctgaaagtctaccttgagaagacccagccggtcattgactattatagtaagaaaggtattctcaaacgcgtagatgggtcgcaaggaatcgacaacgttgtggcagaagtcctgggggcgctgggttggagcgataagtaatga

SEQ ID NO: 2220 - protein, 231 aa, synthetic construct
  REGION 1..231: note = Variant of adenylate kinase
MHHHHHHGGSGMGAYLVFLGPPGAGKGTQGRIISAKTGIPHISTGDILRDIVAKQNDEVASKIKEIMEKGELVPDELGNALVKRRLSEKDCEKGFILDGFPRTVRQAEYLDSFLESQNRQLTAAVLINVPEDEVKQRLLSRLICPKCGRIYNMIFLPPKEDELCDDCGVGLVQRLDDKEETVRHRLKVYLEKTQPVIDYYSKKGILKRVDGSQGIDNVVAEVLGALGWSDK

SEQ ID NO: 2221 - DNA, 699 bp, synthetic construct
  misc_feature 1..699: note = Variant of adenylate kinase
  source 1..699: mol_type = other DNA
atgcaccatcatcaccatcacgggggctccggcatgggggcatatctggtgttcttaggtccgccgggcgcgggaaaaggtacccaaggccgtcgcatttcggcaaagactggcatcccgcatattagcacgggcgatatcctgcgtgacatcgtcgctaagcaaaacgatgaagttgcctcgaaaattaaagagatcatggagaaaggtgaactcgttccagatgaactgggtaatgcggtggtaagccgccgcctgtcggagaaagactgcgaaaaaggctttattttggatggtttcccgcgtaccgtgcgccaagcggaatatctggatagttttcttgaaagccagaatcgccagttgacagccgccgtgctgtttaaagtccccgaagatgaagttgttcagcgtctgctgtctcgcctgatctgtccgaaatgcgggcgtatctacaacatgatttttctgccaccaaaagaagacgagctgtgtgacgattgcggtgtcggcttagtacagcgttttgatgataaggaagaaacggtccgtcaccgcctgaaagtctaccttgagaagacccagccggtcattgactattatagtaagaaaggtattctcaaacgcgtagatgggtcgcaaggaatcgacaacgttgtggcagaagtcctgggggcgctgggttggagcgataagtaatga

SEQ ID NO: 2222 - protein, 231 aa, synthetic construct
  REGION 1..231: note = Variant of adenylate kinase
MHHHHHHGGSGMGAYLVFLGPPGAGKGTQGRRISAKTGIPHISTGDILRDIVAKQNDEVASKIKEIMEKGELVPDELGNAVVSRRLSEKDCEKGFILDGFPRTVRQAEYLDSFLESQNRQLTAAVLFKVPEDEVVQRLLSRLICPKCGRIYNMIFLPPKEDELCDDCGVGLVQRFDDKEETVRHRLKVYLEKTQPVIDYYSKKGILKRVDGSQGIDNVVAEVLGALGWSDK

SEQ ID NO: 2223 - DNA, 699 bp, synthetic construct
  misc_feature 1..699: note = Variant of adenylate kinase
  source 1..699: mol_type = other DNA
atgcaccatcatcaccatcacgggggctccggcatgggggcatatctggtgttcttaggtccgccgggcgcgggaaaaggtacccaaggccgtcgcatttcggcaaagactggcatcccgcatattagcacgggcgatatcctgcgtgacatcgtcgctaagcaaaacgatgaagttgcctcgaaaattaaagagatcatggagaaaggtgaactcgttccagatgaactgggtaatgcggtagtaaaacgccgcctgtcggagaaagactgcgaaaaaggctttattttggatggtttcccgcgtaccgtgcgccaagcggaatatctggatagttttcttgaaagccagaatcgccagttgacagccgccgtgctgttcaaagtccccgaagatgaagttaaacagcgtctgctgtctcgcctgatctgtccgaaatgcgggcgtatctacaacatgatttttctgccaccaaaagaagacgagctgtgtgacgattgcggtgtcggcttagtacagcgtttagatgataaggaagaaacggtccgtcaccgcctgaaagtctaccttgagaagacccagccggtcattgactattatagtaagaaaggtattctcaaacgcgtagatgggtcgcaaggaatcgacaacgttgtggcagaagtcctgggggcgctgggttggagcgataagtaatga

SEQ ID NO: 2224 - protein, 231 aa, synthetic construct
  REGION 1..231: note = Variant of adenylate kinase
MHHHHHHGGSGMGAYLVFLGPPGAGKGTQGRRISAKTGIPHISTGDILRDIVAKQNDEVASKIKEIMEKGELVPDELGNAVVKRRLSEKDCEKGFILDGFPRTVRQAEYLDSFLESQNRQLTAAVLFKVPEDEVKQRLLSRLICPKCGRIYNMIFLPPKEDELCDDCGVGLVQRLDDKEETVRHRLKVYLEKTQPVIDYYSKKGILKRVDGSQGIDNVVAEVLGALGWSDK

SEQ ID NO: 2225 - DNA, 699 bp, synthetic construct
  misc_feature 1..699: note = Variant of adenylate kinase
  source 1..699: mol_type = other DNA
atgcaccatcatcaccatcacgggggctccggcatgggggcatatctggtgttcttaggtcctccgggcgcgggaaaaggtacccaaggccgtcgcatttcggcaaagactggcatcccgcatattagcacgggcgatatcctgcgtgacatcgtcgctacacagaacgatgaagttgcctcgaaaattaaagagatcatggagaaaggtgaactcgttccagatgaactgggtaatgcggtagtaaaacaccgcctgtcggagaaagactgcgaaaaaggctttattttggatggtttcccgcgtaccgtgcgccaagcggaatatctggatagttttcttgaaagccagaatcgccagttgacagccgccgtgctgttcaaagtccccgaagatgaagttgttcagcgtctgctgtctcgcctgatctgtccgaaatgcgggcgtatctacaacatgatttttctgccaccaaaagaagacgagctgtgtgacgattgcggtgtcggcttagtacagcgtgatgatgataaggaagaaacggtccgtcaccgcctgaaagtctaccgtgagaagacccagccggtcattgactattatagtaagaaaggtattctcaaacgcgtagatgggagccaaggaatcgacaacgttgtggcagaagtcctggggattctgggttggagcgataagtaatga

SEQ ID NO: 2226 - protein, 231 aa, synthetic construct
  REGION 1..231: note = Variant of adenylate kinase
MHHHHHHGGSGMGAYLVFLGPPGAGKGTQGRRISAKTGIPHISTGDILRDIVATQNDEVASKIKEIMEKGELVPDELGNAVVKHRLSEKDCEKGFILDGFPRTVRQAEYLDSFLESQNRQLTAAVLFKVPEDEVVQRLLSRLICPKCGRIYNMIFLPPKEDELCDDCGVGLVQRDDDKEETVRHRLKVYREKTQPVIDYYSKKGILKRVDGSQGIDNVVAEVLGILGWSDK

SEQ ID NO: 2227 - DNA, 699 bp, synthetic construct
  misc_feature 1..699: note = Variant of adenylate kinase
  source 1..699: mol_type = other DNA
atgcaccatcatcaccatcacgggggctccggcatgggggcatatctggtgttcttaggtcctccgggcgcgggaaaaggtacccaaggccgtcgcatttcggcaaagactggcatcccgcatattagcacgggcgatatcctgcgtgacatcgtcgctaaaagcaacgatgaagttgcctcgaaaattaaagagatcatggagaaaggtgaactcgttccagatgaactgggcaatgcggtagtaaaacgccgcctgtcggagaaagactgcgaaaaaggctttattttggatggtttcccgcgtaccgtgcgccaagcggaatatctggatagttttcttgaaagccagaatcgccagttgacagccgccgtgctgttcaaagtccccgaagatgaagttgttcagcgtctgctgtctcgcctgatctgtccgaaatgcgggcgtatctacaacatgatttttctgccaccaaaagaagacgagctgtgtgacgattgcggtgtcggcttagtacagcgtgatgatgataaggaagaaacggtccgtcaccgcctgaaagtctaccatgagaagacccagccggtcattgactattatagtaagaaaggtattctcaaacgcgtagatgggaaccaaggaatcgacaacgttgtggcagaagtcctggggattctgggttggagcgataagtaatga

SEQ ID NO: 2228 - protein, 231 aa, synthetic construct
  REGION 1..231: note = Variant of adenylate kinase
MHHHHHHGGSGMGAYLVFLGPPGAGKGTQGRRISAKTGIPHISTGDILRDIVAKSNDEVASKIKEIMEKGELVPDELGNAVVKRRLSEKDCEKGFILDGFPRTVRQAEYLDSFLESQNRQLTAAVLFKVPEDEVVQRLLSRLICPKCGRIYNMIFLPPKEDELCDDCGVGLVQRDDDKEETVRHRLKVYHEKTQPVIDYYSKKGILKRVDGNQGIDNVVAEVLGILGWSDK

SEQ ID NO: 2229 - DNA, 699 bp, synthetic construct
  misc_feature 1..699: note = Variant of adenylate kinase
  source 1..699: mol_type = other DNA
atgcaccatcatcaccatcacgggggctccggcatgggggcatatctggtgttcttaggtccgccgggcgcgggaaaaggtacccaaggccgtattatttcggcaaagactggcatcccgcatattagcacgggcgatatcctgcgtgacatcgtcgctaagcaaaacgatgaagtttcgtcgaaaattaaagagatcatggagaaaggtgaactcgttccagatgaactgggtaatgcgctggtaagccgccgcctgtcggagaaagactgcgaaaaaggctttattttggatggtttcccgcgtaccgtgcgccaagcggaatatctggatagttttcttgaaagccagaatcgccagttgacagccgccgtgctgattaacgtccccgaagatgaagttaaacagcgtctgctgtctcgcctgatctgtccgaaatgcgggcgtatctacaacatgatttttctgccaccaaaagaagacgagctgtgtgacgattgcggtgtcggcttagtacagcgtgatgatgataaggaagaaacggtccgtcaccgcctgaaagtctaccttgagaagacccagccggtcattgactattatagtaagaaaggtattctcaaacgcgtagatgggtcgcaaggaatcgacaacgttgtggcagaagtcctgggggcgctgggttggagcgataagtaatga

SEQ ID NO: 2230 - protein, 231 aa, synthetic construct
  REGION 1..231: note = Variant of adenylate kinase
MHHHHHHGGSGMGAYLVFLGPPGAGKGTQGRIISAKTGIPHISTGDILRDIVAKQNDEVSSKIKEIMEKGELVPDELGNALVSRRLSEKDCEKGFILDGFPRTVRQAEYLDSFLESQNRQLTAAVLINVPEDEVKQRLLSRLICPKCGRIYNMIFLPPKEDELCDDCGVGLVQRDDDKEETVRHRLKVYLEKTQPVIDYYSKKGILKRVDGSQGIDNVVAEVLGALGWSDK

SEQ ID NO: 2231 - DNA, 699 bp, synthetic construct
  misc_feature 1..699: note = Variant of adenylate kinase
  source 1..699: mol_type = other DNA
atgcaccatcatcaccatcacgggggctccggcatgggggcatatctggtgttcttaggtccgccgggcgcgggaaaaggtacccaaggccgtcgcatttcggcaaagactggcatcccgcatattagcacgggcgatatcctgcgtgacatcgtcgctaagcaaaacgatgaagttgcctcgaaaattaaagagatcatggagaaaggtgaactcgttccagatgaactgggtaatgcggtagtaaaacgccgcctgtcggagaaagactgcgaaaaaggctttattttggatggtttcccgcgtaccgtgcgccaagcggaatatctggatagttttcttgaaagccagaatcgccagttgacagccgccgtgctgttcaaagtccccgaagatgaagttgttcagcgtctgctgtctcgcctgatctgtccgaaatgcgggcgtatctacaacatgatttttctgccaccaaaagaagacgagctgtgtgacgattgcggtgtcggcttagtacagcgttttgatgataaggaagaaacggtccgtcaccgcctgaaagtctaccttgagaagacccagccggtcattgactattatagtaagaaaggtattctcaaacgcgtagatgggtcgcaaggaatcgacaacgttgtggcagaagtcctgggggcgctgggttggagcgataagtaatga

SEQ ID NO: 2232 - protein, 231 aa, synthetic construct
  REGION 1..231: note = Variant of adenylate kinase
MHHHHHHGGSGMGAYLVFLGPPGAGKGTQGRRISAKTGIPHISTGDILRDIVAKQNDEVASKIKEIMEKGELVPDELGNAVVKRRLSEKDCEKGFILDGFPRTVRQAEYLDSFLESQNRQLTAAVLFKVPEDEVVQRLLSRLICPKCGRIYNMIFLPPKEDELCDDCGVGLVQRFDDKEETVRHRLKVYLEKTQPVIDYYSKKGILKRVDGSQGIDNVVAEVLGALGWSDK

SEQ ID NO: 2233 - DNA, 699 bp, synthetic construct
  misc_feature 1..699: note = Variant of adenylate kinase
  source 1..699: mol_type = other DNA
atgcaccatcatcaccatcacgggggctccggcatgggggcatatctggtgttcttaggtccgccgggcgcgggaaaaggtacccaaggccgtattatttcggcaaagactggcatcccgcatattagcacgggcgatatcctgcgtgacatcgtcgctaagcaaaacgatgaagttgcctcgaaaattaaagagatcatggagaaaggtgaactcgttccagatgaactgggtaatgcggtagtaaaacgccgcctgtcggagaaagactgcgaaaaaggctttattttggatggtttcccgcgtaccgtgcgccaagcggaatatctggatagttttcttgaaagccagaatcgccagttgacagccgccgtgctgattaaagtccccgaagatgaagttgttcagcgtctgctgtctcgcctgatctgtccgaaatgcgggcgtatctacaacatgatttttctgccaccaaaagaagacgagctgtgtgacgattgcggtgtcggcttagtacagcgtttagatgataaggaagaaacggtccgtcaccgcctgaaagtctaccttgagaagacccagccggtcattgactattatagtaagaaaggtattctcaaacgcgtagatgggtcgcaaggaatcgacaacgttgtggcagaagtcctggggattctgggttggagcgataagtaatga

SEQ ID NO: 2234 - protein, 231 aa, synthetic construct
  REGION 1..231: note = Variant of adenylate kinase
MHHHHHHGGSGMGAYLVFLGPPGAGKGTQGRIISAKTGIPHISTGDILRDIVAKQNDEVASKIKEIMEKGELVPDELGNAVVKRRLSEKDCEKGFILDGFPRTVRQAEYLDSFLESQNRQLTAAVLIKVPEDEVVQRLLSRLICPKCGRIYNMIFLPPKEDELCDDCGVGLVQRLDDKEETVRHRLKVYLEKTQPVIDYYSKKGILKRVDGSQGIDNVVAEVLGILGWSDK

SEQ ID NO: 2235 - DNA, 699 bp, synthetic construct
  misc_feature 1..699: note = Variant of adenylate kinase
  source 1..699: mol_type = other DNA
atgcaccatcatcaccatcacgggggctccggcatgggggcatatctggtgttcttaggtcctccgggcgcgggaaaaggtacccaaggccgtcgcatttcggcaaagactggcatcccgcatattagcacgggcgatatcctgcgtgacatcgtcgctaaacagaacgatgaagttgcctcgaaaattaaagagatcatggagaaaggtgaactcgttccagatgaactgggtaatgcggtagtaaaagcgcgcctgtcggagaaagactgcgaaaaaggctttattttggatggtttcccgcgtaccgtgcgccaagcggaatatctggatagttttcttgaaagccagaatcgccagttgacagccgccgtgctgttcaaagtccccgaagatgaagtcgttcagcgtctgctgtctcgcctgatctgtccgaaatgcgggcgtatctacaacatgatttttctgccaccaaaagaagacgagctgtgtgacgattgcggtgtcggcttagtacagcgtgatgatgataaggaagaaacggtccgtcaccgcctgaaagtctaccatgagaagacccagccggtcattgactattatagtaagaaaggtattctcaaacgcgtagatgggaaccaaggaatcgacaacgttgtggcagaagtcctggggattctgggttggagcgataagtaatga

SEQ ID NO: 2236 - protein, 231 aa, synthetic construct
  REGION 1..231: note = Variant of adenylate kinase
MHHHHHHGGSGMGAYLVFLGPPGAGKGTQGRRISAKTGIPHISTGDILRDIVAKQNDEVASKIKEIMEKGELVPDELGNAVVKARLSEKDCEKGFILDGFPRTVRQAEYLDSFLESQNRQLTAAVLFKVPEDEVVQRLLSRLICPKCGRIYNMIFLPPKEDELCDDCGVGLVQRDDDKEETVRHRLKVYHEKTQPVIDYYSKKGILKRVDGNQGIDNVVAEVLGILGWSDK

SEQ ID NO: 2237 - DNA, 699 bp, synthetic construct
  misc_feature 1..699: note = Variant of adenylate kinase
  source 1..699: mol_type = other DNA
atgcaccatcatcaccatcacgggggctccggcatgggggcatatctggtgttcttaggtccgccgggcgcgggaaaaggtacccaaggccgtattatttcggcaaagactggcatcccgcatattagcacgggcgatatcctgcgtgacatcgtcgctaagcaaaacgatgaagttgcctcgaaaattaaagagatcatggagaaaggtgaactcgttccagatgaactgggtaatgcggtagtaaaacgccgcctgtcggagaaagactgcgaaaaaggctttattttggatggtttcccgcgtaccgtgcgccaagcggaatatctggatagttttcttgaaagccagaatcgccagttgacagccgccgtgctgtttaacgtccccgaagatgaagttgttcagcgtctgctgtctcgcctgatctgtccgaaatgcgggcgtatctacaacatgatttttctgccaccaaaagaagacgagctgtgtgacgattgcggtgtcggcttagtacagcgttttgatgataaggaagaaacggtccgtcaccgcctgaaagtctaccttgagaagacccagccggtcattgactattatagtaagaaaggtattctcaaacgcgtagatgggtcgcaaggaatcgacaacgttgtggcagaagtcctggggattctgggttggagcgataagtaatga

SEQ ID NO: 2238 - protein, 231 aa, synthetic construct
  REGION 1..231: note = Variant of adenylate kinase
MHHHHHHGGSGMGAYLVFLGPPGAGKGTQGRIISAKTGIPHISTGDILRDIVAKQNDEVASKIKEIMEKGELVPDELGNAVVKRRLSEKDCEKGFILDGFPRTVRQAEYLDSFLESQNRQLTAAVLFNVPEDEVVQRLLSRLICPKCGRIYNMIFLPPKEDELCDDCGVGLVQRFDDKEETVRHRLKVYLEKTQPVIDYYSKKGILKRVDGSQGIDNVVAEVLGILGWSDK

SEQ ID NO: 2239 - DNA, 699 bp, synthetic construct
  misc_feature 1..699: note = Variant of adenylate kinase
  source 1..699: mol_type = other DNA
atgcaccatcatcaccatcacgggggctccggcatgggggcatatctggtgttcttaggtccgccgggcgcgggaaaaggtacccaaggccgtcgcatttcggcaaagactggcatcccgcatattagcacgggcgatatcctgcgtgacatcgtcgctaagcaaaacgatgaagttgcctcgaaaattaaagagatcatggagaaaggtgaactcgttccagatgaactgggtaatgcgctggtaaaacgccgcctgtcggagaaagactgcgaaaaaggctttattttggatggtttcccgcgtaccgtgcgccaagcggaatatctggatagttttcttgaaagccagaatcgccagttgacagccgccgtgctgttcaaagtccccgaagatgaagttgttcagcgtctgctgtctcgcctgatctgtccgaaatgcgggcgtatctacaacatgatttttctgccaccaaaagaagacgagctgtgtgacgattgcggtgtcggcttagtacagcgtttagatgataaggaagaaacggtccgtcaccgcctgaaagtctaccttgagaagacccagccggtcattgactattatagtaagaaaggtattctcaaacgcgtagatgggtcgcaaggaatcgacaacgttgtggcagaagtcctggggattctgggttggagcgataagtaatga

SEQ ID NO: 2240 - protein, 231 aa, synthetic construct
  REGION 1..231: note = Variant of adenylate kinase
MHHHHHHGGSGMGAYLVFLGPPGAGKGTQGRRISAKTGIPHISTGDILRDIVAKQNDEVASKIKEIMEKGELVPDELGNALVKRRLSEKDCEKGFILDGFPRTVRQAEYLDSFLESQNRQLTAAVLFKVPEDEVVQRLLSRLICPKCGRIYNMIFLPPKEDELCDDCGVGLVQRLDDKEETVRHRLKVYLEKTQPVIDYYSKKGILKRVDGSQGIDNVVAEVLGILGWSDK

SEQ ID NO: 2241 - DNA, 699 bp, synthetic construct
  misc_feature 1..699: note = Variant of adenylate kinase
  source 1..699: mol_type = other DNA
atgcaccatcatcaccatcacgggggctccggcatgggggcatatctggtgttcttaggtccgccgggcgcgggaaaaggtacccaaggccgtcgcatttcggcaaagactggcatcccgcatattagcacgggcgatatcctgcgtgacatcgtcgctaagcaaaacgatgaagttgcgtcgaaaattaaagagatcatggagaaaggtgaactcgttccagatgaactgggtaatgcgctggtaaaacgccgcctgtcggagaaagactgcgaaaaaggctttattttggatggtttcccgcgtaccgtgcgccaagcggaatatctggatagttttcttgaaagccagaatcgccagttgacagccgccgtgctgttcaaagtccccgaagatgaagttgttcagcgtctgctgtctcgcctgatctgtccgaaatgcgggcgtatctacaacatgatttttctgccaccaaaagaagacgagctgtgtgacgattgcggtgtcggcttagtacagcgttttgatgataaggaagaaacggtccgtcaccgcctgaaagtctaccttgagaagacccagccggtcattgactattatagtaagaaaggtattctcaaacgcgtagatgggtcgcaaggaatcgacaacgttgtggcagaagtcctggggattctgggttggagcgataagtaatga

SEQ ID NO: 2242 - protein, 231 aa, synthetic construct
  REGION 1..231: note = Variant of adenylate kinase
MHHHHHHGGSGMGAYLVFLGPPGAGKGTQGRRISAKTGIPHISTGDILRDIVAKQNDEVASKIKEIMEKGELVPDELGNALVKRRLSEKDCEKGFILDGFPRTVRQAEYLDSFLESQNRQLTAAVLFKVPEDEVVQRLLSRLICPKCGRIYNMIFLPPKEDELCDDCGVGLVQRFDDKEETVRHRLKVYLEKTQPVIDYYSKKGILKRVDGSQGIDNVVAEVLGILGWSDK

SEQ ID NO: 2243 - DNA, 699 bp, synthetic construct
  misc_feature 1..699: note = Variant of adenylate kinase
  source 1..699: mol_type = other DNA
atgcaccatcatcaccatcacgggggctccggcatgggggcatatctggtgttcttaggtcgtccgggcgcgggaaaaggtacccaaggccgtcgcatttcggcaaagactggcatcccgcatattagcacgggcgatatcctgcgtgacatcgtcgctacacagaacgatgaagttgcctcgaaaattaaagagatcatggagaaaggtgaactcgttccagatgaactgggcaatgcggtagtaaaacgccgcctgtcggagaaagactgcgaaaaaggctttattttggatggtttcccgcgtaccgtgcgccaagcggaatatctggatagttttcttgaaagccagaatcgccagttgacagccgccgtgctgttcaaagtccccgaagatgaagttgttcagcgtctgctgtctcgcctgatctgtccgaaatgcgggcgtatctacaacatgatttttctgccaccaaaagaagacgagctgtgtgacgattgcggtgtcggcttagtacagcgtgatgatgataaggaagaaacggtccgtcaccgcctgaaagtctaccttgagaagacccagccggtcattgactattatagtaagaaaggtattctcaaacgcgtagatgggtcgcaaggaatcgacaacgttgtggcagaagtcctggggattctgggttggagcgataagtaatga

SEQ ID NO: 2244 - protein, 231 aa, synthetic construct
  REGION 1..231: note = Variant of adenylate kinase
MHHHHHHGGSGMGAYLVFLGRPGAGKGTQGRRISAKTGIPHISTGDILRDIVATQNDEVASKIKEIMEKGELVPDELGNAVVKRRLSEKDCEKGFILDGFPRTVRQAEYLDSFLESQNRQLTAAVLFKVPEDEVVQRLLSRLICPKCGRIYNMIFLPPKEDELCDDCGVGLVQRDDDKEETVRHRLKVYLEKTQPVIDYYSKKGILKRVDGSQGIDNVVAEVLGILGWSDK

SEQ ID NO: 2245 - DNA, 699 bp, synthetic construct
  misc_feature 1..699: note = Variant of adenylate kinase
  source 1..699: mol_type = other DNA
atgcaccatcatcaccatcacgggggctccggcatgggggcatatctggtgttcttaggtcctccgggcgcgggaaaaggtacccaaggccgtcgcatttcggcaaagactggcatcccgcatattagcacgggcgatatcctgcgtgacatcgtcgctacaagcaacgatgaagttgcctcgaaaattaaagagatcatggagaaaggtgaactcgttccagatgaactgggcaatgcggtagtaaaacgccgcctgtcggagaaagactgcgaaaaaggctttattttggatggtttcccgcgtaccgtgcgccaagcggaatatctggatagttttcttgaaagccagaatcgccagttgacagccgccgtgctgttcaaagtccccgaagatgaagttgttcagcgtctgctgtctcgcctgatctgtccgaaatgcgggcgtatctacaacatgatttttctgccaccaaaagaagacgagctgtgtgacgattgcggtgtcggcttagtacagcgtgatgatgataaggaagaaacggtccgtcaccgcctgaaagtctaccttgagaagacccagccggtcattgactattatagtaagaaaggtattctcaaacgcgtagatgggaaccaaggaatcgacaacgttgtggcagaagtcctggggattctgggttggagcgataagtaatga

SEQ ID NO: 2246 - protein, 231 aa, synthetic construct
  REGION 1..231: note = Variant of adenylate kinase
MHHHHHHGGSGMGAYLVFLGPPGAGKGTQGRRISAKTGIPHISTGDILRDIVATSNDEVASKIKEIMEKGELVPDELGNAVVKRRLSEKDCEKGFILDGFPRTVRQAEYLDSFLESQNRQLTAAVLFKVPEDEVVQRLLSRLICPKCGRIYNMIFLPPKEDELCDDCGVGLVQRDDDKEETVRHRLKVYLEKTQPVIDYYSKKGILKRVDGNQGIDNVVAEVLGILGWSDK

SEQ ID NO: 2247 - DNA, 699 bp, synthetic construct
  misc_feature 1..699: note = Variant of adenylate kinase
  source 1..699: mol_type = other DNA
atgcaccatcatcaccatcacgggggctccggcatgggggcatatctggtgttcttaggtccgccgggcgcgggaaaaggtacccaaggccgtattatttcggcaaagactggcatcccgcatattagcacgggcgatatcctgcgtgacatcgtcgctaagcaaaacgatgaagttgcctcgaaaattaaagagatcatggagaaaggtgaactcgttccagatgaactgggtaatgcggtggtaaaacgccgcctgtcggagaaagactgcgaaaaaggctttattttggatggtttcccgcgtaccgtgcgccaagcggaatatctggatagttttcttgaaagccagaatcgccagttgacagccgccgtgctgtttaaagtccccgaagatgaagttgttcagcgtctgctgtctcgcctgatctgtccgaaatgcgggcgtatctacaacatgatttttctgccaccaaaagaagacgagctgtgtgacgattgcggtgtcggcttagtacagcgtttagatgataaggaagaaacggtccgtcaccgcctgaaagtctaccttgagaagacccagccggtcattgactattatagtaagaaaggtattctcaaacgcgtagatgggtcgcaaggaatcgacaacgttgtggcagaagtcctgggggcgctgggttggagcgataagtaatga

SEQ ID NO: 2248 - protein, 231 aa, synthetic construct
  REGION 1..231: note = Variant of adenylate kinase
MHHHHHHGGSGMGAYLVFLGPPGAGKGTQGRIISAKTGIPHISTGDILRDIVAKQNDEVASKIKEIMEKGELVPDELGNAVVKRRLSEKDCEKGFILDGFPRTVRQAEYLDSFLESQNRQLTAAVLFKVPEDEVVQRLLSRLICPKCGRIYNMIFLPPKEDELCDDCGVGLVQRLDDKEETVRHRLKVYLEKTQPVIDYYSKKGILKRVDGSQGIDNVVAEVLGALGWSDK

SEQ ID NO: 2249 - DNA, 699 bp, synthetic construct
  misc_feature 1..699: note = Variant of adenylate kinase
  source 1..699: mol_type = other DNA
atgcaccatcatcaccatcacgggggctccggcatgggggcatatctggtgttcttaggtccgccgggcgcgggaaaaggtacccaaggccgtcgcatttcggcaaagactggcatcccgcatattagcacgggcgatatcctgcgtgacatcgtcgctaagcaaaacgatgaagttgcgtcgaaaattaaagagatcatggagaaaggtgaactcgttccagatgaactgggtaatgcggtagtaaaacgccgcctgtcggagaaagactgcgaaaaaggctttattttggatggtttcccgcgtaccgtgcgccaagcggaatatctggatagttttcttgaaagccagaatcgccagttgacagccgccgtgctgtttaacgtccccgaagatgaagttgttcagcgtctgctgtctcgcctgatctgtccgaaatgcgggcgtatctacaacatgatttttctgccaccaaaagaagacgagctgtgtgacgattgcggtgtcggcttagtacagcgttttgatgataaggaagaaacggtccgtcaccgcctgaaagtctaccttgagaagacccagccggtcattgactattatagtaagaaaggtattctcaaacgcgtagatgggtcgcaaggaatcgacaacgttgtggcagaagtcctgggggcgctgggttggagcgataagtaatga

SEQ ID NO: 2250 - protein, 231 aa, synthetic construct
  REGION 1..231: note = Variant of adenylate kinase
MHHHHHHGGSGMGAYLVFLGPPGAGKGTQGRRISAKTGIPHISTGDILRDIVAKQNDEVASKIKEIMEKGELVPDELGNAVVKRRLSEKDCEKGFILDGFPRTVRQAEYLDSFLESQNRQLTAAVLFNVPEDEVVQRLLSRLICPKCGRIYNMIFLPPKEDELCDDCGVGLVQRFDDKEETVRHRLKVYLEKTQPVIDYYSKKGILKRVDGSQGIDNVVAEVLGALGWSDK

SEQ ID NO: 2251 - DNA, 699 bp, synthetic construct
  misc_feature 1..699: note = Variant of adenylate kinase
  source 1..699: mol_type = other DNA
atgcaccatcatcaccatcacgggggctccggcatgggggcatatctggtgttcttaggtcctccgggcgcgggaaaaggtacccaaggccgtcgcatttcggcaaagactggcatcccgcatattagcacgggcgatatcctgcgtgacatcgtcgctaagcaaaacgatgaagttgcctcgagcattaaagagatcatggagaaaggtgaactcgttccagatgaactgggtaatgcggtagtaaaagcgcgcctgtcggagaaagactgcgaaaaaggctttattttggatggtttcccgcgtaccgtgcgccaagcggaatatctggatagttttcttgaaagccagaatcgccagttgacagccgccgtgctgttcaaagtccccgaagatgaagttgttcagcgtctgctgtctcgcctgatctgtccgaaatgcgggcgtatctacaacatgatttttctgccaccaaaagaagacgagctgtgtgacgattgcggtgtcggcttagtacagcgtgatgatgataaggaagaaacggtccgtcaccgcctgaaagtctaccgtgagaagacccagccggtcattgactattatagtaagaaaggtattctcaaacgcgtagatgggtcgcaaggaatcgacaacgttgtggcagaagtcctggggattctgggttggagcgataagtaatga

SEQ ID NO: 2252 - protein, 231 aa, synthetic construct
  REGION 1..231: note = Variant of adenylate kinase
MHHHHHHGGSGMGAYLVFLGPPGAGKGTQGRRISAKTGIPHISTGDILRDIVAKQNDEVASSIKEIMEKGELVPDELGNAVVKARLSEKDCEKGFILDGFPRTVRQAEYLDSFLESQNRQLTAAVLFKVPEDEVVQRLLSRLICPKCGRIYNMIFLPPKEDELCDDCGVGLVQRDDDKEETVRHRLKVYREKTQPVIDYYSKKGILKRVDGSQGIDNVVAEVLGILGWSDK

SEQ ID NO: 2253 - DNA, 699 bp, synthetic construct
  misc_feature 1..699: note = Variant of adenylate kinase
  source 1..699: mol_type = other DNA
atgcaccatcatcaccatcacgggggctccggcatgggggcatatctggtgttcttaggtccgccgggcgcgggaaaaggtacccaaggccgtcgcatttcggcaaagactggcatcccgcatattagcacgggcgatatcctgcgtgacatcgtcgctaagcaaaacgatgaagttgcctcgaaaattaaagagatcatggagaaaggtgaactcgttccagatgaactgggtaatgcgctggtaaaacgccgcctgtcggagaaagactgcgaaaaaggctttattttggatggtttcccgcgtaccgtgcgccaagcggaatatctggatagttttcttgaaagccagaatcgccagttgacagccgccgtgctgtttaaagtccccgaagatgaagttatgcagcgtctgctgtctcgcctgatctgtccgaaatgcgggcgtatctacaacatgatttttctgccaccaaaagaagacgagctgtgtgacgattgcggtgtcggcttagtacagcgtgatgatgataaggaagaaacggtccgtcaccgcctgaaagtctaccttgagaagacccagccggtcattgactattatagtaagaaaggtattctcaaacgcgtagatgggtcgcaaggaatcgacaacgttgtggcagaagtcctgggggcgctgggttggagcgataagtaatga

SEQ ID NO: 2254 - protein, 231 aa, synthetic construct
  REGION 1..231: note = Variant of adenylate kinase
MHHHHHHGGSGMGAYLVFLGPPGAGKGTQGRRISAKTGIPHISTGDILRDIVAKQNDEVASKIKEIMEKGELVPDELGNALVKRRLSEKDCEKGFILDGFPRTVRQAEYLDSFLESQNRQLTAAVLFKVPEDEVMQRLLSRLICPKCGRIYNMIFLPPKEDELCDDCGVGLVQRDDDKEETVRHRLKVYLEKTQPVIDYYSKKGILKRVDGSQGIDNVVAEVLGALGWSDK

SEQ ID NO: 2255 - DNA, 699 bp, synthetic construct
  misc_feature 1..699: note = Variant of adenylate kinase
  source 1..699: mol_type = other DNA
atgcaccatcatcaccatcacgggggctccggcatgggggcatatctggtgttcttaggtcgtccgggcgcgggaaaaggtacccaaggccgtcgcatttcggcaaagactggcatcccgcatattagcacgggcgatatcctgcgtgacatcgtcgctacacagaacgatgaagttgcctcgagcattaaagagatcatggagaaaggtgaactcgttccagatgaactgggtaatgcggtagtaaaacgccgcctgtcggagaaagactgcgaaaaaggctttattttggatggtttcccgcgtaccgtgcgccaagcggaatatctggatagttttcttgaaagccagaatcgccagttgacagccgccgtgctgttcaaagtccccgaagatgaagttgttcagcgtctgctgtctcgcctgatctgtccgaaatgcgggcgtatctacaacatgatttttctgccaccaaaagaagacgagctgtgtgacgattgcggtgtcggcttagtacagcgtgatgatgataaggaagaaacggtccgtcaccgcctgaaagtctaccgtgagaagacccagccggtcattgactattatagtaagaaaggtattctcaaacgcgtagatgggaaccaaggaatcgacaacgttgtggcagaagtcctggggattctgggttggagcgataagtaatga

SEQ ID NO: 2256 - protein, 231 aa, synthetic construct
  REGION 1..231: note = Variant of adenylate kinase
MHHHHHHGGSGMGAYLVFLGRPGAGKGTQGRRISAKTGIPHISTGDILRDIVATQNDEVASSIKEIMEKGELVPDELGNAVVKRRLSEKDCEKGFILDGFPRTVRQAEYLDSFLESQNRQLTAAVLFKVPEDEVVQRLLSRLICPKCGRIYNMIFLPPKEDELCDDCGVGLVQRDDDKEETVRHRLKVYREKTQPVIDYYSKKGILKRVDGNQGIDNVVAEVLGILGWSDK

SEQ ID NO: 2257 - DNA, 699 bp, synthetic construct
  misc_feature 1..699: note = Variant of adenylate kinase
  source 1..699: mol_type = other DNA
atgcaccatcatcaccatcacgggggctccggcatgggggcatatctggtgttcttaggtccgccgggcgcgggaaaaggtacccaaggccgtcgcatttcggcaaagactggcatcccgcatattagcacgggcgatatcctgcgtgacatcgtcgctaagcaaaacgatgaagtttcgtcgaaaattaaagagatcatggagaaaggtgaactcgttccagatgaactgggtaatgcgctggtaggccgccgcctgtcggagaaagactgcgaaaaaggctttattttggatggtttcccgcgtaccgtgcgccaagcggaatatctggatagttttcttgaaagccagaatcgccagttgacagccgccgtgctgtttaaagtccccgaagatgaagttgttcagcgtctgctgtctcgcctgatctgtccgaaatgcgggcgtatctacaacatgatttttctgccaccaaaagaagacgagctgtgtgacgattgcggtgtcggcttagtacagcgtttagatgataaggaagaaacggtccgtcaccgcctgaaagtctaccttgagaagacccagccggtcattgactattatagtaagaaaggtattctcaaacgcgtagatgggtcgcaaggaatcgacaacgttgtggcagaagtcctggggattctgggttggagcgataagtaatga

SEQ ID NO: 2258 - protein, 231 aa, synthetic construct
  REGION 1..231: note = Variant of adenylate kinase
MHHHHHHGGSGMGAYLVFLGPPGAGKGTQGRRISAKTGIPHISTGDILRDIVAKQNDEVSSKIKEIMEKGELVPDELGNALVGRRLSEKDCEKGFILDGFPRTVRQAEYLDSFLESQNRQLTAAVLFKVPEDEVVQRLLSRLICPKCGRIYNMIFLPPKEDELCDDCGVGLVQRLDDKEETVRHRLKVYLEKTQPVIDYYSKKGILKRVDGSQGIDNVVAEVLGILGWSDK

SEQ ID NO: 2259 - DNA, 699 bp, synthetic construct
  misc_feature 1..699: note = Variant of adenylate kinase
  source 1..699: mol_type = other DNA
atgcaccatcatcaccatcacgggggctccggcatgggggcatatctggtgttcttaggtcctccgggcgcgggaaaaggtacccaaggccgtcgcatttcggcaaagactggcatcccgcatattagcacgggcgatatcctgcgtgacatcgtcgctaaaagcaacgatgaagttgcctcgaaaattaaagagatcatggagaaaggtgaactcgttccagatgaactgggcaatgcggtagtaaaagcgcgcctgtcggagaaagactgcgaaaaaggctttattttggatggtttcccgcgtaccgtgcgccaagcggaatatctggatagttttcttgaaagccagaatcgccagttgacagccgccgtgctgttcaaagtccccgaagatgaagttgttcagcgtctgctgtctcgcctgatctgtccgaaatgcgggcgtatctacaacatgatttttctgccaccaaaagaagacgagctgtgtgacgattgcggtgtcggcttagtacagcgtgatgatgataaggaagaaacggtccgtcaccgcctgaaagtctaccgtgagaagacccagccggtcattgactattatagtaagaaaggtattctcaaacgcgtagatgggtcgcaaggaatcgacaacgttgtggcagaagtcctggggattctgggttggagcgataagtaatga

SEQ ID NO: 2260 - protein, 231 aa, synthetic construct
  REGION 1..231: note = Variant of adenylate kinase
MHHHHHHGGSGMGAYLVFLGPPGAGKGTQGRRISAKTGIPHISTGDILRDIVAKSNDEVASKIKEIMEKGELVPDELGNAVVKARLSEKDCEKGFILDGFPRTVRQAEYLDSFLESQNRQLTAAVLFKVPEDEVVQRLLSRLICPKCGRIYNMIFLPPKEDELCDDCGVGLVQRDDDKEETVRHRLKVYREKTQPVIDYYSKKGILKRVDGSQGIDNVVAEVLGILGWSDK

SEQ ID NO: 2261 - DNA, 699 bp, synthetic construct
  misc_feature 1..699: note = Variant of adenylate kinase
  source 1..699: mol_type = other DNA
atgcaccatcatcaccatcacgggggctccggcatgggggcatatctggtgttcttaggtccgccgggcgcgggaaaaggtacccaaggccgtattatttcggcaaagactggcatcccgcatattagcacgggcgatatcctgcgtgacatcgtcgctaagcaaaacgatgaagttgcctcgaaaattaaagagatcatggagaaaggtgaactcgttccagatgaactgggtaatgcgctggtaggccgccgcctgtcggagaaagactgcgaaaaaggctttattttggatggtttcccgcgtaccgtgcgccaagcggaatatctggatagttttcttgaaagccagaatcgccagttgacagccgccgtgctgttcaaagtccccgaagatgaagttaaacagcgtctgctgtctcgcctgatctgtccgaaatgcgggcgtatctacaacatgatttttctgccaccaaaagaagacgagctgtgtgacgattgcggtgtcggcttagtacagcgtgatgatgataaggaagaaacggtccgtcaccgcctgaaagtctaccttgagaagacccagccggtcattgactattatagtaagaaaggtattctcaaacgcgtagatgggtcgcaaggaatcgacaacgttgtggcagaagtcctgggggcgctgggttggagcgataagtaatga

SEQ ID NO: 2262 - protein, 231 aa, synthetic construct
  REGION 1..231: note = Variant of adenylate kinase
MHHHHHHGGSGMGAYLVFLGPPGAGKGTQGRIISAKTGIPHISTGDILRDIVAKQNDEVASKIKEIMEKGELVPDELGNALVGRRLSEKDCEKGFILDGFPRTVRQAEYLDSFLESQNRQLTAAVLFKVPEDEVKQRLLSRLICPKCGRIYNMIFLPPKEDELCDDCGVGLVQRDDDKEETVRHRLKVYLEKTQPVIDYYSKKGILKRVDGSQGIDNVVAEVLGALGWSDK

SEQ ID NO: 2263 - DNA, 699 bp, synthetic construct
  misc_feature 1..699: note = Variant of adenylate kinase
  source 1..699: mol_type = other DNA
atgcaccatcatcaccatcacgggggctccggcatgggggcatatctggtgttcttaggtccgccgggcgcgggaaaaggtacccaaggccgtcgcatttcggcaaagactggcatcccgcatattagcacgggcgatatcctgcgtgacatcgtcgctaagcaaaacgatgaagttgcctcgaaaattaaagagatcatggagaaaggtgaactcgttccagatgaactgggtaatgcggtagtaaaacgccgcctgtcggagaaagactgcgaaaaaggctttattttggatggtttcccgcgtaccgtgcgccaagcggaatatctggatagttttcttgaaagccagaatcgccagttgacagccgccgtgctgttcaaagtccccgaagatgaagttgttcagcgtctgctgtctcgcctgatctgtccgaaatgcgggcgtatctacaacatgatttttctgccaccaaaagaagacgagctgtgtgacgattgcggtgtcggcttagtacagcgttttgatgataaggaagaaacggtccgtcaccgcctgaaagtctaccttgagaagacccagccggtcattgactattatagtaagaaaggtattctcaaacgcgtagatgggtcgcaaggaatcgacaacgttgtggcagaagtcctggggattctgggttggagcgataagtaatga

SEQ ID NO: 2264 - protein, 231 aa, synthetic construct
  REGION 1..231: note = Variant of adenylate kinase
MHHHHHHGGSGMGAYLVFLGPPGAGKGTQGRRISAKTGIPHISTGDILRDIVAKQNDEVASKIKEIMEKGELVPDELGNAVVKRRLSEKDCEKGFILDGFPRTVRQAEYLDSFLESQNRQLTAAVLFKVPEDEVVQRLLSRLICPKCGRIYNMIFLPPKEDELCDDCGVGLVQRFDDKEETVRHRLKVYLEKTQPVIDYYSKKGILKRVDGSQGIDNVVAEVLGILGWSDK

SEQ ID NO: 2265 - DNA, 699 bp, synthetic construct
  misc_feature 1..699: note = Variant of adenylate kinase
  source 1..699: mol_type = other DNA
atgcaccatcatcaccatcacgggggctccggcatgggggcatatctggtgttcttaggtcctccgggcgcgggaaaaggtacccaaggccgtcgcatttcggcaaagactggcatcccgcatattagcacgggcgatatcctgcgtgacatcgtcgctaaacagaacgatgaagttgcctcgagcattaaagagatcatggagaaaggtgaactcgttccagatgaactgggcaatgcggtagtaaaacgccgcctgtcggagaaagactgcgaaaaaggctttattttggatggtttcccgcgtaccgtgcgccaagcggaatatctggatagttttcttgaaagccagaatcgccagttgacagccgccgtgctgttcaaagtccccgaagatgaagttgttcagcgtctgctgtctcgcctgatctgtccgaaatgcgggcgtatctacaacatgatttttctgccaccaaaagaagacgagctgtgtgacgattgcggtgtcggcttagtacagcgtgatgatgataaggaagaaacggtccgtcaccgcctgaaagtctaccttgagaagacccagccggtcattgactattatagtaagaaaggtattctcaaacgcgtagatgggaaccaaggaatcgacaacgttgtggcagaagtcctggggattctgggttggagcgataagtaatga

SEQ ID NO: 2266 - protein, 231 aa, synthetic construct
  REGION 1..231: note = Variant of adenylate kinase
MHHHHHHGGSGMGAYLVFLGPPGAGKGTQGRRISAKTGIPHISTGDILRDIVAKQNDEVASSIKEIMEKGELVPDELGNAVVKRRLSEKDCEKGFILDGFPRTVRQAEYLDSFLESQNRQLTAAVLFKVPEDEVVQRLLSRLICPKCGRIYNMIFLPPKEDELCDDCGVGLVQRDDDKEETVRHRLKVYLEKTQPVIDYYSKKGILKRVDGNQGIDNVVAEVLGILGWSDK

SEQ ID NO: 2267 - DNA, 699 bp, synthetic construct
  misc_feature 1..699: note = Variant of adenylate kinase
  source 1..699: mol_type = other DNA
atgcaccatcatcaccatcacgggggctccggcatgggggcatatctggtgttcttaggtccgccgggcgcgggaaaaggtacccaaggccgtattatttcggcaaagactggcatcccgcatattagcacgggcgatatcctgcgtgacatcgtcgctaagcaaaacgatgaagttgcgtcgaaaattaaagagatcatggagaaaggtgaactcgttccagatgaactgggtaatgcgctggtaagccgccgcctgtcggagaaagactgcgaaaaaggctttattttggatggtttcccgcgtaccgtgcgccaagcggaatatctggatagttttcttgaaagccagaatcgccagttgacagccgccgtgctgtttaaagtccccgaagatgaagttgttcagcgtctgctgtctcgcctgatctgtccgaaatgcgggcgtatctacaacatgatttttctgccaccaaaagaagacgagctgtgtgacgattgcggtgtcggcttagtacagcgtgatgatgataaggaagaaacggtccgtcaccgcctgaaagtctaccttgagaagacccagccggtcattgactattatagtaagaaaggtattctcaaacgcgtagatgggtcgcaaggaatcgacaacgttgtggcagaagtcctggggattctgggttggagcgataagtaatga

SEQ ID NO: 2268 - protein, 231 aa, synthetic construct
  REGION 1..231: note = Variant of adenylate kinase
MHHHHHHGGSGMGAYLVFLGPPGAGKGTQGRIISAKTGIPHISTGDILRDIVAKQNDEVASKIKEIMEKGELVPDELGNALVSRRLSEKDCEKGFILDGFPRTVRQAEYLDSFLESQNRQLTAAVLFKVPEDEVVQRLLSRLICPKCGRIYNMIFLPPKEDELCDDCGVGLVQRDDDKEETVRHRLKVYLEKTQPVIDYYSKKGILKRVDGSQGIDNVVAEVLGILGWSDK

SEQ ID NO: 2269 - DNA, 699 bp, synthetic construct
  misc_feature 1..699: note = Variant of adenylate kinase
  source 1..699: mol_type = other DNA
atgcaccatcatcaccatcacgggggctccggcatgggggcatatctggtgttcttaggtccgccgggcgcgggaaaaggtacccaaggccgtattatttcggcaaagactggcatcccgcatattagcacgggcgatatcctgcgtgacatcgtcgctaagcaaaacgatgaagttgcctcgaaaattaaagagatcatggagaaaggtgaactcgttccagatgaactgggtaatgcgctggtaaaacgccgcctgtcggagaaagactgcgaaaaaggctttattttggatggtttcccgcgtaccgtgcgccaagcggaatatctggatagttttcttgaaagccagaatcgccagttgacagccgccgtgctgtttaaagtccccgaagatgaagttgttcagcgtctgctgtctcgcctgatctgtccgaaatgcgggcgtatctacaacatgatttttctgccaccaaaagaagacgagctgtgtgacgattgcggtgtcggcttagtacagcgtgatgatgataaggaagaaacggtccgtcaccgcctgaaagtctaccttgagaagacccagccggtcattgactattatagtaagaaaggtattctcaaacgcgtagatgggtcgcaaggaatcgacaacgttgtggcagaagtcctgggggcgctgggttggagcgataagtaatga

SEQ ID NO: 2270 - protein, 231 aa, synthetic construct
  REGION 1..231: note = Variant of adenylate kinase
MHHHHHHGGSGMGAYLVFLGPPGAGKGTQGRIISAKTGIPHISTGDILRDIVAKQNDEVASKIKEIMEKGELVPDELGNALVKRRLSEKDCEKGFILDGFPRTVRQAEYLDSFLESQNRQLTAAVLFKVPEDEVVQRLLSRLICPKCGRIYNMIFLPPKEDELCDDCGVGLVQRDDDKEETVRHRLKVYLEKTQPVIDYYSKKGILKRVDGSQGIDNVVAEVLGALGWSDK

SEQ ID NO: 2271 - DNA, 699 bp, synthetic construct
  misc_feature 1..699: note = Variant of adenylate kinase
  source 1..699: mol_type = other DNA
atgcaccatcatcaccatcacgggggctccggcatgggggcatatctggtgttcttaggtcctccgggcgcgggaaaaggtacccaaggccgtcgcatttcggcaaagactggcatcccgcatattagcacgggcgatatcctgcgtgacatcgtcgctacaagcaacgatgaagttgcctcgaaaattaaagagatcatggagaaaggtgaactcgttccagatgaactgggcaatgcggtagtaaaagcgcgcctgtcggagaaagactgcgaaaaaggctttattttggatggtttcccgcgtaccgtgcgccaagcggaatatctggatagttttcttgaaagccagaatcgccagttgacagccgccgtgctgttcaaagtccccgaagatgaagttgttcagcgtctgctgtctcgcctgatctgtccgaaatgcgggcgtatctacaacatgatttttctgccaccaaaagaagacgagctgtgtgacgattgcggtgtcggcttagtacagcgtgatgatgataaggaagaaacggtccgtcaccgcctgaaagtctaccttgagaagacccagccggtcattgactattatagtaagaaaggtattctcaaacgcgtagatgggaaccaaggaatcgacaacgttgtggcagaagtcctggggattctgggttggagcgataagtaatga

SEQ ID NO: 2272 - protein, 231 aa, synthetic construct
  REGION 1..231: note = Variant of adenylate kinase
MHHHHHHGGSGMGAYLVFLGPPGAGKGTQGRRISAKTGIPHISTGDILRDIVATSNDEVASKIKEIMEKGELVPDELGNAVVKARLSEKDCEKGFILDGFPRTVRQAEYLDSFLESQNRQLTAAVLFKVPEDEVVQRLLSRLICPKCGRIYNMIFLPPKEDELCDDCGVGLVQRDDDKEETVRHRLKVYLEKTQPVIDYYSKKGILKRVDGNQGIDNVVAEVLGILGWSDK

SEQ ID NO: 2273 - DNA, 699 bp, synthetic construct
  misc_feature 1..699: note = Variant of adenylate kinase
  source 1..699: mol_type = other DNA
atgcaccatcatcaccatcacgggggctccggcatgggggcatatctggtgttcttaggtcctccgggcgcgggaaaaggtacccaaggccgtcgcatttcggcaaagactggcatcccgcatattagcacgggcgatatcctgcgtgacatcgtcgctaaaagcaacgatgaagttgcctcgaaaattaaagagatcatggagaaaggtgaactcgttccagatgaactgggtaatgcggtagtaaaacgccgcctgtcggagaaagactgcgaaaaaggctttattttggatggtttcccgcgtaccgtgcgccaagcggaatatctggatagttttcttgaaagccagaatcgccagttgacagccgccgtgctgttcaaagtccccgaagatgaagttgttcagcgtctgctgtctcgcctgatctgtccgaaatgcgggcgtatctacaacatgatttttctgccaccaaaagaagacgagctgtgtgacgattgcggtgtcggcttagtacagcgtgatgatgataaggaagaaacggtccgtcaccgcctgaaagtctaccgtgagaagacccagccggtcattgactattatagtaagaaaggtattctcaaacgcgtagatgggagccaaggaatcgacaacgttgtggcagaagtcctggggattctgggttggagcgataagtaatga

SEQ ID NO: 2274 - protein, 231 aa, synthetic construct
  REGION 1..231: note = Variant of adenylate kinase
MHHHHHHGGSGMGAYLVFLGPPGAGKGTQGRRISAKTGIPHISTGDILRDIVAKSNDEVASKIKEIMEKGELVPDELGNAVVKRRLSEKDCEKGFILDGFPRTVRQAEYLDSFLESQNRQLTAAVLFKVPEDEVVQRLLSRLICPKCGRIYNMIFLPPKEDELCDDCGVGLVQRDDDKEETVRHRLKVYREKTQPVIDYYSKKGILKRVDGSQGIDNVVAEVLGILGWSDK

SEQ ID NO: 2275 - DNA, 699 bp, synthetic construct
  misc_feature 1..699: note = Variant of adenylate kinase
  source 1..699: mol_type = other DNA
atgcaccatcatcaccatcacgggggctccggcatgggggcatatctggtgttcttaggtccgccgggcgcgggaaaaggtacccaaggccgtcgcatttcggcaaagactggcatcccgcatattagcacgggcgatatcctgcgtgacatcgtcgctaaacagaacgatgaagttgcctcgagcattaaagagatcatggagaaaggtgaactcgttccagatgaactgggtaatgcggtagtaaaacgccgcctgtcggagaaagactgcgaaaaaggctttattttggatggtttcccgcgtaccgtgcgccaagcggaatatctggatagttttcttgaaagccagaatcgccagttgacagccgccgtgctgttcaaagtccccgaagatgaagttgttcagcgtctgctgtctcgcctgatctgtccgaaatgcgggcgtatctacaacatgatttttctgccaccaaaagaagacgagctgtgtgacgattgcggtgtcggcttagtacagcgtgatgatgataagccggaaacggtccgtcaccgcctgaaagtctaccttgagaagacccagccggtcattgactattatagtaagaaaggtattctcaaacgcgtagatgggagccaaggaatcgacaacgttgtggcagaagtcctggggattctgggttggagcgataagtaatga

SEQ ID NO: 2276 - protein, 231 aa, synthetic construct
  REGION 1..231: note = Variant of adenylate kinase
MHHHHHHGGSGMGAYLVFLGPPGAGKGTQGRRISAKTGIPHISTGDILRDIVAKQNDEVASSIKEIMEKGELVPDELGNAVVKRRLSEKDCEKGFILDGFPRTVRQAEYLDSFLESQNRQLTAAVLFKVPEDEVVQRLLSRLICPKCGRIYNMIFLPPKEDELCDDCGVGLVQRDDDKPETVRHRLKVYLEKTQPVIDYYSKKGILKRVDGSQGIDNVVAEVLGILGWSDK

SEQ ID NO: 2277 - DNA, 699 bp, synthetic construct
  misc_feature 1..699: note = Variant of adenylate kinase
  source 1..699: mol_type = other DNA
atgcaccatcatcaccatcacgggggctccggcatgggggcatatctggtgttcttaggtcctccgggcgcgggaaaaggtacccaaggccgtcgcatttcggcaaagactggcatcccgcatattagcacgggcgatatcctgcgtgacatcgtcgctaagcaaaacgatgaagttgcctcggaaattaaagagatcatggagaaaggtgaactcgttccagatgaactgggcaatgcggtagtaaaagcgcgcctgtcggagaaagactgcgaaaaaggctttattttggatggtttcccgcgtaccgtgcgccaagcggaatatctggatagttttcttgaaagccagaatcgccagttgacagccgccgtgctgttcaaagtccccgaagatgaagttgttcagcgtctgctgtctcgcctgatctgtccgaaatgcgggcgtatctacaacatgatttttctgccaccaaaagaagacgagctgtgtgacgattgcggtgtcggcttagtacagcgtgatgatgataaggaagaaacggtccgtcaccgcctgaaagtctaccatgagaagacccagccggtcattgactattatagtaagaaaggtattctcaaacgcgtagatgggtcgcaaggaatcgacaacgttgtggcagaagtcctggggattctgggttggagcgataagtaatga

SEQ ID NO: 2278 - protein, 231 aa, synthetic construct
  REGION 1..231: note = Variant of adenylate kinase
MHHHHHHGGSGMGAYLVFLGPPGAGKGTQGRRISAKTGIPHISTGDILRDIVAKQNDEVASEIKEIMEKGELVPDELGNAVVKARLSEKDCEKGFILDGFPRTVRQAEYLDSFLESQNRQLTAAVLFKVPEDEVVQRLLSRLICPKCGRIYNMIFLPPKEDELCDDCGVGLVQRDDDKEETVRHRLKVYHEKTQPVIDYYSKKGILKRVDGSQGIDNVVAEVLGILGWSDK

SEQ ID NO: 2279 - DNA, 699 bp, synthetic construct
  misc_feature 1..699: note = Variant of adenylate kinase
  source 1..699: mol_type = other DNA
atgcaccatcatcaccatcacgggggctccggcatgggggcatatctggtgttcttaggtcctccgggcgcgggaaaaggtacccaaggccgtcgcatttcggcaaagactggcatcccgcatattagcacgggcgatatcctgcgtgacatcgtcgctacacagaacgatgaagttgcctcgaaaattaaagagatcatggagaaaggtgaactcgttccagatgaactgggtaatgcggtagtaaaagcgcgcctgtcggagaaagactgcgaaaaaggctttattttggatggtttcccgcgtaccgtgcgccaagcggaatatctggatagttttcttgaaagccagaatcgccagttgacagccgccgtgctgttcaaagtccccgaagatgaagttgttcagcgtctgctgtctcgcctgatctgtccgaaatgcgggcgtatctacaacatgatttttctgccaccaaaagaagacgagctgtgtgacgattgcggtgtcggcttagtacagcgtgatgatgataagccggaaacggtccgtcaccgcctgaaagtctaccttgagaagacccagccggtcattgactattatagtaagaaaggtattctcaaacgcgtagatgggaaccaaggaatcgacaacgttgtggcagaagtcctggggattctgggttggagcgataagtaatga

SEQ ID NO: 2280 - protein, 231 aa, synthetic construct
  REGION 1..231: note = Variant of adenylate kinase
MHHHHHHGGSGMGAYLVFLGPPGAGKGTQGRRISAKTGIPHISTGDILRDIVATQNDEVASKIKEIMEKGELVPDELGNAVVKARLSEKDCEKGFILDGFPRTVRQAEYLDSFLESQNRQLTAAVLFKVPEDEVVQRLLSRLICPKCGRIYNMIFLPPKEDELCDDCGVGLVQRDDDKPETVRHRLKVYLEKTQPVIDYYSKKGILKRVDGNQGIDNVVAEVLGILGWSDK

SEQ ID NO: 2281 - DNA, 699 bp, synthetic construct
  misc_feature 1..699: note = Variant of adenylate kinase
  source 1..699: mol_type = other DNA
atgcaccatcatcaccatcacgggggctccggcatgggggcatatctggtgttcttaggtcctccgggcgcgggaaaaggtacccaaggccgtcgcatttcggcaaagactggcatcccgcatattagcacgggcgatatcctgcgtgacatcgtcgctacaagcaacgatgaagttgcctcgagcattaaagagatcatggagaaaggtgaactcgttccagatgaactgggtaatgcggtagtaaaagcgcgcctgtcggagaaagactgcgaaaaaggctttattttggatggtttcccgcgtaccgtgcgccaagcggaatatctggatagttttcttgaaagccagaatcgccagttgacagccgccgtgctgttcaaagtccccgaagatgaagttgttcagcgtctgctgtctcgcctgatctgtccgaaatgcgggcgtatctacaacatgatttttctgccaccaaaagaagacgagctgtgtgacgattgcggtgtcggcttagtacagcgtgatgatgataaggaagaaacggtccgtcaccgcctgaaagtctaccttgagaagacccagccggtcattgactattatagtaagaaaggtattctcaaacgcgtagatgggagccaaggaatcgacaacgttgtggcagaagtcctggggattctgggttggagcgataagtaatga

SEQ ID NO: 2282 - protein, 231 aa, synthetic construct
  REGION 1..231: note = Variant of adenylate kinase
MHHHHHHGGSGMGAYLVFLGPPGAGKGTQGRRISAKTGIPHISTGDILRDIVATSNDEVASSIKEIMEKGELVPDELGNAVVKARLSEKDCEKGFILDGFPRTVRQAEYLDSFLESQNRQLTAAVLFKVPEDEVVQRLLSRLICPKCGRIYNMIFLPPKEDELCDDCGVGLVQRDDDKEETVRHRLKVYLEKTQPVIDYYSKKGILKRVDGSQGIDNVVAEVLGILGWSDK

SEQ ID NO: 2283 - DNA, 699 bp, synthetic construct
  misc_feature 1..699: note = Variant of adenylate kinase
  source 1..699: mol_type = other DNA
atgcaccatcatcaccatcacgggggctccggcatgggggcatatctggtgttcttaggtccgccgggcgcgggaaaaggtacccaaggccgtcgcatttcggcaaagactggcatcccgcatattagcacgggcgatatcctgcgtgacatcgtcgctaagcaaaacgatgaagttgcctcgaaaattaaagagatcatggagaaaggtgaactcgttccagatgaactgggtaatgcgctggtaaaacgccgcctgtcggagaaagactgcgaaaaaggctttattttggatggtttcccgcgtaccgtgcgccaagcggaatatctggatagttttcttgaaagccagaatcgccagttgacagccgccgtgctgttcaaagtccccgaagatgaagttatgcagcgtctgctgtctcgcctgatctgtccgaaatgcgggcgtatctacaacatgatttttctgccaccaaaagaagacgagctgtgtgacgattgcggtgtcggcttagtacagcgtgatgatgataaggaagaaacggtccgtcaccgcctgaaagtctaccttgagaagacccagccggtcattgactattatagtaagaaaggtattctcaaacgcgtagatgggtcgcaaggaatcgacaacgttgtggcagaagtcctggggattctgggttggagcgataagtaatga

SEQ ID NO: 2284 - protein, 231 aa, synthetic construct
  REGION 1..231: note = Variant of adenylate kinase
MHHHHHHGGSGMGAYLVFLGPPGAGKGTQGRRISAKTGIPHISTGDILRDIVAKQNDEVASKIKEIMEKGELVPDELGNALVKRRLSEKDCEKGFILDGFPRTVRQAEYLDSFLESQNRQLTAAVLFKVPEDEVMQRLLSRLICPKCGRIYNMIFLPPKEDELCDDCGVGLVQRDDDKEETVRHRLKVYLEKTQPVIDYYSKKGILKRVDGSQGIDNVVAEVLGILGWSDK

SEQ ID NO: 2285 - DNA, 699 bp, synthetic construct
  misc_feature 1..699: note = Variant of adenylate kinase
  source 1..699: mol_type = other DNA
atgcaccatcatcaccatcacgggggctccggcatgggggcatatctggtgttcttaggtccgccgggcgcgggaaaaggtacccaaggccgtattatttcggcaaagactggcatcccgcatattagcacgggcgatatcctgcgtgacatcgtcgctaagcaaaacgatgaagttgcctcgaaaattaaagagatcatggagaaaggtgaactcgttccagatgaactgggtaatgcgctggtaaaacgccgcctgtcggagaaagactgcgaaaaaggctttattttggatggtttcccgcgtaccgtgcgccaagcggaatatctggatagttttcttgaaagccagaatcgccagttgacagccgccgtgctgttcaaagtccccgaagatgaagttaaacagcgtctgctgtctcgcctgatctgtccgaaatgcgggcgtatctacaacatgatttttctgccaccaaaagaagacgagctgtgtgacgattgcggtgtcggcttagtacagcgtgatgatgataaggaagaaacggtccgtcaccgcctgaaagtctaccttgagaagacccagccggtcattgactattatagtaagaaaggtattctcaaacgcgtagatgggtcgcaaggaatcgacaacgttgtggcagaagtcctggggattctgggttggagcgataagtaatga

SEQ ID NO: 2286 - protein, 231 aa, synthetic construct
  REGION 1..231: note = Variant of adenylate kinase
MHHHHHHGGSGMGAYLVFLGPPGAGKGTQGRIISAKTGIPHISTGDILRDIVAKQNDEVASKIKEIMEKGELVPDELGNALVKRRLSEKDCEKGFILDGFPRTVRQAEYLDSFLESQNRQLTAAVLFKVPEDEVKQRLLSRLICPKCGRIYNMIFLPPKEDELCDDCGVGLVQRDDDKEETVRHRLKVYLEKTQPVIDYYSKKGILKRVDGSQGIDNVVAEVLGILGWSDK

SEQ ID NO: 2287 - DNA, 699 bp, synthetic construct
  misc_feature 1..699: note = Variant of adenylate kinase
  source 1..699: mol_type = other DNA
atgcaccatcatcaccatcacgggggctccggcatgggggcatatctggtgttcttaggtccgccgggcgcgggaaaaggtacccaaggccgtcgcatttcggcaaagactggcatcccgcatattagcacgggcgatatcctgcgtgacatcgtcgctaaacagaacgatgaagttgcctcgaaaattaaagagatcatggagaaaggtgaactcgttccagatgaactgggtaatgcggtagtaaaacgccgcctgtcggagaaagactgcgaaaaaggctttattttggatggtttcccgcgtaccgtgcgccaagcggaatatctggatagttttcttgaaagccagaatcgccagttgacagccgccgtgctgttcaaagtccccgaagatgaagttgttcagcgtctgctgtctcgcctgatctgtccgaaatgcgggcgtatctacaacatgatttttctgccaccaaaagaagacgagctgtgtgacgattgcggtgtcggcttagtacagcgtgatgatgataagccggaaacggtccgtcaccgcctgaaagtctaccatgagaagacccagccggtcattgactattatagtaagaaaggtattctcaaacgcgtagatgggaaccaaggaatcgacaacgttgtggcagaagtcctggggattctgggttggagcgataagtaatga

SEQ ID NO: 2288 - protein, 231 aa, synthetic construct
  REGION 1..231: note = Variant of adenylate kinase
MHHHHHHGGSGMGAYLVFLGPPGAGKGTQGRRISAKTGIPHISTGDILRDIVAKQNDEVASKIKEIMEKGELVPDELGNAVVKRRLSEKDCEKGFILDGFPRTVRQAEYLDSFLESQNRQLTAAVLFKVPEDEVVQRLLSRLICPKCGRIYNMIFLPPKEDELCDDCGVGLVQRDDDKPETVRHRLKVYHEKTQPVIDYYSKKGILKRVDGNQGIDNVVAEVLGILGWSDK

SEQ ID NO: 2289 - DNA, 699 bp, synthetic construct
  misc_feature 1..699: note = Variant of adenylate kinase
  source 1..699: mol_type = other DNA
atgcaccatcatcaccatcacgggggctccggcatgggggcatatctggtgttcttaggtccgccgggcgcgggaaaaggtacccaaggccgtcgcatttcggcaaagactggcatcccgcatattagcacgggcgatatcctgcgtgacatcgtcgctaaaagcaacgatgaagttgcctcggaaattaaagagatcatggagaaaggtgaactcgttccagatgaactgggtaatgcggtagtaaaacgccgcctgtcggagaaagactgcgaaaaaggctttattttggatggtttcccgcgtaccgtgcgccaagcggaatatctggatagttttcttgaaagccagaatcgccagttgacagccgccgtgctgttcaaagtccccgaagatgaagttgttcagcgtctgctgtctcgcctgatctgtccgaaatgcgggcgtatctacaacatgatttttctgccaccaaaagaagacgagctgtgtgacgattgcggtgtcggcttagtacagcgtgatgatgataaggaagaaacggtccgtcaccgcctgaaagtctaccttgagaagacccagccggtcattgactattatagtaagaaaggtattctcaaacgcgtagatgggtcgcaaggaatcgacaacgttgtggcagaagtcctggggattctgggttggagcgataagtaatga

SEQ ID NO: 2290 - protein, 231 aa, synthetic construct
  REGION 1..231: note = Variant of adenylate kinase
MHHHHHHGGSGMGAYLVFLGPPGAGKGTQGRRISAKTGIPHISTGDILRDIVAKSNDEVASEIKEIMEKGELVPDELGNAVVKRRLSEKDCEKGFILDGFPRTVRQAEYLDSFLESQNRQLTAAVLFKVPEDEVVQRLLSRLICPKCGRIYNMIFLPPKEDELCDDCGVGLVQRDDDKEETVRHRLKVYLEKTQPVIDYYSKKGILKRVDGSQGIDNVVAEVLGILGWSDK

SEQ ID NO: 2291 - DNA, 699 bp, synthetic construct
  misc_feature 1..699: note = Variant of adenylate kinase
  source 1..699: mol_type = other DNA
atgcaccatcatcaccatcacgggggctccggcatgggggcatatctggtgttcttaggtccgccgggcgcgggaaaaggtacccaaggccgtcgcatttcggcaaagactggcatcccgcatattagcacgggcgatatcctgcgtgacatcgtcgctaagcaaaacgatgaagttgcctcgaaaattaaagagatcatggagaaaggtgaactcgttccagatgaactgggtaatgcggtagtaaaacgccgcctgtcggagaaagactgcgaaaaaggctttattttggatggttatccgcggaccgtgcgccaagcggaatatctggatagttttcttgaaagccagaatcgccagttgacagccgccgtgctgttcaaagtccccgaagatgaagttgttcagcgtctgctgtctcgcctgatctgtccgaaatgcgggcgtatctacaacatgatttttctgccaccaaaagaagacgagctgtgtgacgattgcggtgtcggcttagtacagcgtgatgatgataaggaagaaacggtccgtcaccgcctgaaagtctaccttgagaagacccagccggtcattgactattatagtaagaaaggtattctcaaacgcgtagatgggtcgcaaggaatcgacaacgttgtggcagaagtcctggggattctgggttggagcgataagtaatga

SEQ ID NO: 2292 - protein, 231 aa, synthetic construct
  REGION 1..231: note = Variant of adenylate kinase
MHHHHHHGGSGMGAYLVFLGPPGAGKGTQGRRISAKTGIPHISTGDILRDIVAKQNDEVASKIKEIMEKGELVPDELGNAVVKRRLSEKDCEKGFILDGYPRTVRQAEYLDSFLESQNRQLTAAVLFKVPEDEVVQRLLSRLICPKCGRIYNMIFLPPKEDELCDDCGVGLVQRDDDKEETVRHRLKVYLEKTQPVIDYYSKKGILKRVDGSQGIDNVVAEVLGILGWSDK

SEQ ID NO: 2293 - DNA, 699 bp, synthetic construct
  misc_feature 1..699: note = Variant of adenylate kinase
  source 1..699: mol_type = other DNA
atgcaccatcatcaccatcacgggggctccggcatgggggcatatctggtgttcttaggtcgtccgggcgcgggaaaaggtacccaaggccgtcgcatttcggcaaagactggcatcccgcatattagcacgggcgatatcctgcgtgacatcgtcgctacacagaacgatgaagttgcctcggaaattaaagagatcatggagaaaggtgaactcgttccagatgaactgggtaatgcggtagtaaaacgccgcctgtcggagaaagactgcgaaaaaggctttattttggatggtttcccgcgtaccgtgcgccaagcggaatatctggatagttttcttgaaagccagaatcgccagttgacagccgccgtgctgttcaaagtccccgaagatgaagttgttcagcgtctgctgtctcgcctgatctgtccgaaatgcgggcgtatctacaacatgatttttctgccaccaaaagaagacgagctgtgtgacgattgcggtgtcggcttagtacagcgtgatgatgataaggaagaaacggtccgtcaccgcctgaaagtctaccatgagaagacccagccggtcattgactattatagtaagaaaggtattctcaaacgcgtagatgggagccaaggaatcgacaacgttgtggcagaagtcctggggattctgggttggagcgataagtaatga

SEQ ID NO: 2294 - protein, 231 aa, synthetic construct
  REGION 1..231: note = Variant of adenylate kinase
MHHHHHHGGSGMGAYLVFLGRPGAGKGTQGRRISAKTGIPHISTGDILRDIVATQNDEVASEIKEIMEKGELVPDELGNAVVKRRLSEKDCEKGFILDGFPRTVRQAEYLDSFLESQNRQLTAAVLFKVPEDEVVQRLLSRLICPKCGRIYNMIFLPPKEDELCDDCGVGLVQRDDDKEETVRHRLKVYHEKTQPVIDYYSKKGILKRVDGSQGIDNVVAEVLGILGWSDK

SEQ ID NO: 2295 - DNA, 699 bp, synthetic construct
  misc_feature 1..699: note = Variant of adenylate kinase
  source 1..699: mol_type = other DNA
atgcaccatcatcaccatcacgggggctccggcatgggggcatatctggtgttcttaggtccgccgggcgcgggaaaaggtacccaaggccgtcgcatttcggcaaagactggcatcccgcatattagcacgggcgatatcctgcgtgacatcgtcgctaagcaaaacgatgaagttgcctcgaaaattaaagagatcatggagaaaggtgaactcgttccagatgaactgggtaatgcggtagtaaaacgccgcctgtcggagaaagactgcgaaaaaggctttattttggatggtttcccgcgtaccgtgcgccaagcggaatatctggatagttttcttgaaagccagaatcgccagttgacagccgccgtgctgttcaaagtccccgaagatgaagttgttcagcgtctgctgtctcgcctgatctgtccgaaatgcgggcgtatctacaacatgatttttctgccaccaaaagaagacgagctgtgtgacgattgcggtgtcggcttagtacagcgtgatgatgataaggaagaaacggtccgtcaccgcctgaaagtctaccatgagaagacccagccggtcattgactattatagtaagaaaggtattctcaaacgcgtagatgggaaccaaggaatcgacaacgttgtggcagaagtcctggggattctgggttggagcgataagtaatga

SEQ ID NO: 2296 - protein, 231 aa, synthetic construct
  REGION 1..231: note = Variant of adenylate kinase
MHHHHHHGGSGMGAYLVFLGPPGAGKGTQGRRISAKTGIPHISTGDILRDIVAKQNDEVASKIKEIMEKGELVPDELGNAVVKRRLSEKDCEKGFILDGFPRTVRQAEYLDSFLESQNRQLTAAVLFKVPEDEVVQRLLSRLICPKCGRIYNMIFLPPKEDELCDDCGVGLVQRDDDKEETVRHRLKVYHEKTQPVIDYYSKKGILKRVDGNQGIDNVVAEVLGILGWSDK

SEQ ID NO: 2297 - DNA, 699 bp, synthetic construct
  misc_feature 1..699: note = Variant of adenylate kinase
  source 1..699: mol_type = other DNA
atgcaccatcatcaccatcacgggggctccggcatgggggcatatctggtgttcttaggtccgccgggcgcgggaaaaggtacccaaggccgtcgcatttcggcaaagactggcatcccgcatattagcacgggcgatatcctgcgtgacatcgtcgctaagcaaaacgatgaagttgcctcgaaaattaaagagatcatggagaaaggtgaactcgttccagatgaactgggtaatgcggtagtaaaacgccgcctgtcggagaaagactgcgaaaaaggctttattttggatggtttcccgcgtaccgtgcgccaagcggaatatctggatagttttcttgaaagccagaatcgccagttgacagccgccgtgctgtttaacgtccccgaagatgaagttgttcagcgtctgctgtctcgcctgatctgtccgaaatgcgggcgtatctacaacatgatttttctgccaccaaaagaagacgagctgtgtgacgattgcggtgtcggcttagtacagcgtttagatgataaggaagaaacggtccgtcaccgcctgaaagtctaccttgagaagacccagccggtcattgactattatagtaagaaaggtattctcaaacgcgtagatgggtcgcaaggaatcgacaacgttgtggcagaagtcctggggattctgggttggagcgataagtaatga

SEQ ID NO: 2298 - protein, 231 aa, synthetic construct
  REGION 1..231: note = Variant of adenylate kinase
MHHHHHHGGSGMGAYLVFLGPPGAGKGTQGRRISAKTGIPHISTGDILRDIVAKQNDEVASKIKEIMEKGELVPDELGNAVVKRRLSEKDCEKGFILDGFPRTVRQAEYLDSFLESQNRQLTAAVLFNVPEDEVVQRLLSRLICPKCGRIYNMIFLPPKEDELCDDCGVGLVQRLDDKEETVRHRLKVYLEKTQPVIDYYSKKGILKRVDGSQGIDNVVAEVLGILGWSDK

SEQ ID NO: 2299 - DNA, 699 bp, synthetic construct
  misc_feature 1..699: note = Variant of adenylate kinase
  source 1..699: mol_type = other DNA
atgcaccatcatcaccatcacgggggctccggcatgggggcatatctggtgttcttaggtcgtccgggcgcgggaaaaggtacccaaggccgtcgcatttcggcaaagactggcatcccgcatattagcacgggcgatatcctgcgtgacatcgtcgctaagcaaaacgatgaagttgcctcgagcattaaagagatcatggagaaaggtgaactcgttccagatgaactgggcaatgcggtagtaaaacgccgcctgtcggagaaagactgcgaaaaaggctttattttggatggtttcccgcgtaccgtgcgccaagcggaatatctggatagttttcttgaaagccagaatcgccagttgacagccgccgtgctgttcaaagtccccgaagatgaagttgttcagcgtctgctgtctcgcctgatctgtccgaaatgcgggcgtatctacaacatgatttttctgccaccaaaagaagacgagctgtgtgacgattgcggtgtcggcttagtacagcgtgatgatgataaggaagaaacggtccgtcaccgcctgaaagtctaccatgagaagacccagccggtcattgactattatagtaagaaaggtattctcaaacgcgtagatgggagccaaggaatcgacaacgttgtggcagaagtcctggggattctgggttggagcgataagtaatga

SEQ ID NO: 2300 - protein, 231 aa, synthetic construct
  REGION 1..231: note = Variant of adenylate kinase
MHHHHHHGGSGMGAYLVFLGRPGAGKGTQGRRISAKTGIPHISTGDILRDIVAKQNDEVASSIKEIMEKGELVPDELGNAVVKRRLSEKDCEKGFILDGFPRTVRQAEYLDSFLESQNRQLTAAVLFKVPEDEVVQRLLSRLICPKCGRIYNMIFLPPKEDELCDDCGVGLVQRDDDKEETVRHRLKVYHEKTQPVIDYYSKKGILKRVDGSQGIDNVVAEVLGILGWSDK

SEQ ID NO: 2301 - DNA, 699 bp, synthetic construct
  misc_feature 1..699: note = Variant of adenylate kinase
  source 1..699: mol_type = other DNA
atgcaccatcatcaccatcacgggggctccggcatgggggcatatctggtgttcttaggtcctccgggcgcgggaaaaggtacccaaggccgtcgcatttcggcaaagactggcatcccgcatattagcacgggcgatatcctgcgtgacatcgtcgctacacagaacgatgaagttgcctcgaaaattaaagagatcatggagaaaggtgaactcgttccagatgaactgggcaatgcggtagtaaaacgccgcctgtcggagaaagactgcgaaaaaggctttattttggatggtttcccgcgtaccgtgcgccaagcggaatatctggatagttttcttgaaagccagaatcgccagttgacagccgccgtgctgttcaaagtccccgaagatgaagttgttcagcgtctgctgtctcgcctgatctgtccgaaatgcgggcgtatctacaacatgatttttctgccaccaaaagaagacgagctgtgtgacgattgcggtgtcggcttagtacagcgtgatgatgataagccggaaacggtccgtcaccgcctgaaagtctaccatgagaagacccagccggtcattgactattatagtaagaaaggtattctcaaacgcgtagatgggtcgcaaggaatcgacaacgttgtggcagaagtcctggggattctgggttggagcgataagtaatga

SEQ ID NO: 2302 - protein, 231 aa, synthetic construct
  REGION 1..231: note = Variant of adenylate kinase
MHHHHHHGGSGMGAYLVFLGPPGAGKGTQGRRISAKTGIPHISTGDILRDIVATQNDEVASKIKEIMEKGELVPDELGNAVVKRRLSEKDCEKGFILDGFPRTVRQAEYLDSFLESQNRQLTAAVLFKVPEDEVVQRLLSRLICPKCGRIYNMIFLPPKEDELCDDCGVGLVQRDDDKPETVRHRLKVYHEKTQPVIDYYSKKGILKRVDGSQGIDNVVAEVLGILGWSDK

SEQ ID NO: 2303 - DNA, 699 bp, synthetic construct
  misc_feature 1..699: note = Variant of adenylate kinase
  source 1..699: mol_type = other DNA
atgcaccatcatcaccatcacgggggctccggcatgggggcatatctggtgttcttaggtccgccgggcgcgggaaaaggtacccaaggccgtcgcatttcggcaaagactggcatcccgcatattagcacgggcgatatcctgcgtgacatcgtcgctacacagaacgatgaagttgcctcgaaaattaaagagatcatggagaaaggtgaactcgttccagatgaactgggtaatgcggtagtaaaacgccgcctgtcggagaaagactgcgaaaaaggctttattttggatggtttcccgcgtaccgtgcgccaagcggaatatctggatagttttcttgaaagccagaatcgccagttgacagccgccgtgctgttcaaagtccccgaagatgaagttgttcagcgtctgctgtctcgcctgatctgtccgaaatgcgggcgtatctacaacatgatttttctgccaccaaaagaagacgagctgtgtgacgattgcggtgtcggcttagtacagcgtgatgatgataaggaagaaacggtccgtcaccgcctgaaagtctaccgtgagaagacccagccggtcattgactattatagtaagaaaggtattctcaaacgcgtagatgggtcgcaaggaatcgacaacgttgtggcagaagtcctggggattctgggttggagcgataagtaatga

SEQ ID NO: 2304 - protein, 231 aa, synthetic construct
  REGION 1..231: note = Variant of adenylate kinase
MHHHHHHGGSGMGAYLVFLGPPGAGKGTQGRRISAKTGIPHISTGDILRDIVATQNDEVASKIKEIMEKGELVPDELGNAVVKRRLSEKDCEKGFILDGFPRTVRQAEYLDSFLESQNRQLTAAVLFKVPEDEVVQRLLSRLICPKCGRIYNMIFLPPKEDELCDDCGVGLVQRDDDKEETVRHRLKVYREKTQPVIDYYSKKGILKRVDGSQGIDNVVAEVLGILGWSDK

SEQ ID NO: 2305 - DNA, 699 bp, synthetic construct
  misc_feature 1..699: note = Variant of adenylate kinase
  source 1..699: mol_type = other DNA
atgcaccatcatcaccatcacgggggctccggcatgggggcatatctggtgttcttaggtcgtccgggcgcgggaaaaggtacccaaggccgtcgcatttcggcaaagactggcatcccgcatattagcacgggcgatatcctgcgtgacatcgtcgctaaaagcaacgatgaagttgcctcgaaaattaaagagatcatggagaaaggtgaactcgttccagatgaactgggtaatgcggtagtaaaacgccgcctgtcggagaaagactgcgaaaaaggctttattttggatggtttcccgcgtaccgtgcgccaagcggaatatctggatagttttcttgaaagccagaatcgccagttgacagccgccgtgctgttcaaagtccccgaagatgaagttgttcagcgtctgctgtctcgcctgatctgtccgaaatgcgggcgtatctacaacatgatttttctgccaccaaaagaagacgagctgtgtgacgattgcggtgtcggcttagtacagcgtgatgatgataaggaagaaacggtccgtcaccgcctgaaagtctaccatgagaagacccagccggtcattgactattatagtaagaaaggtattctcaaacgcgtagatgggtcgcaaggaatcgacaacgttgtggcagaagtcctggggattctgggttggagcgataagtaatga

SEQ ID NO: 2306 - protein, 231 aa, synthetic construct
  REGION 1..231: note = Variant of adenylate kinase
MHHHHHHGGSGMGAYLVFLGRPGAGKGTQGRRISAKTGIPHISTGDILRDIVAKSNDEVASKIKEIMEKGELVPDELGNAVVKRRLSEKDCEKGFILDGFPRTVRQAEYLDSFLESQNRQLTAAVLFKVPEDEVVQRLLSRLICPKCGRIYNMIFLPPKEDELCDDCGVGLVQRDDDKEETVRHRLKVYHEKTQPVIDYYSKKGILKRVDGSQGIDNVVAEVLGILGWSDK

SEQ ID NO: 2307 - DNA, 699 bp, synthetic construct
  misc_feature 1..699: note = Variant of adenylate kinase
  source 1..699: mol_type = other DNA
atgcaccatcatcaccatcacgggggctccggcatgggggcatatctggtgttcttaggtcgtccgggcgcgggaaaaggtacccaaggccgtcgcatttcggcaaagactggcatcccgcatattagcacgggcgatatcctgcgtgacatcgtcgctacacagaacgatgaagttgcctcggaaattaaagagatcatggagaaaggtgaactcgttccagatgaactgggtaatgcggtagtaaaacgccgcctgtcggagaaagactgcgaaaaaggctttattttggatggtttcccgcgtaccgtgcgccaagcggaatatctggatagttttcttgaaagccagaatcgccagttgacagccgccgtgctgttcaaagtccccgaagatgaagttgttcagcgtctgctgtctcgcctgatctgtccgaaatgcgggcgtatctacaacatgatttttctgccaccaaaagaagacgagctgtgtgacgattgcggtgtcggcttagtacagcgtgatgatgataaggaagaaacggtccgtcaccgcctgaaagtctaccttgagaagacccagccggtcattgactattatagtaagaaaggtattctcaaacgcgtagatgggagccaaggaatcgacaacgttgtggcagaagtcctggggattctgggttggagcgataagtaatga

SEQ ID NO: 2308 - protein, 231 aa, synthetic construct
  REGION 1..231: note = Variant of adenylate kinase
MHHHHHHGGSGMGAYLVFLGRPGAGKGTQGRRISAKTGIPHISTGDILRDIVATQNDEVASEIKEIMEKGELVPDELGNAVVKRRLSEKDCEKGFILDGFPRTVRQAEYLDSFLESQNRQLTAAVLFKVPEDEVVQRLLSRLICPKCGRIYNMIFLPPKEDELCDDCGVGLVQRDDDKEETVRHRLKVYLEKTQPVIDYYSKKGILKRVDGSQGIDNVVAEVLGILGWSDK

SEQ ID NO: 2309 - DNA, 699 bp, synthetic construct
  misc_feature 1..699: note = Variant of adenylate kinase
  source 1..699: mol_type = other DNA
atgcaccatcatcaccatcacgggggctccggcatgggggcatatctggtgttcttaggtcgtccgggcgcgggaaaaggtacccaaggccgtcgcatttcggcaaagactggcatcccgcatattagcacgggcgatatcctgcgtgacatcgtcgctaaacagaacgatgaagttgcctcgaaaattaaagagatcatggagaaaggtgaactcgttccagatgaactgggcaatgcggtagtaaaagcgcgcctgtcggagaaagactgcgaaaaaggctttattttggatggtttcccgcgtaccgtgcgccaagcggaatatctggatagttttcttgaaagccagaatcgccagttgacagccgccgtgctgttcaaagtccccgaagatgaagttgttcagcgtctgctgtctcgcctgatctgtccgaaatgcgggcgtatctacaacatgatttttctgccaccaaaagaagacgagctgtgtgacgattgcggtgtcggcttagtacagcgtgatgatgataaggaagaaacggtccgtcaccgcctgaaagtctaccttgagaagacccagccggtcattgactattatagtaagaaaggtattctcaaacgcgtagatgggtcgcaaggaatcgacaacgttgtggcagaagtcctggggattctgggttggagcgataagtaatga

SEQ ID NO: 2310 - protein, 231 aa, synthetic construct
  REGION 1..231: note = Variant of adenylate kinase
MHHHHHHGGSGMGAYLVFLGRPGAGKGTQGRRISAKTGIPHISTGDILRDIVAKQNDEVASKIKEIMEKGELVPDELGNAVVKARLSEKDCEKGFILDGFPRTVRQAEYLDSFLESQNRQLTAAVLFKVPEDEVVQRLLSRLICPKCGRIYNMIFLPPKEDELCDDCGVGLVQRDDDKEETVRHRLKVYLEKTQPVIDYYSKKGILKRVDGSQGIDNVVAEVLGILGWSDK

SEQ ID NO: 2311 - DNA, 699 bp, synthetic construct
  misc_feature 1..699: note = Variant of adenylate kinase
  source 1..699: mol_type = other DNA
atgcaccatcatcaccatcacgggggctccggcatgggggcatatctggtgttcttaggtcgtccgggcgcgggaaaaggtacccaaggccgtcgcatttcggcaaagactggcatcccgcatattagcacgggcgatatcctgcgtgacatcgtcgctaaaagcaacgatgaagttgcctcgaaaattaaagagatcatggagaaaggtgaactcgttccagatgaactgggtaatgcggtagtaaaacgccgcctgtcggagaaagactgcgaaaaaggctttattttggatggtttcccgcgtaccgtgcgccaagcggaatatctggatagttttcttgaaagccagaatcgccagttgacagccgccgtgctgttcaaagtccccgaagatgaagttgttcagcgtctgctgtctcgcctgatctgtccgaaatgcgggcgtatctacaacatgatttttctgccaccaaaagaagacgagctgtgtgacgattgcggtgtcggcttagtacagcgtgatgatgataaggaagaaacggtccgtcaccgcctgaaagtctaccttgagaagacccagccggtcattgactattatagtaagaaaggtattctcaaacgcgtagatgggtcgcaaggaatcgacaacgttgtggcagaagtcctggggattctgggttggagcgataagtaatga

SEQ ID NO: 2312 - protein, 231 aa, synthetic construct
  REGION 1..231: note = Variant of adenylate kinase
MHHHHHHGGSGMGAYLVFLGRPGAGKGTQGRRISAKTGIPHISTGDILRDIVAKSNDEVASKIKEIMEKGELVPDELGNAVVKRRLSEKDCEKGFILDGFPRTVRQAEYLDSFLESQNRQLTAAVLFKVPEDEVVQRLLSRLICPKCGRIYNMIFLPPKEDELCDDCGVGLVQRDDDKEETVRHRLKVYLEKTQPVIDYYSKKGILKRVDGSQGIDNVVAEVLGILGWSDK

SEQ ID NO: 2313 - DNA, 699 bp, synthetic construct
  misc_feature 1..699: note = Variant of adenylate kinase
  source 1..699: mol_type = other DNA
atgcaccatcatcaccatcacgggggctccggcatgggggcatatctggtgttcttaggtcgtccgggcgcgggaaaaggtacccaaggccgtcgcatttcggcaaagactggcatcccgcatattagcacgggcgatatcctgcgtgacatcgtcgctaagcaaaacgatgaagttgcctcgagcattaaagagatcatggagaaaggtgaactcgttccagatgaactgggtaatgcggtagtaaaacgccgcctgtcggagaaagactgcgaaaaaggctttattttggatggtttcccgcgtaccgtgcgccaagcggaatatctggatagttttcttgaaagccagaatcgccagttgacagccgccgtgctgttcaaagtccccgaagatgaagttgttcagcgtctgctgtctcgcctgatctgtccgaaatgcgggcgtatctacaacatgatttttctgccaccaaaagaagacgagctgtgtgacgattgcggtgtcggcttagtacagcgtgatgatgataaggaagaaacggtccgtcaccgcctgaaagtctaccttgagaagacccagccggtcattgactattatagtaagaaaggtattctcaaacgcgtagatgggtcgcaaggaatcgacaacgttgtggcagaagtcctggggattctgggttggagcgataagtaatga

SEQ ID NO: 2314 - protein, 231 aa, synthetic construct
  REGION 1..231: note = Variant of adenylate kinase
MHHHHHHGGSGMGAYLVFLGRPGAGKGTQGRRISAKTGIPHISTGDILRDIVAKQNDEVASSIKEIMEKGELVPDELGNAVVKRRLSEKDCEKGFILDGFPRTVRQAEYLDSFLESQNRQLTAAVLFKVPEDEVVQRLLSRLICPKCGRIYNMIFLPPKEDELCDDCGVGLVQRDDDKEETVRHRLKVYLEKTQPVIDYYSKKGILKRVDGSQGIDNVVAEVLGILGWSDK

SEQ ID NO: 2315 - DNA, 699 bp, synthetic construct
  misc_feature 1..699: note = Variant of adenylate kinase
  source 1..699: mol_type = other DNA
atgcaccatcatcaccatcacgggggctccggcatgggggcatatctggtgttcttaggtcgtccgggcgcgggaaaaggtacccaaggccgtcgcatttcggcaaagactggcatcccgcatattagcacgggcgatatcctgcgtgacatcgtcgctaaacagaacgatgaagttgcctcgaaaattaaagagatcatggagaaaggtgaactcgttccagatgaactgggcaatgcggtagtaaaacgccgcctgtcggagaaagactgcgaaaaaggctttattttggatggtttcccgcgtaccgtgcgccaagcggaatatctggatagttttcttgaaagccagaatcgccagttgacagccgccgtgctgttcaaagtccccgaagatgaagttgttcagcgtctgctgtctcgcctgatctgtccgaaatgcgggcgtatctacaacatgatttttctgccaccaaaagaagacgagctgtgtgacgattgcggtgtcggcttagtacagcgtgatgatgataagccggaaacggtccgtcaccgcctgaaagtctaccttgagaagacccagccggtcattgactattatagtaagaaaggtattctcaaacgcgtagatgggagccaaggaatcgacaacgttgtggcagaagtcctggggattctgggttggagcgataagtaatga

SEQ ID NO: 2316 - protein, 231 aa, synthetic construct
  REGION 1..231: note = Variant of adenylate kinase
MHHHHHHGGSGMGAYLVFLGRPGAGKGTQGRRISAKTGIPHISTGDILRDIVAKQNDEVASKIKEIMEKGELVPDELGNAVVKRRLSEKDCEKGFILDGFPRTVRQAEYLDSFLESQNRQLTAAVLFKVPEDEVVQRLLSRLICPKCGRIYNMIFLPPKEDELCDDCGVGLVQRDDDKPETVRHRLKVYLEKTQPVIDYYSKKGILKRVDGSQGIDNVVAEVLGILGWSDK

SEQ ID NO: 2317 - DNA, 699 bp, synthetic construct
  misc_feature 1..699: note = Variant of adenylate kinase
  source 1..699: mol_type = other DNA
atgcaccatcatcaccatcacgggggctccggcatgggggcatatctggtgttcttaggtccgccgggcgcgggaaaaggtacccaaggccgtcgcatttcggcaaagactggcatcccgcatattagcacgggcgatatcctgcgtgacatcgtcgctaagcaaaacgatgaagttgcctcgaaaattaaagagatcatggagaaaggtgaactcgttccagatgaactgggtaatgcggtagtaaaacgccgcctgtcggagaaagactgcgaaaaaggctttattttggatggtttcccgcgtaccgtgcgccaagcggaatatctggatagttttcttgaaagccagaatcgccagttgacagccgccgtgctgttcaaagtccccgaagatgaagttgttcagcgtctgctgtctcgcctgatctgtccgaaatgcgggcgtatctacaacatgatttttctgccaccaaaagaagacgagctgtgtgacgattgcggtgtcggcttagtacagcgtctggatgataaggaagaaacggtccgtcaccgcctgaaagtctaccttgagaagacccagccggtcattgactattatagtaagaaaggtattctcaaacgcgtagatgggtcgcaaggaatcgacaacgttgtggcagaagtcctggggattctgggttggagcgataagtaatga

SEQ ID NO: 2318 - protein, 231 aa, synthetic construct
  REGION 1..231: note = Variant of adenylate kinase
MHHHHHHGGSGMGAYLVFLGPPGAGKGTQGRRISAKTGIPHISTGDILRDIVAKQNDEVASKIKEIMEKGELVPDELGNAVVKRRLSEKDCEKGFILDGFPRTVRQAEYLDSFLESQNRQLTAAVLFKVPEDEVVQRLLSRLICPKCGRIYNMIFLPPKEDELCDDCGVGLVQRLDDKEETVRHRLKVYLEKTQPVIDYYSKKGILKRVDGSQGIDNVVAEVLGILGWSDK

SEQ ID NO: 2319 - DNA, 699 bp, synthetic construct
  misc_feature 1..699: note = Variant of adenylate kinase
  source 1..699: mol_type = other DNA
atgcaccatcatcaccatcacgggggctccggcatgggggcatatctggtgttcttaggtccgccgggcgcgggaaaaggtacccaaggccgtcgcatttcggcaaagactggcatcccgcatattagcacgggcgatatcctgcgtgacatcgtcgctaaaagcaacgatgaagttgcctcggaaattaaagagatcatggagaaaggtgaactcgttccagatgaactgggcaatgcggtagtaaaacgccgcctgtcggagaaagactgcgaaaaaggctttattttggatggtttcccgcgtaccgtgcgccaagcggaatatctggatagttttcttgaaagccagaatcgccagttgacagccgccgtgctgttcaaagtccccgaagatgaagttgttcagcgtctgctgtctcgcctgatctgtccgaaatgcgggcgtatctacaacatgatttttctgccaccaaaagaagacgagctgtgtgacgattgcggtgtcggcttagtacagcgtgatgatgataaggaagaaacggtccgtcaccgcctgaaagtctaccatgagaagacccagccggtcattgactattatagtaagaaaggtattctcaaacgcgtagatgggaaccaaggaatcgacaacgttgtggcagaagtcctggggattctgggttggagcgataagtaatga

SEQ ID NO: 2320 - protein, 231 aa, synthetic construct
  REGION 1..231: note = Variant of adenylate kinase
MHHHHHHGGSGMGAYLVFLGPPGAGKGTQGRRISAKTGIPHISTGDILRDIVAKSNDEVASEIKEIMEKGELVPDELGNAVVKRRLSEKDCEKGFILDGFPRTVRQAEYLDSFLESQNRQLTAAVLFKVPEDEVVQRLLSRLICPKCGRIYNMIFLPPKEDELCDDCGVGLVQRDDDKEETVRHRLKVYHEKTQPVIDYYSKKGILKRVDGNQGIDNVVAEVLGILGWSDK

SEQ ID NO: 2321 - DNA, 699 bp, synthetic construct
  misc_feature 1..699: note = Variant of adenylate kinase
  source 1..699: mol_type = other DNA
atgcaccatcatcaccatcacgggggctccggcatgggggcatatctggtgttcttaggtcctccgggtgcgggaaaaggtacccaaggccgtcgcatttcggcaaagactggcatcccgcatattagcacgggcgatatcctgcgtgacatcgtcgctacacagaacgatgaagttgcctcggaaattaaagagatcatggagaaaggtgaactcgttccagatgaactgggtaatgcggtagtaaaagcgcgcctgtcggagaaagactgcgaaaaaggctttattttggatggtttcccgcgtaccgtgcgccaagcggaatatctggatagttttcttgaaagccagaatcgccagttgacagccgccgtgctgttcaaagtccccgaagatgaagttgttcagcgtctgctgtctcgcctgatctgtccgaaatgcgggcgtatctacaacatgatttttctgccaccaaaagaagacgagctgtgtgacgattgcggtgtcggcttagtacagcgtgatgatgataaggaagaaacggtccgtcaccgcctgaaagtctaccttgagaagacccagccggtcattgactattatagtaagaaaggtattctcaaacgcgtagatgggtcgcaaggaatcgacaacgttgtggcagaagtcctggggattctgggttggagcgataagtaatga

SEQ ID NO: 2322 - protein, 231 aa, synthetic construct
  REGION 1..231: note = Variant of adenylate kinase
MHHHHHHGGSGMGAYLVFLGPPGAGKGTQGRRISAKTGIPHISTGDILRDIVATQNDEVASEIKEIMEKGELVPDELGNAVVKARLSEKDCEKGFILDGFPRTVRQAEYLDSFLESQNRQLTAAVLFKVPEDEVVQRLLSRLICPKCGRIYNMIFLPPKEDELCDDCGVGLVQRDDDKEETVRHRLKVYLEKTQPVIDYYSKKGILKRVDGSQGIDNVVAEVLGILGWSDK

SEQ ID NO: 2323 - DNA, 699 bp, synthetic construct
  misc_feature 1..699: note = Variant of adenylate kinase
  source 1..699: mol_type = other DNA
atgcaccatcatcaccatcacgggggctccggcatgggggcatatctggtgttcttaggtccgccgggcgcgggaaaaggtacccaaggccgtcgcatttcggcaaagactggcatcccgcatattagcacgggcgatatcctgcgtgacatcgtcgctaagcaaaacgatgaagttgcctcgaaaattaaagagatcatggagaaaggtgaactcgttccagatgaactgggtaatgcggtggtaaaacgccgcctgtcggagaaagactgcgaaaaaggctttattttggatggtttcccgcgtaccgtgcgccaagcggaatatctggatagttttcttgaaagccagaatcgccagttgacagccgccgtgctgattaacgtccccgaagatgaagttgttcagcgtctgctgtctcgcctgatctgtccgaaatgcgggcgtatctacaacatgatttttctgccaccaaaagaagacgagctgtgtgacgattgcggtgtcggcttagtacagcgtttagatgataaggaagaaacggtccgtcaccgcctgaaagtctaccttgagaagacccagccggtcattgactattatagtaagaaaggtattctcaaacgcgtagatgggtcgcaaggaatcgacaacgttgtggcagaagtcctgggggcgctgggttggagcgataagtaatga

SEQ ID NO: 2324 - protein, 231 aa, synthetic construct
  REGION 1..231: note = Variant of adenylate kinase
MHHHHHHGGSGMGAYLVFLGPPGAGKGTQGRRISAKTGIPHISTGDILRDIVAKQNDEVASKIKEIMEKGELVPDELGNAVVKRRLSEKDCEKGFILDGFPRTVRQAEYLDSFLESQNRQLTAAVLINVPEDEVVQRLLSRLICPKCGRIYNMIFLPPKEDELCDDCGVGLVQRLDDKEETVRHRLKVYLEKTQPVIDYYSKKGILKRVDGSQGIDNVVAEVLGALGWSDK

SEQ ID NO: 2325 - DNA, 699 bp, synthetic construct
  misc_feature 1..699: note = Variant of adenylate kinase
  source 1..699: mol_type = other DNA
atgcaccatcatcaccatcacgggggctccggcatgggggcatatctggtgttcttaggtcctccgggcgcgggaaaaggtacccaaggccgtcgcatttcggcaaagactggcatcccgcatattagcacgggcgatatcctgcgtgacatcgtcgctacacagaacgatgaagttgcctcggaaattaaagagatcatggagaaaggtgaactcgttccagatgaactgggtaatgcggtagtaaaacgccgcctgtcggagaaagactgcgaaaaaggctttattttggatggtttcccgcgtaccgtgcgccaagcggaatatctggatagttttcttgaaagccagaatcgccagttgacagccgccgtgctgttcaaagtccccgaagatgaagttgttcagcgtctgctgtctcgcctgatctgtccgaaatgcgggcgtatctacaacatgatttttctgccaccaaaagaagacgagctgtgtgacgattgcggtgtcggcttagtacagcgtgatgatgataaggaagaaacggtccgtcaccgcctgaaagtctaccttgagaagacccagccggtcattgactattatagtaagaaaggtattctcaaacgcgtagatgggtcgcaaggaatcgacaacgttgtggcagaagtcctggggattctgggttggagcgataagtaatga

SEQ ID NO: 2326 - protein, 231 aa, synthetic construct
  REGION 1..231: note = Variant of adenylate kinase
MHHHHHHGGSGMGAYLVFLGPPGAGKGTQGRRISAKTGIPHISTGDILRDIVATQNDEVASEIKEIMEKGELVPDELGNAVVKRRLSEKDCEKGFILDGFPRTVRQAEYLDSFLESQNRQLTAAVLFKVPEDEVVQRLLSRLICPKCGRIYNMIFLPPKEDELCDDCGVGLVQRDDDKEETVRHRLKVYLEKTQPVIDYYSKKGILKRVDGSQGIDNVVAEVLGILGWSDK

SEQ ID NO: 2327 - DNA, 699 bp, synthetic construct
  misc_feature 1..699: note = Variant of adenylate kinase
  source 1..699: mol_type = other DNA
atgcaccatcatcaccatcacgggggctccggcatgggggcatatctggtgttcttaggtccgccgggcgcgggaaaaggtacccaaggccgtcgcatttcggcaaagactggcatcccgcatattagcacgggcgatatcctgcgtgacatcgtcgctaagcaaaacgatgaagttgcctcgaaaattaaagagatcatggagaaaggtgaactcgttccagatgaactgggtaatgcggtagtaaaacgccgcctgtcggagaaagactgcgaaaaaggctttattttggatggttatccgcgtacctttcgccaagcggaatatctggatagttttcttgaaagccagaatcgccagttgacagccgccgtgctgttcaaagtccccgaagatgaagttgttcagcgtctgctgtctcgcctgatctgtccgaaatgcgggcgtatctacaacatgatttttctgccaccaaaagaagacgagctgtgtgacgattgcggtgtcggcttagtacagcgtgatgatgataaggaagaaacggtccgtcaccgcctgaaagtctaccttgagaagacccagccggtcattgactattatagtaagaaaggtattctcaaacgcgtagatgggtcgcaaggaatcgacaacgttgtggcagaagtcctggggattctgggttggagcgataagtaatga

SEQ ID NO: 2328 - protein, 231 aa, synthetic construct
  REGION 1..231: note = Variant of adenylate kinase
MHHHHHHGGSGMGAYLVFLGPPGAGKGTQGRRISAKTGIPHISTGDILRDIVAKQNDEVASKIKEIMEKGELVPDELGNAVVKRRLSEKDCEKGFILDGYPRTFRQAEYLDSFLESQNRQLTAAVLFKVPEDEVVQRLLSRLICPKCGRIYNMIFLPPKEDELCDDCGVGLVQRDDDKEETVRHRLKVYLEKTQPVIDYYSKKGILKRVDGSQGIDNVVAEVLGILGWSDK

SEQ ID NO: 2329 - DNA, 699 bp, synthetic construct
  misc_feature 1..699: note = Variant of adenylate kinase
  source 1..699: mol_type = other DNA
atgcaccatcatcaccatcacgggggctccggcatgggggcatatctggtgttcttaggtcctccgggcgcgggaaaaggtacccaaggccgtcgcatttcggcaaagactggcatcccgcatattagcacgggcgatatcctgcgtgacatcgtcgctaaaagcaacgatgaagttgcctcggaaattaaagagatcatggagaaaggtgaactcgttccagatgaactgggcaatgcggtagtaaaacgccgcctgtcggagaaagactgcgaaaaaggctttattttggatggtttcccgcgtaccgtgcgccaagcggaatatctggatagttttcttgaaagccagaatcgccagttgacagccgccgtgctgttcaaagtccccgaagatgaagttgttcagcgtctgctgtctcgcctgatctgtccgaaatgcgggcgtatctacaacatgatttttctgccaccaaaagaagacgagctgtgtgacgattgcggtgtcggcttagtacagcgtgatgatgataaggaagaaacggtccgtcaccgcctgaaagtctaccgtgagaagacccagccggtcattgactattatagtaagaaaggtattctcaaacgcgtagatgggaaccaaggaatcgacaacgttgtggcagaagtcctggggattctgggttggagcgataagtaatga

SEQ ID NO: 2330 - protein, 231 aa, synthetic construct
  REGION 1..231: note = Variant of adenylate kinase
MHHHHHHGGSGMGAYLVFLGPPGAGKGTQGRRISAKTGIPHISTGDILRDIVAKSNDEVASEIKEIMEKGELVPDELGNAVVKRRLSEKDCEKGFILDGFPRTVRQAEYLDSFLESQNRQLTAAVLFKVPEDEVVQRLLSRLICPKCGRIYNMIFLPPKEDELCDDCGVGLVQRDDDKEETVRHRLKVYREKTQPVIDYYSKKGILKRVDGNQGIDNVVAEVLGILGWSDK

SEQ ID NO: 2331 - DNA, 699 bp, synthetic construct
  misc_feature 1..699: note = Variant of adenylate kinase
  source 1..699: mol_type = other DNA
atgcaccatcatcaccatcacgggggctccggcatgggggcatatctggtgttcttaggtcctccgggcgcgggaaaaggtacccaaggccgtcgcatttcggcaaagactggcatcccgcatattagcacgggcgatatcctgcgtgacatcgtcgctacaagcaacgatgaagttgcctcgaaaattaaagagatcatggagaaaggtgaactcgttccagatgaactgggcaatgcggtagtaaaacgccgcctgtcggagaaagactgcgaaaaaggctttattttggatggtttcccgcgtaccgtgcgccaagcggaatatctggatagttttcttgaaagccagaatcgccagttgacagccgccgtgctgttcaaagtccccgaagatgaagttgttcagcgtctgctgtctcgcctgatctgtccgaaatgcgggcgtatctacaacatgatttttctgccaccaaaagaagacgagctgtgtgacgattgcggtgtcggcttagtacagcgtgatgatgataaggaagaaacggtccgtcaccgcctgaaagtctaccttgagaagacccagccggtcattgactattatagtaagaaaggtattctcaaacgcgtagatgggtcgcaaggaatcgacaacgttgtggcagaagtcctggggattctgggttggagcgataagtaatga

SEQ ID NO: 2332 - protein, 231 aa, synthetic construct
  REGION 1..231: note = Variant of adenylate kinase
MHHHHHHGGSGMGAYLVFLGPPGAGKGTQGRRISAKTGIPHISTGDILRDIVATSNDEVASKIKEIMEKGELVPDELGNAVVKRRLSEKDCEKGFILDGFPRTVRQAEYLDSFLESQNRQLTAAVLFKVPEDEVVQRLLSRLICPKCGRIYNMIFLPPKEDELCDDCGVGLVQRDDDKEETVRHRLKVYLEKTQPVIDYYSKKGILKRVDGSQGIDNVVAEVLGILGWSDK

SEQ ID NO: 2333 - DNA, 699 bp, synthetic construct
  misc_feature 1..699: note = Variant of adenylate kinase
  source 1..699: mol_type = other DNA
atgcaccatcatcaccatcacgggggctccggcatgggggcatatctggtgttcttaggtcgtccgggcgcgggaaaaggtacccaaggccgtcgcatttcggcaaagactggcatcccgcatattagcacgggcgatatcctgcgtgacatcgtcgctaaaagcaacgatgaagttgcctcgaaaattaaagagatcatggagaaaggtgaactcgttccagatgaactgggcaatgcggtagtaaaacgccgcctgtcggagaaagactgcgaaaaaggctttattttggatggtttcccgcgtaccgtgcgccaagcggaatatctggatagttttcttgaaagccagaatcgccagttgacagccgccgtgctgttcaaagtccccgaagatgaagttgttcagcgtctgctgtctcgcctgatctgtccgaaatgcgggcgtatctacaacatgatttttctgccaccaaaagaagacgagctgtgtgacgattgcggtgtcggcttagtacagcgtgatgatgataaggaagaaacggtccgtcaccgcctgaaagtctaccttgagaagacccagccggtcattgactattatagtaagaaaggtattctcaaacgcgtagatgggaaccaaggaatcgacaacgttgtggcagaagtcctggggattctgggttggagcgataagtaatga

SEQ ID NO: 2334 - protein, 231 aa, synthetic construct
  REGION 1..231: note = Variant of adenylate kinase
MHHHHHHGGSGMGAYLVFLGRPGAGKGTQGRRISAKTGIPHISTGDILRDIVAKSNDEVASKIKEIMEKGELVPDELGNAVVKRRLSEKDCEKGFILDGFPRTVRQAEYLDSFLESQNRQLTAAVLFKVPEDEVVQRLLSRLICPKCGRIYNMIFLPPKEDELCDDCGVGLVQRDDDKEETVRHRLKVYLEKTQPVIDYYSKKGILKRVDGNQGIDNVVAEVLGILGWSDK

SEQ ID NO: 2335 - DNA, 699 bp, synthetic construct
  misc_feature 1..699: note = Variant of adenylate kinase
  source 1..699: mol_type = other DNA
atgcaccatcatcaccatcacgggggctccggcatgggggcatatctggtgttcttaggtccgccgggcgcgggaaaaggtacccaaggccgtcgcatttcggcaaagactggcatcccgcatattagcacgggcgatatcctgcgtgacatcgtcgctaagcaaaacgatgaagttgcctcgagtattaaagagatcatggagaaaggtgaactcgttccagatgaactgggtaatgcggtagtaaaacgccgcctgtcggagaaagactgcgaaaaaggctttattttggatggtttcccgcgtaccgtgcgccaagcggaatatctggatagttttcttgaaagccagaatcgccagttgacagccgccgtgctgttcaaagtccccgaagatgaagttgttcagcgtctgctgtctcgcctgatctgtccgaaatgcgggcgtatctacaacatgatttttctgccaccaaaagaagacgagctgtgtgacgattgcggtgtcggcttagtacagcgtgatgatgataaggaagaaacggtccgtcaccgcctgaaagtctaccttgagaagacccagccggtcattgactattatagtaagaaaggtattctcaaacgcgtagatgggtcgcaaggaatcgacaacgttgtggcagaagtcctggggattctgggttggagcgataagtaatga

SEQ ID NO: 2336 - protein, 231 aa, synthetic construct
  REGION 1..231: note = Variant of adenylate kinase
MHHHHHHGGSGMGAYLVFLGPPGAGKGTQGRRISAKTGIPHISTGDILRDIVAKQNDEVASSIKEIMEKGELVPDELGNAVVKRRLSEKDCEKGFILDGFPRTVRQAEYLDSFLESQNRQLTAAVLFKVPEDEVVQRLLSRLICPKCGRIYNMIFLPPKEDELCDDCGVGLVQRDDDKEETVRHRLKVYLEKTQPVIDYYSKKGILKRVDGSQGIDNVVAEVLGILGWSDK

SEQ ID NO: 2337 - DNA, 699 bp, synthetic construct
  misc_feature 1..699: note = Variant of adenylate kinase
  source 1..699: mol_type = other DNA
atgcaccatcatcaccatcacgggggctccggcatgggggcatatctggtgttcttaggtcctccgggcgcgggaaaaggtacccaaggccgtcgcatttcggcaaagactggcatcccgcatattagcacgggcgatatcctgcgtgacatcgtcgctaaaagcaacgatgaagttgcctcgaaaattaaagagatcatggagaaaggtgaactcgttccagatgaactgggcaatgcggtagtaaaagcgcgcctgtcggagaaagactgcgaaaaaggctttattttggatggtttcccgcgtaccgtgcgccaagcggaatatctggatagttttcttgaaagccagaatcgccagttgacagccgccgtgctgttcaaagtccccgaagatgaagttgttcagcgtctgctgtctcgcctgatctgtccgaaatgcgggcgtatctacaacatgatttttctgccaccaaaagaagacgagctgtgtgacgattgcggtgtcggcttagtacagcgtgatgatgataaggaagaaacggtccgtcaccgcctgaaagtctaccttgagaagacccagccggtcattgactattatagtaagaaaggtattctcaaacgcgtagatgggagccaaggaatcgacaacgttgtggcagaagtcctggggattctgggttggagcgataagtaatga

SEQ ID NO: 2338 - protein, 231 aa, synthetic construct
  REGION 1..231: note = Variant of adenylate kinase
MHHHHHHGGSGMGAYLVFLGPPGAGKGTQGRRISAKTGIPHISTGDILRDIVAKSNDEVASKIKEIMEKGELVPDELGNAVVKARLSEKDCEKGFILDGFPRTVRQAEYLDSFLESQNRQLTAAVLFKVPEDEVVQRLLSRLICPKCGRIYNMIFLPPKEDELCDDCGVGLVQRDDDKEETVRHRLKVYLEKTQPVIDYYSKKGILKRVDGSQGIDNVVAEVLGILGWSDK

SEQ ID NO: 2339 - DNA, 699 bp, synthetic construct
  misc_feature 1..699: note = Variant of adenylate kinase
  source 1..699: mol_type = other DNA
atgcaccatcatcaccatcacgggggctccggcatgggggcatatctggtgttcttaggtcctccgggcgcgggaaaaggtacccaaggccgtcgcatttcggcaaagactggcatcccgcatattagcacgggcgatatcctgcgtgacatcgtcgctaaaagcaacgatgaagttgcctcgagcattaaagagatcatggagaaaggtgaactcgttccagatgaactgggcaatgcggtagtaaaacgccgcctgtcggagaaagactgcgaaaaaggctttattttggatggtttcccgcgtaccgtgcgccaagcggaatatctggatagttttcttgaaagccagaatcgccagttgacagccgccgtgctgttcaaagtccccgaagatgaagttgttcagcgtctgctgtctcgcctgatctgtccgaaatgcgggcgtatctacaacatgatttttctgccaccaaaagaagacgagctgtgtgacgattgcggtgtcggcttagtacagcgtgatgatgataaggaagaaacggtccgtcaccgcctgaaagtctaccttgagaagacccagccggtcattgactattatagtaagaaaggtattctcaaacgcgtagatgggaaccaaggaatcgacaacgttgtggcagaagtcctggggattctgggttggagcgataagtaatga

SEQ ID NO: 2340 - protein, 231 aa, synthetic construct
  REGION 1..231: note = Variant of adenylate kinase
MHHHHHHGGSGMGAYLVFLGPPGAGKGTQGRRISAKTGIPHISTGDILRDIVAKSNDEVASSIKEIMEKGELVPDELGNAVVKRRLSEKDCEKGFILDGFPRTVRQAEYLDSFLESQNRQLTAAVLFKVPEDEVVQRLLSRLICPKCGRIYNMIFLPPKEDELCDDCGVGLVQRDDDKEETVRHRLKVYLEKTQPVIDYYSKKGILKRVDGNQGIDNVVAEVLGILGWSDK

SEQ ID NO: 2341 - DNA, 699 bp, synthetic construct
  misc_feature 1..699: note = Variant of adenylate kinase
  source 1..699: mol_type = other DNA
atgcaccatcatcaccatcacgggggctccggcatgggggcatatctggtgttcttaggtcgtccgggcgcgggaaaaggtacccaaggccgtcgcatttcggcaaagactggcatcccgcatattagcacgggcgatatcctgcgtgacatcgtcgctaaacagaacgatgaagttgcctcgaaaattaaagagatcatggagaaaggtgaactcgttccagatgaactgggtaatgcggtagtaaaagcgcgcctgtcggagaaagactgcgaaaaaggctttattttggatggtttcccgcgtaccgtgcgccaagcggaatatctggatagttttcttgaaagccagaatcgccagttgacagccgccgtgctgttcaaagtccccgaagatgaagttgttcagcgtctgctgtctcgcctgatctgtccgaaatgcgggcgtatctacaacatgatttttctgccaccaaaagaagacgagctgtgtgacgattgcggtgtcggcttagtacagcgtgatgatgataaggaagaaacggtccgtcaccgcctgaaagtctaccatgagaagacccagccggtcattgactattatagtaagaaaggtattctcaaacgcgtagatgggtcgcaaggaatcgacaacgttgtggcagaagtcctggggattctgggttggagcgataagtaatga

SEQ ID NO: 2342 - protein, 231 aa, synthetic construct
  REGION 1..231: note = Variant of adenylate kinase
MHHHHHHGGSGMGAYLVFLGRPGAGKGTQGRRISAKTGIPHISTGDILRDIVAKQNDEVASKIKEIMEKGELVPDELGNAVVKARLSEKDCEKGFILDGFPRTVRQAEYLDSFLESQNRQLTAAVLFKVPEDEVVQRLLSRLICPKCGRIYNMIFLPPKEDELCDDCGVGLVQRDDDKEETVRHRLKVYHEKTQPVIDYYSKKGILKRVDGSQGIDNVVAEVLGILGWSDK

SEQ ID NO: 2343 - DNA, 699 bp, synthetic construct
  misc_feature 1..699: note = Variant of adenylate kinase
  source 1..699: mol_type = other DNA
atgcaccatcatcaccatcacgggggctccggcatgggggcatatctggtgttcttaggtccgccgggcgcgggaaaaggtacccaaggccgtcgcatttcggcaaagactggcatcccgcatattagcacgggcgatatcctgcgtgacatcgtcgctaagcaaaacgatgaagttgcctcgaaaattaaagagatcatggagaaaggtgaactcgttccagatgaactgggtaatgcggtagtaaaacgccgcctgtcggagaaagactgcgaaaaaggctttattttggatggtttcccgcgtaccgtgcgccaagcggaatatctggatagttttcttgaaagccagaatcgccagttgacagccgccgtgctgttcaaagtccccgaagatgaagttgttcagcgtctgctgtctcgcctgatctgtccgaaatgcgggcgtatctacaacatgatttttctgccaccaaaagaagacgagctgtgtgacgattgcggtgtcggcttagtacagcgtgatgatgataaggaagaaacggtccgtcaccgcctgaaagtctaccttgagaagacccagccggtcattgactattatagtaagaaaggtattctcaaacgcgtagatgggtcgcaaggaatcgacaacgttgttgcagaagtcctgggggctctgggttggagcgataagtaatga

SEQ ID NO: 2344 - protein, 231 aa, synthetic construct
  REGION 1..231: note = Variant of adenylate kinase
MHHHHHHGGSGMGAYLVFLGPPGAGKGTQGRRISAKTGIPHISTGDILRDIVAKQNDEVASKIKEIMEKGELVPDELGNAVVKRRLSEKDCEKGFILDGFPRTVRQAEYLDSFLESQNRQLTAAVLFKVPEDEVVQRLLSRLICPKCGRIYNMIFLPPKEDELCDDCGVGLVQRDDDKEETVRHRLKVYLEKTQPVIDYYSKKGILKRVDGSQGIDNVVAEVLGALGWSDK

SEQ ID NO: 2345 - DNA, 699 bp, synthetic construct
  misc_feature 1..699: note = Variant of adenylate kinase
  source 1..699: mol_type = other DNA
atgcaccatcatcaccatcacgggggctccggcatgggggcatatctggtgttcttaggtcgtccgggcgcgggaaaaggtacccaaggccgtcgcatttcggcaaagactggcatcccgcatattagcacgggcgatatcctgcgtgacatcgtcgctacacagaacgatgaagttgcctcgaaaattaaagagatcatggagaaaggtgaactcgttccagatgaactgggtaatgcggtagtaaaacgccgcctgtcggagaaagactgcgaaaaaggctttattttggatggtttcccgcgtaccgtgcgccaagcggaatatctggatagttttcttgaaagccagaatcgccagttgacagccgccgtgctgttcaaagtccccgaagatgaagttgttcagcgtctgctgtctcgcctgatctgtccgaaatgcgggcgtatctacaacatgatttttctgccaccaaaagaagacgagctgtgtgacgattgcggtgtcggcttagtacagcgtgatgatgataagccggaaacggtccgtcaccgcctgaaagtctaccgtgagaagacccagccggtcattgactattatagtaagaaaggtattctcaaacgcgtagatgggtcgcaaggaatcgacaacgttgtggcagaagtcctggggattctgggttggagcgataagtaatga

SEQ ID NO: 2346 - protein, 231 aa, synthetic construct
  REGION 1..231: note = Variant of adenylate kinase
MHHHHHHGGSGMGAYLVFLGRPGAGKGTQGRRISAKTGIPHISTGDILRDIVATQNDEVASKIKEIMEKGELVPDELGNAVVKRRLSEKDCEKGFILDGFPRTVRQAEYLDSFLESQNRQLTAAVLFKVPEDEVVQRLLSRLICPKCGRIYNMIFLPPKEDELCDDCGVGLVQRDDDKPETVRHRLKVYREKTQPVIDYYSKKGILKRVDGSQGIDNVVAEVLGILGWSDK

SEQ ID NO: 2347 - DNA, 699 bp, synthetic construct
  misc_feature 1..699: note = Variant of adenylate kinase
  source 1..699: mol_type = other DNA
atgcaccatcatcaccatcacgggggctccggcatgggggcatatctggtgttcttaggtccgccgggcgcgggaaaaggtacccaaggccgtcgcatttcggcaaagactggcatcccgcatattagcacgggcgatatcctgcgtgacatcgtcgctaagcaaaacgatgaagttgcgtcgaaaattaaagagatcatggagaaaggtgaactcgttccagatgaactgggtaatgcggtggtaagccgccgcctgtcggagaaagactgcgaaaaaggctttattttggatggtttcccgcgtaccgtgcgccaagcggaatatctggatagttttcttgaaagccagaatcgccagttgacagccgccgtgctgtttaaagtccccgaagatgaagttaaacagcgtctgctgtctcgcctgatctgtccgaaatgcgggcgtatctacaacatgatttttctgccaccaaaagaagacgagctgtgtgacgattgcggtgtcggcttagtacagcgtgatgatgataaggaagaaacggtccgtcaccgcctgaaagtctaccttgagaagacccagccggtcattgactattatagtaagaaaggtattctcaaacgcgtagatgggtcgcaaggaatcgacaacgttgtggcagaagtcctggggattctgggttggagcgataagtaatga

SEQ ID NO: 2348 - protein, 231 aa, synthetic construct
  REGION 1..231: note = Variant of adenylate kinase
MHHHHHHGGSGMGAYLVFLGPPGAGKGTQGRRISAKTGIPHISTGDILRDIVAKQNDEVASKIKEIMEKGELVPDELGNAVVSRRLSEKDCEKGFILDGFPRTVRQAEYLDSFLESQNRQLTAAVLFKVPEDEVKQRLLSRLICPKCGRIYNMIFLPPKEDELCDDCGVGLVQRDDDKEETVRHRLKVYLEKTQPVIDYYSKKGILKRVDGSQGIDNVVAEVLGILGWSDK

SEQ ID NO: 2349 - DNA, 699 bp, synthetic construct
  misc_feature 1..699: note = Variant of adenylate kinase
  source 1..699: mol_type = other DNA
atgcaccatcatcaccatcacgggggctccggcatgggggcatatctggtgttcttaggtccgccgggcgcgggaaaaggtacccaaggccgtattatttcggcaaagactggcatcccgcatattagcacgggcgatatcctgcgtgacatcgtcgctaagcaaaacgatgaagttgcgtcgaaaattaaagagatcatggagaaaggtgaactcgttccagatgaactgggtaatgcggtagtaaaacgccgcctgtcggagaaagactgcgaaaaaggctttattttggatggtttcccgcgtaccgtgcgccaagcggaatatctggatagttttcttgaaagccagaatcgccagttgacagccgccgtgctgttcaaagtccccgaagatgaagttgttcagcgtctgctgtctcgcctgatctgtccgaaatgcgggcgtatctacaacatgatttttctgccaccaaaagaagacgagctgtgtgacgattgcggtgtcggcttagtacagcgtttagatgataaggaagaaacggtccgtcaccgcctgaaagtctaccttgagaagacccagccggtcattgactattatagtaagaaaggtattctcaaacgcgtagatgggtcgcaaggaatcgacaacgttgtggcagaagtcctggggattctgggttggagcgataagtaatga

SEQ ID NO: 2350 - protein, 231 aa, synthetic construct
  REGION 1..231: note = Variant of adenylate kinase
MHHHHHHGGSGMGAYLVFLGPPGAGKGTQGRIISAKTGIPHISTGDILRDIVAKQNDEVASKIKEIMEKGELVPDELGNAVVKRRLSEKDCEKGFILDGFPRTVRQAEYLDSFLESQNRQLTAAVLFKVPEDEVVQRLLSRLICPKCGRIYNMIFLPPKEDELCDDCGVGLVQRLDDKEETVRHRLKVYLEKTQPVIDYYSKKGILKRVDGSQGIDNVVAEVLGILGWSDK

SEQ ID NO: 2351 - DNA, 699 bp, synthetic construct
  misc_feature 1..699: note = Variant of adenylate kinase
  source 1..699: mol_type = other DNA
atgcaccatcatcaccatcacgggggctccggcatgggggcatatctggtgttcttaggtcgtccgggcgcgggaaaaggtacccaaggccgtcgcatttcggcaaagactggcatcccgcatattagcacgggcgatatcctgcgtgacatcgtcgctacacagaacgatgaagttgcctcgaaaattaaagagatcatggagaaaggtgaactcgttccagatgaactgaccaatgcggtagtaaaacgccgcctgtcggagaaagactgcgaaaaaggctttattttggatggtttcccgcgtaccgtgcgccaagcggaatatctggatagttttcttgaaagccagaatcgccagttgacagccgccgtgctgttcaaagtccccgaagatgaagttgttcagcgtctgctgtctcgcctgatctgtccgaaatgcgggcgtatctacaacatgatttttctgccaccaaaagaagacgagctgtgtgacgattgcggtgtcggcttagtacagcgtgatgatgataaggaagaaacggtccgtcaccgcctgaaagtctaccgtgagaagacccagccggtcattgactattatagtaagaaaggtattctcaaacgcgtagatgggagccaaggaatcgacaacgttgtggcagaagtcctggggattctgggttggagcgataagtaatga

SEQ ID NO: 2352 - protein, 231 aa, synthetic construct
  REGION 1..231: note = Variant of adenylate kinase
MHHHHHHGGSGMGAYLVFLGRPGAGKGTQGRRISAKTGIPHISTGDILRDIVATQNDEVASKIKEIMEKGELVPDELTNAVVKRRLSEKDCEKGFILDGFPRTVRQAEYLDSFLESQNRQLTAAVLFKVPEDEVVQRLLSRLICPKCGRIYNMIFLPPKEDELCDDCGVGLVQRDDDKEETVRHRLKVYREKTQPVIDYYSKKGILKRVDGSQGIDNVVAEVLGILGWSDK

SEQ ID NO: 2353 - DNA, 699 bp, synthetic construct
  misc_feature 1..699: note = Variant of adenylate kinase
  source 1..699: mol_type = other DNA
atgcaccatcatcaccatcacgggggctccggcatgggggcatatctggtgttcttaggtccgccgggcgcgggaaaaggtacccaaggccgtcgcatttcggcaaagactggcatcccgcatattagcacgggcgatatcctgcgtgacatcgtcgctaagcaaaacgatgaagttgcctcggagattaaagagatcatggagaaaggtgaactcgttccagatgaactgggtaatgcggtagtaaaacgccgcctgtcggagaaagactgcgaaaaaggctttattttggatggtttcccgcgtaccgtgcgccaagcggaatatctggatagttttcttgaaagccagaatcgccagttgacagccgccgtgctgttcaaagtccccgaagatgaagttgttcagcgtctgctgtctcgcctgatctgtccgaaatgcgggcgtatctacaacatgatttttctgccaccaaaagaagacgagctgtgtgacgattgcggtgtcggcttagtacagcgtgatgatgataaggaagaaacggtccgtcaccgcctgaaagtctaccttgagaagacccagccggtcattgactattatagtaagaaaggtattctcaaacgcgtagatgggtcgcaaggaatcgacaacgttgtggcagaagtcctggggattctgggttggagcgataagtaatga

SEQ ID NO: 2354 - protein, 231 aa, synthetic construct
  REGION 1..231: note = Variant of adenylate kinase
MHHHHHHGGSGMGAYLVFLGPPGAGKGTQGRRISAKTGIPHISTGDILRDIVAKQNDEVASEIKEIMEKGELVPDELGNAVVKRRLSEKDCEKGFILDGFPRTVRQAEYLDSFLESQNRQLTAAVLFKVPEDEVVQRLLSRLICPKCGRIYNMIFLPPKEDELCDDCGVGLVQRDDDKEETVRHRLKVYLEKTQPVIDYYSKKGILKRVDGSQGIDNVVAEVLGILGWSDK

SEQ ID NO: 2355 - DNA, 699 bp, synthetic construct
  misc_feature 1..699: note = Variant of adenylate kinase
  source 1..699: mol_type = other DNA
atgcaccatcatcaccatcacgggggctccggcatgggggcatatctggtgttcttaggtcctccgggcgcgggaaaaggtacccaaggccgtcgcatttcggcaaagactggcatcccgcatattagcacgggcgatatcctgcgtgacatcgtcgctaaaagcaacgatgaagttgcctcggaaattaaagagatcatggagaaaggtgaactcgttccagatgaactgggtaatgcggtagtaaaacgccgcctgtcggagaaagactgcgaaaaaggctttattttggatggtttcccgcgtaccgtgcgccaagcggaatatctggatagttttcttgaaagccagaatcgccagttgacagccgccgtgctgttcaaagtccccgaagatgaagttgttcagcgtctgctgtctcgcctgatctgtccgaaatgcgggcgtatctacaacatgatttttctgccaccaaaagaagacgagctgtgtgacgattgcggtgtcggcttagtacagcgtgatgatgataagccggaaacggtccgtcaccgcctgaaagtctaccatgagaagacccagccggtcattgactattatagtaagaaaggtattctcaaacgcgtagatgggaaccaaggaatcgacaacgttgtggcagaagtcctggggattctgggttggagcgataagtaatga

SEQ ID NO: 2356 - protein, 231 aa, synthetic construct
  REGION 1..231: note = Variant of adenylate kinase
MHHHHHHGGSGMGAYLVFLGPPGAGKGTQGRRISAKTGIPHISTGDILRDIVAKSNDEVASEIKEIMEKGELVPDELGNAVVKRRLSEKDCEKGFILDGFPRTVRQAEYLDSFLESQNRQLTAAVLFKVPEDEVVQRLLSRLICPKCGRIYNMIFLPPKEDELCDDCGVGLVQRDDDKPETVRHRLKVYHEKTQPVIDYYSKKGILKRVDGNQGIDNVVAEVLGILGWSDK

SEQ ID NO: 2357 - DNA, 699 bp, synthetic construct
  misc_feature 1..699: note = Variant of adenylate kinase
  source 1..699: mol_type = other DNA
atgcaccatcatcaccatcatgggggctccggcatgggggcatatctggtgttcttaggtccgccgggcgcgggaaaaggtacccaaggccgtcgcatttcggcaaagactggcatcccgcatattagcacgggcgatatcctgcgtgacatcgtcgctaagcaaaacgatgaagttgcctcgaaaattaaagagatcatggagaaaggtgaactcgttccagatgaactgggtaatgcgctggtaaaacgccgcctgtcggagaaagactgcgaaaaaggctttattttggatggtttcccgcgtaccgtgcgccaagcggaatatctggatagttttcttgaaagccagaatcgccagttgacagccgccgtgctgttcaaagtccccgaagatgaagttaaacagcgtctgctgtctcgcctgatctgtccgaaatgcgggcgtatctacaacatgatttttctgccaccaaaagaagacgagctgtgtgacgattgcggtgtcggcttagtacagcgtgatgatgataaggaagaaacggtccgtcaccgcctgaaagtctaccttgagaagacccagccggtcattgactattatagtaagaaaggtattctcaaacgcgtagatgggtcgcaaggaatcgacaacgttgtggcagaagtcctggggattctgggttggagcgataagtaatga

SEQ ID NO: 2358 - protein, 231 aa, synthetic construct
  REGION 1..231: note = Variant of adenylate kinase
MHHHHHHGGSGMGAYLVFLGPPGAGKGTQGRRISAKTGIPHISTGDILRDIVAKQNDEVASKIKEIMEKGELVPDELGNALVKRRLSEKDCEKGFILDGFPRTVRQAEYLDSFLESQNRQLTAAVLFKVPEDEVKQRLLSRLICPKCGRIYNMIFLPPKEDELCDDCGVGLVQRDDDKEETVRHRLKVYLEKTQPVIDYYSKKGILKRVDGSQGIDNVVAEVLGILGWSDK

SEQ ID NO: 2359 - DNA, 699 bp, synthetic construct
  misc_feature 1..699: note = Variant of adenylate kinase
  source 1..699: mol_type = other DNA
atgcaccatcatcaccatcacgggggctccggcatgggggcatatctggtgttcttaggtcgtccgggcgcgggaaaaggtacccaaggccgtcgcatttcggcaaagactggcatcccgcatattagcacgggcgatatcctgcgtgacatcgtcgctacacagaacgatgaagttgcctcgaaaattaaagagatcatggagaaaggtgaactcgttccagatgaactgggcaatgcggtagtaaaacgccgcctgtcggagaaagactgcgaaaaaggctttattttggatggtttcccgcgtaccgtgcgccaagcggaatatctggatagttttcttgaaagccagaatcgccagttgacagccgccgtgctgttcaaagtccccgaagatgaagttgttcagcgtctgctgtctcgcctgatctgtccgaaatgcgggcgtatctacaacatgatttttctgccaccaaaagaagacgagctgtgtgacgattgcggtgtcggcttagtacagcgtgatgatgataaggaagaaacggtccgtcaccgcctgaaagtctaccatgagaagacccagccggtcattgactattatagtaagaaaggtattctcaaacgcgtagatgggagccaaggaatcgacaacgttgtggcagaagtcctggggattctgggttggagcgataagtaatga

SEQ ID NO: 2360 - protein, 231 aa, synthetic construct
  REGION 1..231: note = Variant of adenylate kinase
MHHHHHHGGSGMGAYLVFLGRPGAGKGTQGRRISAKTGIPHISTGDILRDIVATQNDEVASKIKEIMEKGELVPDELGNAVVKRRLSEKDCEKGFILDGFPRTVRQAEYLDSFLESQNRQLTAAVLFKVPEDEVVQRLLSRLICPKCGRIYNMIFLPPKEDELCDDCGVGLVQRDDDKEETVRHRLKVYHEKTQPVIDYYSKKGILKRVDGSQGIDNVVAEVLGILGWSDK

SEQ ID NO: 2361 - DNA, 699 bp, synthetic construct
  misc_feature 1..699: note = Variant of adenylate kinase
  source 1..699: mol_type = other DNA
atgcaccatcatcaccatcacgggggctccggcatgggggcatatctggtgttcttaggtcgtccgggcgcgggaaaaggtacccaaggccgtcgcatttcggcaaagactggcatcccgcatattagcacgggcgatatcctgcgtgacatcgtcgctaaaagcaacgatgaagttgcctcgaaaattaaagagatcatggagaaaggtgaactcgttccagatgaactgggcaatgcggtagtaaaagcgcgcctgtcggagaaagactgcgaaaaaggctttattttggatggtttcccgcgtaccgtgcgccaagcggaatatctggatagttttcttgaaagccagaatcgccagttgacagccgccgtgctgttcaaagtccccgaagatgaagttgttcagcgtctgctgtctcgcctgatctgtccgaaatgcgggcgtatctacaacatgatttttctgccaccaaaagaagacgagctgtgtgacgattgcggtgtcggcttagtacagcgtgatgatgataaggaagaaacggtccgtcaccgcctgaaagtctaccatgagaagacccagccggtcattgactattatagtaagaaaggtattctcaaacgcgtagatgggtcgcaaggaatcgacaacgttgtggcagaagtcctggggattctgggttggagcgataagtaatga

SEQ ID NO: 2362 - protein, 231 aa, synthetic construct
  REGION 1..231: note = Variant of adenylate kinase
MHHHHHHGGSGMGAYLVFLGRPGAGKGTQGRRISAKTGIPHISTGDILRDIVAKSNDEVASKIKEIMEKGELVPDELGNAVVKARLSEKDCEKGFILDGFPRTVRQAEYLDSFLESQNRQLTAAVLFKVPEDEVVQRLLSRLICPKCGRIYNMIFLPPKEDELCDDCGVGLVQRDDDKEETVRHRLKVYHEKTQPVIDYYSKKGILKRVDGSQGIDNVVAEVLGILGWSDK

SEQ ID NO: 2363 - DNA, 699 bp, synthetic construct
  misc_feature 1..699: note = Variant of adenylate kinase
  source 1..699: mol_type = other DNA
atgcaccatcatcaccatcacgggggctccggcatgggggcatatctggtgttcttaggtcctccgggcgcgggaaaaggtacccaaggccgtcgcatttcggcaaagactggcatcccgcatattagcacgggcgatatcctgcgtgacatcgtcgctaagcaaaacgatgaagttgcctcgagcattaaagagatcatggagaaaggtgaactcgttccagatgaactgggtaatgcggtagtaaaagcgcgcctgtcggagaaagactgcgaaaaaggctttattttggatggtttcccgcgtaccgtgcgccaagcggaatatctggatagttttcttgaaagccagaatcgccagttgacagccgccgtgctgttcaaagtccccgaagatgaagttgttcagcgtctgctgtctcgcctgatctgtccgaaatgcgggcgtatctacaacatgatttttctgccaccaaaagaagacgagctgtgtgacgattgcggtgtcggcttagtacagcgtgatgatgataaggaagaaacggtccgtcaccgcctgaaagtctaccttgagaagacccagccggtcattgactattatagtaagaaaggtattctcaaacgcgtagatgggtcgcaaggaatcgacaacgttgtggcagaagtcctggggattctgggttggagcgataagtaatga

SEQ ID NO: 2364 - protein, 231 aa, synthetic construct
  REGION 1..231: note = Variant of adenylate kinase
MHHHHHHGGSGMGAYLVFLGPPGAGKGTQGRRISAKTGIPHISTGDILRDIVAKQNDEVASSIKEIMEKGELVPDELGNAVVKARLSEKDCEKGFILDGFPRTVRQAEYLDSFLESQNRQLTAAVLFKVPEDEVVQRLLSRLICPKCGRIYNMIFLPPKEDELCDDCGVGLVQRDDDKEETVRHRLKVYLEKTQPVIDYYSKKGILKRVDGSQGIDNVVAEVLGILGWSDK

SEQ ID NO: 2365 - DNA, 699 bp, synthetic construct
  misc_feature 1..699: note = Variant of adenylate kinase
  source 1..699: mol_type = other DNA
atgcaccatcatcaccatcacgggggctccggcatgggggcatatctggtgttcttaggtcgtccgggcgcgggaaaaggtacccaaggccgtcgcatttcggcaaagactggcatcccgcatattagcacgggcgatatcctgcgtgacatcgtcgctaaaagcaacgatgaagttgcctcggaaattaaagagatcatggagaaaggtgaactcgttccagatgaactgggtaatgcggtagtaaaacgccgcctgtcggagaaagactgcgaaaaaggctttattttggatggtttcccgcgtaccgtgcgccaagcggaatatctggatagttttcttgaaagccagaatcgccagttgacagccgccgtgctgttcaaagtccccgaagatgaagttgttcagcgtctgctgtctcgcctgatctgtccgaaatgcgggcgtatctacaacatgatttttctgccaccaaaagaagacgagctgtgtgacgattgcggtgtcggcttagtacagcgtgatgatgataaggaagaaacggtccgtcaccgcctgaaagtctaccttgagaagacccagccggtcattgactattatagtaagaaaggtattctcaaacgcgtagatgggtcgcaaggaatcgacaacgttgtggcagaagtcctggggattctgggttggagcgataagtaatga

SEQ ID NO: 2366 - protein, 231 aa, synthetic construct
  REGION 1..231: note = Variant of adenylate kinase
MHHHHHHGGSGMGAYLVFLGRPGAGKGTQGRRISAKTGIPHISTGDILRDIVAKSNDEVASEIKEIMEKGELVPDELGNAVVKRRLSEKDCEKGFILDGFPRTVRQAEYLDSFLESQNRQLTAAVLFKVPEDEVVQRLLSRLICPKCGRIYNMIFLPPKEDELCDDCGVGLVQRDDDKEETVRHRLKVYLEKTQPVIDYYSKKGILKRVDGSQGIDNVVAEVLGILGWSDK

SEQ ID NO: 2367 - DNA, 699 bp, synthetic construct
  misc_feature 1..699: note = Variant of adenylate kinase
  source 1..699: mol_type = other DNA
atgcaccatcatcaccatcacgggggctccggcatgggggcatatctggtgttcttaggtcgtccgggcgcgggaaaaggtacccaaggccgtcgcatttcggcaaagactggcatcccgcatattagcacgggcgatatcctgcgtgacatcgtcgctaaacagaacgatgaagttgcctcgagcattaaagagatcatggagaaaggtgaactcgttccagatgaactgggtaatgcggtagtaaaagcgcgcctgtcggagaaagactgcgaaaaaggctttattttggatggtttcccgcgtaccgtgcgccaagcggaatatctggatagttttcttgaaagccagaatcgccagttgacagccgccgtgctgttcaaagtccccgaagatgaagttgttcagcgtctgctgtctcgcctgatctgtccgaaatgcgggcgtatctacaacatgatttttctgccaccaaaagaagacgagctgtgtgacgattgcggtgtcggcttagtacagcgtgatgatgataaggaagaaacggtccgtcaccgcctgaaagtctaccttgagaagacccagccggtcattgactattatagtaagaaaggtattctcaaacgcgtagatgggtcgcaaggaatcgacaacgttgtggcagaagtcctggggattctgggttggagcgataagtaatga

SEQ ID NO: 2368 - protein, 231 aa, synthetic construct
  REGION 1..231: note = Variant of adenylate kinase
MHHHHHHGGSGMGAYLVFLGRPGAGKGTQGRRISAKTGIPHISTGDILRDIVAKQNDEVASSIKEIMEKGELVPDELGNAVVKARLSEKDCEKGFILDGFPRTVRQAEYLDSFLESQNRQLTAAVLFKVPEDEVVQRLLSRLICPKCGRIYNMIFLPPKEDELCDDCGVGLVQRDDDKEETVRHRLKVYLEKTQPVIDYYSKKGILKRVDGSQGIDNVVAEVLGILGWSDK

SEQ ID NO: 2369 - DNA, 699 bp, synthetic construct
  misc_feature 1..699: note = Variant of adenylate kinase
  source 1..699: mol_type = other DNA
atgcaccatcatcaccatcacgggggctccggcatgggggcatatctggtgttcttaggtccgccgggcgcgggaaaaggtacccaaggccgtcgcatttcggcaaagactggcatcccgcatattagcacgggcgatatcctgcgtgacatcgtcgctaagcaaaacgatgaagttgcctcgaaaattaaagagatcatggagaaaggtgaactcgttccagatgaactgggtaatgcggtagtaaaacgccgcctgtcggagaaagactgcgaaaaaggctttattttggatggtttcccgcgtaccgtgcgccaagcggaatatctggatagttttcttgaaagccagaatcgccagttgacagccgccgtgctgttcaaagtccccgaagatgaagttatgcagcgtctgctgtctcgcctgatctgtccgaaatgcgggcgtatctacaacatgatttttctgccaccaaaagaagacgagctgtgtgacgattgcggtgtcggcttagtacagcgtgatgatgataaggaagaaacggtccgtcaccgcctgaaagtctaccttgagaagacccagccggtcattgactattatagtaagaaaggtattctcaaacgcgtagatgggtcgcaaggaatcgacaacgttgtggcagaagtcctggggattctgggttggagcgataagtaatga

SEQ ID NO: 2370 - protein, 231 aa, synthetic construct
  REGION 1..231: note = Variant of adenylate kinase
MHHHHHHGGSGMGAYLVFLGPPGAGKGTQGRRISAKTGIPHISTGDILRDIVAKQNDEVASKIKEIMEKGELVPDELGNAVVKRRLSEKDCEKGFILDGFPRTVRQAEYLDSFLESQNRQLTAAVLFKVPEDEVMQRLLSRLICPKCGRIYNMIFLPPKEDELCDDCGVGLVQRDDDKEETVRHRLKVYLEKTQPVIDYYSKKGILKRVDGSQGIDNVVAEVLGILGWSDK

SEQ ID NO: 2371 - DNA, 699 bp, synthetic construct
  misc_feature 1..699: note = Variant of adenylate kinase
  source 1..699: mol_type = other DNA
atgcaccatcatcaccatcacgggggctccggcatgggggcatatctggtgttcttaggtccgccgggcgcgggaaaaggtacccaaggccgtattatttcggcaaagactggcatcccgcatattagcacgggcgatatcctgcgtgacatcgtcgctaagcaaaacgatgaagtttcgtcgaaaattaaagagatcatggagaaaggtgaactcgttccagatgaactgggtaatgcgctggtaaaacgccgcctgtcggagaaagactgcgaaaaaggctttattttggatggtttcccgcgtaccgtgcgccaagcggaatatctggatagttttcttgaaagccagaatcgccagttgacagccgccgtgctgattaaagtccccgaagatgaagttgtgcagcgtctgctgtctcgcctgatctgtccgaaatgcgggcgtatctacaacatgatttttctgccaccaaaagaagacgagctgtgtgacgattgcggtgtcggcttagtacagcgtgatgatgataaggaagaaacggtccgtcaccgcctgaaagtctaccttgagaagacccagccggtcattgactattatagtaagaaaggtattctcaaacgcgtagatgggtcgcaaggaatcgacaacgttgtggcagaagtcctggggattctgggttggagcgataagtaatga

SEQ ID NO: 2372 - protein, 231 aa, synthetic construct
  REGION 1..231: note = Variant of adenylate kinase
MHHHHHHGGSGMGAYLVFLGPPGAGKGTQGRIISAKTGIPHISTGDILRDIVAKQNDEVSSKIKEIMEKGELVPDELGNALVKRRLSEKDCEKGFILDGFPRTVRQAEYLDSFLESQNRQLTAAVLIKVPEDEVVQRLLSRLICPKCGRIYNMIFLPPKEDELCDDCGVGLVQRDDDKEETVRHRLKVYLEKTQPVIDYYSKKGILKRVDGSQGIDNVVAEVLGILGWSDK

SEQ ID NO: 2373 - DNA, 699 bp, synthetic construct
  misc_feature 1..699: note = Variant of adenylate kinase
  source 1..699: mol_type = other DNA
atgcaccatcatcaccatcacgggggctccggcatgggggcatatctggtgttcttaggtcgtccgggcgcgggaaaaggtacccaaggccgtcgcatttcggcaaagactggcatcccgcatattagcacgggcgatatcctgcgtgacatcgtcgctacaagcaacgatgaagttgcctcggaaattaaagagatcatggagaaaggtgaactcgttccagatgaactgaccaatgcggtagtaaaacgccgcctgtcggagaaagactgcgaaaaaggctttattttggatggtttcccgcgtaccgtgcgccaagcggaatatctggatagttttcttgaaagccagaatcgccagttgacagccgccgtgctgttcaaagtccccgaagatgaagttgttcagcgtctgctgtctcgcctgatctgtccgaaatgcgggcgtatctacaacatgatttttctgccaccaaaagaagacgagctgtgtgacgattgcggtgtcggcttagtacagcgtgatgatgataaggaagaaacggtccgtcaccgcctgaaagtctaccttgagaagacccagccggtcattgactattatagtaagaaaggtattctcaaacgcgtagatgggtcgcaaggaatcgacaacgttgtggcagaagtcctggggattctgggttggagcgataagtaatga

SEQ ID NO: 2374 - protein, 231 aa, synthetic construct
  REGION 1..231: note = Variant of adenylate kinase
MHHHHHHGGSGMGAYLVFLGRPGAGKGTQGRRISAKTGIPHISTGDILRDIVATSNDEVASEIKEIMEKGELVPDELTNAVVKRRLSEKDCEKGFILDGFPRTVRQAEYLDSFLESQNRQLTAAVLFKVPEDEVVQRLLSRLICPKCGRIYNMIFLPPKEDELCDDCGVGLVQRDDDKEETVRHRLKVYLEKTQPVIDYYSKKGILKRVDGSQGIDNVVAEVLGILGWSDK

SEQ ID NO: 2375 - DNA, 699 bp, synthetic construct
  misc_feature 1..699: note = Variant of adenylate kinase
  source 1..699: mol_type = other DNA
atgcaccatcatcaccatcacgggggctccggcatgggggcatatctggtgttcttaggtccgccgggcgcgggaaaaggtacccaaggccgtcgcatttcggcaaagactggcatcccgcatattagcacgggcgatatcctgcgtgacatcgtcgctaagcaaaacgatgaagttgcctcgaaaattaaagagatcatggagaaaggtgaactcgttccagatgaactgggtaatgcggtagtaaaacgccgcctgtcggagaaagactgcgaaaaaggctttattttggatggttatccgcgtacccatcgccaagcggaatatctggatagttttcttgaaagccagaatcgccagttgacagccgccgtgctgttcaaagtccccgaagatgaagttgttcagcgtctgctgtctcgcctgatctgtccgaaatgcgggcgtatctacaacatgatttttctgccaccaaaagaagacgagctgtgtgacgattgcggtgtcggcttagtacagcgtgatgatgataaggaagaaacggtccgtcaccgcctgaaagtctaccttgagaagacccagccggtcattgactattatagtaagaaaggtattctcaaacgcgtagatgggtcgcaaggaatcgacaacgttgtggcagaagtcctggggattctgggttggagcgataagtaatga

SEQ ID NO: 2376 - protein, 231 aa, synthetic construct
  REGION 1..231: note = Variant of adenylate kinase
MHHHHHHGGSGMGAYLVFLGPPGAGKGTQGRRISAKTGIPHISTGDILRDIVAKQNDEVASKIKEIMEKGELVPDELGNAVVKRRLSEKDCEKGFILDGYPRTHRQAEYLDSFLESQNRQLTAAVLFKVPEDEVVQRLLSRLICPKCGRIYNMIFLPPKEDELCDDCGVGLVQRDDDKEETVRHRLKVYLEKTQPVIDYYSKKGILKRVDGSQGIDNVVAEVLGILGWSDK

SEQ ID NO: 2377 - DNA, 699 bp, synthetic construct
  misc_feature 1..699: note = Variant of adenylate kinase
  source 1..699: mol_type = other DNA
atgcaccatcatcaccatcacgggggctccggcatgggggcatatctggtgttcttaggtccgccgggcgcgggaaaaggtacccaaggccgtcgcatttcggcaaagactggcatcccgcatattagcacgggcgatatcctgcgtgacatcgtcgctacacagaacgatgaagttgcctcgaaaattaaagagatcatggagaaaggtgaactcgttccagatgaactgggtaatgcggtagtaaaagcgcgcctgtcggagaaagactgcgaaaaaggctttattttggatggtttcccgcgtaccgtgcgccaagcggaatatctggatagttttcttgaaagccagaatcgccagttgacagccgccgtgctgttcaaagtccccgaagatgaagttgttcagcgtctgctgtctcgcctgatctgtccgaaatgcgggcgtatctacaacatgatttttctgccaccaaaagaagacgagctgtgtgacgattgcggtgtcggcttagtacagcgtgatgatgataaggaagaaacggtccgtcaccgcctgaaagtctaccttgagaagacccagccggtcattgactattatagtaagaaaggtattctcaaacgcgtagatgggtcgcaaggaatcgacaacgttgtggcagaagtcctggggattctgggttggagcgataagtaatga

SEQ ID NO: 2378 - protein, 231 aa, synthetic construct
  REGION 1..231: note = Variant of adenylate kinase
MHHHHHHGGSGMGAYLVFLGPPGAGKGTQGRRISAKTGIPHISTGDILRDIVATQNDEVASKIKEIMEKGELVPDELGNAVVKARLSEKDCEKGFILDGFPRTVRQAEYLDSFLESQNRQLTAAVLFKVPEDEVVQRLLSRLICPKCGRIYNMIFLPPKEDELCDDCGVGLVQRDDDKEETVRHRLKVYLEKTQPVIDYYSKKGILKRVDGSQGIDNVVAEVLGILGWSDK

SEQ ID NO: 2379 - DNA, 699 bp, synthetic construct
  misc_feature 1..699: note = Variant of adenylate kinase
  source 1..699: mol_type = other DNA
atgcaccatcatcaccatcacgggggctccggcatgggggcatatctggtgttcttaggtcctccgggcgcgggaaaaggtacccaaggccgtcgcatttcggcaaagactggcatcccgcatattagcacgggcgatatcctgcgtgacatcgtcgctaaaagcaacgatgaagttgcctcgagcattaaagagatcatggagaaaggtgaactcgttccagatgaactgggcaatgcggtagtaaaacgccgcctgtcggagaaagactgcgaaaaaggctttattttggatggtttcccgcgtaccgtgcgccaagcggaatatctggatagttttcttgaaagccagaatcgccagttgacagccgccgtgctgttcaaagtccccgaagatgaagttgttcagcgtctgctgtctcgcctgatctgtccgaaatgcgggcgtatctacaacatgatttttctgccaccaaaagaagacgagctgtgtgacgattgcggtgtcggcttagtacagcgtgatgatgataagccggaaacggtccgtcaccgcctgaaagtctaccgtgagaagacccagccggtcattgactattatagtaagaaaggtattctcaaacgcgtagatgggtcgcaaggaatcgacaacgttgtggcagaagtcctggggattctgggttggagcgataagtaatga

SEQ ID NO: 2380 - protein, 231 aa, synthetic construct
  REGION 1..231: note = Variant of adenylate kinase
MHHHHHHGGSGMGAYLVFLGPPGAGKGTQGRRISAKTGIPHISTGDILRDIVAKSNDEVASSIKEIMEKGELVPDELGNAVVKRRLSEKDCEKGFILDGFPRTVRQAEYLDSFLESQNRQLTAAVLFKVPEDEVVQRLLSRLICPKCGRIYNMIFLPPKEDELCDDCGVGLVQRDDDKPETVRHRLKVYREKTQPVIDYYSKKGILKRVDGSQGIDNVVAEVLGILGWSDK

SEQ ID NO: 2381 - DNA, 699 bp, synthetic construct
  misc_feature 1..699: note = Variant of adenylate kinase
  source 1..699: mol_type = other DNA
atgcaccatcatcaccatcacgggggctccggcatgggggcatatctggtgttcttaggtcctccgggcgcgggaaaaggtacccaaggccgtcgcatttcggcaaagactggcatcccgcatattagcacgggcgatatcctgcgtgacatcgtcgctacaagcaacgatgaagttgcctcgagcattaaagagatcatggagaaaggtgaactcgttccagatgaactgggcaatgcggtagtaaaagcgcgcctgtcggagaaagactgcgaaaaaggctttattttggatggtttcccgcgtaccgtgcgccaagcggaatatctggatagttttcttgaaagccagaatcgccagttgacagccgccgtgctgttcaaagtccccgaagatgaagttgttcagcgtctgctgtctcgcctgatctgtccgaaatgcgggcgtatctacaacatgatttttctgccaccaaaagaagacgagctgtgtgacgattgcggtgtcggcttagtacagcgtgatgatgataagccggaaacggtccgtcaccgcctgaaagtctaccatgagaagacccagccggtcattgactattatagtaagaaaggtattctcaaacgcgtagatgggaaccaaggaatcgacaacgttgtggcagaagtcctggggattctgggttggagcgataagtaatga

SEQ ID NO: 2382 - protein, 231 aa, synthetic construct
  REGION 1..231: note = Variant of adenylate kinase
MHHHHHHGGSGMGAYLVFLGPPGAGKGTQGRRISAKTGIPHISTGDILRDIVATSNDEVASSIKEIMEKGELVPDELGNAVVKARLSEKDCEKGFILDGFPRTVRQAEYLDSFLESQNRQLTAAVLFKVPEDEVVQRLLSRLICPKCGRIYNMIFLPPKEDELCDDCGVGLVQRDDDKPETVRHRLKVYHEKTQPVIDYYSKKGILKRVDGNQGIDNVVAEVLGILGWSDK

SEQ ID NO: 2383 - DNA, 699 bp, synthetic construct
  misc_feature 1..699: note = Variant of adenylate kinase
  source 1..699: mol_type = other DNA
atgcaccatcatcaccatcacgggggctccggcatgggggcatatctggtgttcttaggtccgccgggcgcgggaaaaggtacccaaggccgtcgcatttcggcaaagactggcatcccgcatattagcacgggcgatatcctgcgtgacatcgtcgctaagcaaaacgatgaagttgcctcgaaaattaaagagatcatggagaaaggtgaactcgttccagatgaactgggtaatgcggtagtaaaacgccgcctgtcggagaaagactgcgaaaaaggctttattttggatggtttcccgcgtaccgtgcgccaagcggaatatctggatagttttcttgaaagccagaatcgccagttgacagccgccgtgctgttcaaagtccccgaagatgaagttgttcagcgtctgctgtctcgcctgatctgtccgaaatgcgggcgtatctacaacatgatttttctgccaccaaaagaagacgagctgtgtgacgattgcggtgtcggcttagtacagcgtgatgatgataaggaagaaacggtccgtcaccgcctgaaagtctaccgggagaagacccagccggtcattgactattatagtaagaaaggtattctcaaacgcgtagatgggtcgcaaggaatcgacaacgttgtggcagaagtcctggggattctgggttggagcgataagtaatga

SEQ ID NO: 2384 - protein, 231 aa, synthetic construct
  REGION 1..231: note = Variant of adenylate kinase
MHHHHHHGGSGMGAYLVFLGPPGAGKGTQGRRISAKTGIPHISTGDILRDIVAKQNDEVASKIKEIMEKGELVPDELGNAVVKRRLSEKDCEKGFILDGFPRTVRQAEYLDSFLESQNRQLTAAVLFKVPEDEVVQRLLSRLICPKCGRIYNMIFLPPKEDELCDDCGVGLVQRDDDKEETVRHRLKVYREKTQPVIDYYSKKGILKRVDGSQGIDNVVAEVLGILGWSDK

SEQ ID NO: 2385 - DNA, 699 bp, synthetic construct
  misc_feature 1..699: note = Variant of adenylate kinase
  source 1..699: mol_type = other DNA
atgcaccatcatcaccatcacgggggctccggcatgggggcatatctggtgttcttaggtccgccgggcgcgggaaaaggtacccaaggccgtcgcatttcggcaaagactggcatcccgcatattagcacgggcgatatcctgcgtgacatcgtcgctaagcaaaacgatgaagttgcctcgaaaattaaagagatcatggagaaaggtgaactcgttccagatgaactgggtaatgcggtagtaaaacgccgcctgtcggagaaagactgcgaaaaaggctttattttggatggtttcccgcgtaccgtgcgccaagcggaatatctggatagttttcttgaaagccagaatcgccagttgacagccgccgtgctgttcaaagtccccgaagatgaagttgttcagcgtctgctgtctcgcctgatctgtccgaaatgcgggcgtatctacaacatgatttttctgccaccaaaagaagacgagctgtgtgacgattgcggtgtcggcttagtacagcgtgatgatgataaggaagaaacggtccgtcaccgcctgaaagtctaccatgagaagacccagccggtcattgactattatagtaagaaaggtattctcaaacgcgtagatgggtcgcaaggaatcgacaacgttgtggcagaagtcctggggattctgggttggagcgataagtaatga

SEQ ID NO: 2386 - protein, 231 aa, synthetic construct
  REGION 1..231: note = Variant of adenylate kinase
MHHHHHHGGSGMGAYLVFLGPPGAGKGTQGRRISAKTGIPHISTGDILRDIVAKQNDEVASKIKEIMEKGELVPDELGNAVVKRRLSEKDCEKGFILDGFPRTVRQAEYLDSFLESQNRQLTAAVLFKVPEDEVVQRLLSRLICPKCGRIYNMIFLPPKEDELCDDCGVGLVQRDDDKEETVRHRLKVYHEKTQPVIDYYSKKGILKRVDGSQGIDNVVAEVLGILGWSDK

SEQ ID NO: 2387 - DNA, 699 bp, synthetic construct
  misc_feature 1..699: note = Variant of adenylate kinase
  source 1..699: mol_type = other DNA
atgcaccatcatcaccatcacgggggctccggcatgggggcatatctggtgttcttaggtccgccgggcgcgggaaaaggtacccaaggccgtcgcatttcggcaaagactggcatcccgcatattagcacgggcgatatcctgcgtgacatcgtcgctaagcaaaacgatgaagttgcctcgaaaattaaagagatcatggagaaaggtgaactcgttccagatgaactgggtaatgcggtagtatctcgccgcctgtcggagaaagactgcgaaaaaggctttattttggatggtttcccgcgtaccgtgcgccaagcggaatatctggatagttttcttgaaagccagaatcgccagttgacagccgccgtgctgttcaaagtccccgaagatgaagttgttcagcgtctgctgtctcgcctgatctgtccgaaatgcgggcgtatctacaacatgatttttctgccaccaaaagaagacgagctgtgtgacgattgcggtgtcggcttagtacagcgtgatgatgataaggaagaaacggtccgtcaccgcctgaaagtctaccttgagaagacccagccggtcattgactattatagtaagaaaggtattctcaaacgcgtagatgggtcgcaaggaatcgacaacgttgtggcagaagtcctggggattctgggttggagcgataagtaatga

SEQ ID NO: 2388 - protein, 231 aa, synthetic construct
  REGION 1..231: note = Variant of adenylate kinase
MHHHHHHGGSGMGAYLVFLGPPGAGKGTQGRRISAKTGIPHISTGDILRDIVAKQNDEVASKIKEIMEKGELVPDELGNAVVSRRLSEKDCEKGFILDGFPRTVRQAEYLDSFLESQNRQLTAAVLFKVPEDEVVQRLLSRLICPKCGRIYNMIFLPPKEDELCDDCGVGLVQRDDDKEETVRHRLKVYLEKTQPVIDYYSKKGILKRVDGSQGIDNVVAEVLGILGWSDK

SEQ ID NO: 2389 - DNA, 699 bp, synthetic construct
  misc_feature 1..699: note = Variant of adenylate kinase
  source 1..699: mol_type = other DNA
atgcaccatcatcaccatcacgggggctccggcatgggggcatatctggtgttcttaggtccgccgggcgcgggaaaaggtacccaaggccgtcgcatttcggcaaagactggcatcccgcatattagcacgggcgatatcctgcgtgacatcgtcgctaagcaaaacgatgaagttgcctcgaaaattaaagagatcatggagaaaggtgaactcgttccagatgaactgggtaatgcggtagtaaaacgccgcctgtcggagaaagactgcgaaaaaggctttattttggatggttatccgcgtacccggcgccaagcggaatatctggatagttttcttgaaagccagaatcgccagttgacagccgccgtgctgttcaaagtccccgaagatgaagttgttcagcgtctgctgtctcgcctgatctgtccgaaatgcgggcgtatctacaacatgatttttctgccaccaaaagaagacgagctgtgtgacgattgcggtgtcggcttagtacagcgtgatgatgataaggaagaaacggtccgtcaccgcctgaaagtctaccttgagaagacccagccggtcattgactattatagtaagaaaggtattctcaaacgcgtagatgggtcgcaaggaatcgacaacgttgtggcagaagtcctggggattctgggttggagcgataagtaatga

SEQ ID NO: 2390 - protein, 231 aa, synthetic construct
  REGION 1..231: note = Variant of adenylate kinase
MHHHHHHGGSGMGAYLVFLGPPGAGKGTQGRRISAKTGIPHISTGDILRDIVAKQNDEVASKIKEIMEKGELVPDELGNAVVKRRLSEKDCEKGFILDGYPRTRRQAEYLDSFLESQNRQLTAAVLFKVPEDEVVQRLLSRLICPKCGRIYNMIFLPPKEDELCDDCGVGLVQRDDDKEETVRHRLKVYLEKTQPVIDYYSKKGILKRVDGSQGIDNVVAEVLGILGWSDK

SEQ ID NO: 2391 - DNA, 699 bp, synthetic construct
  misc_feature 1..699: note = Variant of adenylate kinase
  source 1..699: mol_type = other DNA
atgcaccatcatcaccatcacgggggctccggcatgggggcatatctggtgttcttaggtccgccgggcgcgggaaaaggtacccaaggccgtcgcatttcggcaaagactggcatcccgcatattagcacgggcgatatcctgcgtgacatcgtcgctaagcaaaacgatgaagttgcctcgaaaattaaagagatcatggagaaaggtgaactcgttccagatgaactgactaatgcggtagtaaaacgccgcctgtcggagaaagactgcgaaaaaggctttattttggatggtttcccgcgtaccgtgcgccaagcggaatatctggatagttttcttgaaagccagaatcgccagttgacagccgccgtgctgttcaaagtccccgaagatgaagttgttcagcgtctgctgtctcgcctgatctgtccgaaatgcgggcgtatctacaacatgatttttctgccaccaaaagaagacgagctgtgtgacgattgcggtgtcggcttagtacagcgtgatgatgataaggaagaaacggtccgtcaccgcctgaaagtctaccttgagaagacccagccggtcattgactattatagtaagaaaggtattctcaaacgcgtagatgggtcgcaaggaatcgacaacgttgtggcagaagtcctggggattctgggttggagcgataagtaatga

SEQ ID NO: 2392 - protein, 231 aa, synthetic construct
  REGION 1..231: note = Variant of adenylate kinase
MHHHHHHGGSGMGAYLVFLGPPGAGKGTQGRRISAKTGIPHISTGDILRDIVAKQNDEVASKIKEIMEKGELVPDELTNAVVKRRLSEKDCEKGFILDGFPRTVRQAEYLDSFLESQNRQLTAAVLFKVPEDEVVQRLLSRLICPKCGRIYNMIFLPPKEDELCDDCGVGLVQRDDDKEETVRHRLKVYLEKTQPVIDYYSKKGILKRVDGSQGIDNVVAEVLGILGWSDK

SEQ ID NO: 2393 - DNA, 699 bp, synthetic construct
  misc_feature 1..699: note = Variant of adenylate kinase
  source 1..699: mol_type = other DNA
atgcaccatcatcaccatcacgggggctccggcatgggggcatatctggtgttcttaggtcctccgggcgcgggaaaaggtacccaaggccgtcgcatttcggcaaagactggcatcccgcatattagcacgggcgatatcctgcgtgacatcgtcgctacacagaacgatgaagttgcctcggaaattaaagagatcatggagaaaggtgaactcgttccagatgaactgggtaatgcggtagtaaaacgccgcctgtcggagaaagactgcgaaaaaggctttattttggatggtttcccgcgtaccgtgcgccaagcggaatatctggatagttttcttgaaagccagaatcgccagttgacagccgccgtgctgttcaaagtccccgaagatgaagttgttcagcgtctgctgtctcgcctgatctgtccgaaatgcgggcgtatctacaacatgatttttctgccaccaaaagaagacgagctgtgtgacgattgcggtgtcggcttagtacagcgtgatgatgataaggaagaaacggtccgtcaccgcctgaaagtctaccgtgagaagacccagccggtcattgactattatagtaagaaaggtattctcaaacgcgtagatgggtcgcaaggaatcgacaacgttgtggcagaagtcctggggattctgggttggagcgataagtaatga

SEQ ID NO: 2394 - protein, 231 aa, synthetic construct
  REGION 1..231: note = Variant of adenylate kinase
MHHHHHHGGSGMGAYLVFLGPPGAGKGTQGRRISAKTGIPHISTGDILRDIVATQNDEVASEIKEIMEKGELVPDELGNAVVKRRLSEKDCEKGFILDGFPRTVRQAEYLDSFLESQNRQLTAAVLFKVPEDEVVQRLLSRLICPKCGRIYNMIFLPPKEDELCDDCGVGLVQRDDDKEETVRHRLKVYREKTQPVIDYYSKKGILKRVDGSQGIDNVVAEVLGILGWSDK

SEQ ID NO: 2395 - DNA, 699 bp, synthetic construct
  misc_feature 1..699: note = Variant of adenylate kinase
  source 1..699: mol_type = other DNA
atgcaccatcatcaccatcacgggggctccggcatgggggcatatctggtgttcttaggtcgtccgggcgcgggaaaaggtacccaaggccgtcgcatttcggcaaagactggcatcccgcatattagcacgggcgatatcctgcgtgacatcgtcgctaaaagcaacgatgaagttgcctcggaaattaaagagatcatggagaaaggtgaactcgttccagatgaactgggcaatgcggtagtaaaacgccgcctgtcggagaaagactgcgaaaaaggctttattttggatggtttcccgcgtaccgtgcgccaagcggaatatctggatagttttcttgaaagccagaatcgccagttgacagccgccgtgctgttcaaagtccccgaagatgaagttgttcagcgtctgctgtctcgcctgatctgtccgaaatgcgggcgtatctacaacatgatttttctgccaccaaaagaagacgagctgtgtgacgattgcggtgtcggcttagtacagcgtgatgatgataagccggaaacggtccgtcaccgcctgaaagtctaccatgagaagacccagccggtcattgactattatagtaagaaaggtattctcaaacgcgtagatgggagccaaggaatcgacaacgttgtggcagaagtcctggggattctgggttggagcgataagtaatga

SEQ ID NO: 2396 - protein, 231 aa, synthetic construct
  REGION 1..231: note = Variant of adenylate kinase
MHHHHHHGGSGMGAYLVFLGRPGAGKGTQGRRISAKTGIPHISTGDILRDIVAKSNDEVASEIKEIMEKGELVPDELGNAVVKRRLSEKDCEKGFILDGFPRTVRQAEYLDSFLESQNRQLTAAVLFKVPEDEVVQRLLSRLICPKCGRIYNMIFLPPKEDELCDDCGVGLVQRDDDKPETVRHRLKVYHEKTQPVIDYYSKKGILKRVDGSQGIDNVVAEVLGILGWSDK

SEQ ID NO: 2397 - DNA, 699 bp, synthetic construct
  misc_feature 1..699: note = Variant of adenylate kinase
  source 1..699: mol_type = other DNA
atgcaccatcatcaccatcacgggggctccggcatgggggcatatctggtgttcttaggtccgccgggcgcgggaaaaggtacccaaggccgtcgcatttcggcaaagactggcatcccgcatattagcacgggcgatatcctgcgtgacatcgtcgctaagcaaaacgatgaagttgcctcgaaaattaaagagatcatggagaaaggtgaactcgttccagatgaactgtgtaatgcggtagtaaaacgccgcctgtcggagaaagactgcgaaaaaggctttattttggatggtttcccgcgtaccgtgcgccaagcggaatatctggatagttttcttgaaagccagaatcgccagttgacagccgccgtgctgttcaaagtccccgaagatgaagttgttcagcgtctgctgtctcgcctgatctgtccgaaatgcgggcgtatctacaacatgatttttctgccaccaaaagaagacgagctgtgtgacgattgcggtgtcggcttagtacagcgtgatgatgataaggaagaaacggtccgtcaccgcctgaaagtctaccttgagaagacccagccggtcattgactattatagtaagaaaggtattctcaaacgcgtagatgggtcgcaaggaatcgacaacgttgtggcagaagtcctggggattctgggttggagcgataagtaatga

SEQ ID NO: 2398 - protein, 231 aa, synthetic construct
  REGION 1..231: note = Variant of adenylate kinase
MHHHHHHGGSGMGAYLVFLGPPGAGKGTQGRRISAKTGIPHISTGDILRDIVAKQNDEVASKIKEIMEKGELVPDELCNAVVKRRLSEKDCEKGFILDGFPRTVRQAEYLDSFLESQNRQLTAAVLFKVPEDEVVQRLLSRLICPKCGRIYNMIFLPPKEDELCDDCGVGLVQRDDDKEETVRHRLKVYLEKTQPVIDYYSKKGILKRVDGSQGIDNVVAEVLGILGWSDK

SEQ ID NO: 2399 - DNA, 699 bp, synthetic construct
  misc_feature 1..699: note = Variant of adenylate kinase
  source 1..699: mol_type = other DNA
atgcaccatcatcaccatcacgggggctccggcatgggggcatatctggtgttcttaggtccgccgggcgcgggaaaaggtacccaaggccgtattatttcggcaaagactggcatcccgcatattagcacgggcgatatcctgcgtgacatcgtcgctaagcaaaacgatgaagtttcgtcgaaaattaaagagatcatggagaaaggtgaactcgttccagatgaactgggtaatgcggtagtaaaacgccgcctgtcggagaaagactgcgaaaaaggctttattttggatggtttcccgcgtaccgtgcgccaagcggaatatctggatagttttcttgaaagccagaatcgccagttgacagccgccgtgctgattaaagtccccgaagatgaagttgttcagcgtctgctgtctcgcctgatctgtccgaaatgcgggcgtatctacaacatgatttttctgccaccaaaagaagacgagctgtgtgacgattgcggtgtcggcttagtacagcgtgatgatgataaggaagaaacggtccgtcaccgcctgaaagtctaccttgagaagacccagccggtcattgactattatagtaagaaaggtattctcaaacgcgtagatgggtcgcaaggaatcgacaacgttgtggcagaagtcctggggattctgggttggagcgataagtaatga

SEQ ID NO: 2400 - protein, 231 aa, synthetic construct
  REGION 1..231: note = Variant of adenylate kinase
MHHHHHHGGSGMGAYLVFLGPPGAGKGTQGRIISAKTGIPHISTGDILRDIVAKQNDEVSSKIKEIMEKGELVPDELGNAVVKRRLSEKDCEKGFILDGFPRTVRQAEYLDSFLESQNRQLTAAVLIKVPEDEVVQRLLSRLICPKCGRIYNMIFLPPKEDELCDDCGVGLVQRDDDKEETVRHRLKVYLEKTQPVIDYYSKKGILKRVDGSQGIDNVVAEVLGILGWSDK

SEQ ID NO: 2401 - DNA, 699 bp, synthetic construct
  misc_feature 1..699: note = Variant of adenylate kinase
  source 1..699: mol_type = other DNA
atgcaccatcatcaccatcacgggggctccggcatgggggcatatctggtgttcttaggtcctccgggcgcgggaaaaggtacccaaggccgtcgcatttcggcaaagactggcatcccgcatattagcacgggcgatatcctgcgtgacatcgtcgctacacagaacgatgaagttgcctcggaaattaaagagatcatggagaaaggtgaactcgttccagatgaactgggcaatgcggtagtaaaagcgcgcctgtcggagaaagactgcgaaaaaggctttattttggatggtttcccgcgtaccgtgcgccaagcggaatatctggatagttttcttgaaagccagaatcgccagttgacagccgccgtgctgttcaaagtccccgaagatgaagttgttcagcgtctgctgtctcgcctgatctgtccgaaatgcgggcgtatctacaacatgatttttctgccaccaaaagaagacgagctgtgtgacgattgcggtgtcggcttagtacagcgtgatgatgataaggaagaaacggtccgtcaccgcctgaaagtctaccatgagaagacccagccggtcattgactattatagtaagaaaggtattctcaaacgcgtagatgggaaccaaggaatcgacaacgttgtggcagaagtcctggggattctgggttggagcgataagtaatga

SEQ ID NO: 2402 - protein, 231 aa, synthetic construct
  REGION 1..231: note = Variant of adenylate kinase
MHHHHHHGGSGMGAYLVFLGPPGAGKGTQGRRISAKTGIPHISTGDILRDIVATQNDEVASEIKEIMEKGELVPDELGNAVVKARLSEKDCEKGFILDGFPRTVRQAEYLDSFLESQNRQLTAAVLFKVPEDEVVQRLLSRLICPKCGRIYNMIFLPPKEDELCDDCGVGLVQRDDDKEETVRHRLKVYHEKTQPVIDYYSKKGILKRVDGNQGIDNVVAEVLGILGWSDK

SEQ ID NO: 2403 - DNA, 699 bp, synthetic construct
  misc_feature 1..699: note = Variant of adenylate kinase
  source 1..699: mol_type = other DNA
atgcaccatcatcaccatcacgggggctccggcatgggggcatatctggtgttcttaggtcgtccgggcgcgggaaaaggtacccaaggccgtcgcatttcggcaaagactggcatcccgcatattagcacgggcgatatcctgcgtgacatcgtcgctaaacagaacgatgaagttgcctcgagcattaaagagatcatggagaaaggtgaactcgttccagatgaactgggtaatgcggtagtaaaacgccgcctgtcggagaaagactgcgaaaaaggctttattttggatggtttcccgcgtaccgtgcgccaagcggaatatctggatagttttcttgaaagccagaatcgccagttgacagccgccgtgctgttcaaagtccccgaagatgaagttgttcagcgtctgctgtctcgcctgatctgtccgaaatgcgggcgtatctacaacatgatttttctgccaccaaaagaagacgagctgtgtgacgattgcggtgtcggcttagtacagcgtgatgatgataagccggaaacggtccgtcaccgcctgaaagtctaccttgagaagacccagccggtcattgactattatagtaagaaaggtattctcaaacgcgtagatgggtcgcaaggaatcgacaacgttgtggcagaagtcctggggattctgggttggagcgataagtaatga

SEQ ID NO: 2404 - protein, 231 aa, synthetic construct
  REGION 1..231: note = Variant of adenylate kinase
MHHHHHHGGSGMGAYLVFLGRPGAGKGTQGRRISAKTGIPHISTGDILRDIVAKQNDEVASSIKEIMEKGELVPDELGNAVVKRRLSEKDCEKGFILDGFPRTVRQAEYLDSFLESQNRQLTAAVLFKVPEDEVVQRLLSRLICPKCGRIYNMIFLPPKEDELCDDCGVGLVQRDDDKPETVRHRLKVYLEKTQPVIDYYSKKGILKRVDGSQGIDNVVAEVLGILGWSDK

SEQ ID NO: 2405 - DNA, 699 bp, synthetic construct
  misc_feature 1..699: note = Variant of adenylate kinase
  source 1..699: mol_type = other DNA
atgcaccatcatcaccatcacgggggctccggcatgggggcatatctggtgttcttaggtccgccgggcgcgggaaaaggtacccaaggccgtcgcatttcggcaaagactggcatcccgcatattagcacgggcgatatcctgcgtgacatcgtcgctaagcaaaacgatgaagttgcctcgaaaattaaagagatcatggagaaaggtgaactcgttccagatgaactgggtaatgcggtagtaaaacgccgcctgtcggagaaagactgcgaaaaaggctttattttggatggttatccgcgtacccagcgccaagcggaatatctggatagttttcttgaaagccagaatcgccagttgacagccgccgtgctgttcaaagtccccgaagatgaagttgttcagcgtctgctgtctcgcctgatctgtccgaaatgcgggcgtatctacaacatgatttttctgccaccaaaagaagacgagctgtgtgacgattgcggtgtcggcttagtacagcgtgatgatgataaggaagaaacggtccgtcaccgcctgaaagtctaccttgagaagacccagccggtcattgactattatagtaagaaaggtattctcaaacgcgtagatgggtcgcaaggaatcgacaacgttgtggcagaagtcctggggattctgggttggagcgataagtaatga

SEQ ID NO: 2406 - protein, 231 aa, synthetic construct
  REGION 1..231: note = Variant of adenylate kinase
MHHHHHHGGSGMGAYLVFLGPPGAGKGTQGRRISAKTGIPHISTGDILRDIVAKQNDEVASKIKEIMEKGELVPDELGNAVVKRRLSEKDCEKGFILDGYPRTQRQAEYLDSFLESQNRQLTAAVLFKVPEDEVVQRLLSRLICPKCGRIYNMIFLPPKEDELCDDCGVGLVQRDDDKEETVRHRLKVYLEKTQPVIDYYSKKGILKRVDGSQGIDNVVAEVLGILGWSDK

SEQ ID NO: 2407 - DNA, 699 bp, synthetic construct
  misc_feature 1..699: note = Variant of adenylate kinase
  source 1..699: mol_type = other DNA
atgcaccatcatcaccatcacgggggctccggcatgggggcatatctggtgttcttaggtccgccgggcgcgggaaaaggtacccaaggccgtcgcatttcggcaaagactggcatcccgcatattagcacgggcgatatcctgcgtgacatcgtcgctaagcaaaacgatgaagttgcctcgaaaattaaagagatcatggagaaaggtgaactcgttccagatgaactgggtaatgcggtagtaaaacgccgcctgtcggagaaagactgcgaaaaaggctttattttggatggtttcccgcgtaccgtgcgccaagcggaatatctggatagttttcttgaaagccagaatcgccagttgacagccgccgtgctgattaacgtccccgaagatgaagttgtgcagcgtctgctgtctcgcctgatctgtccgaaatgcgggcgtatctacaacatgatttttctgccaccaaaagaagacgagctgtgtgacgattgcggtgtcggcttagtacagcgtgatgatgataaggaagaaacggtccgtcaccgcctgaaagtctaccttgagaagacccagccggtcattgactattatagtaagaaaggtattctcaaacgcgtagatgggtcgcaaggaatcgacaacgttgtggcagaagtcctgggggcgctgggttggagcgataagtaatga

SEQ ID NO: 2408 - protein, 231 aa, synthetic construct
  REGION 1..231: note = Variant of adenylate kinase
MHHHHHHGGSGMGAYLVFLGPPGAGKGTQGRRISAKTGIPHISTGDILRDIVAKQNDEVASKIKEIMEKGELVPDELGNAVVKRRLSEKDCEKGFILDGFPRTVRQAEYLDSFLESQNRQLTAAVLINVPEDEVVQRLLSRLICPKCGRIYNMIFLPPKEDELCDDCGVGLVQRDDDKEETVRHRLKVYLEKTQPVIDYYSKKGILKRVDGSQGIDNVVAEVLGALGWSDK

SEQ ID NO: 2409 - DNA, 699 bp, synthetic construct
  misc_feature 1..699: note = Variant of adenylate kinase
  source 1..699: mol_type = other DNA
atgcaccatcatcaccatcacgggggctccggcatgggggcatatctggtgttcttaggtccgccgggcgcgggaaaaggtacccaaggccgtattatttcggcaaagactggcatcccgcatattagcacgggcgatatcctgcgtgacatcgtcgctaagcaaaacgatgaagttgcgtcgaaaattaaagagatcatggagaaaggtgaactcgttccagatgaactgggtaatgcggtggtaaaacgccgcctgtcggagaaagactgcgaaaaaggctttattttggatggtttcccgcgtaccgtgcgccaagcggaatatctggatagttttcttgaaagccagaatcgccagttgacagccgccgtgctgttcaaagtccccgaagatgaagttgttcagcgtctgctgtctcgcctgatctgtccgaaatgcgggcgtatctacaacatgatttttctgccaccaaaagaagacgagctgtgtgacgattgcggtgtcggcttagtacagcgtgatgatgataaggaagaaacggtccgtcaccgcctgaaagtctaccttgagaagacccagccggtcattgactattatagtaagaaaggtattctcaaacgcgtagatgggtcgcaaggaatcgacaacgttgtggcagaagtcctgggggcgctgggttggagcgataagtaatga

SEQ ID NO: 2410 - protein, 231 aa, synthetic construct
  REGION 1..231: note = Variant of adenylate kinase
MHHHHHHGGSGMGAYLVFLGPPGAGKGTQGRIISAKTGIPHISTGDILRDIVAKQNDEVASKIKEIMEKGELVPDELGNAVVKRRLSEKDCEKGFILDGFPRTVRQAEYLDSFLESQNRQLTAAVLFKVPEDEVVQRLLSRLICPKCGRIYNMIFLPPKEDELCDDCGVGLVQRDDDKEETVRHRLKVYLEKTQPVIDYYSKKGILKRVDGSQGIDNVVAEVLGALGWSDK

SEQ ID NO: 2411 - DNA, 699 bp, synthetic construct
  misc_feature 1..699: note = Variant of adenylate kinase
  source 1..699: mol_type = other DNA
atgcaccatcatcaccatcacgggggctccggcatgggggcatatctggtgttcttaggtccgccgggcgcgggaaaaggtacccaaggccgtattatttcggcaaagactggcatcccgcatattagcacgggcgatatcctgcgtgacatcgtcgctaagcaaaacgatgaagtttcgtcgaaaattaaagagatcatggagaaaggtgaactcgttccagatgaactgggtaatgcgctggtaaaacgccgcctgtcggagaaagactgcgaaaaaggctttattttggatggtttcccgcgtaccgtgcgccaagcggaatatctggatagttttcttgaaagccagaatcgccagttgacagccgccgtgctgttcaaagtccccgaagatgaagttgttcagcgtctgctgtctcgcctgatctgtccgaaatgcgggcgtatctacaacatgatttttctgccaccaaaagaagacgagctgtgtgacgattgcggtgtcggcttagtacagcgtgatgatgataaggaagaaacggtccgtcaccgcctgaaagtctaccttgagaagacccagccggtcattgactattatagtaagaaaggtattctcaaacgcgtagatgggtcgcaaggaatcgacaacgttgtggcagaagtcctggggattctgggttggagcgataagtaatga

SEQ ID NO: 2412 - protein, 231 aa, synthetic construct
  REGION 1..231: note = Variant of adenylate kinase
MHHHHHHGGSGMGAYLVFLGPPGAGKGTQGRIISAKTGIPHISTGDILRDIVAKQNDEVSSKIKEIMEKGELVPDELGNALVKRRLSEKDCEKGFILDGFPRTVRQAEYLDSFLESQNRQLTAAVLFKVPEDEVVQRLLSRLICPKCGRIYNMIFLPPKEDELCDDCGVGLVQRDDDKEETVRHRLKVYLEKTQPVIDYYSKKGILKRVDGSQGIDNVVAEVLGILGWSDK

SEQ ID NO: 2413 - DNA, 699 bp, synthetic construct
  misc_feature 1..699: note = Variant of adenylate kinase
  source 1..699: mol_type = other DNA
atgcaccatcatcaccatcacgggggctccggcatgggggcatatctggtgttcttaggtccgccgggcgcgggaaaaggtacccaaggccgtcgcatttcggcaaagactggcatcccgcatattagcacgggcgatatcctgcgtgacatcgtcgctaagcaaaacgatgaagttgcctcgaaaattaaagagatcatggagaaaggtgaactcgttccagatgaactgggtaatgcggtagtaaaacgccgcctgtcggagaaagactgcgaaaaaggctttattttggatggtttcccgcgtaccgtgcgccaagcggaatatctggatagttttcttgaaagccagaatcgccagttgacagccgccgtgctgttcaaagtccccgaagatgaagttgttcagcgtctgctgtctcgcctgatctgtccgaaatgcgggcgtatctacaacatgatttttctgccaccaaaagaagacgagctgtgtgacgattgcggtgtcggcttagtacagcgtgatgatgataaggaagaaacggtccgtcaccgcctgaaagtctaccttgagaagacccagccggtcattgactattatagtaagaaaggtattctcaaacgcgtagatgggtcgcaaggaatcgacaacgttgttgcagaagtcctgggggtgctgggttggagcgataagtaatga

SEQ ID NO: 2414 - protein, 231 aa, synthetic construct
  REGION 1..231: note = Variant of adenylate kinase
MHHHHHHGGSGMGAYLVFLGPPGAGKGTQGRRISAKTGIPHISTGDILRDIVAKQNDEVASKIKEIMEKGELVPDELGNAVVKRRLSEKDCEKGFILDGFPRTVRQAEYLDSFLESQNRQLTAAVLFKVPEDEVVQRLLSRLICPKCGRIYNMIFLPPKEDELCDDCGVGLVQRDDDKEETVRHRLKVYLEKTQPVIDYYSKKGILKRVDGSQGIDNVVAEVLGVLGWSDK

SEQ ID NO: 2415 - DNA, 699 bp, synthetic construct
  misc_feature 1..699: note = Variant of adenylate kinase
  source 1..699: mol_type = other DNA
atgcaccatcatcaccatcacgggggctccggcatgggggcatatctggtgttcttaggtccgccgggcgcgggaaaaggtacccaaggccgtcgcatttcggcaaagactggcatcccgcatattagcacgggcgatatcctgcgtgacatcgtcgctaagcaaaacgatgaagttgcctcgaaaattaaagagatcatggagaaaggtgaactcgttccagatgaactgggtaatgcgcttgtaaaacgccgcctgtcggagaaagactgcgaaaaaggctttattttggatggtttcccgcgtaccgtgcgccaagcggaatatctggatagttttcttgaaagccagaatcgccagttgacagccgccgtgctgttcaaagtccccgaagatgaagttgttcagcgtctgctgtctcgcctgatctgtccgaaatgcgggcgtatctacaacatgatttttctgccaccaaaagaagacgagctgtgtgacgattgcggtgtcggcttagtacagcgtgatgatgataaggaagaaacggtccgtcaccgcctgaaagtctaccttgagaagacccagccggtcattgactattatagtaagaaaggtattctcaaacgcgtagatgggtcgcaaggaatcgacaacgttgtggcagaagtcctggggattctgggttggagcgataagtaatga

SEQ ID NO: 2416 - protein, 231 aa, synthetic construct
  REGION 1..231: note = Variant of adenylate kinase
MHHHHHHGGSGMGAYLVFLGPPGAGKGTQGRRISAKTGIPHISTGDILRDIVAKQNDEVASKIKEIMEKGELVPDELGNALVKRRLSEKDCEKGFILDGFPRTVRQAEYLDSFLESQNRQLTAAVLFKVPEDEVVQRLLSRLICPKCGRIYNMIFLPPKEDELCDDCGVGLVQRDDDKEETVRHRLKVYLEKTQPVIDYYSKKGILKRVDGSQGIDNVVAEVLGILGWSDK

SEQ ID NO: 2417 - DNA, 699 bp, synthetic construct
  misc_feature 1..699: note = Variant of adenylate kinase
  source 1..699: mol_type = other DNA
atgcaccatcatcaccatcacgggggctccggcatgggggcatatctggtgttcttaggtccgccgggcgcgggaaaaggtacccaaggccgtcgcatttcggcaaagactggcatcccgcatattagcacgggcgatatcctccgtgacatcgtcgctactcaaaacgatgaagttgcctcgaaaattaaagagatcatggagaaaggtgaactcgttccagatgaactgggtaatgcggtagtaaaacgccgcctgtcggagaaagactgcgaaaaaggctttattttggatggtttcccgcgtaccgtgcgccaagcggaatatctggatagttttcttgaaagccagaatcgccagttgacagccgccgtgctgttcaaagtccccgaagatgaagttgttcagcgtctgctgtctcgcctgatctgtccgaaatgcgggcgtatctacaacatgatttttctgccaccaaaagaagacgagctgtgtgacgattgcggtgtcggcttagtacagcgtgatgatgataaggaagaaacggtccgtcaccgcctgaaagtctaccttgagaagacccagccggtcattgactattatagtaagaaaggtattctcaaacgcgtagatgggtcgcaaggaatcgacaacgttgtggcagaagtcctagggattctgggttggagcgataagtaatga

SEQ ID NO: 2418 - protein, 231 aa, synthetic construct
  REGION 1..231: note = Variant of adenylate kinase
MHHHHHHGGSGMGAYLVFLGPPGAGKGTQGRRISAKTGIPHISTGDILRDIVATQNDEVASKIKEIMEKGELVPDELGNAVVKRRLSEKDCEKGFILDGFPRTVRQAEYLDSFLESQNRQLTAAVLFKVPEDEVVQRLLSRLICPKCGRIYNMIFLPPKEDELCDDCGVGLVQRDDDKEETVRHRLKVYLEKTQPVIDYYSKKGILKRVDGSQGIDNVVAEVLGILGWSDK

SEQ ID NO: 2419 - DNA, 699 bp, synthetic construct
  misc_feature 1..699: note = Variant of adenylate kinase
  source 1..699: mol_type = other DNA
atgcaccatcatcaccatcacgggggctccggcatgggggcatatctggtgttcttaggtcggccgggcgcgggaaaaggtacccaaggccgtcgcatttcggcaaagactggcatcccgcatattagcacgggcgatatcctgcgtgacatcgtcgctaagcaaaacgatgaagttgcctcgaaaattaaagagatcatggagaaaggtgaactcgttccagatgaactgggtaatgcggtagtaaaacgccgcctgtcggagaaagactgcgaaaaaggctttattttggatggtttcccgcgtaccgtgcgccaagcggaatatctggatagttttcttgaaagccagaatcgccagttgacagccgccgtgctgttcaaagtccccgaagatgaagttgttcagcgtctgctgtctcgcctgatctgtccgaaatgcgggcgtatctacaacatgatttttctgccaccaaaagaagacgagctgtgtgacgattgcggtgtcggcttagtacagcgtgatgatgataaggaagaaacggtccgtcaccgcctgaaagtctaccttgagaagacccagccggtcattgactattatagtaagaaaggtattctcaaacgcgtagatgggtcgcaaggaatcgacaacgttgtggcagaagtcctggggattctgggttggagcgataagtaatga

SEQ ID NO: 2420 - protein, 231 aa, synthetic construct
  REGION 1..231: note = Variant of adenylate kinase
MHHHHHHGGSGMGAYLVFLGRPGAGKGTQGRRISAKTGIPHISTGDILRDIVAKQNDEVASKIKEIMEKGELVPDELGNAVVKRRLSEKDCEKGFILDGFPRTVRQAEYLDSFLESQNRQLTAAVLFKVPEDEVVQRLLSRLICPKCGRIYNMIFLPPKEDELCDDCGVGLVQRDDDKEETVRHRLKVYLEKTQPVIDYYSKKGILKRVDGSQGIDNVVAEVLGILGWSDK

SEQ ID NO: 2421 - DNA, 699 bp, synthetic construct
  misc_feature 1..699: note = Variant of adenylate kinase
  source 1..699: mol_type = other DNA
atgcaccatcatcaccatcacgggggctccggcatgggggcatatctggtgttcttaggtccgccgggcgcgggaaaaggtacccaaggccgtcgcatttcggcaaagactggcatcccgcatattagcacgggcgatatcctgcgtgacatcgtcgctaagcaaaacgatgaagtttcgtcgaaaattaaagagatcatggagaaaggtgaactcgttccagatgaactgggtaatgcgctggtaaaacgccgcctgtcggagaaagactgcgaaaaaggctttattttggatggtttcccgcgtaccgtgcgccaagcggaatatctggatagttttcttgaaagccagaatcgccagttgacagccgccgtgctgtttaacgtccccgaagatgaagttgtgcagcgtctgctgtctcgcctgatctgtccgaaatgcgggcgtatctacaacatgatttttctgccaccaaaagaagacgagctgtgtgacgattgcggtgtcggcttagtacagcgtttagatgataaggaagaaacggtccgtcaccgcctgaaagtctaccttgagaagacccagccggtcattgactattatagtaagaaaggtattctcaaacgcgtagatgggtcgcaaggaatcgacaacgttgtggcagaagtcctggggattctgggttggagcgataagtaatga

SEQ ID NO: 2422 - protein, 231 aa, synthetic construct
  REGION 1..231: note = Variant of adenylate kinase
MHHHHHHGGSGMGAYLVFLGPPGAGKGTQGRRISAKTGIPHISTGDILRDIVAKQNDEVSSKIKEIMEKGELVPDELGNALVKRRLSEKDCEKGFILDGFPRTVRQAEYLDSFLESQNRQLTAAVLFNVPEDEVVQRLLSRLICPKCGRIYNMIFLPPKEDELCDDCGVGLVQRLDDKEETVRHRLKVYLEKTQPVIDYYSKKGILKRVDGSQGIDNVVAEVLGILGWSDK

SEQ ID NO: 2423 - DNA, 699 bp, synthetic construct
  misc_feature 1..699: note = Variant of adenylate kinase
  source 1..699: mol_type = other DNA
atgcaccatcatcaccatcacgggggctccggcatgggggcatatctggtgttcttaggtccgccgggcgcgggaaaaggtacccaaggccgtcgcatttcggcaaagactggcatcccgcatattagcacgggcgatatcctgcgtgacatcgtcgctaagcaaaacgatgaagttgcctcgaaaattaaagagatcatggagaaaggtgaactcgttccagatgaactgggtaatgcggtagtaaaacgccgcctgtcggagaaagactgcgaaaaaggctttattttggatggtttcccgcgtaccgtgcgccaagcggaatatctggatagttttcttgaaagccagaatcgccagttgacagccgccgtgctgttcaaagtccccgaagatgaagttgttcagcgtctgctgtctcgcctgatctgtccgaaatgcgggcgtatctacaacatgatttttctgccaccaaaagaagacgagctgtgtgacgattgcggtgtcggcttagtacagcgtgatgatgataaggaagaaacggtccgtcaccgcctgaaagtctaccaggagaagacccagccggtcattgactattatagtaagaaaggtattctcaaacgcgtagatgggtcgcaaggaatcgacaacgttgtggcagaagtcctggggattctgggttggagcgataagtaatga

SEQ ID NO: 2424 - protein, 231 aa, synthetic construct
  REGION 1..231: note = Variant of adenylate kinase
MHHHHHHGGSGMGAYLVFLGPPGAGKGTQGRRISAKTGIPHISTGDILRDIVAKQNDEVASKIKEIMEKGELVPDELGNAVVKRRLSEKDCEKGFILDGFPRTVRQAEYLDSFLESQNRQLTAAVLFKVPEDEVVQRLLSRLICPKCGRIYNMIFLPPKEDELCDDCGVGLVQRDDDKEETVRHRLKVYQEKTQPVIDYYSKKGILKRVDGSQGIDNVVAEVLGILGWSDK

SEQ ID NO: 2425 - DNA, 699 bp, synthetic construct
  misc_feature 1..699: note = Variant of adenylate kinase
  source 1..699: mol_type = other DNA
atgcaccatcatcaccatcacgggggctccggcatgggggcatatctggtgttcttaggtccgccgggcgcgggaaaaggtacccaaggccgtcgcatttcggcaaagactggcatcccgcatattagcacgggcgatatcctgcgtgacatcgtcgctaagcaaaacgatgaagttgcctcgaaaattaaagagatcatggagaaaggtgaactcgttccagatgaactgggtaatgcggtagtaaaagcgcgcctgtcggagaaagactgcgaaaaaggctttattttggatggtttcccgcgtaccgtgcgccaagcggaatatctggatagttttcttgaaagccagaatcgccagttgacagccgccgtgctgttcaaagtccccgaagatgaagttgttcagcgtctgctgtctcgcctgatctgtccgaaatgcgggcgtatctacaacatgatttttctgccaccaaaagaagacgagctgtgtgacgattgcggtgtcggcttagtacagcgtgatgatgataaggaagaaacggtccgtcaccgcctgaaagtctaccttgagaagacccagccggtcattgactattatagtaagaaaggtattctcaaacgcgtagatgggtcgcaaggaatcgacaacgttgtggcagaagtcctggggattctgggttggagcgataagtaatga

SEQ ID NO: 2426 - protein, 231 aa, synthetic construct
  REGION 1..231: note = Variant of adenylate kinase
MHHHHHHGGSGMGAYLVFLGPPGAGKGTQGRRISAKTGIPHISTGDILRDIVAKQNDEVASKIKEIMEKGELVPDELGNAVVKARLSEKDCEKGFILDGFPRTVRQAEYLDSFLESQNRQLTAAVLFKVPEDEVVQRLLSRLICPKCGRIYNMIFLPPKEDELCDDCGVGLVQRDDDKEETVRHRLKVYLEKTQPVIDYYSKKGILKRVDGSQGIDNVVAEVLGILGWSDK

SEQ ID NO: 2427 - DNA, 699 bp, synthetic construct
  misc_feature 1..699: note = Variant of adenylate kinase
  source 1..699: mol_type = other DNA
atgcaccatcatcaccatcacgggggctccggcatgggggcatatctggtgttcttaggtcgtccgggcgcgggaaaaggtacccaaggccgtcgcatttcggcaaagactggcatcccgcatattagcacgggcgatatcctgcgtgacatcgtcgctaagcaaaacgatgaagttgcctcgaaaattaaagagatcatggagaaaggtgaactcgttccagatgaactgggtaatgcggtagtaaaacgccgcctgtcggagaaagactgcgaaaaaggctttattttggatggtttcccgcgtaccgtgcgccaagcggaatatctggatagttttcttgaaagccagaatcgccagttgacagccgccgtgctgttcaaagtccccgaagatgaagttgttcagcgtctgctgtctcgcctgatctgtccgaaatgcgggcgtatctacaacatgatttttctgccaccaaaagaagacgagctgtgtgacgattgcggtgtcggcttagtacagcgtgatgatgataaggaagaaacggtccgtcaccgcctgaaagtctaccgtgagaagacccagccggtcattgactattatagtaagaaaggtattctcaaacgcgtagatgggaaccaaggaatcgacaacgttgtggcagaagtcctggggattctgggttggagcgataagtaatga

SEQ ID NO: 2428 - protein, 231 aa, synthetic construct
  REGION 1..231: note = Variant of adenylate kinase
MHHHHHHGGSGMGAYLVFLGRPGAGKGTQGRRISAKTGIPHISTGDILRDIVAKQNDEVASKIKEIMEKGELVPDELGNAVVKRRLSEKDCEKGFILDGFPRTVRQAEYLDSFLESQNRQLTAAVLFKVPEDEVVQRLLSRLICPKCGRIYNMIFLPPKEDELCDDCGVGLVQRDDDKEETVRHRLKVYREKTQPVIDYYSKKGILKRVDGNQGIDNVVAEVLGILGWSDK

SEQ ID NO: 2429 - DNA, 699 bp, synthetic construct
  misc_feature 1..699: note = Variant of adenylate kinase
  source 1..699: mol_type = other DNA
atgcaccatcatcaccatcacgggggctccggcatgggggcatatctggtgttcttaggtccgccgggcgcgggaaaaggtacccaaggccgtcgcatttcggcaaagactggcatcccgcatattagcacgggcgatatcctgcgtgacatcgtcgctaagcaaaacgatgaagttgcctcgaaaattaaagagatcatggagaaaggtgaactcgttccagatgaactgggtaatgcggtagtaaaacgccgcctgtcggagaaagactgcgaaaaaggctttattttggatggtttcccgcgtaccgtgcgccaagcggaatatctggatagttttcttgaaagccagaatcgccagttgacagccgccgtgctgttcaaagtccccgaagatgaagttgttcagcgtctgctgtctcgcctgatctgtccgaaatgcgggcgtatctacaacatgatttttctgccaccaaaagaagacgagctgtgtgacgattgcggtgtcggcttagtacagcgtgatgatgataaggaagaaacggtccgtcaccgcctgaaagtctactgtgagaagacccagccggtcattgactattatagtaagaaaggtattctcaaacgcgtagatgggtcgcaaggaatcgacaacgttgtggcagaagtcctggggattctgggttggagcgataagtaatga

SEQ ID NO: 2430 - protein, 231 aa, synthetic construct
  REGION 1..231: note = Variant of adenylate kinase
MHHHHHHGGSGMGAYLVFLGPPGAGKGTQGRRISAKTGIPHISTGDILRDIVAKQNDEVASKIKEIMEKGELVPDELGNAVVKRRLSEKDCEKGFILDGFPRTVRQAEYLDSFLESQNRQLTAAVLFKVPEDEVVQRLLSRLICPKCGRIYNMIFLPPKEDELCDDCGVGLVQRDDDKEETVRHRLKVYCEKTQPVIDYYSKKGILKRVDGSQGIDNVVAEVLGILGWSDK

SEQ ID NO: 2431 - DNA, 699 bp, synthetic construct
  misc_feature 1..699: note = Variant of adenylate kinase
  source 1..699: mol_type = other DNA
atgcaccatcatcaccatcacgggggctccggcatgggggcatatctggtgttcttaggtccgccgggcgcgggaaaaggtacccaaggccgtcgcatttcggcaaagactggcatcccgcatattagcacgggcgatatcctgcgtgacatcgtcgctaagcaaaacgatgaagttgcctcgaaaattaaagagatcatggagaaaggtgaactcgttccagatgaactgggtaatgcggtagtaaaacgccgcctgtcggagaaagactgcgaaaaaggctttattttggatggtttcccgcgtaccgtgcgccaagcggaatatctggatagttttcttgaaagccagaatcgccagttgacagccgccgtgctgttcaaagtccccgaagatgaagttaagcagcgtctgctgtctcgcctgatctgtccgaaatgcgggcgtatctacaacatgatttttctgccaccaaaagaagacgagctgtgtgacgattgcggtgtcggcttagtacagcgtgatgatgataaggaagaaacggtccgtcaccgcctgaaagtctaccttgagaagacccagccggtcattgactattatagtaagaaaggtattctcaaacgcgtagatgggtcgcaaggaatcgacaacgttgtggcagaagtcctggggattctgggttggagcgataagtaatga

SEQ ID NO: 2432 - protein, 231 aa, synthetic construct
  REGION 1..231: note = Variant of adenylate kinase
MHHHHHHGGSGMGAYLVFLGPPGAGKGTQGRRISAKTGIPHISTGDILRDIVAKQNDEVASKIKEIMEKGELVPDELGNAVVKRRLSEKDCEKGFILDGFPRTVRQAEYLDSFLESQNRQLTAAVLFKVPEDEVKQRLLSRLICPKCGRIYNMIFLPPKEDELCDDCGVGLVQRDDDKEETVRHRLKVYLEKTQPVIDYYSKKGILKRVDGSQGIDNVVAEVLGILGWSDK

SEQ ID NO: 2433 - DNA, 699 bp, synthetic construct
  misc_feature 1..699: note = Variant of adenylate kinase
  source 1..699: mol_type = other DNA
atgcaccatcatcaccatcacgggggctccggcatgggggcatatctggtgttcttaggtccgccgggcgcgggaaaaggtacccaaggccgtcgcatttcggcaaagactggcatcccgcatattagcacgggcgatatcctgcgtgacatcgtcgctaagcaaaacgatgaagtttcgtcgaaaattaaagagatcatggagaaaggtgaactcgttccagatgaactgggtaatgcggtagtaaaacgccgcctgtcggagaaagactgcgaaaaaggctttattttggatggtttcccgcgtaccgtgcgccaagcggaatatctggatagttttcttgaaagccagaatcgccagttgacagccgccgtgctgtttaacgtccccgaagatgaagttgttcagcgtctgctgtctcgcctgatctgtccgaaatgcgggcgtatctacaacatgatttttctgccaccaaaagaagacgagctgtgtgacgattgcggtgtcggcttagtacagcgtgatgatgataaggaagaaacggtccgtcaccgcctgaaagtctaccttgagaagacccagccggtcattgactattatagtaagaaaggtattctcaaacgcgtagatgggtcgcaaggaatcgacaacgttgtggcagaagtcctgggggcgctgggttggagcgataagtaatga

SEQ ID NO: 2434 - protein, 231 aa, synthetic construct
  REGION 1..231: note = Variant of adenylate kinase
MHHHHHHGGSGMGAYLVFLGPPGAGKGTQGRRISAKTGIPHISTGDILRDIVAKQNDEVSSKIKEIMEKGELVPDELGNAVVKRRLSEKDCEKGFILDGFPRTVRQAEYLDSFLESQNRQLTAAVLFNVPEDEVVQRLLSRLICPKCGRIYNMIFLPPKEDELCDDCGVGLVQRDDDKEETVRHRLKVYLEKTQPVIDYYSKKGILKRVDGSQGIDNVVAEVLGALGWSDK

SEQ ID NO: 2435 - DNA, 699 bp, synthetic construct
  misc_feature 1..699: note = Variant of adenylate kinase
  source 1..699: mol_type = other DNA
atgcaccatcatcaccatcacgggggctccggcatgggggcatatctggtgttcttaggtccgccgggcgcgggaaaaggtacccaaggccgtcgcatttcggcaaagactggcatcccgcatattagcacgggcgatatcctgcgtgacatcgtcgctaagcaaaacgatgaagttgcctcgaaaattaaagagatcatggagaaaggtgaactcgttccagatgaactgggtaatgcggtagtaaaacgccgcctgtcggagaaagactgcgaaaaaggctttattttggatggtttcccgcgtaccgtgcgccaagcggaatatctggatagttttcttgaaagccagaatcgccagttgacagccgccgtgctgttcaaagtccccgaagatgaagttgttcagcgtctgctgtctcgcctgatctgtccgaaatgcgggcgtatctacaacatgatttttctgccaccaaaagaagacgagctgtgtgacgattgcggtgtcggcttagtacagcgtgatgatgataaggaagaaacggtccgtcaccgcctgaaagtctaccttgagaagacccagccggtcattgactattatagtaagaaaggtattctcaaacgcgtagatgggtcgcaaggaatcgacaacgttgttgcagaagtcctggggacgctgggttggagcgataagtaatga

SEQ ID NO: 2436 - protein, 231 aa, synthetic construct
  REGION 1..231: note = Variant of adenylate kinase
MHHHHHHGGSGMGAYLVFLGPPGAGKGTQGRRISAKTGIPHISTGDILRDIVAKQNDEVASKIKEIMEKGELVPDELGNAVVKRRLSEKDCEKGFILDGFPRTVRQAEYLDSFLESQNRQLTAAVLFKVPEDEVVQRLLSRLICPKCGRIYNMIFLPPKEDELCDDCGVGLVQRDDDKEETVRHRLKVYLEKTQPVIDYYSKKGILKRVDGSQGIDNVVAEVLGTLGWSDK

SEQ ID NO: 2437 - DNA, 699 bp, synthetic construct
  misc_feature 1..699: note = Variant of adenylate kinase
  source 1..699: mol_type = other DNA
atgcaccatcatcaccatcacgggggctccggcatgggggcatatctggtgttcttaggtccgccgggcgcgggaaaaggtacccaaggccgtcgcatttcggcaaagactggcatcccgcatattagcacgggcgatatcctgcgtgacatcgtcgctaagcaaaacgatgaagttgcctcgggtattaaagagatcatggagaaaggtgaactcgttccagatgaactgggtaatgcggtagtaaaacgccgcctgtcggagaaagactgcgaaaaaggctttattttggatggtttcccgcgtaccgtgcgccaagcggaatatctggatagttttcttgaaagccagaatcgccagttgacagccgccgtgctgttcaaagtccccgaagatgaagttgttcagcgtctgctgtctcgcctgatctgtccgaaatgcgggcgtatctacaacatgatttttctgccaccaaaagaagacgagctgtgtgacgattgcggtgtcggcttagtacagcgtgatgatgataaggaagaaacggtccgtcaccgcctgaaagtctaccttgagaagacccagccggtcattgactattatagtaagaaaggtattctcaaacgcgtagatgggtcgcaaggaatcgacaacgttgtggcagaagtcctggggattctgggttggagcgataagtaatga

SEQ ID NO: 2438 - protein, 231 aa, synthetic construct
  REGION 1..231: note = Variant of adenylate kinase
MHHHHHHGGSGMGAYLVFLGPPGAGKGTQGRRISAKTGIPHISTGDILRDIVAKQNDEVASGIKEIMEKGELVPDELGNAVVKRRLSEKDCEKGFILDGFPRTVRQAEYLDSFLESQNRQLTAAVLFKVPEDEVVQRLLSRLICPKCGRIYNMIFLPPKEDELCDDCGVGLVQRDDDKEETVRHRLKVYLEKTQPVIDYYSKKGILKRVDGSQGIDNVVAEVLGILGWSDK

SEQ ID NO: 2439 - DNA, 699 bp, synthetic construct
  misc_feature 1..699: note = Variant of adenylate kinase
  source 1..699: mol_type = other DNA
atgcaccatcatcaccatcacgggggctccggcatgggggcatatctggtgttcttaggtccgccgggcgcgggaaaaggtacccaaggccgtcgcatttcggcaaagactggcatcccgcatattagcacgggcgatatcctgcgtgacatcgtcgctaagcaaaacgatgaagttgcctcgaaaattaaagagatcatggagaaaggtgaactcgttccagatgaactgggtaatgcggtagtaaaacgccgcctgtcggagaaagactgcgaaaaaggctttattttggatggtttcccgcgtaccgtgcgccaagcggaatatctggatagttttcttgaaagccagaatcgccagttgacagccgccgtgctgttcaaagtccccgaagatgaagttgttcagcgtctgctgtctcgcctgatctgtccgaaatgcgggcgtatctacaacatgatttttctgccaccaaaagaagacgagctgtgtgacgattgcggtgtcggcttagtacagcgtgatgatgataaggaagaaacggtccgtcaccgcctgaaagtctaccttgagaagacccagccggtcattgactattatagtaagaaaggtattctcaaacgcgtagatgggtcgcaaggaatcgacaacgttgttgcagaagtcctggggcagctgggttggagcgataagtaatga

SEQ ID NO: 2440 - protein, 231 aa, synthetic construct
  REGION 1..231: note = Variant of adenylate kinase
MHHHHHHGGSGMGAYLVFLGPPGAGKGTQGRRISAKTGIPHISTGDILRDIVAKQNDEVASKIKEIMEKGELVPDELGNAVVKRRLSEKDCEKGFILDGFPRTVRQAEYLDSFLESQNRQLTAAVLFKVPEDEVVQRLLSRLICPKCGRIYNMIFLPPKEDELCDDCGVGLVQRDDDKEETVRHRLKVYLEKTQPVIDYYSKKGILKRVDGSQGIDNVVAEVLGQLGWSDK

SEQ ID NO: 2441 - DNA, 699 bp, synthetic construct
  misc_feature 1..699: note = Variant of adenylate kinase
  source 1..699: mol_type = other DNA
atgcaccatcatcaccatcacgggggctccggcatgggggcatatctggtgttcttaggtccgccgggcgcgggaaaaggtacccaaggccgtcgcatttcggcaaagactggcatcccgcatattagcacgggcgatatcctgcgtgacatcgtcgctaagcaaaacgatgaagttgcctcgaaaattaaagagatcatggagaaaggtgaactcgttccagatgaactgggtaatgcggtagtaaaacgccgcctgtcggagaaagactgcgaaaaaggctttattttggatggtttcccgcgtaccgtgcgccaagcggaatatctggatagttttcttgaaagccagaatcgccagttgacagccgccgtgctgttcaaagtccccgaagatgaagttgttcagcgtctgctgtctcgcctgatctgtccgaaatgcgggcgtatctacaacatgatttttctgccaccaaaagaagacgagctgtgtgacgattgcggtgtcggcttagtacagcgtgatgatgataagcctgaaacggtccgtcaccgcctgaaagtctaccttgagaagacccagccggtcattgactattatagtaagaaaggtattctcaaacgcgtagatgggtcgcaaggaatcgacaacgttgtggcagaagtcctggggattctgggttggagcgataagtaatga

SEQ ID NO: 2442 - protein, 231 aa, synthetic construct
  REGION 1..231: note = Variant of adenylate kinase
MHHHHHHGGSGMGAYLVFLGPPGAGKGTQGRRISAKTGIPHISTGDILRDIVAKQNDEVASKIKEIMEKGELVPDELGNAVVKRRLSEKDCEKGFILDGFPRTVRQAEYLDSFLESQNRQLTAAVLFKVPEDEVVQRLLSRLICPKCGRIYNMIFLPPKEDELCDDCGVGLVQRDDDKPETVRHRLKVYLEKTQPVIDYYSKKGILKRVDGSQGIDNVVAEVLGILGWSDK

SEQ ID NO: 2443 - DNA, 699 bp, synthetic construct
  misc_feature 1..699: note = Variant of adenylate kinase
  source 1..699: mol_type = other DNA
atgcaccatcatcaccatcacgggggctccggcatgggggcatatctggtgttcttaggtccgccgggcgcgggaaaaggtacccaaggccgtcgcatttcggcaaagactggcatcccgcatattagcacgggcgatatcctgcgtgacatcgtcgctaagcaaaacgatgaagttgcctcgaaaattaaagagatcatggagaaaggtgaactcgttccagatgaactgggtaatgcggtagtaaaacgccgcctgtcggagaaagactgcgaaaaaggctttattttggatggtttcccgcgtaccgtgcgccaagcggaatatctggatagttttcttgaaagccagaatcgccagttgacagccgccgtgctgttcaaagtccccgaagatgaagttgttcagcgtctgctgtctcgcctgatctgtccgaaatgcgggcgtatctacaacatgatttttctgccaccaaaagaagacgagctgtgtgacgattgcggtgtcggcttagtacagcgtgatgatgataaggaagaaacggtccgtcaccgcctgaaagtctaccttgagaagacccagccggtcattgactattatagtaagaaaggtattctcaaacgcgtagatgggtcgcaaggaatcgacaacgttgttgcagaagtcctggggcggctgggttggagcgataagtaatga

SEQ ID NO: 2444 - protein, 231 aa, synthetic construct
  REGION 1..231: note = Variant of adenylate kinase
MHHHHHHGGSGMGAYLVFLGPPGAGKGTQGRRISAKTGIPHISTGDILRDIVAKQNDEVASKIKEIMEKGELVPDELGNAVVKRRLSEKDCEKGFILDGFPRTVRQAEYLDSFLESQNRQLTAAVLFKVPEDEVVQRLLSRLICPKCGRIYNMIFLPPKEDELCDDCGVGLVQRDDDKEETVRHRLKVYLEKTQPVIDYYSKKGILKRVDGSQGIDNVVAEVLGRLGWSDK

SEQ ID NO: 2445 - DNA, 699 bp, synthetic construct
  misc_feature 1..699: note = Variant of adenylate kinase
  source 1..699: mol_type = other DNA
atgcaccatcatcaccatcacgggggctccggcatgggggcatatctggtgttcttaggtccgccgggcgcgggaaaaggtacccaaggccgtcgcatttcggcaaagactggcatcccgcatattagcacgggcgatatcctgcgtgacatcgtcgctaagcaaaacgatgaagttgcctcgaaaattaaagagatcatggagaaaggtgaactcgttccagatgaactgggtaatgcggtagtaaaacgccgcctgtcggagaaagactgcgaaaaaggctttattttggatggttatccgcgtacctctcgccaagcggaatatctggatagttttcttgaaagccagaatcgccagttgacagccgccgtgctgttcaaagtccccgaagatgaagttgttcagcgtctgctgtctcgcctgatctgtccgaaatgcgggcgtatctacaacatgatttttctgccaccaaaagaagacgagctgtgtgacgattgcggtgtcggcttagtacagcgtgatgatgataaggaagaaacggtccgtcaccgcctgaaagtctaccttgagaagacccagccggtcattgactattatagtaagaaaggtattctcaaacgcgtagatgggtcgcaaggaatcgacaacgttgtggcagaagtcctggggattctgggttggagcgataagtaatga

SEQ ID NO: 2446 - protein, 231 aa, synthetic construct
  REGION 1..231: note = Variant of adenylate kinase
MHHHHHHGGSGMGAYLVFLGPPGAGKGTQGRRISAKTGIPHISTGDILRDIVAKQNDEVASKIKEIMEKGELVPDELGNAVVKRRLSEKDCEKGFILDGYPRTSRQAEYLDSFLESQNRQLTAAVLFKVPEDEVVQRLLSRLICPKCGRIYNMIFLPPKEDELCDDCGVGLVQRDDDKEETVRHRLKVYLEKTQPVIDYYSKKGILKRVDGSQGIDNVVAEVLGILGWSDK

SEQ ID NO: 2447 - DNA, 699 bp, synthetic construct
  misc_feature 1..699: note = Variant of adenylate kinase
  source 1..699: mol_type = other DNA
atgcaccatcatcaccatcacgggggctccggcatgggggcatatctggtgttcttaggtccgccgggcgcgggaaaaggtacccaaggccgtcgcatttcggcaaagactggcatcccgcatattagcacgggcgatatcctgcgtgacatcgtcgctaagcaaaacgatgaagttgcctcgaaaattaaagagatcatggagaaaggtgaactcgttccagatgaactgggtaatgcggtagtacatcgccgcctgtcggagaaagactgcgaaaaaggctttattttggatggtttcccgcgtaccgtgcgccaagcggaatatctggatagttttcttgaaagccagaatcgccagttgacagccgccgtgctgttcaaagtccccgaagatgaagttgttcagcgtctgctgtctcgcctgatctgtccgaaatgcgggcgtatctacaacatgatttttctgccaccaaaagaagacgagctgtgtgacgattgcggtgtcggcttagtacagcgtgatgatgataaggaagaaacggtccgtcaccgcctgaaagtctaccttgagaagacccagccggtcattgactattatagtaagaaaggtattctcaaacgcgtagatgggtcgcaaggaatcgacaacgttgtggcagaagtcctggggattctgggttggagcgataagtaatga

SEQ ID NO: 2448 - protein, 231 aa, synthetic construct
  REGION 1..231: note = Variant of adenylate kinase
MHHHHHHGGSGMGAYLVFLGPPGAGKGTQGRRISAKTGIPHISTGDILRDIVAKQNDEVASKIKEIMEKGELVPDELGNAVVHRRLSEKDCEKGFILDGFPRTVRQAEYLDSFLESQNRQLTAAVLFKVPEDEVVQRLLSRLICPKCGRIYNMIFLPPKEDELCDDCGVGLVQRDDDKEETVRHRLKVYLEKTQPVIDYYSKKGILKRVDGSQGIDNVVAEVLGILGWSDK

SEQ ID NO: 2449 - DNA, 699 bp, synthetic construct
  misc_feature 1..699: note = Variant of adenylate kinase
  source 1..699: mol_type = other DNA
atgcaccatcatcaccatcacgggggctccggcatgggggcatatctggtgttcttaggtcgtccgggcgcgggaaaaggtacccaaggccgtcgcatttcggcaaagactggcatcccgcatattagcacgggcgatatcctgcgtgacatcgtcgctaaaagcaacgatgaagttgcctcggaaattaaagagatcatggagaaaggtgaactcgttccagatgaactgggcaatgcggtagtaaaacgccgcctgtcggagaaagactgcgaaaaaggctttattttggatggtttcccgcgtaccgtgcgccaagcggaatatctggatagttttcttgaaagccagaatcgccagttgacagccgccgtgctgttcaaagtccccgaagatgaagttgttcagcgtctgctgtctcgcctgatctgtccgaaatgcgggcgtatctacaacatgatttttctgccaccaaaagaagacgagctgtgtgacgattgcggtgtcggcttagtacagcgtgatgatgataaggaagaaacggtccgtcaccgcctgaaagtctaccgtgagaagacccagccggtcattgactattatagtaagaaaggtattctcaaacgcgtagatgggagccaaggaatcgacaacgttgtggcagaagtcctggggattctgggttggagcgataagtaatga

SEQ ID NO: 2450 - protein, 231 aa, synthetic construct
  REGION 1..231: note = Variant of adenylate kinase
MHHHHHHGGSGMGAYLVFLGRPGAGKGTQGRRISAKTGIPHISTGDILRDIVAKSNDEVASEIKEIMEKGELVPDELGNAVVKRRLSEKDCEKGFILDGFPRTVRQAEYLDSFLESQNRQLTAAVLFKVPEDEVVQRLLSRLICPKCGRIYNMIFLPPKEDELCDDCGVGLVQRDDDKEETVRHRLKVYREKTQPVIDYYSKKGILKRVDGSQGIDNVVAEVLGILGWSDK

SEQ ID NO: 2451 - DNA, 699 bp, synthetic construct
  misc_feature 1..699: note = Variant of adenylate kinase
  source 1..699: mol_type = other DNA
atgcaccatcatcaccatcacgggggctccggcatgggggcatatctggtgttcttaggtccgccgggcgcgggaaaaggtacccaaggccgtcgcatttcggcaaagactggcatcccgcatattagcacgggcgatatcctgcgtgacatcgtcgctaagcaaaacgatgaagttgcctcgaaaattaaagagatcatggagaaaggtgaactcgttccagatgaactgggtaatgcggtagtaaaacgccgcctgtcggagaaagactgcgaaaaaggctttattttggatggttatccgcgtacctggcgccaagcggaatatctggatagttttcttgaaagccagaatcgccagttgacagccgccgtgctgttcaaagtccccgaagatgaagttgttcagcgtctgctgtctcgcctgatctgtccgaaatgcgggcgtatctacaacatgatttttctgccaccaaaagaagacgagctgtgtgacgattgcggtgtcggcttagtacagcgtgatgatgataaggaagaaacggtccgtcaccgcctgaaagtctaccttgagaagacccagccggtcattgactattatagtaagaaaggtattctcaaacgcgtagatgggtcgcaaggaatcgacaacgttgtggcagaagtcctggggattctgggttggagcgataagtaatga

SEQ ID NO: 2452 - protein, 231 aa, synthetic construct
  REGION 1..231: note = Variant of adenylate kinase
MHHHHHHGGSGMGAYLVFLGPPGAGKGTQGRRISAKTGIPHISTGDILRDIVAKQNDEVASKIKEIMEKGELVPDELGNAVVKRRLSEKDCEKGFILDGYPRTWRQAEYLDSFLESQNRQLTAAVLFKVPEDEVVQRLLSRLICPKCGRIYNMIFLPPKEDELCDDCGVGLVQRDDDKEETVRHRLKVYLEKTQPVIDYYSKKGILKRVDGSQGIDNVVAEVLGILGWSDK

SEQ ID NO: 2453 - DNA, 699 bp, synthetic construct
  misc_feature 1..699: note = Variant of adenylate kinase
  source 1..699: mol_type = other DNA
atgcaccatcatcaccatcacgggggctccggcatgggggcatatctggtgttcttaggtccgccgggcgcgggaaaaggtacccaaggccgtcgcatttcggcaaagactggcatcccgcatattagcacgggcgatatcctgcgtgacatcgtcgctaagcaaaacgatgaagttgcctcgaaaattaaagagatcatggagaaaggtgaactcgttccagatgaactgggtaatgcggtagtaaaacgccgcctgtcggagaaagactgcgaaaaaggctttattttggatggtttcccgcgtaccgtgcgccaagcggaatatctggatagttttcttgaaagccagaatcgccagttgacagccgccgtgctgttcaaagtccccgaagatgaagttgttcagcgtctgctgtctcgcctgatctgtccgaaatgcgggcgtatctacaacatgatttttctgccaccaaaagaagacgagctgtgtgacgattgcggtgtcggcttagtacagcgtgatgatgataaggaagaaacggtccgtcaccgcctgaaagtctacggtgagaagacccagccggtcattgactattatagtaagaaaggtattctcaaacgcgtagatgggtcgcaaggaatcgacaacgttgtggcagaagtcctggggattctgggttggagcgataagtaatga

SEQ ID NO: 2454 - protein, 231 aa, synthetic construct
  REGION 1..231: note = Variant of adenylate kinase
MHHHHHHGGSGMGAYLVFLGPPGAGKGTQGRRISAKTGIPHISTGDILRDIVAKQNDEVASKIKEIMEKGELVPDELGNAVVKRRLSEKDCEKGFILDGFPRTVRQAEYLDSFLESQNRQLTAAVLFKVPEDEVVQRLLSRLICPKCGRIYNMIFLPPKEDELCDDCGVGLVQRDDDKEETVRHRLKVYGEKTQPVIDYYSKKGILKRVDGSQGIDNVVAEVLGILGWSDK

SEQ ID NO: 2455 - DNA, 699 bp, synthetic construct
  misc_feature 1..699: note = Variant of adenylate kinase
  source 1..699: mol_type = other DNA
atgcaccatcatcaccatcacgggggctccggcatgggggcatatctggtgttcttaggtccgccgggcgcgggaaaaggtacccaaggccgtcgcatttcggcaaagactggcatcccgcatattagcacgggcgatatcctgcgtgacatcgtcgctaagcaaaacgatgaagttgcctcgaaaattaaagagatcatggagaaaggtgaactcgttccagatgaactgggtaatgcggtagtaaaacgccgcctgtcggagaaagactgcgaaaaaggctttattttggatggtttcccgcgtaccgtgcgccaagcggaatatctggatagttttcttgaaagccagaatcgccagttgacagccgccgtgctgttcaatgtccccgaagatgaagttgttcagcgtctgctgtctcgcctgatctgtccgaaatgcgggcgtatctacaacatgatttttctgccaccaaaagaagacgagctgtgtgacgattgcggtgtcggcttagtacagcgtgatgatgataaggaagaaacggtccgtcaccgcctgaaagtctaccttgagaagacccagccggtcattgactattatagtaagaaaggtattctcaaacgcgtagatgggtcgcaaggaatcgacaacgttgtggcagaagtcctggggattctgggttggagcgataagtaatga

SEQ ID NO: 2456 - protein, 231 aa, synthetic construct
  REGION 1..231: note = Variant of adenylate kinase
MHHHHHHGGSGMGAYLVFLGPPGAGKGTQGRRISAKTGIPHISTGDILRDIVAKQNDEVASKIKEIMEKGELVPDELGNAVVKRRLSEKDCEKGFILDGFPRTVRQAEYLDSFLESQNRQLTAAVLFNVPEDEVVQRLLSRLICPKCGRIYNMIFLPPKEDELCDDCGVGLVQRDDDKEETVRHRLKVYLEKTQPVIDYYSKKGILKRVDGSQGIDNVVAEVLGILGWSDK

SEQ ID NO: 2457 - DNA, 699 bp, synthetic construct
  misc_feature 1..699: note = Variant of adenylate kinase
  source 1..699: mol_type = other DNA
atgcaccatcatcaccatcacgggggctccggcatgggggcatatctggtgttcttaggtccgccgggcgcgggaaaaggtacccaaggccgtcgcatttcggcaaagactggcatcccgcatattagcacgggcgatatcctgcgtgacatcgtcgctaagcaaaacgatgaagttgcctcgaaaattaaagagatcatggagaaaggtgaactcgttccagatgaactgggtaatgcggtagtaaaaatgcgcctgtcggagaaagactgcgaaaaaggctttattttggatggtttcccgcgtaccgtgcgccaagcggaatatctggatagttttcttgaaagccagaatcgccagttgacagccgccgtgctgttcaaagtccccgaagatgaagttgttcagcgtctgctgtctcgcctgatctgtccgaaatgcgggcgtatctacaacatgatttttctgccaccaaaagaagacgagctgtgtgacgattgcggtgtcggcttagtacagcgtgatgatgataaggaagaaacggtccgtcaccgcctgaaagtctaccttgagaagacccagccggtcattgactattatagtaagaaaggtattctcaaacgcgtagatgggtcgcaaggaatcgacaacgttgtggcagaagtcctggggattctgggttggagcgataagtaatga

SEQ ID NO: 2458 - protein, 231 aa, synthetic construct
  REGION 1..231: note = Variant of adenylate kinase
MHHHHHHGGSGMGAYLVFLGPPGAGKGTQGRRISAKTGIPHISTGDILRDIVAKQNDEVASKIKEIMEKGELVPDELGNAVVKMRLSEKDCEKGFILDGFPRTVRQAEYLDSFLESQNRQLTAAVLFKVPEDEVVQRLLSRLICPKCGRIYNMIFLPPKEDELCDDCGVGLVQRDDDKEETVRHRLKVYLEKTQPVIDYYSKKGILKRVDGSQGIDNVVAEVLGILGWSDK

SEQ ID NO: 2459 - DNA, 699 bp, synthetic construct
  misc_feature 1..699: note = Variant of adenylate kinase
  source 1..699: mol_type = other DNA
atgcaccatcatcaccatcacgggggctccggcatgggggcatatctggtgttcttaggtccgccgggcgcgggaaaaggtacccaaggccgtcgcatttcggcaaagactggcatcccgcatattagcacgggcgatatcctgcgtgacatcgtcgctaagcaaaacgatgaagtttcttcgaaaattaaagagatcatggagaaaggtgaactcgttccagatgaactgggtaatgcggtagtaaaacgccgcctgtcggagaaagactgcgaaaaaggctttattttggatggtttcccgcgtaccgtgcgccaagcggaatatctggatagttttcttgaaagccagaatcgccagttgacagccgccgtgctgttcaaagtccccgaagatgaagttgttcagcgtctgctgtctcgcctgatctgtccgaaatgcgggcgtatctacaacatgatttttctgccaccaaaagaagacgagctgtgtgacgattgcggtgtcggcttagtacagcgtgatgatgataaggaagaaacggtccgtcaccgcctgaaagtctaccttgagaagacccagccggtcattgactattatagtaagaaaggtattctcaaacgcgtagatgggtcgcaaggaatcgacaacgttgtggcagaagtcctggggattctgggttggagcgataagtaatga

SEQ ID NO: 2460 - protein, 231 aa, synthetic construct
  REGION 1..231: note = Variant of adenylate kinase
MHHHHHHGGSGMGAYLVFLGPPGAGKGTQGRRISAKTGIPHISTGDILRDIVAKQNDEVSSKIKEIMEKGELVPDELGNAVVKRRLSEKDCEKGFILDGFPRTVRQAEYLDSFLESQNRQLTAAVLFKVPEDEVVQRLLSRLICPKCGRIYNMIFLPPKEDELCDDCGVGLVQRDDDKEETVRHRLKVYLEKTQPVIDYYSKKGILKRVDGSQGIDNVVAEVLGILGWSDK

SEQ ID NO: 2461 - DNA, 699 bp, synthetic construct
  misc_feature 1..699: note = Variant of adenylate kinase
  source 1..699: mol_type = other DNA
atgcaccatcatcaccatcacgggggctccggcatgggggcatatctggtgttcttaggtccgccgggcgcgggaaaaggtacccaaggccgtcgcatttcggcaaagactggcatcccgcatattagcacgggcgatatcctgcgtgacatcgtcgctaagcaaaacgatgaagttgcctcgaaaattaaagagatcatggagaaaggtgaactcgttccagatgaactgaataatgcggtagtaaaacgccgcctgtcggagaaagactgcgaaaaaggctttattttggatggtttcccgcgtaccgtgcgccaagcggaatatctggatagttttcttgaaagccagaatcgccagttgacagccgccgtgctgttcaaagtccccgaagatgaagttgttcagcgtctgctgtctcgcctgatctgtccgaaatgcgggcgtatctacaacatgatttttctgccaccaaaagaagacgagctgtgtgacgattgcggtgtcggcttagtacagcgtgatgatgataaggaagaaacggtccgtcaccgcctgaaagtctaccttgagaagacccagccggtcattgactattatagtaagaaaggtattctcaaacgcgtagatgggtcgcaaggaatcgacaacgttgtggcagaagtcctggggattctgggttggagcgataagtaatga

SEQ ID NO: 2462 - protein, 231 aa, synthetic construct
  REGION 1..231: note = Variant of adenylate kinase
MHHHHHHGGSGMGAYLVFLGPPGAGKGTQGRRISAKTGIPHISTGDILRDIVAKQNDEVASKIKEIMEKGELVPDELNNAVVKRRLSEKDCEKGFILDGFPRTVRQAEYLDSFLESQNRQLTAAVLFKVPEDEVVQRLLSRLICPKCGRIYNMIFLPPKEDELCDDCGVGLVQRDDDKEETVRHRLKVYLEKTQPVIDYYSKKGILKRVDGSQGIDNVVAEVLGILGWSDK

SEQ ID NO: 2463 - DNA, 699 bp, synthetic construct
  misc_feature 1..699: note = Variant of adenylate kinase
  source 1..699: mol_type = other DNA
atgcaccatcatcaccatcacgggggctccggcatgggggcatatctggtgttcttaggtccgccgggcgcgggaaaaggtacccaaggccgtcgcatttcggcaaagactggcatcccgcatattagcacgggcgatatcctgcgtgacatcgtcgctaagcaaaacgatgaagttgcctcgaaaattaaagagatcatggagaaaggtgaactcgttccagatgaactgggtaatgcggtagtaaaatctcgcctgtcggagaaagactgcgaaaaaggctttattttggatggtttcccgcgtaccgtgcgccaagcggaatatctggatagttttcttgaaagccagaatcgccagttgacagccgccgtgctgttcaaagtccccgaagatgaagttgttcagcgtctgctgtctcgcctgatctgtccgaaatgcgggcgtatctacaacatgatttttctgccaccaaaagaagacgagctgtgtgacgattgcggtgtcggcttagtacagcgtgatgatgataaggaagaaacggtccgtcaccgcctgaaagtctaccttgagaagacccagccggtcattgactattatagtaagaaaggtattctcaaacgcgtagatgggtcgcaaggaatcgacaacgttgtggcagaagtcctggggattctgggttggagcgataagtaatga

SEQ ID NO: 2464 - protein, 231 aa, synthetic construct
  REGION 1..231: note = Variant of adenylate kinase
MHHHHHHGGSGMGAYLVFLGPPGAGKGTQGRRISAKTGIPHISTGDILRDIVAKQNDEVASKIKEIMEKGELVPDELGNAVVKSRLSEKDCEKGFILDGFPRTVRQAEYLDSFLESQNRQLTAAVLFKVPEDEVVQRLLSRLICPKCGRIYNMIFLPPKEDELCDDCGVGLVQRDDDKEETVRHRLKVYLEKTQPVIDYYSKKGILKRVDGSQGIDNVVAEVLGILGWSDK

SEQ ID NO: 2465 - DNA, 699 bp, synthetic construct
  misc_feature 1..699: note = Variant of adenylate kinase
  source 1..699: mol_type = other DNA
atgcaccatcatcaccatcacgggggctccggcatgggggcatatctggtgttcttaggtccgccgggcgcgggaaaaggtacccaaggccgtcgcatttcggcaaagactggcatcccgcatattagcacgggcgatatcctgcgtgacatcgtcgctaagcaaaacgatgaagttgcctcgttgattaaagagatcatggagaaaggtgaactcgttccagatgaactgggtaatgcggtagtaaaacgccgcctgtcggagaaagactgcgaaaaaggctttattttggatggtttcccgcgtaccgtgcgccaagcggaatatctggatagttttcttgaaagccagaatcgccagttgacagccgccgtgctgttcaaagtccccgaagatgaagttgttcagcgtctgctgtctcgcctgatctgtccgaaatgcgggcgtatctacaacatgatttttctgccaccaaaagaagacgagctgtgtgacgattgcggtgtcggcttagtacagcgtgatgatgataaggaagaaacggtccgtcaccgcctgaaagtctaccttgagaagacccagccggtcattgactattatagtaagaaaggtattctcaaacgcgtagatgggtcgcaaggaatcgacaacgttgtggcagaagtcctggggattctgggttggagcgataagtaatga

SEQ ID NO: 2466 - protein, 231 aa, synthetic construct
  REGION 1..231: note = Variant of adenylate kinase
MHHHHHHGGSGMGAYLVFLGPPGAGKGTQGRRISAKTGIPHISTGDILRDIVAKQNDEVASLIKEIMEKGELVPDELGNAVVKRRLSEKDCEKGFILDGFPRTVRQAEYLDSFLESQNRQLTAAVLFKVPEDEVVQRLLSRLICPKCGRIYNMIFLPPKEDELCDDCGVGLVQRDDDKEETVRHRLKVYLEKTQPVIDYYSKKGILKRVDGSQGIDNVVAEVLGILGWSDK

SEQ ID NO: 2467 - DNA, 699 bp, synthetic construct
  misc_feature 1..699: note = Variant of adenylate kinase
  source 1..699: mol_type = other DNA
atgcaccatcatcaccatcacgggggctccggcatgggggcatatctggtgttcttaggtccgccgggcgcgggaaaaggtacccaaggccgtcgcatttcggcaaagactggcatcccgcatattagcacgggcgatatcctgcgtgacatcgtcgctaagcaaaacgatgaagttgcctcgaaaattaaagagatcatggagaaaggtgaactcgttccagatgaactgggtaatgcggtagtaaaacgccgcctgtcggagaaagactgcgaaaaaggctttattttggatggtttcccgcgtaccgtgcgccaagcggaatatctggatagttttcttgaaagccagaatcgccagttgacagccgccgtgctgttcgaggtccccgaagatgaagttgttcagcgtctgctgtctcgcctgatctgtccgaaatgcgggcgtatctacaacatgatttttctgccaccaaaagaagacgagctgtgtgacgattgcggtgtcggcttagtacagcgtgatgatgataaggaagaaacggtccgtcaccgcctgaaagtctaccttgagaagacccagccggtcattgactattatagtaagaaaggtattctcaaacgcgtagatgggtcgcaaggaatcgacaacgttgtggcagaagtcctggggattctgggttggagcgataagtaatga

SEQ ID NO: 2468 - protein, 231 aa, synthetic construct
  REGION 1..231: note = Variant of adenylate kinase
MHHHHHHGGSGMGAYLVFLGPPGAGKGTQGRRISAKTGIPHISTGDILRDIVAKQNDEVASKIKEIMEKGELVPDELGNAVVKRRLSEKDCEKGFILDGFPRTVRQAEYLDSFLESQNRQLTAAVLFEVPEDEVVQRLLSRLICPKCGRIYNMIFLPPKEDELCDDCGVGLVQRDDDKEETVRHRLKVYLEKTQPVIDYYSKKGILKRVDGSQGIDNVVAEVLGILGWSDK

SEQ ID NO: 2469 - DNA, 699 bp, synthetic construct
  misc_feature 1..699: note = Variant of adenylate kinase
  source 1..699: mol_type = other DNA
atgcaccatcatcaccatcacgggggctccggcatgggggcatatctggtgttcttaggtccgccgggcgcgggaaaaggtacccaaggccgtcgcatttcggcaaagactggcatcccgcatattagcacgggcgatatcctgcgtgacatcgtcgctaagcaaaacgatgaagttgcctcgaaaattaaagagatcatggagaaaggtgaactcgttccagatgaactgggtaatgcggtagtaaaacgccgcctgtcggagaaagactgcgaaaaaggctttattttggatggtttcccgcgtaccgtgcgccaagcggaatatctggatagttttcttgaaagccagaatcgccagttgacagccgccgtgctgttcaaagtccccgaagatgaagttgttcagcgtctgctgtctcgcctgatctgtccgaaatgcgggcgtatctacaacatgatttttctgccaccaaaagaagacgagctgtgtgacgattgcggtgtcggcttagtacagcgtgatgatgataaggaagaaacggtccgtcaccgcctgaaagtctaccttgagaagacccagccggtcattgactattatagtaagaaaggtattctcaaacgcgtagatgggaatcaaggaatcgacaacgttgttgcagaagtcctggggattctgggttggagcgataagtaatga

SEQ ID NO: 2470 - protein, 231 aa, synthetic construct
  REGION 1..231: note = Variant of adenylate kinase
MHHHHHHGGSGMGAYLVFLGPPGAGKGTQGRRISAKTGIPHISTGDILRDIVAKQNDEVASKIKEIMEKGELVPDELGNAVVKRRLSEKDCEKGFILDGFPRTVRQAEYLDSFLESQNRQLTAAVLFKVPEDEVVQRLLSRLICPKCGRIYNMIFLPPKEDELCDDCGVGLVQRDDDKEETVRHRLKVYLEKTQPVIDYYSKKGILKRVDGNQGIDNVVAEVLGILGWSDK

SEQ ID NO: 2471 - DNA, 699 bp, synthetic construct
  misc_feature 1..699: note = Variant of adenylate kinase
  source 1..699: mol_type = other DNA
atgcaccatcatcaccatcacgggggctccggcatgggggcatatctggtgttcttaggtccgccgggcgcgggaaaaggtacccaaggccgtcgcatttcggcaaagactggcatcccgcatattagcacgggcgatatcctccgtgacatcgtcgctaagtctaacgatgaagttgcctcgaaaattaaagagatcatggagaaaggtgaactcgttccagatgaactgggtaatgcggtagtaaaacgccgcctgtcggagaaagactgcgaaaaaggctttattttggatggtttcccgcgtaccgtgcgccaagcggaatatctggatagttttcttgaaagccagaatcgccagttgacagccgccgtgctgttcaaagtccccgaagatgaagttgttcagcgtctgctgtctcgcctgatctgtccgaaatgcgggcgtatctacaacatgatttttctgccaccaaaagaagacgagctgtgtgacgattgcggtgtcggcttagtacagcgtgatgatgataaggaagaaacggtccgtcaccgcctgaaagtctaccttgagaagacccagccggtcattgactattatagtaagaaaggtattctcaaacgcgtagatgggtcgcaaggaatcgacaacgttgtggcagaagtcctggggattctgggttggagcgataagtaatga

SEQ ID NO: 2472 - protein, 231 aa, synthetic construct
  REGION 1..231: note = Variant of adenylate kinase
MHHHHHHGGSGMGAYLVFLGPPGAGKGTQGRRISAKTGIPHISTGDILRDIVAKSNDEVASKIKEIMEKGELVPDELGNAVVKRRLSEKDCEKGFILDGFPRTVRQAEYLDSFLESQNRQLTAAVLFKVPEDEVVQRLLSRLICPKCGRIYNMIFLPPKEDELCDDCGVGLVQRDDDKEETVRHRLKVYLEKTQPVIDYYSKKGILKRVDGSQGIDNVVAEVLGILGWSDK

SEQ ID NO: 2473 - DNA, 699 bp, synthetic construct
  misc_feature 1..699: note = Variant of adenylate kinase
  source 1..699: mol_type = other DNA
atgcaccatcatcaccatcacgggggctccggcatgggggcatatctggtgttcttaggtccgccgggcgcgggaaaaggtacccaaggccgtcgcatttcggcaaagactggcatcccgcatattagcacgggcgatatcctgcgtgacatcgtcgctaagcaaaacgatgaagttgcctcgaaaattaaagagatcatggagaaaggtgaactcgttccagatgaactgggtaatgcggtagtaaaacgccgcctgtcggagaaagactgcgaaaaaggctttattttggatggtttcccgcgtaccgtgcgccaagcggaatatctggatagttttcttgaaagccagaatcgccagttgacagccgccgtgctgattaaagtccccgaagatgaagttgttcagcgtctgctgtctcgcctgatctgtccgaaatgcgggcgtatctacaacatgatttttctgccaccaaaagaagacgagctgtgtgacgattgcggtgtcggcttagtacagcgtgatgatgataaggaagaaacggtccgtcaccgcctgaaagtctaccttgagaagacccagccggtcattgactattatagtaagaaaggtattctcaaacgcgtagatgggtcgcaaggaatcgacaacgttgtggcagaagtcctggggattctgggttggagcgataagtaatga

SEQ ID NO: 2474 - protein, 231 aa, synthetic construct
  REGION 1..231: note = Variant of adenylate kinase
MHHHHHHGGSGMGAYLVFLGPPGAGKGTQGRRISAKTGIPHISTGDILRDIVAKQNDEVASKIKEIMEKGELVPDELGNAVVKRRLSEKDCEKGFILDGFPRTVRQAEYLDSFLESQNRQLTAAVLIKVPEDEVVQRLLSRLICPKCGRIYNMIFLPPKEDELCDDCGVGLVQRDDDKEETVRHRLKVYLEKTQPVIDYYSKKGILKRVDGSQGIDNVVAEVLGILGWSDK

SEQ ID NO: 2475 - DNA, 699 bp, synthetic construct
  misc_feature 1..699: note = Variant of adenylate kinase
  source 1..699: mol_type = other DNA
atgcaccatcatcaccatcacgggggctccggcatgggggcatatctggtgttcttaggttctccgggcgcgggaaaaggtacccaaggccgtcgcatttcggcaaagactggcatcccgcatattagcacgggcgatatcctgcgtgacatcgtcgctaagcaaaacgatgaagttgcctcgaaaattaaagagatcatggagaaaggtgaactcgttccagatgaactgggtaatgcggtagtaaaacgccgcctgtcggagaaagactgcgaaaaaggctttattttggatggtttcccgcgtaccgtgcgccaagcggaatatctggatagttttcttgaaagccagaatcgccagttgacagccgccgtgctgttcaaagtccccgaagatgaagttgttcagcgtctgctgtctcgcctgatctgtccgaaatgcgggcgtatctacaacatgatttttctgccaccaaaagaagacgagctgtgtgacgattgcggtgtcggcttagtacagcgtgatgatgataaggaagaaacggtccgtcaccgcctgaaagtctaccttgagaagacccagccggtcattgactattatagtaagaaaggtattctcaaacgcgtagatgggtcgcaaggaatcgacaacgttgtggcagaagtcctggggattctgggttggagcgataagtaatga

SEQ ID NO: 2476 - protein, 231 aa, synthetic construct
  REGION 1..231: note = Variant of adenylate kinase
MHHHHHHGGSGMGAYLVFLGSPGAGKGTQGRRISAKTGIPHISTGDILRDIVAKQNDEVASKIKEIMEKGELVPDELGNAVVKRRLSEKDCEKGFILDGFPRTVRQAEYLDSFLESQNRQLTAAVLFKVPEDEVVQRLLSRLICPKCGRIYNMIFLPPKEDELCDDCGVGLVQRDDDKEETVRHRLKVYLEKTQPVIDYYSKKGILKRVDGSQGIDNVVAEVLGILGWSDK

SEQ ID NO: 2477 - DNA, 699 bp, synthetic construct
  misc_feature 1..699: note = Variant of adenylate kinase
  source 1..699: mol_type = other DNA
atgcaccatcatcaccatcacgggggctccggcatgggggcatatctggtgttcttaggtccgccgggcgcgggaaaaggtacccaaggccgtattatttcggcaaagactggcatcccgcatattagcacgggcgatatcctgcgtgacatcgtcgctaagcaaaacgatgaagttgcctcgaaaattaaagagatcatggagaaaggtgaactcgttccagatgaactgggtaatgcggtagtaaaacgccgcctgtcggagaaagactgcgaaaaaggctttattttggatggtttcccgcgtaccgtgcgccaagcggaatatctggatagttttcttgaaagccagaatcgccagttgacagccgccgtgctgttcaaagtccccgaagatgaagttgttcagcgtctgctgtctcgcctgatctgtccgaaatgcgggcgtatctacaacatgatttttctgccaccaaaagaagacgagctgtgtgacgattgcggtgtcggcttagtacagcgtgatgatgataaggaagaaacggtccgtcaccgcctgaaagtctaccttgagaagacccagccggtcattgactattatagtaagaaaggtattctcaaacgcgtagatgggtcgcaaggaatcgacaacgttgtggcagaagtcctggggattctgggttggagcgataagtaatga

SEQ ID NO: 2478 - protein, 231 aa, synthetic construct
  REGION 1..231: note = Variant of adenylate kinase
MHHHHHHGGSGMGAYLVFLGPPGAGKGTQGRIISAKTGIPHISTGDILRDIVAKQNDEVASKIKEIMEKGELVPDELGNAVVKRRLSEKDCEKGFILDGFPRTVRQAEYLDSFLESQNRQLTAAVLFKVPEDEVVQRLLSRLICPKCGRIYNMIFLPPKEDELCDDCGVGLVQRDDDKEETVRHRLKVYLEKTQPVIDYYSKKGILKRVDGSQGIDNVVAEVLGILGWSDK

SEQ ID NO: 2479 - DNA, 699 bp, synthetic construct
  misc_feature 1..699: note = Variant of adenylate kinase
  source 1..699: mol_type = other DNA
atgcaccatcatcaccatcacgggggctccggcatgggggcatatctggtgttcttaggtccgccgggcgcgggaaaaggtacccaaggccgtcgcatttcggcaaagactggcatcccgcatattagcacgggcgatatcctgcgtgacatcgtcgctaagcaaaacgatgaagttgcctcgaaaattaaagagatcatggagaaaggtgaactcgttccagatgaactgggtaatggggtagtaaaacgccgcctgtcggagaaagactgcgaaaaaggctttattttggatggtttcccgcgtaccgtgcgccaagcggaatatctggatagttttcttgaaagccagaatcgccagttgacagccgccgtgctgttcaaagtccccgaagatgaagttgttcagcgtctgctgtctcgcctgatctgtccgaaatgcgggcgtatctacaacatgatttttctgccaccaaaagaagacgagctgtgtgacgattgcggtgtcggcttagtacagcgtgatgatgataaggaagaaacggtccgtcaccgcctgaaagtctaccttgagaagacccagccggtcattgactattatagtaagaaaggtattctcaaacgcgtagatgggtcgcaaggaatcgacaacgttgtggcagaagtcctggggattctgggttggagcgataagtaatga

SEQ ID NO: 2480 - protein, 231 aa, synthetic construct
  REGION 1..231: note = Variant of adenylate kinase
MHHHHHHGGSGMGAYLVFLGPPGAGKGTQGRRISAKTGIPHISTGDILRDIVAKQNDEVASKIKEIMEKGELVPDELGNGVVKRRLSEKDCEKGFILDGFPRTVRQAEYLDSFLESQNRQLTAAVLFKVPEDEVVQRLLSRLICPKCGRIYNMIFLPPKEDELCDDCGVGLVQRDDDKEETVRHRLKVYLEKTQPVIDYYSKKGILKRVDGSQGIDNVVAEVLGILGWSDK

SEQ ID NO: 2481 - DNA, 699 bp, synthetic construct
  misc_feature 1..699: note = Variant of adenylate kinase
  source 1..699: mol_type = other DNA
atgcaccatcatcaccatcacgggggctccggcatgggggcatatctggtgttcttaggtccgccgggcgcgggaaaaggtacccaaggccgtcgcatttcggcaaagactggcatcccgcatattagcacgggcgatatcctgcgtgacatcgtcgctaagcaaaacgatgaagttgcctcgaaaattaaagagatcatggagaaaggtgaactcgttccagatgaactgggtaatgcggtagtaaaagagcgcctgtcggagaaagactgcgaaaaaggctttattttggatggtttcccgcgtaccgtgcgccaagcggaatatctggatagttttcttgaaagccagaatcgccagttgacagccgccgtgctgttcaaagtccccgaagatgaagttgttcagcgtctgctgtctcgcctgatctgtccgaaatgcgggcgtatctacaacatgatttttctgccaccaaaagaagacgagctgtgtgacgattgcggtgtcggcttagtacagcgtgatgatgataaggaagaaacggtccgtcaccgcctgaaagtctaccttgagaagacccagccggtcattgactattatagtaagaaaggtattctcaaacgcgtagatgggtcgcaaggaatcgacaacgttgtggcagaagtcctggggattctgggttggagcgataagtaatga

SEQ ID NO: 2482 - protein, 231 aa, synthetic construct
  REGION 1..231: note = Variant of adenylate kinase
MHHHHHHGGSGMGAYLVFLGPPGAGKGTQGRRISAKTGIPHISTGDILRDIVAKQNDEVASKIKEIMEKGELVPDELGNAVVKERLSEKDCEKGFILDGFPRTVRQAEYLDSFLESQNRQLTAAVLFKVPEDEVVQRLLSRLICPKCGRIYNMIFLPPKEDELCDDCGVGLVQRDDDKEETVRHRLKVYLEKTQPVIDYYSKKGILKRVDGSQGIDNVVAEVLGILGWSDK

SEQ ID NO: 2483 - DNA, 699 bp, synthetic construct
  misc_feature 1..699: note = Variant of adenylate kinase
  source 1..699: mol_type = other DNA
atgcaccatcatcaccatcacgggggctccggcatgggggcatatctggtgttcttaggtccgccgggcgcgggaaaaggtacccaaggccgtcgcatttcggcaaagactggcatcccgcatattagcacgggcgatatcctgcgtgacatcgtcgctaagcaaaacgatgaagttgcctcgaaaattaaagagatcatggagaaaggtgaactcgttccagatgaactgggtaatgcggtagtaaaacgccgcctgtcggagaaagactgcgaaaaaggctttattttggatggtttcccgcgtaccgtgcgccaagcggaatatctggatagttttcttgaaagccagaatcgccagttgacagccgccgtgctgttcaaagtccccgaagatgaagttgttcagcgtctgctgtctcgcctgatctgtccgaaatgcgggcgtatctacaacatgatttttctgccaccaaaagaagacgagctgtgtgacgattgcggtgtcggcttagtacagcgtgatgatgataaggaagaaacggtccgtcaccgcctgaaagtctaccttgagaagacccagccggtcattgactattatagtaagaaaggtattctcaaacgcgtagatgggtcgcaaggaatcgacaacgttgttgtggaagtcctggggattctgggttggagcgataagtaatga

SEQ ID NO: 2484 - protein, 231 aa, synthetic construct
  REGION 1..231: note = Variant of adenylate kinase
MHHHHHHGGSGMGAYLVFLGPPGAGKGTQGRRISAKTGIPHISTGDILRDIVAKQNDEVASKIKEIMEKGELVPDELGNAVVKRRLSEKDCEKGFILDGFPRTVRQAEYLDSFLESQNRQLTAAVLFKVPEDEVVQRLLSRLICPKCGRIYNMIFLPPKEDELCDDCGVGLVQRDDDKEETVRHRLKVYLEKTQPVIDYYSKKGILKRVDGSQGIDNVVVEVLGILGWSDK

SEQ ID NO: 2485 - DNA, 699 bp, synthetic construct
  misc_feature 1..699: note = Variant of adenylate kinase
  source 1..699: mol_type = other DNA
atgcaccatcatcaccatcacgggggctccggcatgggggcatatctggtgttcttaggtcctccgggcgcgggaaaaggtacccaaggccgtcgcatttcggcaaagactggcatcccgcatattagcacgggcgatatcctgcgtgacatcgtcgctaaacagaacgatgaagttgcctcgagcattaaagagatcatggagaaaggtgaactcgttccagatgaactgaccaatgcggtagtaaaacgccgcctgtcggagaaagactgcgaaaaaggctttattttggatggtttcccgcgtaccgtgcgccaagcggaatatctggatagttttcttgaaagccagaatcgccagttgacagccgccgtgctgttcaaagtccccgaagatgaagttgttcagcgtctgctgtctcgcctgatctgtccgaaatgcgggcgtatctacaacatgatttttctgccaccaaaagaagacgagctgtgtgacgattgcggtgtcggcttagtacagcgtgatgatgataagccggaaacggtccgtcaccgcctgaaagtctaccttgagaagacccagccggtcattgactattatagtaagaaaggtattctcaaacgcgtagatgggtcgcaaggaatcgacaacgttgtggcagaagtcctggggattctgggttggagcgataagtaatga

SEQ ID NO: 2486 - protein, 231 aa, synthetic construct
  REGION 1..231: note = Variant of adenylate kinase
MHHHHHHGGSGMGAYLVFLGPPGAGKGTQGRRISAKTGIPHISTGDILRDIVAKQNDEVASSIKEIMEKGELVPDELTNAVVKRRLSEKDCEKGFILDGFPRTVRQAEYLDSFLESQNRQLTAAVLFKVPEDEVVQRLLSRLICPKCGRIYNMIFLPPKEDELCDDCGVGLVQRDDDKPETVRHRLKVYLEKTQPVIDYYSKKGILKRVDGSQGIDNVVAEVLGILGWSDK

SEQ ID NO: 2487 - DNA, 699 bp, synthetic construct
  misc_feature 1..699: note = Variant of adenylate kinase
  source 1..699: mol_type = other DNA
atgcaccatcatcaccatcacgggggctccggcatgggggcatatctggtgttcttaggtccgccgggcgcgggaaaaggtacccaaggccgtcgcatttcggcaaagactggcatcccgcatattagcacgggcgatatcctgcgtgacatcgtcgctaagcaaaacgatgaagttgcctcgaaaattaaagagatcatggagaaaggtgaactcgttccagatgaactgggtaatgcggtagtaaaacgccgcctgtcggagaaagactgcgaaaaaggctttattttggatggtttcccgcgtaccgtgcgccaagcggaatatctggatagttttcttgaaagccagaatcgccagttgacagccgccgtgctgttcaaagtccccgaagatgaagttgttcagcgtctgctgtctcgcctgatctgtccgaaatgcgggcgtatctacaacatgatttttctgccaccaaaagaagacgagctgtgtgacgattgcggtgtcggcttagtacagcgtgatgatgataaggaagaaacggtccgtcaccgcctgaaagtctacgaggagaagacccagccggtcattgactattatagtaagaaaggtattctcaaacgcgtagatgggtcgcaaggaatcgacaacgttgtggcagaagtcctggggattctgggttggagcgataagtaatga

SEQ ID NO: 2488 - protein, 231 aa, synthetic construct
  REGION 1..231: note = Variant of adenylate kinase
MHHHHHHGGSGMGAYLVFLGPPGAGKGTQGRRISAKTGIPHISTGDILRDIVAKQNDEVASKIKEIMEKGELVPDELGNAVVKRRLSEKDCEKGFILDGFPRTVRQAEYLDSFLESQNRQLTAAVLFKVPEDEVVQRLLSRLICPKCGRIYNMIFLPPKEDELCDDCGVGLVQRDDDKEETVRHRLKVYEEKTQPVIDYYSKKGILKRVDGSQGIDNVVAEVLGILGWSDK

SEQ ID NO: 2489 - DNA, 699 bp, synthetic construct
  misc_feature 1..699: note = Variant of adenylate kinase
  source 1..699: mol_type = other DNA
atgcaccatcatcaccatcacgggggctccggcatgggggcatatctggtgttcttaggtcctccgggcgcgggaaaaggtacccaaggccgtcgcatttcggcaaagactggcatcccgcatattagcacgggcgatatcctgcgtgacatcgtcgctaaaagcaacgatgaagttgcctcggaaattaaagagatcatggagaaaggtgaactcgttccagatgaactgggtaatgcggtagtaaaagcgcgcctgtcggagaaagactgcgaaaaaggctttattttggatggtttcccgcgtaccgtgcgccaagcggaatatctggatagttttcttgaaagccagaatcgccagttgacagccgccgtgctgttcaaagtccccgaagatgaagttgttcagcgtctgctgtctcgcctgatctgtccgaaatgcgggcgtatctacaacatgatttttctgccaccaaaagaagacgagctgtgtgacgattgcggtgtcggcttagtacagcgtgatgatgataaggaagaaacggtccgtcaccgcctgaaagtctaccttgagaagacccagccggtcattgactattatagtaagaaaggtattctcaaacgcgtagatgggtcgcaaggaatcgacaacgttgtggcagaagtcctggggattctgggttggagcgataagtaatga

SEQ ID NO: 2490 - protein, 231 aa, synthetic construct
  REGION 1..231: note = Variant of adenylate kinase
MHHHHHHGGSGMGAYLVFLGPPGAGKGTQGRRISAKTGIPHISTGDILRDIVAKSNDEVASEIKEIMEKGELVPDELGNAVVKARLSEKDCEKGFILDGFPRTVRQAEYLDSFLESQNRQLTAAVLFKVPEDEVVQRLLSRLICPKCGRIYNMIFLPPKEDELCDDCGVGLVQRDDDKEETVRHRLKVYLEKTQPVIDYYSKKGILKRVDGSQGIDNVVAEVLGILGWSDK

SEQ ID NO: 2491 - DNA, 699 bp, synthetic construct
  misc_feature 1..699: note = Variant of adenylate kinase
  source 1..699: mol_type = other DNA
atgcaccatcatcaccatcacgggggctccggcatgggggcatatctggtgttcttaggtcgtccgggcgcgggaaaaggtacccaaggccgtcgcatttcggcaaagactggcatcccgcatattagcacgggcgatatcctgcgtgacatcgtcgctaaaagcaacgatgaagttgcctcgaaaattaaagagatcatggagaaaggtgaactcgttccagatgaactgggtaatgcggtagtaaaacgccgcctgtcggagaaagactgcgaaaaaggctttattttggatggtttcccgcgtaccgtgcgccaagcggaatatctggatagttttcttgaaagccagaatcgccagttgacagccgccgtgctgttcaaagtccccgaagatgaagttgttcagcgtctgctgtctcgcctgatctgtccgaaatgcgggcgtatctacaacatgatttttctgccaccaaaagaagacgagctgtgtgacgattgcggtgtcggcttagtacagcgtgatgatgataaggaagaaacggtccgtcaccgcctgaaagtctaccatgagaagacccagccggtcattgactattatagtaagaaaggtattctcaaacgcgtagatgggaaccaaggaatcgacaacgttgtggcagaagtcctggggattctgggttggagcgataagtaatga

SEQ ID NO: 2492 - protein, 231 aa, synthetic construct
  REGION 1..231: note = Variant of adenylate kinase
MHHHHHHGGSGMGAYLVFLGRPGAGKGTQGRRISAKTGIPHISTGDILRDIVAKSNDEVASKIKEIMEKGELVPDELGNAVVKRRLSEKDCEKGFILDGFPRTVRQAEYLDSFLESQNRQLTAAVLFKVPEDEVVQRLLSRLICPKCGRIYNMIFLPPKEDELCDDCGVGLVQRDDDKEETVRHRLKVYHEKTQPVIDYYSKKGILKRVDGNQGIDNVVAEVLGILGWSDK

SEQ ID NO: 2493 - DNA, 699 bp, synthetic construct
  misc_feature 1..699: note = Variant of adenylate kinase
  source 1..699: mol_type = other DNA
atgcaccatcatcaccatcacgggggctccggcatgggggcatatctggtgttcttaggtccgccgggcgcgggaaaaggtacccaaggccgtattatttcggcaaagactggcatcccgcatattagcacgggcgatatcctgcgtgacatcgtcgctaagcaaaacgatgaagttgcctcgaaaattaaagagatcatggagaaaggtgaactcgttccagatgaactgggtaatgcggtggtaaaacgccgcctgtcggagaaagactgcgaaaaaggctttattttggatggtttcccgcgtaccgtgcgccaagcggaatatctggatagttttcttgaaagccagaatcgccagttgacagccgccgtgctgattaacgtccccgaagatgaagttgttcagcgtctgctgtctcgcctgatctgtccgaaatgcgggcgtatctacaacatgatttttctgccaccaaaagaagacgagctgtgtgacgattgcggtgtcggcttagtacagcgtgatgatgataaggaagaaacggtccgtcaccgcctgaaagtctaccttgagaagacccagccggtcattgactattatagtaagaaaggtattctcaaacgcgtagatgggtcgcaaggaatcgacaacgttgtggcagaagtcctgggggcgctgggttggagcgataagtaatga

SEQ ID NO: 2494 - protein, 231 aa, synthetic construct
  REGION 1..231: note = Variant of adenylate kinase
MHHHHHHGGSGMGAYLVFLGPPGAGKGTQGRIISAKTGIPHISTGDILRDIVAKQNDEVASKIKEIMEKGELVPDELGNAVVKRRLSEKDCEKGFILDGFPRTVRQAEYLDSFLESQNRQLTAAVLINVPEDEVVQRLLSRLICPKCGRIYNMIFLPPKEDELCDDCGVGLVQRDDDKEETVRHRLKVYLEKTQPVIDYYSKKGILKRVDGSQGIDNVVAEVLGALGWSDK

SEQ ID NO: 2495 - DNA, 699 bp, synthetic construct
  misc_feature 1..699: note = Variant of adenylate kinase
  source 1..699: mol_type = other DNA
atgcaccatcatcaccatcacgggggctccggcatgggggcatatctggtgttcttaggtcgtccgggcgcgggaaaaggtacccaaggccgtcgcatttcggcaaagactggcatcccgcatattagcacgggcgatatcctgcgtgacatcgtcgctacaagcaacgatgaagttgcctcgaaaattaaagagatcatggagaaaggtgaactcgttccagatgaactgggtaatgcggtagtaaaagcgcgcctgtcggagaaagactgcgaaaaaggctttattttggatggtttcccgcgtaccgtgcgccaagcggaatatctggatagttttcttgaaagccagaatcgccagttgacagccgccgtgctgttcaaagtccccgaagatgaagttgttcagcgtctgctgtctcgcctgatctgtccgaaatgcgggcgtatctacaacatgatttttctgccaccaaaagaagacgagctgtgtgacgattgcggtgtcggcttagtacagcgtgatgatgataagccggaaacggtccgtcaccgcctgaaagtctaccttgagaagacccagccggtcattgactattatagtaagaaaggtattctcaaacgcgtagatgggtcgcaaggaatcgacaacgttgtggcagaagtcctggggattctgggttggagcgataagtaatga

SEQ ID NO: 2496 - protein, 231 aa, synthetic construct
  REGION 1..231: note = Variant of adenylate kinase
MHHHHHHGGSGMGAYLVFLGRPGAGKGTQGRRISAKTGIPHISTGDILRDIVATSNDEVASKIKEIMEKGELVPDELGNAVVKARLSEKDCEKGFILDGFPRTVRQAEYLDSFLESQNRQLTAAVLFKVPEDEVVQRLLSRLICPKCGRIYNMIFLPPKEDELCDDCGVGLVQRDDDKPETVRHRLKVYLEKTQPVIDYYSKKGILKRVDGSQGIDNVVAEVLGILGWSDK

SEQ ID NO: 2497 - DNA, 699 bp, synthetic construct
  misc_feature 1..699: note = Variant of adenylate kinase
  source 1..699: mol_type = other DNA
atgcaccatcatcaccatcacgggggctccggcatgggggcatatctggtgttcttaggtcgtccgggcgcgggaaaaggtacccaaggccgtcgcatttcggcaaagactggcatcccgcatattagcacgggcgatatcctgcgtgacatcgtcgctaaacagaacgatgaagttgcctcgaaaattaaagagatcatggagaaaggtgaactcgttccagatgaactgggtaatgcggtagtaaaacgccgcctgtcggagaaagactgcgaaaaaggctttattttggatggtttcccgcgtaccgtgcgccaagcggaatatctggatagttttcttgaaagccagaatcgccagttgacagccgccgtgctgttcaaagtccccgaagatgaagttgttcagcgtctgctgtctcgcctgatctgtccgaaatgcgggcgtatctacaacatgatttttctgccaccaaaagaagacgagctgtgtgacgattgcggtgtcggcttagtacagcgtgatgatgataaggaagaaacggtccgtcaccgcctgaaagtctaccgtgagaagacccagccggtcattgactattatagtaagaaaggtattctcaaacgcgtagatgggagccaaggaatcgacaacgttgtggcagaagtcctggggattctgggttggagcgataagtaatga

SEQ ID NO: 2498 - protein, 231 aa, synthetic construct
  REGION 1..231: note = Variant of adenylate kinase
MHHHHHHGGSGMGAYLVFLGRPGAGKGTQGRRISAKTGIPHISTGDILRDIVAKQNDEVASKIKEIMEKGELVPDELGNAVVKRRLSEKDCEKGFILDGFPRTVRQAEYLDSFLESQNRQLTAAVLFKVPEDEVVQRLLSRLICPKCGRIYNMIFLPPKEDELCDDCGVGLVQRDDDKEETVRHRLKVYREKTQPVIDYYSKKGILKRVDGSQGIDNVVAEVLGILGWSDK

SEQ ID NO: 2499 - DNA, 699 bp, synthetic construct
  misc_feature 1..699: note = Variant of adenylate kinase
  source 1..699: mol_type = other DNA
atgcaccatcatcaccatcacgggggctccggcatgggggcatatctggtgttcttaggtccgccgggcgcgggaaaaggtacccaaggccgtattatttcggcaaagacaggcatcccgcatattagcacgggcgatatcctgcgtgacatcgtcgctaagcaaaacgatgaagtttcgtcgaaaattaaagagatcatggagaaaggtgaactcgttccagatgaactgggtaatgcgctggtaagccgccgcctgtcggagaaagactgcgaaaaaggctttattttggatggtttcccgcgtaccgtgcgccaagcggaatatctggatagttttcttgaaagccagaatcgccagttgacagccgccgtgctgtttaacgtccccgaagatgaagttatgcagcgtctgctgtctcgcctgatctgtccgaaatgcgggcgtatctacaacatgatttttctgccaccaaaagaagacgagctgtgtgacgattgcggtgtcggcttagtacagcgtgatgatgataaggaagaaacggtccgtcaccgcctgaaagtctaccttgagaagacccagccggtcattgactattatagtaagaaaggtattctcaaacgcgtagatgggtcgcaaggaatcgacaacgttgtggcagaagtcctggggattctgggttggagcgataagtaatga

SEQ ID NO: 2500 - protein, 231 aa, synthetic construct
  REGION 1..231: note = Variant of adenylate kinase
MHHHHHHGGSGMGAYLVFLGPPGAGKGTQGRIISAKTGIPHISTGDILRDIVAKQNDEVSSKIKEIMEKGELVPDELGNALVSRRLSEKDCEKGFILDGFPRTVRQAEYLDSFLESQNRQLTAAVLFNVPEDEVMQRLLSRLICPKCGRIYNMIFLPPKEDELCDDCGVGLVQRDDDKEETVRHRLKVYLEKTQPVIDYYSKKGILKRVDGSQGIDNVVAEVLGILGWSDK

SEQ ID NO: 2501 - DNA, 699 bp, synthetic construct
  misc_feature 1..699: note = Variant of adenylate kinase
  source 1..699: mol_type = other DNA
atgcaccatcatcaccatcacgggggctccggcatgggggcatatctggtgttcttaggtccgccgggcgcgggaaaaggtacccaaggccgtcgcatttcggcaaagactggcatcccgcatattagcacgggcgatatcctgcgtgacatcgtcgctaagcaaaacgatgaagttgcctcgaaaattaaagagatcatggagaaaggtgaactcgttccagatgaactgggtaatgcggtagtaaaacgccgcctgtcggagaaagactgcgaaaaaggctttattttggatggtttcccgcgtaccgtgcgccaagcggaatatctggatagttttcttgaaagccagaatcgccagttgacagccgccgtgctgattaacgtccccgaagatgaagttgttcagcgtctgctgtctcgcctgatctgtccgaaatgcgggcgtatctacaacatgatttttctgccaccaaaagaagacgagctgtgtgacgattgcggtgtcggcttagtacagcgtgatgatgataaggaagaaacggtccgtcaccgcctgaaagtctaccttgagaagacccagccggtcattgactattatagtaagaaaggtattctcaaacgcgtagatgggtcgcaaggaatcgacaacgttgtggcagaagtcctggggattctgggttggagcgataagtaatga

SEQ ID NO: 2502 - protein, 231 aa, synthetic construct
  REGION 1..231: note = Variant of adenylate kinase
MHHHHHHGGSGMGAYLVFLGPPGAGKGTQGRRISAKTGIPHISTGDILRDIVAKQNDEVASKIKEIMEKGELVPDELGNAVVKRRLSEKDCEKGFILDGFPRTVRQAEYLDSFLESQNRQLTAAVLINVPEDEVVQRLLSRLICPKCGRIYNMIFLPPKEDELCDDCGVGLVQRDDDKEETVRHRLKVYLEKTQPVIDYYSKKGILKRVDGSQGIDNVVAEVLGILGWSDK

SEQ ID NO: 2503 - DNA, 699 bp, synthetic construct
  misc_feature 1..699: note = Variant of adenylate kinase
  source 1..699: mol_type = other DNA
atgcaccatcatcaccatcacgggggctccggcatgggggcatatctggtgttcttaggtcgtccgggcgcgggaaaaggtacccaaggccgtcgcatttcggcaaagactggcatcccgcatattagcacgggcgatatcctgcgtgacatcgtcgctaaaagcaacgatgaagttgcctcgaaaattaaagagatcatggagaaaggtgaactcgttccagatgaactgggtaatgcggtagtaaaacgccgcctgtcggagaaagactgcgaaaaaggctttattttggatggtttcccgcgtaccgtgcgccaagcggaatatctggatagttttcttgaaagccagaatcgccagttgacagccgccgtgctgttcaaagtccccgaagatgaagttgttcagcgtctgctgtctcgcctgatctgtccgaaatgcgggcgtatctacaacatgatttttctgccaccaaaagaagacgagctgtgtgacgattgcggtgtcggcttagtacagcgtgatgatgataagccggaaacggtccgtcaccgcctgaaagtctaccttgagaagacccagccggtcattgactattatagtaagaaaggtattctcaaacgcgtagatgggagccaaggaatcgacaacgttgtggcagaagtcctggggattctgggttggagcgataagtaatga

SEQ ID NO: 2504 - protein, 231 aa, synthetic construct
  REGION 1..231: note = Variant of adenylate kinase
MHHHHHHGGSGMGAYLVFLGRPGAGKGTQGRRISAKTGIPHISTGDILRDIVAKSNDEVASKIKEIMEKGELVPDELGNAVVKRRLSEKDCEKGFILDGFPRTVRQAEYLDSFLESQNRQLTAAVLFKVPEDEVVQRLLSRLICPKCGRIYNMIFLPPKEDELCDDCGVGLVQRDDDKPETVRHRLKVYLEKTQPVIDYYSKKGILKRVDGSQGIDNVVAEVLGILGWSDK

SEQ ID NO: 2505 - DNA, 1257 bp, synthetic construct
  misc_feature 1..1257: note = Variant of acetate kinase
  source 1..1257: mol_type = other DNA
atgcaccatcatcatcatcatggcggtagcggcatgaaagttctggtgattaattctggtagctcctccatcaaatatcagctcctcgatatgaccaacgaaaaggtattagcgaaaggcttggtcgagcgcattggcatcgacggttcgcgtatcgtgcataaagttaacggcgaaaaacacgtgctggaacatgagattaagaatcacgaaattggacttaaattggtcctggatcttcttacggacgaaaaatacggtgtgttgaaggatctcaaagaaatcgatgcatgggggcatcgcgtagtacatggcggcgagcgttttgccagtagcgtgaagattactgacgaagtcttaaagaccatcgagacgttgtcgttcttagctccgttacacaatccagcgaacattatgggtatcaagagcagcatgaaattattaccgggtgtgcctcaagttgccgtctttgatacagcgttccaccagaagatgccggagaaagcctatttgtacgcaatcccctatgagtactacgagaaatataaaattcgccgctatgggtttcatggaacctcacatcgttatgtgagtaaacgtgctgcggaaattatgggcaaaccgtacgatcagctcaagatcattaccgttcacgtgggtaacggcgcatcagttgcggcggtgaagaatggcgtatctgttgacacttccatgggtttcacaccacttgaaggtcttgtcatgggcacgcgcagcggcgatattgatccggccatcgtggaatttcttgagaaagaagaaggattgtcggccaaagaagtcgtcaacatcctcaacaagaaatctggtgtgtatgggctcaccaaaggctttagtagtgacatgcgtgacattgaagataatgctattgaaggtgatcctgtatgccgccttgcattcgatgtgtacgaatatcgtatcgcgaaatatattggcgcatacgctgcggccatgaacggtgttgacgcgatcgtctttaccgcaggagttggcgaaaatagcccgattatgcgcgaagaaattattgagaactacttgggctacttagggatcaagatcgataaagaagccaatgacttcaaaggtgaggagaagatcatttcaacgcccgattccaaagtgattgcgatggtagttccgaccaacgaggagctcatgatcgccaaagacacgaaagaaatcattgagaaagggttggacgagcttaagatctaatga

SEQ ID NO: 2506 - protein, 417 aa, synthetic construct
  REGION 1..417: note = Variant of acetate kinase
MHHHHHHGGSGMKVLVINSGSSSIKYQLLDMTNEKVLAKGLVERIGIDGSRIVHKVNGEKHVLEHEIKNHEIGLKLVLDLLTDEKYGVLKDLKEIDAWGHRVVHGGERFASSVKITDEVLKTIETLSFLAPLHNPANIMGIKSSMKLLPGVPQVAVFDTAFHQKMPEKAYLYAIPYEYYEKYKIRRYGFHGTSHRYVSKRAAEIMGKPYDQLKIITVHVGNGASVAAVKNGVSVDTSMGFTPLEGLVMGTRSGDIDPAIVEFLEKEEGLSAKEVVNILNKKSGVYGLTKGFSSDMRDIEDNAIEGDPVCRLAFDVYEYRIAKYIGAYAAAMNGVDAIVFTAGVGENSPIMREEIIENYLGYLGIKIDKEANDFKGEEKIISTPDSKVIAMVVPTNEELMIAKDTKEIIEKGLDELKI

SEQ ID NO: 2507 - DNA, 1257 bp, synthetic construct
  misc_feature 1..1257: note = Variant of acetate kinase
  source 1..1257: mol_type = other DNA
atgcaccatcatcatcatcatggcggtagcggcatgaaagttctggtgattaattctggtagctcctccatcaaatatcagctcctcgatatgaccaacgaaaaggtattagcgaaaggcttggtcgagcgcattggcatcgacggttcgcgtatcgtgcataaagttaacggcgaaaaacacgtgctggaacatgagattaagaatcacgaaattggacttaaattggtcctggatcttcttacggacgaaaaatacggtgtgttgaaggatctcaaagaaatcgatgcagttgggcatcgcgtagtacatggcggcgagcgttttgccagtagcgtgaagattactgacgaagtcttaaagaccatcgagacgttgtcgttcttagctccgttacacaatccagcgaacattatgggtatcaagagcagcatgaaattattaccgggtgtgcctcaagttgccgtctttgatacagcgttccaccagaagatgccggagaaagcctatttgtacgcaatcccctatgagtactacgagaaatataaaattcgccgctatgggtttcatggaacctcacatcgttatgtgagtaaacgtgctgcggaaattatgggcaaaccgtacgatcagctcaagatcattaccgttcacgtgggtaacggcgcatcagttgcggcggtgaagaatggcgtatctgttgacacttccatgggtttcacaccacttgaaggtcttgtcatgggcacgcgcagcggcgatattgatccggccatcgtggaatttcttgagaaagaagaaggattgtcggccaaagaagtcgtcaacatcctcaacaagaaatctggtgtgtatgggctcaccaaaggctttagtagtgacatgcgtgacattgaagataatgctattgaaggtgatcctgtatgccgccttgcattcgatgtgtacgaatatcgtatcgcgaaatatattggcgcatacgctgcggccatgaacggtgttgacgcgatcgtctttaccgcaggagttggcgaaaatagcccgattatgcgcgaagaaattattgagaactacttgggctacttagggatcaagatcgataaagaagccaatgacttcaaaggtgaggagaagatcatttcaacgcccgattccaaagtgattgcgatggtagttccgaccaacgaggagctcatgatcgccaaagacatgaaagaaatcattgagaaagggttggacgagcttaagatctaatga

SEQ ID NO: 2508 - protein, 417 aa, synthetic construct
  REGION 1..417: note = Variant of acetate kinase
MHHHHHHGGSGMKVLVINSGSSSIKYQLLDMTNEKVLAKGLVERIGIDGSRIVHKVNGEKHVLEHEIKNHEIGLKLVLDLLTDEKYGVLKDLKEIDAVGHRVVHGGERFASSVKITDEVLKTIETLSFLAPLHNPANIMGIKSSMKLLPGVPQVAVFDTAFHQKMPEKAYLYAIPYEYYEKYKIRRYGFHGTSHRYVSKRAAEIMGKPYDQLKIITVHVGNGASVAAVKNGVSVDTSMGFTPLEGLVMGTRSGDIDPAIVEFLEKEEGLSAKEVVNILNKKSGVYGLTKGFSSDMRDIEDNAIEGDPVCRLAFDVYEYRIAKYIGAYAAAMNGVDAIVFTAGVGENSPIMREEIIENYLGYLGIKIDKEANDFKGEEKIISTPDSKVIAMVVPTNEELMIAKDMKEIIEKGLDELKI

SEQ ID NO: 2509 - DNA, 1257 bp, synthetic construct
  misc_feature 1..1257: note = Variant of acetate kinase
  source 1..1257: mol_type = other DNA
atgcaccatcatcatcatcatggcggtagcggcatgaaagttctggtgattaattctggtagctcctccatcaaatatcagctcctcgatatgaccaacgaaaaggtattagcgaaaggcttggtcgagcgcattggcatcgacggttcgcgtatcgtgcataaagttaacggcgaaaaacacgtgctggaacatgagattaagaatcacgaaattggacttaaattggtcctggatcttcttacggacgaaaaatacggtgtgttgaaggatctcaaagaaatcgatgcagttgggcatcgcgtagtacatggcggcgagcgttttgccagtagcgtgaagattactgacgaagtcttaaagaccatcgagacgttgtcgttcttagctccgttacacaatccagcgtttattatgggtatcaagagcatcatgaaattattaccgggtgtgcctcaagttgccgtctttgatacagcgttccaccagaagatgccggagaaagcctatttgtacgcaatcccctatgagtactacgagaaatataaaattcgccgctatgggtttcatggaacctcacatcgttatgtgagtaaacgtgctgcggaaattatgggcaaaccgtacgatcagctcaagatcattaccgttcacgtgggtaacggcgcatcagttgcggcggtgaagaatggcgtatctgttgacacttccatgggtttcacaccacttgaaggtcttgtcatgggcacgcgcagcggcgatattgatccggccatcgtggaatttcttgagaaagaagaaggattgtcggccaaagaagtcgtcaacatcctcaacaagaaatctggtgtgtatgggctcaccaaaggctttagtagtgacatgcgtgacattgaagataatgctattgaaggtgatcctgtatgccgccttgcattcgatgtgtacgaatatcgtatcgcgaaatatattggcgcatacgctgcggccatgaacggtgttgacgcgatcgtctttaccgcaggagttggcgaaaatagcccgattatgcgcgaagaaattattgagaactacttgggctacttagggatcaagatcgataaagaagccaatgacttcaaaggtgaggagaagatcatttcaacgcccgattccaaagtgattgcgatggtagttccgaccaacgaggagctcatgatcgccaaagacacgaaagaaatcattgagaaagggttggacgagcttaagatctaatga

SEQ ID NO: 2510 - protein, 417 aa, synthetic construct
  REGION 1..417: note = Variant of acetate kinase
MHHHHHHGGSGMKVLVINSGSSSIKYQLLDMTNEKVLAKGLVERIGIDGSRIVHKVNGEKHVLEHEIKNHEIGLKLVLDLLTDEKYGVLKDLKEIDAVGHRVVHGGERFASSVKITDEVLKTIETLSFLAPLHNPAFIMGIKSIMKLLPGVPQVAVFDTAFHQKMPEKAYLYAIPYEYYEKYKIRRYGFHGTSHRYVSKRAAEIMGKPYDQLKIITVHVGNGASVAAVKNGVSVDTSMGFTPLEGLVMGTRSGDIDPAIVEFLEKEEGLSAKEVVNILNKKSGVYGLTKGFSSDMRDIEDNAIEGDPVCRLAFDVYEYRIAKYIGAYAAAMNGVDAIVFTAGVGENSPIMREEIIENYLGYLGIKIDKEANDFKGEEKIISTPDSKVIAMVVPTNEELMIAKDTKEIIEKGLDELKI

SEQ ID NO: 2511 - DNA, 1257 bp, synthetic construct
  misc_feature 1..1257: note = Variant of acetate kinase
  source 1..1257: mol_type = other DNA
atgcaccatcatcatcatcatggcggtagcggcatgaaagttctggtgattaattctggtagctcctccatcaaatatcagctcctcgatatgaccaacgaaaaggtattagcgaaaggcttggtcgagcgcattggcatcgacggttcgcgtatcgtgcataaagttaacggcgaaaaacacgtgctggaacatgagattaagaatcacgaaattggacttaaattggtcctggatcttcttacggacgaaaaatacggtgtgttgaaggatctcaaagaaatcgatgcaatggggcatcgcgtagtacatggcggcgagcgttttgccagtagcgtgaagattactgacgaagtcttaaagaccatcgagacgttgtcgttcttagctccgttacacaatccagcgaacattatgggtatcaagagcagcatgaaattattaccgggtgtgcctcaagttgccgtctttgatacagcgttccaccagaagatgccggagaaagcctatttgtacgcaatcccctatgagtactacgagaaatataaaattcgccgctatgggtttcatggaacctcacatcgttatgtgagtaaacgtgctgcggaaattatgggcaaaccgtacgatcagctcaagatcattaccgttcacgtgggtaacggcgcatcagttgcggcggtgaagaatggcgtatctgttgacacttccatgggtttcacaccacttgaaggtcttgtcatgggcacgcgcagcggcgatattgatccggccatcgtggaatttcttgagaaagaagaaggattgtcggccaaagaagtcgtcaacatcctcaacaagaaatctggtgtgtatgggctcaccaaaggctttagtagtgacatgcgtgacattgaagataatgctattgaaggtgatcctgtatgccgccttgcattcgatgtgtacgaatatcgtatcgcgaaatatattggcgcatacgctgcggccatgaacggtgttgacgcgatcgtctttaccgcaggagttggcgaaaatagcccgattatgcgcgaagaaattattgagaactacttgggctacttagggatcaagatcgataaagaagccaatgacttcaaaggtgaggagaagatcatttcaacgcccgattccaaagtgattgcgatggtagttccgaccaacgaggagctcatgatcgccaaagacacgaaagaaatcattgagaaagggttggacgagcttaagatctaatga

SEQ ID NO: 2512 - protein, 417 aa, synthetic construct
  REGION 1..417: note = Variant of acetate kinase
MHHHHHHGGSGMKVLVINSGSSSIKYQLLDMTNEKVLAKGLVERIGIDGSRIVHKVNGEKHVLEHEIKNHEIGLKLVLDLLTDEKYGVLKDLKEIDAMGHRVVHGGERFASSVKITDEVLKTIETLSFLAPLHNPANIMGIKSSMKLLPGVPQVAVFDTAFHQKMPEKAYLYAIPYEYYEKYKIRRYGFHGTSHRYVSKRAAEIMGKPYDQLKIITVHVGNGASVAAVKNGVSVDTSMGFTPLEGLVMGTRSGDIDPAIVEFLEKEEGLSAKEVVNILNKKSGVYGLTKGFSSDMRDIEDNAIEGDPVCRLAFDVYEYRIAKYIGAYAAAMNGVDAIVFTAGVGENSPIMREEIIENYLGYLGIKIDKEANDFKGEEKIISTPDSKVIAMVVPTNEELMIAKDTKEIIEKGLDELKI

SEQ ID NO: 2513 - DNA, 1257 bp, synthetic construct
  misc_feature 1..1257: note = Variant of acetate kinase
  source 1..1257: mol_type = other DNA
atgcaccatcatcatcatcatggcggtagcggcatgaaagttctggtgattaattctggtagctcctccatcaaatatcagctcctcgatatgaccaacgaaaaggtattagcgaaaggcttggtcgagcgcattggcatcgacggttcgcgtatcgtgcataaagttaacggcgaaaaacacgtgctggaacatgagattaagaatcacgaaattggacttaaattgggtctggatcttcttacggacgaaaaatacggtgtgttgaaggatctcaaagaaatcgatgcagttgggcatcgcgtagtacatggcggcgagcgttttgccagtagcgtgaagattactgacgaagtcttaaagaccatcgagacgttgtcgttcttagctccgttacacaatccagcgaacattatgggtatcaagagcagcatgaaattattaccgggtgtgcctcaagttgccgtctttgatacagcgttccaccagaagatgccggagaaagcctatttgtacgcaatcccctatgagtactacgagaaatataaaattcgccgctatgggtttcatggaacctcacatcgttatgtgagtaaacgtgctgcggaaattatgggcaaaccgtacgatcagctcaagatcattaccgttcacgtgggtaacggcgcatcagttgcggcggtgaagaatggcgtatctgttgacacttccatgggtttcacaccacttgaaggtcttgtcatgggcacgcgcagcggcgatattgatccggccatcgtggaatttcttgagaaagaagaaggattgtcggccaaagaagtcgtcaacatcctcaacaagaaatctggtgtgtatgggctcaccaaaggctttagtagtgacatgcgtgacattgaagataatgctattgaaggtgatcctgtatgccgccttgcattcgatgtgtacgaatatcgtatcgcgaaatatattggcgcatacgctgcggccatgaacggtgttgacgcgatcgtctttaccgcaggagttggcgaaaatagcccgattatgcgcgaagaaattattgagaactacttgggctacttagggatcaagatcgataaagaagccaatgacttcaaaggtgaggagaagatcatttcaacgcccgattccaaagtgattgcgatggtagttccgaccaacgaggagctcatgatcgccaaagacacgaaagaaatcattgagaaagggttggacgagcttaagatctaatga

SEQ ID NO: 2514 - protein, 417 aa, synthetic construct
  REGION 1..417: note = Variant of acetate kinase
MHHHHHHGGSGMKVLVINSGSSSIKYQLLDMTNEKVLAKGLVERIGIDGSRIVHKVNGEKHVLEHEIKNHEIGLKLGLDLLTDEKYGVLKDLKEIDAVGHRVVHGGERFASSVKITDEVLKTIETLSFLAPLHNPANIMGIKSSMKLLPGVPQVAVFDTAFHQKMPEKAYLYAIPYEYYEKYKIRRYGFHGTSHRYVSKRAAEIMGKPYDQLKIITVHVGNGASVAAVKNGVSVDTSMGFTPLEGLVMGTRSGDIDPAIVEFLEKEEGLSAKEVVNILNKKSGVYGLTKGFSSDMRDIEDNAIEGDPVCRLAFDVYEYRIAKYIGAYAAAMNGVDAIVFTAGVGENSPIMREEIIENYLGYLGIKIDKEANDFKGEEKIISTPDSKVIAMVVPTNEELMIAKDTKEIIEKGLDELKI

SEQ ID NO: 2515 - DNA, 1257 bp, synthetic construct
  misc_feature 1..1257: note = Variant of acetate kinase
  source 1..1257: mol_type = other DNA
atgcaccatcatcatcatcatggcggtagcggcatgaaagttctggtgattaattctggtagctcctccatcaaatatcagctcctcgatatgaccaacgaaaaggtattagcgaaaggcttggtcgagcgcattggcatcgacggttcgcgtatcgtgcataaagttaacggcgaaaaacacgtgctggaacatgagattaagaatcacgaaattggactttttttggtcctggatcttcttacggacgaaaaatacggtgtgttgaaggatctcaaagaaatcgatgcagttgggcatcgcgtagtacatggcggcgagcgttttgccagtagcgtgaagattactgacgaagtcttaaagaccatcgagacgttgtcgttcttagctccgttacacaatccagcgaacattatgggtatcaagagcagcatgaaattattaccgggtgtgcctcaagttgccgtctttgatacagcgttccaccagaagatgccggagaaagcctatttgtacgcaatcccctatgagtactacgagaaatataaaattcgccgctatgggtttcatggaacctcacatcgttatgtgagtaaacgtgctgcggaaattatgggcaaaccgtacgatcagctcaagatcattaccgttcacgtgggtaacggcgcatcagttgcggcggtgaagaatggcgtatctgttgacacttccatgggtttcacaccacttgaaggtcttgtcatgggcacgcgcagcggcgatattgatccggccatcgtggaatttcttgagaaagaagaaggattgtcggccaaagaagtcgtcaacatcctcaacaagaaatctggtgtgtatgggctcaccaaaggctttagtagtgacatgcgtgacattgaagataatgctattgaaggtgatcctgtatgccgccttgcattcgatgtgtacgaatatcgtatcgcgaaatatattggcgcatacgctgcggccatgaacggtgttgacgcgatcgtctttaccgcaggagttggcgaaaatagcccgattatgcgcgaagaaattattgagaactacttgggctacttagggatcaagatcgataaagaagccaatgacttcaaaggtgaggagaagatcatttcaacgcccgattccaaagtgattgcgatggtagttccgaccaacgaggagctcatgatcgccaaagacacgaaagaaatcattgagaaagggttggacgagcttaagatctaatga

SEQ ID NO: 2516 - protein, 417 aa, synthetic construct
  REGION 1..417: note = Variant of acetate kinase
MHHHHHHGGSGMKVLVINSGSSSIKYQLLDMTNEKVLAKGLVERIGIDGSRIVHKVNGEKHVLEHEIKNHEIGLFLVLDLLTDEKYGVLKDLKEIDAVGHRVVHGGERFASSVKITDEVLKTIETLSFLAPLHNPANIMGIKSSMKLLPGVPQVAVFDTAFHQKMPEKAYLYAIPYEYYEKYKIRRYGFHGTSHRYVSKRAAEIMGKPYDQLKIITVHVGNGASVAAVKNGVSVDTSMGFTPLEGLVMGTRSGDIDPAIVEFLEKEEGLSAKEVVNILNKKSGVYGLTKGFSSDMRDIEDNAIEGDPVCRLAFDVYEYRIAKYIGAYAAAMNGVDAIVFTAGVGENSPIMREEIIENYLGYLGIKIDKEANDFKGEEKIISTPDSKVIAMVVPTNEELMIAKDTKEIIEKGLDELKI

SEQ ID NO: 2517 - DNA, 1257 bp, synthetic construct
  misc_feature 1..1257: note = Variant of acetate kinase
  source 1..1257: mol_type = other DNA
atgcaccatcatcatcatcatggcggtagcggcatgaaagttctggtgattaattctggtagctcctccatcaaatatcagctcctcgatatgaccaacgaaaaggtattagcgaaaggcttggtcgagcgcattggcatcgacggttcgcgtatcgtgcataaagttaacggcgaaaaacacgtgctggaacatgagattaagaatcacgaaattggacttaaattggtcctggatcttcttacggacgaaaaatacggtgtgttgaaggatctcaaagaaatcgatgcagttgggcatcgcgtagtacatggcggcgagcgttttgccagtagcgtgaagtctactgacgaagtcttaaagaccatcgagacgttgtcgttcttagctccgttacacaatccagcgaacattatgggtatcaagagcagcatgaaattattaccgggtgtgcctcaagttgccgtctttgatacagcgttccaccagaagatgccggagaaagcctatttgtacgcaatcccctatgagtactacgagaaatataaaattcgccgctatgggtttcatggaacctcacatcgttatgtgagtaaacgtgctgcggaaattatgggcaaaccgtacgatcagctcaagatcattaccgttcacgtgggtaacggcgcatcagttgcggcggtgaagaatggcgtatctgttgacacttccatgggtttcacaccacttgaaggtcttgtcatgggcacgcgcagcggcgatattgatccggccatcgtggaatttcttgagaaagaagaaggattgtcggccaaagaagtcgtcaacatcctcaacaagaaatctggtgtgtatgggctcaccaaaggctttagtagtgacatgcgtgacattgaagataatgctattgaaggtgatcctgtatgccgccttgcattcgatgtgtacgaatatcgtatcgcgaaatatattggcgcatacgctgcggccatgaacggtgttgacgcgatcgtctttaccgcaggagttggcgaaaatagcccgattatgcgcgaagaaattattgagaactacttgggctacttagggatcaagatcgataaagaagccaatgacttcaaaggtgaggagaagatcatttcaacgcccgattccaaagtgattgcgatggtagttccgaccaacgaggagctcatgatcgccaaagacacgaaagaaatcattgagaaagggttggacgagcttaagatctaatga

SEQ ID NO: 2518 - protein, 417 aa, synthetic construct
  REGION 1..417: note = Variant of acetate kinase
MHHHHHHGGSGMKVLVINSGSSSIKYQLLDMTNEKVLAKGLVERIGIDGSRIVHKVNGEKHVLEHEIKNHEIGLKLVLDLLTDEKYGVLKDLKEIDAVGHRVVHGGERFASSVKSTDEVLKTIETLSFLAPLHNPANIMGIKSSMKLLPGVPQVAVFDTAFHQKMPEKAYLYAIPYEYYEKYKIRRYGFHGTSHRYVSKRAAEIMGKPYDQLKIITVHVGNGASVAAVKNGVSVDTSMGFTPLEGLVMGTRSGDIDPAIVEFLEKEEGLSAKEVVNILNKKSGVYGLTKGFSSDMRDIEDNAIEGDPVCRLAFDVYEYRIAKYIGAYAAAMNGVDAIVFTAGVGENSPIMREEIIENYLGYLGIKIDKEANDFKGEEKIISTPDSKVIAMVVPTNEELMIAKDTKEIIEKGLDELKI

SEQ ID NO: 2519 - DNA, 1257 bp, synthetic construct
  misc_feature 1..1257: note = Variant of acetate kinase
  source 1..1257: mol_type = other DNA
atgcaccatcatcatcatcatggcggtagcggcatgaaagttctggtgattaattctggtagctcctccatcaaatatcagctcctcgatatgaccaacgaaaaggtattagcgaaaggcttggtcgagcgcattggcatcgacggttcgcgtatcgtgcataaagttaacggcgaaaaacacgtgctggaacatgagattaagaatcacgaaattggactttggttggtcctggatcttcttacggacgaaaaatacggtgtgttgaaggatctcaaagaaatcgatgcagttgggcatcgcgtagtacatggcggcgagcgttttgccagtagcgtgaagattactgacgaagtcttaaagaccatcgagacgttgtcgttcttagctccgttacacaatccagcgaacattatgggtatcaagagcagcatgaaattattaccgggtgtgcctcaagttgccgtctttgatacagcgttccaccagaagatgccggagaaagcctatttgtacgcaatcccctatgagtactacgagaaatataaaattcgccgctatgggtttcatggaacctcacatcgttatgtgagtaaacgtgctgcggaaattatgggcaaaccgtacgatcagctcaagatcattaccgttcacgtgggtaacggcgcatcagttgcggcggtgaagaatggcgtatctgttgacacttccatgggtttcacaccacttgaaggtcttgtcatgggcacgcgcagcggcgatattgatccggccatcgtggaatttcttgagaaagaagaaggattgtcggccaaagaagtcgtcaacatcctcaacaagaaatctggtgtgtatgggctcaccaaaggctttagtagtgacatgcgtgacattgaagataatgctattgaaggtgatcctgtatgccgccttgcattcgatgtgtacgaatatcgtatcgcgaaatatattggcgcatacgctgcggccatgaacggtgttgacgcgatcgtctttaccgcaggagttggcgaaaatagcccgattatgcgcgaagaaattattgagaactacttgggctacttagggatcaagatcgataaagaagccaatgacttcaaaggtgaggagaagatcatttcaacgcccgattccaaagtgattgcgatggtagttccgaccaacgaggagctcatgatcgccaaagacacgaaagaaatcattgagaaagggttggacgagcttaagatctaatga

SEQ ID NO: 2520 - protein, 417 aa, synthetic construct
  REGION 1..417: note = Variant of acetate kinase
MHHHHHHGGSGMKVLVINSGSSSIKYQLLDMTNEKVLAKGLVERIGIDGSRIVHKVNGEKHVLEHEIKNHEIGLWLVLDLLTDEKYGVLKDLKEIDAVGHRVVHGGERFASSVKITDEVLKTIETLSFLAPLHNPANIMGIKSSMKLLPGVPQVAVFDTAFHQKMPEKAYLYAIPYEYYEKYKIRRYGFHGTSHRYVSKRAAEIMGKPYDQLKIITVHVGNGASVAAVKNGVSVDTSMGFTPLEGLVMGTRSGDIDPAIVEFLEKEEGLSAKEVVNILNKKSGVYGLTKGFSSDMRDIEDNAIEGDPVCRLAFDVYEYRIAKYIGAYAAAMNGVDAIVFTAGVGENSPIMREEIIENYLGYLGIKIDKEANDFKGEEKIISTPDSKVIAMVVPTNEELMIAKDTKEIIEKGLDELKI

SEQ ID NO: 2521 - DNA, 1257 bp, synthetic construct
  misc_feature 1..1257: note = Variant of acetate kinase
  source 1..1257: mol_type = other DNA
atgcaccatcatcatcatcatggcggtagcggcatgaaagttctggtgattaattctggtagctcctccatcaaatatcagctcctcgatatgaccaacgaaaaggtattagcgaaaggcttggtcgagcgcattggcatcgacggttcgcgtatcgtgcataaagttaacggcgaaaaacacgtgctggaacatgagattaagaatcacgaaattggacttaaattggtcctggatcttcttacggacgaaaaatacggtgtgttgaaggatctcaaagaaatcgatgcagttgggcatcgcgtagtacatggcggcgagcgttttgccagtagcgtgaagattactgacgaagtcttaaagaccatcgagacgttgtcgttcttagctccgttacacaatccaattaacattatgggtatcaagagcagcatgaaattattaccgggtgtgcctcaagttgccgtctttgatacagcgttccaccagaagatgccggagaaagcctatttgtacgcaatcccctatgagtactacgagaaatataaaattcgccgctatgggtttcatggaacctcacatcgttatgtgagtaaacgtgctgcggaaattatgggcaaaccgtacgatcagctcaagatcattaccgttcacgtgggtaacggcgcatcagttgcggcggtgaagaatggcgtatctgttgacacttccatgggtttcacaccacttgaaggtcttgtcatgggcacgcgcagcggcgatattgatccggccatcgtggaatttcttgagaaagaagaaggattgtcggccaaagaagtcgtcaacatcctcaacaagaaatctggtgtgtatgggctcaccaaaggctttagtagtgacatgcgtgacattgaagataatgctattgaaggtgatcctgtatgccgccttgcattcgatgtgtacgaatatcgtatcgcgaaatatattggcgcatacgctgcggccatgaacggtgttgacgcgatcgtctttaccgcaggagttggcgaaaatagcccgattatgcgcgaagaaattattgagaactacttgggctacttagggatcaagatcgataaagaagccaatgacttcaaaggtgaggagaagatcatttcaacgcccgattccaaagtgattgcgatggtagttccgaccaacgaggagctcatgatcgccaaagacacgaaagaaatcattgagaaagggttggacgagcttaagatctaatga

SEQ ID NO: 2522 - protein, 417 aa, synthetic construct
  REGION 1..417: note = Variant of acetate kinase
MHHHHHHGGSGMKVLVINSGSSSIKYQLLDMTNEKVLAKGLVERIGIDGSRIVHKVNGEKHVLEHEIKNHEIGLKLVLDLLTDEKYGVLKDLKEIDAVGHRVVHGGERFASSVKITDEVLKTIETLSFLAPLHNPINIMGIKSSMKLLPGVPQVAVFDTAFHQKMPEKAYLYAIPYEYYEKYKIRRYGFHGTSHRYVSKRAAEIMGKPYDQLKIITVHVGNGASVAAVKNGVSVDTSMGFTPLEGLVMGTRSGDIDPAIVEFLEKEEGLSAKEVVNILNKKSGVYGLTKGFSSDMRDIEDNAIEGDPVCRLAFDVYEYRIAKYIGAYAAAMNGVDAIVFTAGVGENSPIMREEIIENYLGYLGIKIDKEANDFKGEEKIISTPDSKVIAMVVPTNEELMIAKDTKEIIEKGLDELKI

SEQ ID NO: 2523 - DNA, 1257 bp, synthetic construct
  misc_feature 1..1257: note = Variant of acetate kinase
  source 1..1257: mol_type = other DNA
atgcaccatcatcatcatcatggcggtagcggcatgaaagttctggtgattaattctggtagctcctccatcaaatatcagctcctcgatatgaccaacgaaaaggtattagcgaaaggcttggtcgagcgcattggcatcgacggttcgcgtatcgtgcataaagttaacggcgaaaaacacgtgctggaacatgagattaagaatcacgaaattggacttaaattggtcctggatcttcttacggacgaaaaatacggtgtgttgaaggatctcaaagaaatcgatgcagttgggcatcgcgtagtacatggcggcgagcgttttgccagtagcgtgaagattactgacgaagtcttaaagaccatcgagacgttgtcgttcttagctccgttacacaatccagcgaacattatgggtatcaagagcagcatgaaagtgttaccgggtgtgcctcaagttgccgtctttgatacagcgttccaccagaagatgccggagaaagcctatttgtacgcaatcccctatgagtactacgagaaatataaaattcgccgctatgggtttcatggaacctcacatcgttatgtgagtaaacgtgctgcggaaattatgggcaaaccgtacgatcagctcaagatcattaccgttcacgtgggtaacggcgcatcagttgcggcggtgaagaatggcgtatctgttgacacttccatgggtttcacaccacttgaaggtcttgtcatgggcacgcgcagcggcgatattgatccggccatcgtggaatttcttgagaaagaagaaggattgtcggccaaagaagtcgtcaacatcctcaacaagaaatctggtgtgtatgggctcaccaaaggctttagtagtgacatgcgtgacattgaagataatgctattgaaggtgatcctgtatgccgccttgcattcgatgtgtacgaatatcgtatcgcgaaatatattggcgcatacgctgcggccatgaacggtgttgacgcgatcgtctttaccgcaggagttggcgaaaatagcccgattatgcgcgaagaaattattgagaactacttgggctacttagggatcaagatcgataaagaagccaatgacttcaaaggtgaggagaagatcatttcaacgcccgattccaaagtgattgcgatggtagttccgaccaacgaggagctcatgatcgccaaagacacgaaagaaatcattgagaaagggttggacgagcttaagatctaatga

SEQ ID NO: 2524 - protein, 417 aa, synthetic construct
  REGION 1..417: note = Variant of acetate kinase
MHHHHHHGGSGMKVLVINSGSSSIKYQLLDMTNEKVLAKGLVERIGIDGSRIVHKVNGEKHVLEHEIKNHEIGLKLVLDLLTDEKYGVLKDLKEIDAVGHRVVHGGERFASSVKITDEVLKTIETLSFLAPLHNPANIMGIKSSMKVLPGVPQVAVFDTAFHQKMPEKAYLYAIPYEYYEKYKIRRYGFHGTSHRYVSKRAAEIMGKPYDQLKIITVHVGNGASVAAVKNGVSVDTSMGFTPLEGLVMGTRSGDIDPAIVEFLEKEEGLSAKEVVNILNKKSGVYGLTKGFSSDMRDIEDNAIEGDPVCRLAFDVYEYRIAKYIGAYAAAMNGVDAIVFTAGVGENSPIMREEIIENYLGYLGIKIDKEANDFKGEEKIISTPDSKVIAMVVPTNEELMIAKDTKEIIEKGLDELKI

SEQ ID NO: 2525 - DNA, 1257 bp, synthetic construct
  misc_feature 1..1257: note = Variant of acetate kinase
  source 1..1257: mol_type = other DNA
atgcaccatcatcatcatcatggcggtagcggcatgaaagttctggtgattaattctggtagctcctccatcaaatatcagctcctcgatatgaccaacgaaaaggtattagcgaaaggcttggtcgagcgcattggcatcgacggttcgcgtatcgtgcataaagttaacggcgaaaaacacgtgctggaacatgagattaagaatcacgaaattggacttaaattggtcctggatcttcttacggacgaaaaatacggtgtgttgaaggatctcaaagaaatcgatgcagttgggcatcgcgtagtacatggcggcgagcgttttgccagtagcgtgaagattactgacgaagtcttaaagaccatcgagacgttgtcgttcttagctccgttacacaatccagcgaacattatgggtatcaagagcagcatgaaagagttaccgggtgtgcctcaagttgccgtctttgatacagcgttccaccagaagatgccggagaaagcctatttgtacgcaatcccctatgagtactacgagaaatataaaattcgccgctatgggtttcatggaacctcacatcgttatgtgagtaaacgtgctgcggaaattatgggcaaaccgtacgatcagctcaagatcattaccgttcacgtgggtaacggcgcatcagttgcggcggtgaagaatggcgtatctgttgacacttccatgggtttcacaccacttgaaggtcttgtcatgggcacgcgcagcggcgatattgatccggccatcgtggaatttcttgagaaagaagaaggattgtcggccaaagaagtcgtcaacatcctcaacaagaaatctggtgtgtatgggctcaccaaaggctttagtagtgacatgcgtgacattgaagataatgctattgaaggtgatcctgtatgccgccttgcattcgatgtgtacgaatatcgtatcgcgaaatatattggcgcatacgctgcggccatgaacggtgttgacgcgatcgtctttaccgcaggagttggcgaaaatagcccgattatgcgcgaagaaattattgagaactacttgggctacttagggatcaagatcgataaagaagccaatgacttcaaaggtgaggagaagatcatttcaacgcccgattccaaagtgattgcgatggtagttccgaccaacgaggagctcatgatcgccaaagacacgaaagaaatcattgagaaagggttggacgagcttaagatctaatga

SEQ ID NO: 2526 - protein, 417 aa, synthetic construct
  REGION 1..417: note = Variant of acetate kinase
MHHHHHHGGSGMKVLVINSGSSSIKYQLLDMTNEKVLAKGLVERIGIDGSRIVHKVNGEKHVLEHEIKNHEIGLKLVLDLLTDEKYGVLKDLKEIDAVGHRVVHGGERFASSVKITDEVLKTIETLSFLAPLHNPANIMGIKSSMKELPGVPQVAVFDTAFHQKMPEKAYLYAIPYEYYEKYKIRRYGFHGTSHRYVSKRAAEIMGKPYDQLKIITVHVGNGASVAAVKNGVSVDTSMGFTPLEGLVMGTRSGDIDPAIVEFLEKEEGLSAKEVVNILNKKSGVYGLTKGFSSDMRDIEDNAIEGDPVCRLAFDVYEYRIAKYIGAYAAAMNGVDAIVFTAGVGENSPIMREEIIENYLGYLGIKIDKEANDFKGEEKIISTPDSKVIAMVVPTNEELMIAKDTKEIIEKGLDELKI

SEQ ID NO: 2527 - DNA, 1257 bp, synthetic construct
  misc_feature 1..1257: note = Variant of acetate kinase
  source 1..1257: mol_type = other DNA
atgcaccatcatcatcatcatggcggtagcggcatgaaagttctggtgattaattctggtagctcctccatcaaatatcagctcctcgatatgaccaacgaaaaggtattagcgaaaggcttggtcgagcgcattggcatcgacggttcgcgtatcgtgcataaagttaacggcgaaaaacacgtgctggaacatgagattaagaatcacgaaattggacttaaattggtcctggatcttcttacggacgaaaaatacggtgtgttgaaggatctcaaagaaatcgatgcagttgggcatcgcgtagtacatggcggcgagcgttttgccagtagcgtgaagattactgacgaagtcttaaagaccatcgagacgttgtcgttcttagctccgttacacaatccagcgaacattatgggtatcaagagcagcatgaaaaagttaccgggtgtgcctcaagttgccgtctttgatacagcgttccaccagaagatgccggagaaagcctatttgtacgcaatcccctatgagtactacgagaaatataaaattcgccgctatgggtttcatggaacctcacatcgttatgtgagtaaacgtgctgcggaaattatgggcaaaccgtacgatcagctcaagatcattaccgttcacgtgggtaacggcgcatcagttgcggcggtgaagaatggcgtatctgttgacacttccatgggtttcacaccacttgaaggtcttgtcatgggcacgcgcagcggcgatattgatccggccatcgtggaatttcttgagaaagaagaaggattgtcggccaaagaagtcgtcaacatcctcaacaagaaatctggtgtgtatgggctcaccaaaggctttagtagtgacatgcgtgacattgaagataatgctattgaaggtgatcctgcatgccgccttgcattcgatgtgtacgaatatcgtatcgcgaaatatattggcgcatacgctgcggccatgaacggtgttgacgcgatcgtctttaccgcaggagttggcgaaaatagcccgattatgcgcgaagaaattattgagaactacttgggctacttagggatcaagatcgataaagaagccaatgacttcaaaggtgaggagaagatcatttcaacgcccgattccaaagtgattgcgatggtagttccgaccaacgaggagctcatgatcgccaaagacacgaaagaaatcattgagaaagggttggacgagcttaagatctaatga

SEQ ID NO: 2528 - protein, 417 aa, synthetic construct
  REGION 1..417: note = Variant of acetate kinase
MHHHHHHGGSGMKVLVINSGSSSIKYQLLDMTNEKVLAKGLVERIGIDGSRIVHKVNGEKHVLEHEIKNHEIGLKLVLDLLTDEKYGVLKDLKEIDAVGHRVVHGGERFASSVKITDEVLKTIETLSFLAPLHNPANIMGIKSSMKKLPGVPQVAVFDTAFHQKMPEKAYLYAIPYEYYEKYKIRRYGFHGTSHRYVSKRAAEIMGKPYDQLKIITVHVGNGASVAAVKNGVSVDTSMGFTPLEGLVMGTRSGDIDPAIVEFLEKEEGLSAKEVVNILNKKSGVYGLTKGFSSDMRDIEDNAIEGDPACRLAFDVYEYRIAKYIGAYAAAMNGVDAIVFTAGVGENSPIMREEIIENYLGYLGIKIDKEANDFKGEEKIISTPDSKVIAMVVPTNEELMIAKDTKEIIEKGLDELKI

SEQ ID NO: 2529 - DNA, 1257 bp, synthetic construct
  misc_feature 1..1257: note = Variant of acetate kinase
  source 1..1257: mol_type = other DNA
atgcaccatcatcatcatcatggcggtagcggcatgaaagttggggtgattaattctggtagctcctccatcaaatatcagctcctcgatatgaccaacgaaaaggtattagcgaaaggcttggtcgagcgcattggcatcgacggttcgcgtatcgtgcataaagttaacggcgaaaaacacgtgctggaacatgagattaagaatcacgaaattggacttaaattggtcctggatcttcttacggacgaaaaatacggtgtgttgaaggatctcaaagaaatcgatgcagttgggcatcgcgtagtacatggcggcgagcgttttgccagtagcgtgaagattactgacgaagtcttaaagaccatcgagacgttgtcgttcttagctccgttacacaatccagcgaacattatgggtatcaagagcagcatgaaattattaccgggtgtgcctcaagttgccgtctttgatacagcgttccaccagaagatgccggagaaagcctatttgtacgcaatcccctatgagtactacgagaaatataaaattcgccgctatgggtttcatggaacctcacatcgttatgtgagtaaacgtgctgcggaaattatgggcaaaccgtacgatcagctcaagatcattaccgttcacgtgggtaacggcgcatcagttgcggcggtgaagaatggcgtatctgttgacacttccatgggtttcacaccacttgaaggtcttgtcatgggcacgcgcagcggcgatattgatccggccatcgtggaatttcttgagaaagaagaaggattgtcggccaaagaagtcgtcaacatcctcaacaagaaatctggtgtgtatgggctcaccaaaggctttagtagtgacatgcgtgacattgaagataatgctattgaaggtgatcctgtatgccgccttgcattcgatgtgtacgaatatcgtatcgcgaaatatattggcgcatacgctgcggccatgaacggtgttgacgcgatcgtctttaccgcaggagttggcgaaaatagcccgattatgcgcgaagaaattattgagaactacttgggctacttagggatcaagatcgataaagaagccaatgacttcaaaggtgaggagaagatcatttcaacgcccgattccaaagtgattgcgatggtagttccgaccaacgaggagctcatgatcgccaaagacacgaaagaaatcattgagaaagggttggacgagcttaagatctaatga

SEQ ID NO: 2530 - protein, 417 aa, synthetic construct
  REGION 1..417: note = Variant of acetate kinase
MHHHHHHGGSGMKVGVINSGSSSIKYQLLDMTNEKVLAKGLVERIGIDGSRIVHKVNGEKHVLEHEIKNHEIGLKLVLDLLTDEKYGVLKDLKEIDAVGHRVVHGGERFASSVKITDEVLKTIETLSFLAPLHNPANIMGIKSSMKLLPGVPQVAVFDTAFHQKMPEKAYLYAIPYEYYEKYKIRRYGFHGTSHRYVSKRAAEIMGKPYDQLKIITVHVGNGASVAAVKNGVSVDTSMGFTPLEGLVMGTRSGDIDPAIVEFLEKEEGLSAKEVVNILNKKSGVYGLTKGFSSDMRDIEDNAIEGDPVCRLAFDVYEYRIAKYIGAYAAAMNGVDAIVFTAGVGENSPIMREEIIENYLGYLGIKIDKEANDFKGEEKIISTPDSKVIAMVVPTNEELMIAKDTKEIIEKGLDELKI

SEQ ID NO: 2531 - DNA, 1257 bp, synthetic construct
  misc_feature 1..1257: note = Variant of acetate kinase
  source 1..1257: mol_type = other DNA
atgcaccatcatcatcatcatggcggtagcggcatgaaagttctggtgattaattctggtagctcctccatcaaatatcagctcctcgatatgaccaacgaaaaggtattagcgaaaggcttggtcgagcgcattggcatcgacggttcgcgtatcgtgcataaagttaacggcgaaaaacacgtgctggaacatgagattaagaatcacgaaattggacttcttttggtcctggatcttcttacggacgaaaaatacggtgtgttgaaggatctcaaagaaatcgatgcagttgggcatcgcgtagtacatggcggcgagcgttttgccagtagcgtgaagattactgacgaagtcttaaagaccatcgagacgttgtcgttcttagctccgttacacaatccagcgaacattatgggtatcaagagcagcatgaaattattaccgggtgtgcctcaagttgccgtctttgatacagcgttccaccagaagatgccggagaaagcctatttgtacgcaatcccctatgagtactacgagaaatataaaattcgccgctatgggtttcatggaacctcacatcgttatgtgagtaaacgtgctgcggaaattatgggcaaaccgtacgatcagctcaagatcattaccgttcacgtgggtaacggcgcatcagttgcggcggtgaagaatggcgtatctgttgacacttccatgggtttcacaccacttgaaggtcttgtcatgggcacgcgcagcggcgatattgatccggccatcgtggaatttcttgagaaagaagaaggattgtcggccaaagaagtcgtcaacatcctcaacaagaaatctggtgtgtatgggctcaccaaaggctttagtagtgacatgcgtgacattgaagataatgctattgaaggtgatcctgtatgccgccttgcattcgatgtgtacgaatatcgtatcgcgaaatatattggcgcatacgctgcggccatgaacggtgttgacgcgatcgtctttaccgcaggagttggcgaaaatagcccgattatgcgcgaagaaattattgagaactacttgggctacttagggatcaagatcgataaagaagccaatgacttcaaaggtgaggagaagatcatttcaacgcccgattccaaagtgattgcgatggtagttccgaccaacgaggagctcatgatcgccaaagacacgaaagaaatcattgagaaagggttggacgagcttaagatctaatga

SEQ ID NO: 2532 - protein, 417 aa, synthetic construct
  REGION 1..417: note = Variant of acetate kinase
MHHHHHHGGSGMKVLVINSGSSSIKYQLLDMTNEKVLAKGLVERIGIDGSRIVHKVNGEKHVLEHEIKNHEIGLLLVLDLLTDEKYGVLKDLKEIDAVGHRVVHGGERFASSVKITDEVLKTIETLSFLAPLHNPANIMGIKSSMKLLPGVPQVAVFDTAFHQKMPEKAYLYAIPYEYYEKYKIRRYGFHGTSHRYVSKRAAEIMGKPYDQLKIITVHVGNGASVAAVKNGVSVDTSMGFTPLEGLVMGTRSGDIDPAIVEFLEKEEGLSAKEVVNILNKKSGVYGLTKGFSSDMRDIEDNAIEGDPVCRLAFDVYEYRIAKYIGAYAAAMNGVDAIVFTAGVGENSPIMREEIIENYLGYLGIKIDKEANDFKGEEKIISTPDSKVIAMVVPTNEELMIAKDTKEIIEKGLDELKI

SEQ ID NO: 2533 - DNA, 1257 bp, synthetic construct
  misc_feature 1..1257: note = Variant of acetate kinase
  source 1..1257: mol_type = other DNA
atgcaccatcatcatcatcatggcggtagcggcatgaaagttctggtgattaattctggtagctcctccatcaaatatcagctcctcgatatgaccaacgaaaaggtattagcgaaaggcttggtcgagcgcattggcatcgacggttcgcgtatcgtgcataaagttaacggcgaaaaacacgtgctggaacatgagattaagaatcacgaaattggacttaaattggtcctggatcttcttacggacgaaaaatacggtgtgttgaaggatctcaaagaaatcgatgcagttgggcatcgcgtagtacatggcggcgagcgttttgccagtagcgtgaagattactgacgaagtcttaaagaccatcgagacgttgtcgttcttagctccgttacacaatccagcgaacattatgggttataagagcagcatgaaattattaccgggtgtgcctcaagttgccgtctttgatacagcgttccaccagaagatgccggagaaagcctatttgtacgcaatcccctatgagtactacgagaaatataaaattcgccgctatgggtttcatggaacctcacatcgttatgtgagtaaacgtgctgcggaaattatgggcaaaccgtacgatcagctcaagatcattaccgttcacgtgggtaacggcgcatcagttgcggcggtgaagaatggcgtatctgttgacacttccatgggtttcacaccacttgaaggtcttgtcatgggcacgcgcagcggcgatattgatccggccatcgtggaatttcttgagaaagaagaaggattgtcggccaaagaagtcgtcaacatcctcaacaagaaatctggtgtgtatgggctcaccaaaggctttagtagtgacatgcgtgacattgaagataatgctattgaaggtgatcctgtatgccgccttgcattcgatgtgtacgaatatcgtatcgcgaaatatattggcgcatacgctgcggccatgaacggtgttgacgcgatcgtctttaccgcaggagttggcgaaaatagcccgattatgcgcgaagaaattattgagaactacttgggctacttagggatcaagatcgataaagaagccaatgacttcaaaggtgaggagaagatcatttcaacgcccgattccaaagtgattgcgatggtagttccgaccaacgaggagctcatgatcgccaaagacacgaaagaaatcattgagaaagggttggacgagcttaagatctaatga

SEQ ID NO: 2534 - protein, 417 aa, synthetic construct
  REGION 1..417: note = Variant of acetate kinase
MHHHHHHGGSGMKVLVINSGSSSIKYQLLDMTNEKVLAKGLVERIGIDGSRIVHKVNGEKHVLEHEIKNHEIGLKLVLDLLTDEKYGVLKDLKEIDAVGHRVVHGGERFASSVKITDEVLKTIETLSFLAPLHNPANIMGYKSSMKLLPGVPQVAVFDTAFHQKMPEKAYLYAIPYEYYEKYKIRRYGFHGTSHRYVSKRAAEIMGKPYDQLKIITVHVGNGASVAAVKNGVSVDTSMGFTPLEGLVMGTRSGDIDPAIVEFLEKEEGLSAKEVVNILNKKSGVYGLTKGFSSDMRDIEDNAIEGDPVCRLAFDVYEYRIAKYIGAYAAAMNGVDAIVFTAGVGENSPIMREEIIENYLGYLGIKIDKEANDFKGEEKIISTPDSKVIAMVVPTNEELMIAKDTKEIIEKGLDELKI

SEQ ID NO: 2535 - DNA, 1257 bp, synthetic construct
  misc_feature 1..1257: note = Variant of acetate kinase
  source 1..1257: mol_type = other DNA
atgcaccatcatcatcatcatggcggtagcggcatgaaagttctggtgattaattctggtagctcctccatcaaatatcagctcctcgatatgaccaacgaaaaggtattagcgaaaggcttggtcgagcgcattggcatcgacggttcgcgtatcgtgcataaagttaacggcgaaaaacacgtgctggaacatgagattaagaatcacgaaattggacttaaattggtcctggatcttcttacggacgaaaaatacggtgtgttgaaggatctcaaagaaatcgatgcagttgggcatcgcgtagtacatggcggcgagcgttttgccagtagcgtgaagattactgacgaagtcttaaagaccatcgagacgttgtcgttcttagctccgttacacaatccagcgaacattatgggtatcaagagcagcatggagttattaccgggtgtgcctcaagttgccgtctttgatacagcgttccaccagaagatgccggagaaagcctatttgtacgcaatcccctatgagtactacgagaaatataaaattcgccgctatgggtttcatggaacctcacatcgttatgtgagtaaacgtgctgcggaaattatgggcaaaccgtacgatcagctcaagatcattaccgttcacgtgggtaacggcgcatcagttgcggcggtgaagaatggcgtatctgttgacacttccatgggtttcacaccacttgaaggtcttgtcatgggcacgcgcagcggcgatattgatccggccatcgtggaatttcttgagaaagaagaaggattgtcggccaaagaagtcgtcaacatcctcaacaagaaatctggtgtgtatgggctcaccaaaggctttagtagtgacatgcgtgacattgaagataatgctattgaaggtgatcctgtatgccgccttgcattcgatgtgtacgaatatcgtatcgcgaaatatattggcgcatacgctgcggccatgaacggtgttgacgcgatcgtctttaccgcaggagttggcgaaaatagcccgattatgcgcgaagaaattattgagaactacttgggctacttagggatcaagatcgataaagaagccaatgacttcaaaggtgaggagaagatcatttcaacgcccgattccaaagtgattgcgatggtagttccgaccaacgaggagctcatgatcgccaaagacacgaaagaaatcattgagaaagggttggacgagcttaagatctaatga

SEQ ID NO: 2536 - protein, 417 aa, synthetic construct
  REGION 1..417: note = Variant of acetate kinase
MHHHHHHGGSGMKVLVINSGSSSIKYQLLDMTNEKVLAKGLVERIGIDGSRIVHKVNGEKHVLEHEIKNHEIGLKLVLDLLTDEKYGVLKDLKEIDAVGHRVVHGGERFASSVKITDEVLKTIETLSFLAPLHNPANIMGIKSSMELLPGVPQVAVFDTAFHQKMPEKAYLYAIPYEYYEKYKIRRYGFHGTSHRYVSKRAAEIMGKPYDQLKIITVHVGNGASVAAVKNGVSVDTSMGFTPLEGLVMGTRSGDIDPAIVEFLEKEEGLSAKEVVNILNKKSGVYGLTKGFSSDMRDIEDNAIEGDPVCRLAFDVYEYRIAKYIGAYAAAMNGVDAIVFTAGVGENSPIMREEIIENYLGYLGIKIDKEANDFKGEEKIISTPDSKVIAMVVPTNEELMIAKDTKEIIEKGLDELKI

SEQ ID NO: 2537 - DNA, 1257 bp, synthetic construct
  misc_feature 1..1257: note = Variant of acetate kinase
  source 1..1257: mol_type = other DNA
atgcaccatcatcatcatcatggcggtagcggcatgaaagttctggtgattaattctggtagctcctccatcaaatatcagctcctcgatatgaccaacgaaaaggtattagcgaaaggcttggtcgagcgcattggcatcgacggttcgcgtatcgtgcataaagttaacggcgaaaaacacgtgctggaacatgagattaagaatcacgaaattggacttaaattggtcctggatcttcttacggacgaaaaatacggtgtgttgaaggatctcaaagaaatcgatgcagttgggcatcgcgtagtacatggcggcgagcgttttgccagtagcgtgaagattactgacgaagtcttaaagaccatcgagacgttgtcgttcttagctccgttacacaatccagtgaacattatgggtatcaagagcagcatgaaattattaccgggtgtgcctcaagttgccgtctttgatacagcgttccaccagaagatgccggagaaagcctatttgtacgcaatcccctatgagtactacgagaaatataaaattcgccgctatgggtttcatggaacctcacatcgttatgtgagtaaacgtgctgcggaaattatgggcaaaccgtacgatcagctcaagatcattaccgttcacgtgggtaacggcgcatcagttgcggcggtgaagaatggcgtatctgttgacacttccatgggtttcacaccacttgaaggtcttgtcatgggcacgcgcagcggcgatattgatccggccatcgtggaatttcttgagaaagaagaaggattgtcggccaaagaagtcgtcaacatcctcaacaagaaatctggtgtgtatgggctcaccaaaggctttagtagtgacatgcgtgacattgaagataatgctattgaaggtgatcctgtatgccgccttgcattcgatgtgtacgaatatcgtatcgcgaaatatattggcgcatacgctgcggccatgaacggtgttgacgcgatcgtctttaccgcaggagttggcgaaaatagcccgattatgcgcgaagaaattattgagaactacttgggctacttagggatcaagatcgataaagaagccaatgacttcaaaggtgaggagaagatcatttcaacgcccgattccaaagtgattgcgatggtagttccgaccaacgaggagctcatgatcgccaaagacacgaaagaaatcattgagaaagggttggacgagcttaagatctaatga

SEQ ID NO: 2538 - protein, 417 aa, synthetic construct
  REGION 1..417: note = Variant of acetate kinase
MHHHHHHGGSGMKVLVINSGSSSIKYQLLDMTNEKVLAKGLVERIGIDGSRIVHKVNGEKHVLEHEIKNHEIGLKLVLDLLTDEKYGVLKDLKEIDAVGHRVVHGGERFASSVKITDEVLKTIETLSFLAPLHNPVNIMGIKSSMKLLPGVPQVAVFDTAFHQKMPEKAYLYAIPYEYYEKYKIRRYGFHGTSHRYVSKRAAEIMGKPYDQLKIITVHVGNGASVAAVKNGVSVDTSMGFTPLEGLVMGTRSGDIDPAIVEFLEKEEGLSAKEVVNILNKKSGVYGLTKGFSSDMRDIEDNAIEGDPVCRLAFDVYEYRIAKYIGAYAAAMNGVDAIVFTAGVGENSPIMREEIIENYLGYLGIKIDKEANDFKGEEKIISTPDSKVIAMVVPTNEELMIAKDTKEIIEKGLDELKI

SEQ ID NO: 2539 - DNA, 1257 bp, synthetic construct
  misc_feature 1..1257: note = Variant of acetate kinase
  source 1..1257: mol_type = other DNA
atgcaccatcatcatcatcatggcggtagcggcatgaaagttctggtgattaattctggtagctcctccatcaaatatcagctcctcgatatgaccaacgaaaaggtattagcgaaaggcttggtcgagcgcattggcatcgacggttcgcgtatcgtgcataaagttaacggcgaaaaacacgtgctggaacatgagattaagaatcacgaaattggacttaaattggtcctggatcttcttacggacgaaaaatacggtgtgttgaaggatctcaaagaaatcgatgcagttgggcatcgcgtagtacatggcggcgagcgttttgccagtagcgtgaagattactgacgaagtctcaaagaccatcgagacgttgtcgttcttagctccgttacacaatctggcgaacattatgggtatcaagagcagcatgaaattattaccgggtgtgcctcaagttgccgtctttgatacagcgttccaccagaagatgccggagaaagcctatttgtacgcaatcccctatgagtactacgagaaatataaaattcgccgctatgggtttcatggaacctcacatcgttatgtgagtaaacgtgctgcggaaattatgggcaaaccgtacgatcagctcaagatcattaccgttcacgtgggtaacggcgcatcagttgcggcggtgaagaatggcgtatctgttgacacttccatgggtttcacaccacttgaaggtcttgtcatgggcacgcgcagcggcgatattgatccggccatcgtggaatttcttgagaaagaagaaggattgtcggccaaagaagtcgtcaacatcctcaacaagaaatctggtgtgtatgggctcaccaaaggctttagtagtgacatgcgtgacattgaagataatgctattgaaggtgatcctgtatgccgccttgcattcgatgtgtacgaatatcgtatcgcgaaatatattggcgcatacgctgcggccatgaacggtgttgacgcgatcgtctttaccgcaggagttggcgaaaatagcccgattatgcgcgaagaaattattgagaactacttgggctacttagggatcaagatcgataaagaagccaatgacttcaaaggtgaggagaagatcatttcaacgcccgattccaaagtgattgcgatggtagttccgaccaacgaggagctcatgatcgccaaagacacgaaagaaatcattgagaaagggttggacgagcttaagatctaatga

SEQ ID NO: 2540 - protein, 417 aa, synthetic construct
  REGION 1..417: note = Variant of acetate kinase
MHHHHHHGGSGMKVLVINSGSSSIKYQLLDMTNEKVLAKGLVERIGIDGSRIVHKVNGEKHVLEHEIKNHEIGLKLVLDLLTDEKYGVLKDLKEIDAVGHRVVHGGERFASSVKITDEVSKTIETLSFLAPLHNLANIMGIKSSMKLLPGVPQVAVFDTAFHQKMPEKAYLYAIPYEYYEKYKIRRYGFHGTSHRYVSKRAAEIMGKPYDQLKIITVHVGNGASVAAVKNGVSVDTSMGFTPLEGLVMGTRSGDIDPAIVEFLEKEEGLSAKEVVNILNKKSGVYGLTKGFSSDMRDIEDNAIEGDPVCRLAFDVYEYRIAKYIGAYAAAMNGVDAIVFTAGVGENSPIMREEIIENYLGYLGIKIDKEANDFKGEEKIISTPDSKVIAMVVPTNEELMIAKDTKEIIEKGLDELKI

SEQ ID NO: 2541 - DNA, 1257 bp, synthetic construct
  misc_feature 1..1257: note = Variant of acetate kinase
  source 1..1257: mol_type = other DNA
atgcaccatcatcatcatcatggcggtagcggcatgaaagttctggtgattaattctggtagctcctccatcaaatatcagctcctcgatatgaccaacgaaaaggtattagcgaaaggcttggtcgagcgcattggcatcgacggttcgcgtatcgtgcataaagttaacggcgaaaaacacgtgctggaacatgagattaagaatcacgaaattggacttaaattggtcctggatcttcttacggacgaaaaatacggtgtgttgaaggatctcaaagaaatcgatgcagttgggcatcgcgtagtacatggcggcgagcgttttgccagtagcgtgaagattactgacgaagtcttaaagaccatcgagacgttgtcgttcttagctccgttacacaatccagcgaacattatgggtatcaagagcagcatgaaattattaccgggtgtgcctcaagttgccgtctttgatacatgtttccaccagaagatgccggagaaagcctatttgtacgcaatcccctatgagtactacgagaaatataaaattcgccgctatgggtttcatggaacctcacatcgttatgtgagtaaacgtgctgcggaaattatgggcaaaccgtacgatcagctcaagatcattaccgttcacgtgggtaacggcgcatcagttgcggcggtgaagaatggcgtatctgttgacacttccatgggtttcacaccacttgaaggtcttgtcatgggcacgcgcagcggcgatattgatccggccatcgtggaatttcttgagaaagaagaaggattgtcggccaaagaagtcgtcaacatcctcaacaagaaatctggtgtgtatgggctcaccaaaggctttagtagtgacatgcgtgacattgaagataatgctattgaaggtgatcctgtatgccgccttgcattcgatgtgtacgaatatcgtatcgcgaaatatattggcgcatacgctgcggccatgaacggtgttgacgcgatcgtctttaccgcaggagttggcgaaaatagcccgattatgcgcgaagaaattattgagaactacttgggctacttagggatcaagatcgataaagaagccaatgacttcaaaggtgaggagaagatcatttcaacgcccgattccaaagtgattgcgatggtagttccgaccaacgaggagctcatgatcgccaaagacacgaaagaaatcattgagaaagggttggacgagcttaagatctaatga

SEQ ID NO: 2542 - protein, 417 aa, synthetic construct
  REGION 1..417: note = Variant of acetate kinase
MHHHHHHGGSGMKVLVINSGSSSIKYQLLDMTNEKVLAKGLVERIGIDGSRIVHKVNGEKHVLEHEIKNHEIGLKLVLDLLTDEKYGVLKDLKEIDAVGHRVVHGGERFASSVKITDEVLKTIETLSFLAPLHNPANIMGIKSSMKLLPGVPQVAVFDTCFHQKMPEKAYLYAIPYEYYEKYKIRRYGFHGTSHRYVSKRAAEIMGKPYDQLKIITVHVGNGASVAAVKNGVSVDTSMGFTPLEGLVMGTRSGDIDPAIVEFLEKEEGLSAKEVVNILNKKSGVYGLTKGFSSDMRDIEDNAIEGDPVCRLAFDVYEYRIAKYIGAYAAAMNGVDAIVFTAGVGENSPIMREEIIENYLGYLGIKIDKEANDFKGEEKIISTPDSKVIAMVVPTNEELMIAKDTKEIIEKGLDELKI

SEQ ID NO: 2543 - DNA, 1257 bp, synthetic construct
  misc_feature 1..1257: note = Variant of acetate kinase
  source 1..1257: mol_type = other DNA
atgcaccatcatcatcatcatggcggtagcggcatgaaagttctggtgattaattctggtagctcctccatcaaatatcagctcctcgatatgaccaacgaaaaggtattagcgaaaggcttggtcgagcgcattggcatcgacggttcgcgtatcgtgcataaagttaacggcgaaaaacacgtgctggaacatgagattaagaatcacgaaattggacttaaattggtcctggatcttcttacggacgaaaaatacggtgtgttgaaggatctcaaagaaatcgatgcagttgggcatcgcgtagtacatggcggcgagcgttttgccagtagcgtgaagattactgacgaagtcttaaagaccatcgagacgttgtcgttcttagctccgttacacaatccagcgaacattatgggtatcaagagcagcatgaaattattaccgggtgtgcctcaagttgccgtctttgatacagcgttccaccagaagatgccggagaaagcctatttgtacgcaatcccctatgagtactacgagaaatataaaattcgccgctatgggtttcatggaacctcacatcgttatgtgagtaaacgtgctgcggaaattatgggcaaaccgtacgatcagctcaagatcattacctgccacgtgggtaacggcgcatcagttgcggcggtgaagaatggcgtatctgttgacacttccatgggtttcacaccacttgaaggtcttgtcatgggcacgcgcagcggcgatattgatccggccatcgtggaatttcttgagaaagaagaaggattgtcggccaaagaagtcgtcaacatcctcaacaagaaatctggtgtgtatgggctcaccaaaggctttagtagtgacatgcgtgacattgaagataatgctattgaaggtgatcctgtatgccgccttgcattcgatgtgtacgaatatcgtatcgcgaaatatattggcgcatacgctgcggccatgaacggtgttgacgcgatcgtctttaccgcaggagttggcgaaaatagcccgattatgcgcgaagaaattattgagaactacttgggctacttagggatcaagatcgataaagaagccaatgacttcaaaggtgaggagaagatcatttcaacgcccgattccaaagtgattgcgatggtagttccgaccaacgaggagctcatgatcgccaaagacacgaaagaaatcattgagaaagggttggacgagcttaagatctaatga

SEQ ID NO: 2544 - protein, 417 aa, synthetic construct
  REGION 1..417: note = Variant of acetate kinase
MHHHHHHGGSGMKVLVINSGSSSIKYQLLDMTNEKVLAKGLVERIGIDGSRIVHKVNGEKHVLEHEIKNHEIGLKLVLDLLTDEKYGVLKDLKEIDAVGHRVVHGGERFASSVKITDEVLKTIETLSFLAPLHNPANIMGIKSSMKLLPGVPQVAVFDTAFHQKMPEKAYLYAIPYEYYEKYKIRRYGFHGTSHRYVSKRAAEIMGKPYDQLKIITCHVGNGASVAAVKNGVSVDTSMGFTPLEGLVMGTRSGDIDPAIVEFLEKEEGLSAKEVVNILNKKSGVYGLTKGFSSDMRDIEDNAIEGDPVCRLAFDVYEYRIAKYIGAYAAAMNGVDAIVFTAGVGENSPIMREEIIENYLGYLGIKIDKEANDFKGEEKIISTPDSKVIAMVVPTNEELMIAKDTKEIIEKGLDELKI

SEQ ID NO: 2545 - DNA, 1257 bp, synthetic construct
  misc_feature 1..1257: note = Variant of acetate kinase
  source 1..1257: mol_type = other DNA
atgcaccatcatcatcatcatggcggtagcggcatgaaagttctggtgattaattctggtagctcctccatcaaatatcagctcctcgatatgaccaacgaaaaggtattagcgaaaggcttggtcgagcgcattggcatcgacggttcgcgtatcgtgcataaagttaacggcgaaaaacacgtgctggaacatgagattaagaatcacgaaattggacttaaattggtcctggatcttcttacggacgaaaaatacggtgtgttgaaggatctcaaagaaatcgatgcagttgggcatcgcgtagtacatggcggcgagcgttttgccagtagcgtgaagattactgacgaagtcttaaagaccatcgagacgttgtcgttcttagctccgttacacaatgctgcgaacattatgggtatcaagagcagcatgaaattattaccgggtgtgcctcaagttgccgtctttgatacagcgttccaccagaagatgccggagaaagcctatttgtacgcaatcccctatgagtactacgagaaatataaaattcgccgctatgggtttcatggaacctcacatcgttatgtgagtaaacgtgctgcggaaattatgggcaaaccgtacgatcagctcaagatcattaccgttcacgtgggtaacggcgcatcagttgcggcggtgaagaatggcgtatctgttgacacttccatgggtttcacaccacttgaaggtcttgtcatgggcacgcgcagcggcgatattgatccggccatcgtggaatttcttgagaaagaagaaggattgtcggccaaagaagtcgtcaacatcctcaacaagaaatctggtgtgtatgggctcaccaaaggctttagtagtgacatgcgtgacattgaagataatgctattgaaggtgatcctgtatgccgccttgcattcgatgtgtacgaatatcgtatcgcgaaatatattggcgcatacgctgcggccatgaacggtgttgacgcgatcgtctttaccgcaggagttggcgaaaatagcccgattatgcgcgaagaaattattgagaactacttgggctacttagggatcaagatcgataaagaagccaatgacttcaaaggtgaggagaagatcatttcaacgcccgattccaaagtgattgcgatggtagttccgaccaacgaggagctcatgatcgccaaagacacgaaagaaatcattgagaaagggttggacgagcttaagatctaatga

SEQ ID NO: 2546 - protein, 417 aa, synthetic construct
  REGION 1..417: note = Variant of acetate kinase
MHHHHHHGGSGMKVLVINSGSSSIKYQLLDMTNEKVLAKGLVERIGIDGSRIVHKVNGEKHVLEHEIKNHEIGLKLVLDLLTDEKYGVLKDLKEIDAVGHRVVHGGERFASSVKITDEVLKTIETLSFLAPLHNAANIMGIKSSMKLLPGVPQVAVFDTAFHQKMPEKAYLYAIPYEYYEKYKIRRYGFHGTSHRYVSKRAAEIMGKPYDQLKIITVHVGNGASVAAVKNGVSVDTSMGFTPLEGLVMGTRSGDIDPAIVEFLEKEEGLSAKEVVNILNKKSGVYGLTKGFSSDMRDIEDNAIEGDPVCRLAFDVYEYRIAKYIGAYAAAMNGVDAIVFTAGVGENSPIMREEIIENYLGYLGIKIDKEANDFKGEEKIISTPDSKVIAMVVPTNEELMIAKDTKEIIEKGLDELKI

SEQ ID NO: 2547 - DNA, 1257 bp, synthetic construct
  misc_feature 1..1257: note = Variant of acetate kinase
  source 1..1257: mol_type = other DNA
atgcaccatcatcatcatcatggcggtagcggcatgaaagttctggtgattaattctggtagctcctccatcaaatatcagctcctcgatatgaccaacgaaaaggtattagcgaaaggcttggtcgagcgcattggcatcgacggttcgcgtatcgtgcataaagttaacggcgaaaaacacgtgctggaacatgagattaagaatcacgaaattggacttaaattggtcctggatcttcttacggacgaaaaatacggtgtgttgaaggatctcaaagaaatcgatgcagttgggcatcgcgtagtacatggcggcgagcgttttgccagtagcgtgaagattactgacgaagtcttaaagaccatcgagacgttgtcgttcttagctccgttacacaatccagcgaacattatgggtatcaagagcagcatgaaattaatgccgggtgtgcctcaagttgccgtctttgatacagcgttccaccagaagatgccggagaaagcctatttgtacgcaatcccctatgagtactacgagaaatataaaattcgccgctatgggtttcatggaacctcacatcgttatgtgagtaaacgtgctgcggaaattatgggcaaaccgtacgatcagctcaagatcattaccgttcacgtgggtaacggcgcatcagttgcggcggtgaagaatggcgtatctgttgacacttccatgggtttcacaccacttgaaggtcttgtcatgggcacgcgcagcggcgatattgatccggccatcgtggaatttcttgagaaagaagaaggattgtcggccaaagaagtcgtcaacatcctcaacaagaaatctggtgtgtatgggctcaccaaaggctttagtagtgacatgcgtgacattgaagataatgctattgaaggtgatcctgtatgccgccttgcattcgatgtgtacgaatatcgtatcgcgaaatatattggcgcatacgctgcggccatgaacggtgttgacgcgatcgtctttaccgcaggagttggcgaaaatagcccgattatgcgcgaagaaattattgagaactacttgggctacttagggatcaagatcgataaagaagccaatgacttcaaaggtgaggagaagatcatttcaacgcccgattccaaagtgattgcgatggtagttccgaccaacgaggagctcatgatcgccaaagacacgaaagaaatcattgagaaagggttggacgagcttaagatctaatga

SEQ ID NO: 2548 - protein, 417 aa, synthetic construct
  REGION 1..417: note = Variant of acetate kinase
MHHHHHHGGSGMKVLVINSGSSSIKYQLLDMTNEKVLAKGLVERIGIDGSRIVHKVNGEKHVLEHEIKNHEIGLKLVLDLLTDEKYGVLKDLKEIDAVGHRVVHGGERFASSVKITDEVLKTIETLSFLAPLHNPANIMGIKSSMKLMPGVPQVAVFDTAFHQKMPEKAYLYAIPYEYYEKYKIRRYGFHGTSHRYVSKRAAEIMGKPYDQLKIITVHVGNGASVAAVKNGVSVDTSMGFTPLEGLVMGTRSGDIDPAIVEFLEKEEGLSAKEVVNILNKKSGVYGLTKGFSSDMRDIEDNAIEGDPVCRLAFDVYEYRIAKYIGAYAAAMNGVDAIVFTAGVGENSPIMREEIIENYLGYLGIKIDKEANDFKGEEKIISTPDSKVIAMVVPTNEELMIAKDTKEIIEKGLDELKI

SEQ ID NO: 2549 - DNA, 1257 bp, synthetic construct
  misc_feature 1..1257: note = Variant of acetate kinase
  source 1..1257: mol_type = other DNA
atgcaccatcatcatcatcatggcggtagcggcatgaaagttctggtgattaattctggtagctcctccatcaaatatcagctcctcgatatgaccaacgaaaaggtattagcgaaaggcttggtcgagcgcattggcatcgacggttcgcgtatcgtgcataaagttaacggcgaaaaacacgtgctggaacatgagattaagaatcacgaaattggacttaaattggtcctggatcttcttacggacgaaaaatacggtgtgttgaaggatctcaaagaaatcgatgcagttgggcatcgcgtagtacatggcggcgagcgttttgccagtagcgtgaagattactgacgaagtcttaaagaccatcgagacgttgtcgttcttagctccgttacacaatccagcgaacattatgggtatcaagagcagcatgaaattattaccgggtgtgcctcaagttgccgtctttgatacagcgttccaccagaagatgccggagaaagcctatttgtacgcaatcccctatgagtactacgagaaatataaaattcgccgctatgggtttcatggaacctcacatcgttatgtgagtaaacgtgctgcggaaattatgggcaaaccgtacgatcagctcaagatcattaccgttcacgtgggtaacggcgcatcagttgcggcggtgaagaatggcgtatctgttgacacttccatgggtttcacaccacttgaaggtcttgtcatgggcacgcgcagcggcgatattgatccggccatcgtggaatttcttgagaaagaagaaggattgtcggccaaagaagtcgtcaacatcctcaacaagaaatctggtgtgtatgggctcaccaaaggctttagtagtgacatgcgtgacattgaagatgcggctattgaaggtgatcctgtatgccgccttgcattcgatgtgtacgaatatcgtatcgcgaaatatattggcgcatacgctgcggccatgaacggtgttgacgcgatcgtctttaccgcaggagttggcgaaaatagcccgattatgcgcgaagaaattattgagaactacttgggctacttagggatcaagatcgataaagaagccaatgacttcaaaggtgaggagaagatcatttcaacgcccgattccaaagtgattgcgatggtagttccgaccaacgaggagctcatgatcgccaaagacacgaaagaaatcattgagaaagggttggacgagcttaagatctaatga

SEQ ID NO: 2550 - protein, 417 aa, synthetic construct
  REGION 1..417: note = Variant of acetate kinase
MHHHHHHGGSGMKVLVINSGSSSIKYQLLDMTNEKVLAKGLVERIGIDGSRIVHKVNGEKHVLEHEIKNHEIGLKLVLDLLTDEKYGVLKDLKEIDAVGHRVVHGGERFASSVKITDEVLKTIETLSFLAPLHNPANIMGIKSSMKLLPGVPQVAVFDTAFHQKMPEKAYLYAIPYEYYEKYKIRRYGFHGTSHRYVSKRAAEIMGKPYDQLKIITVHVGNGASVAAVKNGVSVDTSMGFTPLEGLVMGTRSGDIDPAIVEFLEKEEGLSAKEVVNILNKKSGVYGLTKGFSSDMRDIEDAAIEGDPVCRLAFDVYEYRIAKYIGAYAAAMNGVDAIVFTAGVGENSPIMREEIIENYLGYLGIKIDKEANDFKGEEKIISTPDSKVIAMVVPTNEELMIAKDTKEIIEKGLDELKI

SEQ ID NO: 2551 - DNA, 1257 bp, synthetic construct
  misc_feature 1..1257: note = Variant of acetate kinase
  source 1..1257: mol_type = other DNA
atgcaccatcatcatcatcatggcggtagcggcatgaaagttctggtgattaattctggtagctcctccatcaaatatcagctcctcgatatgaccaacgaaaaggtattagcgaaaggcttggtcgagcgcattggcatcgacggttcgcgtatcgtgcataaagttaacggcgaaaaacacgtgctggaacatgagattaagaatcacgaaattggacttaaattggtcctggatcttcttacggacgaaaaatacggtgtgttgaaggatctcaaagaaatcgatgcagttgggcatcgcgtagtacatggcggcgagcgttttgccagtagcgtgaagattactgacgaagtcttaaagaccatcgagacgttgtcgttcttaattccgttacacaatccagcgaacattatgggtatcaagagcagcatgaaattattaccgggtgtgcctcaagttgccgtctttgatacagcgttccaccagaagatgccggagaaagcctatttgtacgcaatcccctatgagtactacgagaaatataaaattcgccgctatgggtttcatggaacctcacatcgttatgtgagtaaacgtgctgcggaaattatgggcaaaccgtacgatcagctcaagatcattaccgttcacgtgggtaacggcgcatcagttgcggcggtgaagaatggcgtatctgttgacacttccatgggtttcacaccacttgaaggtcttgtcatgggcacgcgcagcggcgatattgatccggccatcgtggaatttcttgagaaagaagaaggattgtcggccaaagaagtcgtcaacatcctcaacaagaaatctggtgtgtatgggctcaccaaaggctttagtagtgacatgcgtgacattgaagataatgctattgaaggtgatcctgtatgccgccttgcattcgatgtgtacgaatatcgtatcgcgaaatatattggcgcatacgctgcggccatgaacggtgttgacgcgatcgtctttaccgcaggagttggcgaaaatagcccgattatgcgcgaagaaattattgagaactacttgggctacttagggatcaagatcgataaagaagccaatgacttcaaaggtgaggagaagatcatttcaacgcccgattccaaagtgattgcgatggtagttccgaccaacgaggagctcatgatcgccaaagacacgaaagaaatcattgagaaagggttggacgagcttaagatctaatga

SEQ ID NO: 2552 - protein, 417 aa, synthetic construct
  REGION 1..417: note = Variant of acetate kinase
MHHHHHHGGSGMKVLVINSGSSSIKYQLLDMTNEKVLAKGLVERIGIDGSRIVHKVNGEKHVLEHEIKNHEIGLKLVLDLLTDEKYGVLKDLKEIDAVGHRVVHGGERFASSVKITDEVLKTIETLSFLIPLHNPANIMGIKSSMKLLPGVPQVAVFDTAFHQKMPEKAYLYAIPYEYYEKYKIRRYGFHGTSHRYVSKRAAEIMGKPYDQLKIITVHVGNGASVAAVKNGVSVDTSMGFTPLEGLVMGTRSGDIDPAIVEFLEKEEGLSAKEVVNILNKKSGVYGLTKGFSSDMRDIEDNAIEGDPVCRLAFDVYEYRIAKYIGAYAAAMNGVDAIVFTAGVGENSPIMREEIIENYLGYLGIKIDKEANDFKGEEKIISTPDSKVIAMVVPTNEELMIAKDTKEIIEKGLDELKI

SEQ ID NO: 2553 - DNA, 1257 bp, synthetic construct
  misc_feature 1..1257: note = Variant of acetate kinase
  source 1..1257: mol_type = other DNA
atgcaccatcatcatcatcatggcggtagcggcatgaaagttactgtgattaattctggtagctcctccatcaaatatcagctcctcgatatgaccaacgaaaaggtattagcgaaaggcttggtcgagcgcattggcatcgacggttcgcgtatcgtgcataaagttaacggcgaaaaacacgtgctggaacatgagattaagaatcacgaaattggacttaaattggtcctggatcttcttacggacgaaaaatacggtgtgttgaaggatctcaaagaaatcgatgcagttgggcatcgcgtagtacatggcggcgagcgttttgccagtagcgtgaagattactgacgaagtcttaaagaccatcgagacgttgtcgttcttagctccgttacacaatccagcgaacattatgggtatcaagagcagcatgaaattattaccgggtgtgcctcaagttgccgtctttgatacagcgttccaccagaagatgccggagaaagcctatttgtacgcaatcccctatgagtactacgagaaatataaaattcgccgctatgggtttcatggaacctcacatcgttatgtgagtaaacgtgctgcggaaattatgggcaaaccgtacgatcagctcaagatcattaccgttcacgtgggtaacggcgcatcagttgcggcggtgaagaatggcgtatctgttgacacttccatgggtttcacaccacttgaaggtcttgtcatgggcacgcgcagcggcgatattgatccggccatcgtggaatttcttgagaaagaagaaggattgtcggccaaagaagtcgtcaacatcctcaacaagaaatctggtgtgtatgggctcaccaaaggctttagtagtgacatgcgtgacattgaagataatgctattgaaggtgatcctgtatgccgccttgcattcgatgtgtacgaatatcgtatcgcgaaatatattggcgcatacgctgcggccatgaacggtgttgacgcgatcgtctttaccgcaggagttggcgaaaatagcccgattatgcgcgaagaaattattgagaactacttgggctacttagggatcaagatcgataaagaagccaatgacttcaaaggtgaggagaagatcatttcaacgcccgattccaaagtgattgcgatggtagttccgaccaacgaggagctcatgatcgccaaagacacgaaagaaatcattgagaaagggttggacgagcttaagatctaatga

SEQ ID NO: 2554 - protein, 417 aa, synthetic construct
  REGION 1..417: note = Variant of acetate kinase
MHHHHHHGGSGMKVTVINSGSSSIKYQLLDMTNEKVLAKGLVERIGIDGSRIVHKVNGEKHVLEHEIKNHEIGLKLVLDLLTDEKYGVLKDLKEIDAVGHRVVHGGERFASSVKITDEVLKTIETLSFLAPLHNPANIMGIKSSMKLLPGVPQVAVFDTAFHQKMPEKAYLYAIPYEYYEKYKIRRYGFHGTSHRYVSKRAAEIMGKPYDQLKIITVHVGNGASVAAVKNGVSVDTSMGFTPLEGLVMGTRSGDIDPAIVEFLEKEEGLSAKEVVNILNKKSGVYGLTKGFSSDMRDIEDNAIEGDPVCRLAFDVYEYRIAKYIGAYAAAMNGVDAIVFTAGVGENSPIMREEIIENYLGYLGIKIDKEANDFKGEEKIISTPDSKVIAMVVPTNEELMIAKDTKEIIEKGLDELKI

SEQ ID NO: 2555 - DNA, 1257 bp, synthetic construct
  misc_feature 1..1257: note = Variant of acetate kinase
  source 1..1257: mol_type = other DNA
atgcaccatcatcatcatcatggcggtagcgacatgaaagttctggtgattaattctggtagctcctccatcaaatatcagctcctcgatatgaccaacgaaaaggtattagcgaaaggcttggtcgagcgcattggcatcgacggtactcgtatcgtgcataaagttaacggcgaaaaacacgtgctggaacatgagattaagaatcacgaaattggacttaaattggtcctggatcttcttacggacgaaaaatacggtgtgttgaaggatctcaaagaaatcgatgcagttgggcatcgcgtagtacatggcggcgagcgttttgccagtagcgtgaagattactgacgaagtcttaaagaccatcgagacgttgtcgttcttagctccgttacacaatccagcgaacattatgggtatcaagagcagcatgaaattattaccgggtgtgcctcaagttgccgtctttgatacagcgttccaccagaagatgccggagaaagcctatttgtacgcaatcccctatgagtactacgagaaatataaaattcgccgctatgggtttcatggaacctcacatcgttatgtgagtaaacgtgctgcggaaattatgggcaaaccgtacgatcagctcaagatcattaccgttcacgtgggtaacggcgcatcagttgcggcggtgaagaatggcgtatctgttgacacttccatgggtttcacaccacttgaaggtcttgtcatgggcacgcgcagcggcgatattgatccggccatcgtggaatttcttgagaaagaagaaggattgtcggccaaagaagtcgtcaacatcctcaacaagaaatctggtgtgtatgggctcaccaaaggctttagtagtgacatgcgtgacattgaagataatgctattgaaggtgatcctgtatgccgccttgcattcgatgtgtacgaatatcgtatcgcgaaatatattggcgcatacgctgcggccatgaacggtgttgacgcgatcgtctttaccgcaggagttggcgaaaatagcccgattatgcgcgaagaaattattgagaactacttgggctacttagggatcaagatcgataaagaagccaatgacttcaaaggtgaggagaagatcatttcaacgcccgattccaaagtgattgcgatggtagttccgaccaacgaggagctcatgatcgccaaagacacgaaagaaatcattgagaaagggttggacgagcttaagatctaatga

SEQ ID NO: 2556 - protein, 417 aa, synthetic construct
  REGION 1..417: note = Variant of acetate kinase
MHHHHHHGGSDMKVLVINSGSSSIKYQLLDMTNEKVLAKGLVERIGIDGTRIVHKVNGEKHVLEHEIKNHEIGLKLVLDLLTDEKYGVLKDLKEIDAVGHRVVHGGERFASSVKITDEVLKTIETLSFLAPLHNPANIMGIKSSMKLLPGVPQVAVFDTAFHQKMPEKAYLYAIPYEYYEKYKIRRYGFHGTSHRYVSKRAAEIMGKPYDQLKIITVHVGNGASVAAVKNGVSVDTSMGFTPLEGLVMGTRSGDIDPAIVEFLEKEEGLSAKEVVNILNKKSGVYGLTKGFSSDMRDIEDNAIEGDPVCRLAFDVYEYRIAKYIGAYAAAMNGVDAIVFTAGVGENSPIMREEIIENYLGYLGIKIDKEANDFKGEEKIISTPDSKVIAMVVPTNEELMIAKDTKEIIEKGLDELKI

SEQ ID NO: 2557 - DNA, 1257 bp, synthetic construct
  misc_feature 1..1257: note = Variant of acetate kinase
  source 1..1257: mol_type = other DNA
atgcaccatcatcatcatcatggcggtagcggcatgaaagttctggtgattaattctggtagctcctccatcaaatatcagctcctcgatatgaccaacgaaaaggtattagcgaaaggcttggtcgagcgcattggcatcgacggttcgcgtatcgtgcataaagttaacggcgaaaaacacgtgctggaacatgagattaagaatcacgaaattggacttaaattggtcctggatcttcttacggacgaaaaatacggtgtgttgaaggatctcaaagaaatcgatgcagttgggcatcgcgtagtacatggcggcgagcgttttgccagtagcgtgaagattactgacgaagtcttaaagaccatcgagacgttgtcgttcttagctccgttacacaatccagcgaacattatgggtatcaagagcagcatgaaattattaccgggtgtgcctcaagttgcccggtttgatacagcgttccaccagaagatgccggagaaagcctatttgtacgcaatcccctatgagtactacgagaaatataaaattcgccgctatgggtttcatggaacctcacatcgttatgtgagtaaacgtgctgcggaaattatgggcaaaccgtacgatcagctcaagatcattaccgttcacgtgggtaacggcgcatcagttgcggcggtgaagaatggcgtatctgttgacacttccatgggtttcacaccacttgaaggtcttgtcatgggcacgcgcagcggcgatattgatccggccatcgtggaatttcttgagaaagaagaaggattgtcggccaaagaagtcgtcaacatcctcaacaagaaatctggtgtgtatgggctcaccaaaggctttagtagtgacatgcgtgacattgaagataatgctattgaaggtgatcctgtatgccgccttgcattcgatgtgtacgaatatcgtatcgcgaaatatattggcgcatacgctgcggccatgaacggtgttgacgcgatcgtctttaccgcaggagttggcgaaaatagcccgattatgcgcgaagaaattattgagaactacttgggctacttagggatcaagatcgataaagaagccaatgacttcaaaggtgaggagaagatcatttcaacgcccgattccaaagtgattgcgatggtagttccgaccaacgaggagctcatgatcgccaaagacacgaaagaaatcattgagaaagggttggacgagcttaagatctaatga

SEQ ID NO: 2558 - protein, 417 aa, synthetic construct
  REGION 1..417: note = Variant of acetate kinase
MHHHHHHGGSGMKVLVINSGSSSIKYQLLDMTNEKVLAKGLVERIGIDGSRIVHKVNGEKHVLEHEIKNHEIGLKLVLDLLTDEKYGVLKDLKEIDAVGHRVVHGGERFASSVKITDEVLKTIETLSFLAPLHNPANIMGIKSSMKLLPGVPQVARFDTAFHQKMPEKAYLYAIPYEYYEKYKIRRYGFHGTSHRYVSKRAAEIMGKPYDQLKIITVHVGNGASVAAVKNGVSVDTSMGFTPLEGLVMGTRSGDIDPAIVEFLEKEEGLSAKEVVNILNKKSGVYGLTKGFSSDMRDIEDNAIEGDPVCRLAFDVYEYRIAKYIGAYAAAMNGVDAIVFTAGVGENSPIMREEIIENYLGYLGIKIDKEANDFKGEEKIISTPDSKVIAMVVPTNEELMIAKDTKEIIEKGLDELKI

SEQ ID NO: 2559 - DNA, 1257 bp, synthetic construct
  misc_feature 1..1257: note = Variant of acetate kinase
  source 1..1257: mol_type = other DNA
atgcaccatcatcatcatcatggcggtagcggcatgaaagttctgaatattaattctggtagctcctccatcaaatatcagctcctcgatatgaccaacgaaaaggtattagcgaaaggcttggtcgagcgcattggcatcgacggttcgcgtatcgtgcataaagttaacggcgaaaaacacgtgctggaacatgagattaagaatcacgaaattggacttaaattggtcctggatcttcttacggacgaaaaatacggtgtgttgaaggatctcaaagaaatcgatgcagttgggcatcgcgtagtacatggcggcgagcgttttgccagtagcgtgaagattactgacgaagtcttaaagaccatcgagacgttgtcgttcttagctccgttacacaatccagcgaacattatgggtatcaagagcagcatgaaattattaccgggtgtgcctcaagttgccgtctttgatacagcgttccaccagaagatgccggagaaagcctatttgtacgcaatcccctatgagtactacgagaaatataaaattcgccgctatgggtttcatggaacctcacatcgttatgtgagtaaacgtgctgcggaaattatgggcaaaccgtacgatcagctcaagatcattaccgttcacgtgggtaacggcgcatcagttgcggcggtgaagaatggcgtatctgttgacacttccatgggtttcacaccacttgaaggtcttgtcatgggcacgcgcagcggcgatattgatccggccatcgtggaatttcttgagaaagaagaaggattgtcggccaaagaagtcgtcaacatcctcaacaagaaatctggtgtgtatgggctcaccaaaggctttagtagtgacatgcgtgacattgaagataatgctattgaaggtgatcctgtatgccgccttgcattcgatgtgtacgaatatcgtatcgcgaaatatattggcgcatacgctgcggccatgaacggtgttgacgcgatcgtctttaccgcaggagttggcgaaaatagcccgattatgcgcgaagaaattattgagaactacttgggctacttagggatcaagatcgataaagaagccaatgacttcaaaggtgaggagaagatcatttcaacgcccgattccaaagtgattgcgatggtagttccgaccaacgaggagctcatgatcgccaaagacacgaaagaaatcattgagaaagggttggacgagcttaagatctaatga

SEQ ID NO: 2560 - protein, 417 aa, synthetic construct
  REGION 1..417: note = Variant of acetate kinase
MHHHHHHGGSGMKVLNINSGSSSIKYQLLDMTNEKVLAKGLVERIGIDGSRIVHKVNGEKHVLEHEIKNHEIGLKLVLDLLTDEKYGVLKDLKEIDAVGHRVVHGGERFASSVKITDEVLKTIETLSFLAPLHNPANIMGIKSSMKLLPGVPQVAVFDTAFHQKMPEKAYLYAIPYEYYEKYKIRRYGFHGTSHRYVSKRAAEIMGKPYDQLKIITVHVGNGASVAAVKNGVSVDTSMGFTPLEGLVMGTRSGDIDPAIVEFLEKEEGLSAKEVVNILNKKSGVYGLTKGFSSDMRDIEDNAIEGDPVCRLAFDVYEYRIAKYIGAYAAAMNGVDAIVFTAGVGENSPIMREEIIENYLGYLGIKIDKEANDFKGEEKIISTPDSKVIAMVVPTNEELMIAKDTKEIIEKGLDELKI

SEQ ID NO: 2561 - DNA, 1257 bp, synthetic construct
  misc_feature 1..1257: note = Variant of acetate kinase
  source 1..1257: mol_type = other DNA
atgcaccatcatcatcatcatggcggtagcggcatgaaagttctggtgattaattctggtagctcctccatcaaatatcagctcctcgatatgaccaacgaaaaggtattagcgaaaggcttggtcgagcgcattggcatcgacggttcgcgtatcgtgcataaagttaacggcgaaaaacacgtgctggaacatgagattaagaatcacgaaattggacttaaattggtcctggatcttcttacggacgaaaaatacggtgtgttgaaggatctcaaagaaatcgatgcagttgggcatcgcgtagtacatggcggcgagcgttttgccagtagcgtgaagattactgacgaagtcttaaagaccatcgagacgttgtcgttcttagctccgttacacaatccagcgaacattatgggtatcaagagcacctgtaaattattaccgggtgtgcctcaagttgccgtctttgatacagcgttccaccagaagatgccggagaaagcctatttgtacgcaatcccctatgagtactacgagaaatataaaattcgccgctatgggtttcatggaacctcacatcgttatgtgagtaaacgtgctgcggaaattatgggcaaaccgtacgatcagctcaagatcattaccgttcacgtgggtaacggcgcatcagttgcggcggtgaagaatggcgtatctgttgacacttccatgggtttcacaccacttgaaggtcttgtcatgggcacgcgcagcggcgatattgatccggccatcgtggaatttcttgagaaagaagaaggattgtcggccaaagaagtcgtcaacatcctcaacaagaaatctggtgtgtatgggctcaccaaaggctttagtagtgacatgcgtgacattgaagataatgctattgaaggtgatcctgtatgccgccttgcattcgatgtgtacgaatatcgtatcgcgaaatatattggcgcatacgctgcggccatgaacggtgttgacgcgatcgtctttaccgcaggagttggcgaaaatagcccgattatgcgcgaagaaattattgagaactacttgggctacttagggatcaagatcgataaagaagccaatgacttcaaaggtgaggagaagatcatttcaacgcccgattccaaagtgattgcgatggtagttccgaccaacgaggagctcatgatcgccaaagacacgaaagaaatcattgagaaagggttggacgagcttaagatctaatga

SEQ ID NO: 2562 - protein, 417 aa, synthetic construct
  REGION 1..417: note = Variant of acetate kinase
MHHHHHHGGSGMKVLVINSGSSSIKYQLLDMTNEKVLAKGLVERIGIDGSRIVHKVNGEKHVLEHEIKNHEIGLKLVLDLLTDEKYGVLKDLKEIDAVGHRVVHGGERFASSVKITDEVLKTIETLSFLAPLHNPANIMGIKSTCKLLPGVPQVAVFDTAFHQKMPEKAYLYAIPYEYYEKYKIRRYGFHGTSHRYVSKRAAEIMGKPYDQLKIITVHVGNGASVAAVKNGVSVDTSMGFTPLEGLVMGTRSGDIDPAIVEFLEKEEGLSAKEVVNILNKKSGVYGLTKGFSSDMRDIEDNAIEGDPVCRLAFDVYEYRIAKYIGAYAAAMNGVDAIVFTAGVGENSPIMREEIIENYLGYLGIKIDKEANDFKGEEKIISTPDSKVIAMVVPTNEELMIAKDTKEIIEKGLDELKI

SEQ ID NO: 2563 - DNA, 1257 bp, synthetic construct
  misc_feature 1..1257: note = Variant of acetate kinase
  source 1..1257: mol_type = other DNA
atgcaccatcatcatcatcatggcggtagcggcatgaaagttctggtgattaattctggtagctcctccatcaaatatcagctcctcgatatgaccaacgaaaaggtattagcgaaaggcttggtcgagcgcattggcatcgacggttcgcgtatcgtgcataaagttaacggcgaaaaacacgtgctggaacatgagattaagaatcacgaaattggacttaaattggtcctggatcttcttacggacgaaaaatacggtgtgttgaaggatctcaaagaaatcgatgcagttgggcatcgcgtagtacatggcggcgagcgttttgccagtagcgtgaagattactgacgaagtcttaaagaccatcgagacgttgtcgttcttagctccgttacacaatccagcgaacattatgggtatcaagagcagcatgaaattattaccgggtgtgcctcaagttgccgtctttgatacagcgttccaccagaagatgccggagaaagcctatttgtacgcaatcccctatgagtactacgagaaatataaaattcgccgctatgggtttcatggaacctcacatcgttatgtgagtaaacgtgctgcggaaattatgggcaaaccgtacgatcagctcaagatcattaccgttcacgtgggtaacggcgcatcagttgcggcggtgaagaatggcgtatctgttgacacttccatgggtttcacaccacttgaaggtcttgtcatgggcacgcgcagcggcgatattgatccggccatcgtggaatttcttgagaaagaagaaggattgtcggccaaagaagtcgtcaacatcctcaacaagaaatctggtgtgtatgggctcaccaaaggctttagtagtgacatgcgtgacattgaagataatgctattgaaggtgatcctgtatgccgccttgcattcgatgtgtacgaatatcgtatcgcgaaatatattggcgcatacgctgcggccatgaacggtgttgacgcgatcgtctttaccgcaggagttggcgaaaatagcgtgattatgcgcgaagaaattattgagaactacttgggctacttagggatcaagatcgataaagaagccaatgacttcaaaggtgaggagaagatcatttcaacgcccgattccaaagtgattgcgatggtagttccgaccaacgaggagctcatgatcgccaaagacacgaaagaaatcattgagaaagggttggacgagcttaagatctaatga

SEQ ID NO: 2564 - protein, 417 aa, synthetic construct
  REGION 1..417: note = Variant of acetate kinase
MHHHHHHGGSGMKVLVINSGSSSIKYQLLDMTNEKVLAKGLVERIGIDGSRIVHKVNGEKHVLEHEIKNHEIGLKLVLDLLTDEKYGVLKDLKEIDAVGHRVVHGGERFASSVKITDEVLKTIETLSFLAPLHNPANIMGIKSSMKLLPGVPQVAVFDTAFHQKMPEKAYLYAIPYEYYEKYKIRRYGFHGTSHRYVSKRAAEIMGKPYDQLKIITVHVGNGASVAAVKNGVSVDTSMGFTPLEGLVMGTRSGDIDPAIVEFLEKEEGLSAKEVVNILNKKSGVYGLTKGFSSDMRDIEDNAIEGDPVCRLAFDVYEYRIAKYIGAYAAAMNGVDAIVFTAGVGENSVIMREEIIENYLGYLGIKIDKEANDFKGEEKIISTPDSKVIAMVVPTNEELMIAKDTKEIIEKGLDELKI

SEQ ID NO: 2565 - DNA, 1257 bp, synthetic construct
  misc_feature 1..1257: note = Variant of acetate kinase
  source 1..1257: mol_type = other DNA
atgcaccatcatcatcatcatggcggtagcggcatgaaagttctggtgattaattctggtagctcctccatcaaatatcagctcctcgatatgaccaacgaaaaggtattagcgaaaggcttggtcgagcgcattggcatcgacggttcgcgtatcgtgcataaagttaacggcgaaaaacacgtgctggaacatgagattaagaatcacgaaattggacttaaattggtcctggatcttcttacggacgaaaaatacggtgtgttgaaggatctcaaagaaatcgatgcaggtgggcatcgcgtagtacatggcggcgagcgttttgccagtagcgtgaagattactgacgaagtcttaaagaccatcgagacgttgtcgttcttagctccgttacacaatccagcgaacattatgggtatcaagagcagcatgaaattattaccgggtgtgcctcaagttgccgtctttgatacagcgttccaccagaagatgccggagaaagcctatttgtacgcaatcccctatgagtactacgagaaatataaaattcgccgctatgggtttcatggaacctcacatcgttatgtgagtaaacgtgctgcggaaattatgggcaaaccgtacgatcagctcaagatcattaccgttcacgtgggtaacggcgcatcagttgcggcggtgaagaatggcgtatctgttgacacttccatgggtttcacaccacttgaaggtcttgtcatgggcacgcgcagcggcgatattgatccggccatcgtggaatttcttgagaaagaagaaggattgtcggccaaagaagtcgtcaacatcctcaacaagaaatctggtgtgtatgggctcaccaaaggctttagtagtgacatgcgtgacattgaagataatgctattgaaggtgatcctgtatgccgccttgcattcgatgtgtacgaatatcgtatcgcgaaatatattggcgcatacgctgcggccatgaacggtgttgacgcgatcgtctttaccgcaggagttggcgaaaatagcccgattatgcgcgaagaaattattgagaactacttgggctacttagggatcaagatcgataaagaagccaatgacttcaaaggtgaggagaagatcatttcaacgcccgattccaaagtgattgcgatggtagttccgaccaacgaggagctcatgatcgccaaagacacgaaagaaatcattgagaaagggttggacgagcttaagatctaatga

SEQ ID NO: 2566 - protein, 417 aa, synthetic construct
  REGION 1..417: note = Variant of acetate kinase
MHHHHHHGGSGMKVLVINSGSSSIKYQLLDMTNEKVLAKGLVERIGIDGSRIVHKVNGEKHVLEHEIKNHEIGLKLVLDLLTDEKYGVLKDLKEIDAGGHRVVHGGERFASSVKITDEVLKTIETLSFLAPLHNPANIMGIKSSMKLLPGVPQVAVFDTAFHQKMPEKAYLYAIPYEYYEKYKIRRYGFHGTSHRYVSKRAAEIMGKPYDQLKIITVHVGNGASVAAVKNGVSVDTSMGFTPLEGLVMGTRSGDIDPAIVEFLEKEEGLSAKEVVNILNKKSGVYGLTKGFSSDMRDIEDNAIEGDPVCRLAFDVYEYRIAKYIGAYAAAMNGVDAIVFTAGVGENSPIMREEIIENYLGYLGIKIDKEANDFKGEEKIISTPDSKVIAMVVPTNEELMIAKDTKEIIEKGLDELKI

SEQ ID NO: 2567 - DNA, 1257 bp, synthetic construct
  misc_feature 1..1257: note = Variant of acetate kinase
  source 1..1257: mol_type = other DNA
atgcaccatcatcatcatcatggcggtagcggcatgaaagttctggtgattaattctggtagctcctccatcaaatatcagctcctcgatatgaccaacgaaaaggtattagcgaaaggcttggtcgagcgcattggcatcgacggttcgcgtatcgtgcataaagttaacggcgaaaaacacgtgctggaacatgagattaagaatcacgaaattggacttaaattggtcctggatcttcttacggacgaaaaatacggtgtgttgaaggatctcaaagaaatcgatgcagttgggcatcgcgtagtacatggcggcgagcgttttgccagtagcgtgaagattactgacgaagtcttaaagaccatcgagacgttgtcgttcttagctccgttacacaatccagcgaacattatgggtatcaagagctgtatgaaattattaccgggtgtgcctcaagttgccgtctttgatacagcgttccaccagaagatgccggagaaagcctatttgtacgcaatcccctatgagtactacgagaaatataaaattcgccgctatgggtttcatggaacctcacatcgttatgtgagtaaacgtgctgcggaaattatgggcaaaccgtacgatcagctcaagatcattaccgttcacgtgggtaacggcgcatcagttgcggcggtgaagaatggcgtatctgttgacacttccatgggtttcacaccacttgaaggtcttgtcatgggcacgcgcagcggcgatattgatccggccatcgtggaatttcttgagaaagaagaaggattgtcggccaaagaagtcgtcaacatcctcaacaagaaatctggtgtgtatgggctcaccaaaggctttagtagtgacatgcgtgacattgaagataatgctattgaaggtgatcctgtatgccgccttgcattcgatgtgtacgaatatcgtatcgcgaaatatattggcgcatacgctgcggccatgaacggtgttgacgcgatcgtctttaccgcaggagttggcgaaaatagcccgattatgcgcgaagaaattattgagaactacttgggctacttagggatcaagatcgataaagaagccaatgacttcaaaggtgaggagaagatcatttcaacgcccgattccaaagtgattgcgatggtagttccgaccaacgaggagctcatgatcgccaaagacacgaaagaaatcattgagaaagggttggacgagcttaagatctaatga

SEQ ID NO: 2568 - protein, 417 aa, synthetic construct
  REGION 1..417: note = Variant of acetate kinase
MHHHHHHGGSGMKVLVINSGSSSIKYQLLDMTNEKVLAKGLVERIGIDGSRIVHKVNGEKHVLEHEIKNHEIGLKLVLDLLTDEKYGVLKDLKEIDAVGHRVVHGGERFASSVKITDEVLKTIETLSFLAPLHNPANIMGIKSCMKLLPGVPQVAVFDTAFHQKMPEKAYLYAIPYEYYEKYKIRRYGFHGTSHRYVSKRAAEIMGKPYDQLKIITVHVGNGASVAAVKNGVSVDTSMGFTPLEGLVMGTRSGDIDPAIVEFLEKEEGLSAKEVVNILNKKSGVYGLTKGFSSDMRDIEDNAIEGDPVCRLAFDVYEYRIAKYIGAYAAAMNGVDAIVFTAGVGENSPIMREEIIENYLGYLGIKIDKEANDFKGEEKIISTPDSKVIAMVVPTNEELMIAKDTKEIIEKGLDELKI

SEQ ID NO: 2569 - DNA, 1257 bp, synthetic construct
  misc_feature 1..1257: note = Variant of acetate kinase
  source 1..1257: mol_type = other DNA
atgcaccatcatcatcatcatggcggtagcggcatgaaagttctggtgattaattctggtagctcctccatcaaatatcagctcctcgatatgaccaacgaaaaggtattagcgaaaggcttggtcgagcgcattggcatcgacggttcgcgtatcgtgcataaagttaacggcgaaaaacacgtgctggaacatgagattaagaatcacgaaattggacttcatttggtcctggatcttcttacggacgaaaaatacggtgtgttgaaggatctcaaagaaatcgatgcagttgggcatcgcgtagtacatggcggcgagcgttttgccagtagcgtgaagattactgacgaagtcttaaagaccatcgagacgttgtcgttcttagctccgttacacaatccagcgaacattatgggtatcaagagcagcatgaaattattaccgggtgtgcctcaagttgccgtctttgatacagcgttccaccagaagatgccggagaaagcctatttgtacgcaatcccctatgagtactacgagaaatataaaattcgccgctatgggtttcatggaacctcacatcgttatgtgagtaaacgtgctgcggaaattatgggcaaaccgtacgatcagctcaagatcattaccgttcacgtgggtaacggcgcatcagttgcggcggtgaagaatggcgtatctgttgacacttccatgggtttcacaccacttgaaggtcttgtcatgggcacgcgcagcggcgatattgatccggccatcgtggaatttcttgagaaagaagaaggattgtcggccaaagaagtcgtcaacatcctcaacaagaaatctggtgtgtatgggctcaccaaaggctttagtagtgacatgcgtgacattgaagataatgctattgaaggtgatcctgtatgccgccttgcattcgatgtgtacgaatatcgtatcgcgaaatatattggcgcatacgctgcggccatgaacggtgttgacgcgatcgtctttaccgcaggagttggcgaaaatagcccgattatgcgcgaagaaattattgagaactacttgggctacttagggatcaagatcgataaagaagccaatgacttcaaaggtgaggagaagatcatttcaacgcccgattccaaagtgattgcgatggtagttccgaccaacgaggagctcatgatcgccaaagacacgaaagaaatcattgagaaagggttggacgagcttaagatctaatga

SEQ ID NO: 2570 - protein, 417 aa, synthetic construct
  REGION 1..417: note = Variant of acetate kinase
MHHHHHHGGSGMKVLVINSGSSSIKYQLLDMTNEKVLAKGLVERIGIDGSRIVHKVNGEKHVLEHEIKNHEIGLHLVLDLLTDEKYGVLKDLKEIDAVGHRVVHGGERFASSVKITDEVLKTIETLSFLAPLHNPANIMGIKSSMKLLPGVPQVAVFDTAFHQKMPEKAYLYAIPYEYYEKYKIRRYGFHGTSHRYVSKRAAEIMGKPYDQLKIITVHVGNGASVAAVKNGVSVDTSMGFTPLEGLVMGTRSGDIDPAIVEFLEKEEGLSAKEVVNILNKKSGVYGLTKGFSSDMRDIEDNAIEGDPVCRLAFDVYEYRIAKYIGAYAAAMNGVDAIVFTAGVGENSPIMREEIIENYLGYLGIKIDKEANDFKGEEKIISTPDSKVIAMVVPTNEELMIAKDTKEIIEKGLDELKI

SEQ ID NO: 2571 - DNA, 1257 bp, synthetic construct
  misc_feature 1..1257: note = Variant of acetate kinase
  source 1..1257: mol_type = other DNA
atgcaccatcatcatcatcatggcggtagcggcatgaaagttctggtgattaattctggtagctcctccatcaaaggtcagctcctcgatatgaccaacgaaaaggtattagcgaaaggcttggtcgagcgcattggcatcgacggttcgcgtatcgtgcataaagttaacggcgaaaaacacgtgctggaacatgagattaagaatcacgaaattggacttaaattggtcctggatcttcttacggacgaaaaatacggtgtgttgaaggatctcaaagaaatcgatgcagttgggcatcgcgtagtacatggcggcgagcgttttgccagtagcgtgaagattactgacgaagtcttaaagaccatcgagacgttgtcgttcttagctccgttacacaatccagcgaacattatgggtatcaagagcagcatgaaattattaccgggtgtgcctcaagttgccgtctttgatacagcgttccaccagaagatgccggagaaagcctatttgtacgcaatcccctatgagtactacgagaaatataaaattcgccgctatgggtttcatggaacctcacatcgttatgtgagtaaacgtgctgcggaaattatgggcaaaccgtacgatcagctcaagatcattaccgttcacgtgggtaacggcgcatcagttgcggcggtgaagaatggcgtatctgttgacacttccatgggtttcacaccacttgaaggtcttgtcatgggcacgcgcagcggcgatattgatccggccatcgtggaatttcttgagaaagaagaaggattgtcggccaaagaagtcgtcaacatcctcaacaagaaatctggtgtgtatgggctcaccaaaggctttagtagtgacatgcgtgacattgaagataatgctattgaaggtgatcctgtatgccgccttgcattcgatgtgtacgaatatcgtatcgcgaaatatattggcgcatacgctgcggccatgaacggtgttgacgcgatcgtctttaccgcaggagttggcgaaaatagcccgattatgcgcgaagaaattattgagaactacttgggctacttagggatcaagatcgataaagaagccaatgacttcaaaggtgaggagaagatcatttcaacgcccgattccaaagtgattgcgatggtagttccgaccaacgaggagctcatgatcgccaaagacacgaaagaaatcattgagaaagggttggacgagcttaagatctaatga

SEQ ID NO: 2572 - protein, 417 aa, synthetic construct
  REGION 1..417: note = Variant of acetate kinase
MHHHHHHGGSGMKVLVINSGSSSIKGQLLDMTNEKVLAKGLVERIGIDGSRIVHKVNGEKHVLEHEIKNHEIGLKLVLDLLTDEKYGVLKDLKEIDAVGHRVVHGGERFASSVKITDEVLKTIETLSFLAPLHNPANIMGIKSSMKLLPGVPQVAVFDTAFHQKMPEKAYLYAIPYEYYEKYKIRRYGFHGTSHRYVSKRAAEIMGKPYDQLKIITVHVGNGASVAAVKNGVSVDTSMGFTPLEGLVMGTRSGDIDPAIVEFLEKEEGLSAKEVVNILNKKSGVYGLTKGFSSDMRDIEDNAIEGDPVCRLAFDVYEYRIAKYIGAYAAAMNGVDAIVFTAGVGENSPIMREEIIENYLGYLGIKIDKEANDFKGEEKIISTPDSKVIAMVVPTNEELMIAKDTKEIIEKGLDELKI

SEQ ID NO: 2573 - DNA, 1257 bp, synthetic construct
  misc_feature 1..1257: note = Variant of acetate kinase
  source 1..1257: mol_type = other DNA
atgcaccatcatcatcatcatggcggtagcggcatgaaagttctggtgattaattctggtagctcctccatcaaatatcagctcctcgatatgaccaacgaaaaggtattagcgaaaggcttggtcgagcgcattggcatcgacggttcgcgtatcgtgcataaagttaacggcgaaaaacacgtgctggaacatgggattaagaatcacgaaattggacttaaattggtcctggatcttcttacggacgaaaaatacggtgtgttgaaggatctcaaagaaatcgatgcagttgggcatcgcgtagtacatggcggcgagcgttttgccagtagcgtgaagattactgacgaagtcttaaagaccatcgagacgttgtcgttcttagctccgttacacaatccagcgaacattatgggtatcaagagcagcatgaaattattaccgggtgtgcctcaagttgccgtctttgatacagcgttccaccagaagatgccggagaaagcctatttgtacgcaatcccctatgagtactacgagaaatataaaattcgccgctatgggtttcatggaacctcacatcgttatgtgagtaaacgtgctgcggaaattatgggcaaaccgtacgatcagctcaagatcattaccgttcacgtgggtaacggcgcatcagttgcggcggtgaagaatggcgtatctgttgacacttccatgggtttcacaccacttgaaggtcttgtcatgggcacgcgcagcggcgatattgatccggccatcgtggaatttcttgagaaagaagaaggattgtcggccaaagaagtcgtcaacatcctcaacaagaaatctggtgtgtatgggctcaccaaaggctttagtagtgacatgcgtgacattgaagataatgctattgaaggtgatcctgtatgccgccttgcattcgatgtgtacgaatatcgtatcgcgaaatatattggcgcatacgctgcggccatgaacggtgttgacgcgatcgtctttaccgcaggagttggcgaaaatagcccgattatgcgcgaagaaattattgagaactacttgggctacttagggatcaagatcgataaagaagccaatgacttcaaaggtgaggagaagatcatttcaacgcccgattccaaagtgattgcgatggtagttccgaccaacgaggagctcatgatcgccaaagacacgaaagaaatcattgagaaagggttggacgagcttaagatctaatga

SEQ ID NO: 2574 - protein, 417 aa, synthetic construct
  REGION 1..417: note = Variant of acetate kinase
MHHHHHHGGSGMKVLVINSGSSSIKYQLLDMTNEKVLAKGLVERIGIDGSRIVHKVNGEKHVLEHGIKNHEIGLKLVLDLLTDEKYGVLKDLKEIDAVGHRVVHGGERFASSVKITDEVLKTIETLSFLAPLHNPANIMGIKSSMKLLPGVPQVAVFDTAFHQKMPEKAYLYAIPYEYYEKYKIRRYGFHGTSHRYVSKRAAEIMGKPYDQLKIITVHVGNGASVAAVKNGVSVDTSMGFTPLEGLVMGTRSGDIDPAIVEFLEKEEGLSAKEVVNILNKKSGVYGLTKGFSSDMRDIEDNAIEGDPVCRLAFDVYEYRIAKYIGAYAAAMNGVDAIVFTAGVGENSPIMREEIIENYLGYLGIKIDKEANDFKGEEKIISTPDSKVIAMVVPTNEELMIAKDTKEIIEKGLDELKI

SEQ ID NO: 2575 - DNA, 1257 bp, synthetic construct
  misc_feature 1..1257: note = Variant of acetate kinase
  source 1..1257: mol_type = other DNA
atgcaccatcatcatcatcatggcggtagcggcatgaaagttctggtgattaattctggtagctcctccatcaaatatcagctcctcgatatgaccaacgaaaaggtattagcgaaaggcttggtcgagcgcattggcatcgacggttcgcgtatcgtgcataaagttaacggcgaaaaacacgtgctggaacatgagattaagaatcacgaaattggacttaaattggtcctggatcttcttacggacgaaaaatacggtgtgttgaaggatctcaaagaaatcgatgcagttgggcatcgcgtagtacatggcggcgagcgttttgccagtagcgtgaagattactgacgaagtcttaaagaccatcgagacgttgtcgttcttagctccgttacacaatccagcgaacctgatgggtatcaagagcagcatgaaattattaccgggtgtgcctcaagttgccgtctttgatacagcgttccaccagaagatgccggagaaagcctatttgtacgcaatcccctatgagtactacgagaaatataaaattcgccgctatgggtttcatggaacctcacatcgttatgtgagtaaacgtgctgcggaaattatgggcaaaccgtacgatcagctcaagatcattaccgttcacgtgggtaacggcgcatcagttgcggcggtgaagaatggcgtatctgttgacacttccatgggtttcacaccacttgaaggtcttgtcatgggcacgcgcagcggcgatattgatccggccatcgtggaatttcttgagaaagaagaaggattgtcggccaaagaagtcgtcaacatcctcaacaagaaatctggtgtgtatgggctcaccaaaggctttagtagtgacatgcgtgacattgaagataatgctattgaaggtgatcctgtatgccgccttgcattcgatgtgtacgaatatcgtatcgcgaaatatattggcgcatacgctgcggccatgaacggtgttgacgcgatcgtctttaccgcaggagttggcgaaaatagcccgattatgcgcgaagaaattattgagaactacttgggctacttggggatcaagatcgataaagaagccaatgacttcaaaggtgaggagaagatcatttcaacgcccgattccaaagtgattgcgatggtagttccgaccaacgaggagctcatgatcgccaaagacacgaaagaaatcattgagaaagggttggacgagcttaagatctaatga

SEQ ID NO: 2576 - protein, 417 aa, synthetic construct
  REGION 1..417: note = Variant of acetate kinase
MHHHHHHGGSGMKVLVINSGSSSIKYQLLDMTNEKVLAKGLVERIGIDGSRIVHKVNGEKHVLEHEIKNHEIGLKLVLDLLTDEKYGVLKDLKEIDAVGHRVVHGGERFASSVKITDEVLKTIETLSFLAPLHNPANLMGIKSSMKLLPGVPQVAVFDTAFHQKMPEKAYLYAIPYEYYEKYKIRRYGFHGTSHRYVSKRAAEIMGKPYDQLKIITVHVGNGASVAAVKNGVSVDTSMGFTPLEGLVMGTRSGDIDPAIVEFLEKEEGLSAKEVVNILNKKSGVYGLTKGFSSDMRDIEDNAIEGDPVCRLAFDVYEYRIAKYIGAYAAAMNGVDAIVFTAGVGENSPIMREEIIENYLGYLGIKIDKEANDFKGEEKIISTPDSKVIAMVVPTNEELMIAKDTKEIIEKGLDELKI

SEQ ID NO: 2577 - DNA, 1257 bp, synthetic construct
  misc_feature 1..1257: note = Variant of acetate kinase
  source 1..1257: mol_type = other DNA
atgcaccatcatcatcatcatggcggtagcggcatgaaagttctggtgattaattctggtagctcctccatcaaatatcagctcctcgatatgaccaacgaaaaggtattagcgaaaggcttggtcgagcgcattggcatcgacaggtcgcgtatcgtgcataaagttaacggcgaaaaacacgtgctggaacatgagattaagaatcacgaaattggacttaaattggtcctggatcttcttacggacgaaaaatacggtgtgttgaaggatctcaaagaaatcgatgcagttgggcatcgcgtagtacatggcggcgagcgttttgccagtagcgtgaagattactgacgaagtcttaaagaccatcgagacgttgtcgttcttagctccgttacacaatccagcgaacattatgggtatcaagagcagcatgaaattattaccgggtgtgcctcaagttgccgtctttgatacagcgttccaccagaagatgccggagaaagcctatttgtacgcaatcccctatgagtactacgagaaatataaaattcgccgctatgggtttcatggaacctcacatcgttatgtgagtaaacgtgctgcggaaattatgggcaaaccgtacgatcagctcaagatcattaccgttcacgtgggtaacggcgcatcagttgcggcggtgaagaatggcgtatctgttgacacttccatgggtttcacaccacttgaaggtcttgtcatgggcacgcgcagcggcgatattgatccggccatcgtggaatttcttgagaaagaagaaggattgtcggccaaagaagtcgtcaacatcctcaacaagaaatctggtgtgtatgggctcaccaaaggctttagtagtgacatgcgtgacattgaagataatgctattgaaggtgatcctgtatgccgccttgcattcgatgtgtacgaatatcgtatcgcgaaatatattggcgcatacgctgcggccatgaacggtgttgacgcgatcgtctttaccgcaggagttggcgaaaatagcccgattatgcgcgaagaaattattgagaactacttgggctacttagggatcaagatcgataaagaagccaatgacttcaaaggtgaggagaagatcatttcaacgcccgattccaaagtgattgcgatggtagttccgaccaacgaggagctcatgatcgccaaagacacgaaagaaatcattgagaaagggttggacgagcttaagatctaatga

SEQ ID NO: 2578 - protein, 417 aa, synthetic construct
  REGION 1..417: note = Variant of acetate kinase
MHHHHHHGGSGMKVLVINSGSSSIKYQLLDMTNEKVLAKGLVERIGIDRSRIVHKVNGEKHVLEHEIKNHEIGLKLVLDLLTDEKYGVLKDLKEIDAVGHRVVHGGERFASSVKITDEVLKTIETLSFLAPLHNPANIMGIKSSMKLLPGVPQVAVFDTAFHQKMPEKAYLYAIPYEYYEKYKIRRYGFHGTSHRYVSKRAAEIMGKPYDQLKIITVHVGNGASVAAVKNGVSVDTSMGFTPLEGLVMGTRSGDIDPAIVEFLEKEEGLSAKEVVNILNKKSGVYGLTKGFSSDMRDIEDNAIEGDPVCRLAFDVYEYRIAKYIGAYAAAMNGVDAIVFTAGVGENSPIMREEIIENYLGYLGIKIDKEANDFKGEEKIISTPDSKVIAMVVPTNEELMIAKDTKEIIEKGLDELKI

SEQ ID NO: 2579 - DNA, 1257 bp, synthetic construct
  misc_feature 1..1257: note = Variant of acetate kinase
  source 1..1257: mol_type = other DNA
atgcaccatcatcatcatcatggcggtagcggcatgaaagttctggtgattaattctggtagctcctccatcaaatatcagctcctcgatatgaccaacgaaaaggtattagcgaaaggcttggtcgagcgcattggcatcgacggttcgcgtatcgtgcataaagttaacggcgaaaaacacgtgctggaacatcgtattaagaatcacgaaattggacttaaattggtcctggatcttcttacggacgaaaaatacggtgtgttgaaggatctcaaagaaatcgatgcagttgggcatcgcgtagtacatggcggcgagcgttttgccagtagcgtgaagattactgacgaagtcttaaagaccatcgagacgttgtcgttcttagctccgttacacaatccagcgaacattatgggtatcaagagcagcatgaaattattaccgggtgtgcctcaagttgccgtctttgatacagcgttccaccagaagatgccggagaaagcctatttgtacgcaatcccctatgagtactacgagaaatataaaattcgccgctatgggtttcatggaacctcacatcgttatgtgagtaaacgtgctgcggaaattatgggcaaaccgtacgatcagctcaagatcattaccgttcacgtgggtaacggcgcatcagttgcggcggtgaagaatggcgtatctgttgacacttccatgggtttcacaccacttgaaggtcttgtcatgggcacgcgcagcggcgatattgatccggccatcgtggaatttcttgagaaagaagaaggattgtcggccaaagaagtcgtcaacatcctcaacaagaaatctggtgtgtatgggctcaccaaaggctttagtagtgacatgcgtgacattgaagataatgctattgaaggtgatcctgtatgccgccttgcattcgatgtgtacgaatatcgtatcgcgaaatatattggcgcatacgctgcggccatgaacggtgttgacgcgatcgtctttaccgcaggagttggcgaaaatagcccgattatgcgcgaagaaattattgagaactacttgggctacttagggatcaagatcgataaagaagccaatgacttcaaaggtgaggagaagatcatttcaacgcccgattccaaagtgattgcgatggtagttccgaccaacgaggagctcatgatcgccaaagacacgaaagaaatcattgagaaagggttggacgagcttaagatctaatga

SEQ ID NO: 2580 - protein, 417 aa, synthetic construct
  REGION 1..417: note = Variant of acetate kinase
MHHHHHHGGSGMKVLVINSGSSSIKYQLLDMTNEKVLAKGLVERIGIDGSRIVHKVNGEKHVLEHRIKNHEIGLKLVLDLLTDEKYGVLKDLKEIDAVGHRVVHGGERFASSVKITDEVLKTIETLSFLAPLHNPANIMGIKSSMKLLPGVPQVAVFDTAFHQKMPEKAYLYAIPYEYYEKYKIRRYGFHGTSHRYVSKRAAEIMGKPYDQLKIITVHVGNGASVAAVKNGVSVDTSMGFTPLEGLVMGTRSGDIDPAIVEFLEKEEGLSAKEVVNILNKKSGVYGLTKGFSSDMRDIEDNAIEGDPVCRLAFDVYEYRIAKYIGAYAAAMNGVDAIVFTAGVGENSPIMREEIIENYLGYLGIKIDKEANDFKGEEKIISTPDSKVIAMVVPTNEELMIAKDTKEIIEKGLDELKI

SEQ ID NO: 2581 - DNA, 1257 bp, synthetic construct
  misc_feature 1..1257: note = Variant of acetate kinase
  source 1..1257: mol_type = other DNA
atgcaccatcatcatcatcatggcggtagcggcatgaaagttctggtgattaattctggtagctcctccatcaaatatcagctcctcgatatgaccaacgaaaaggtattagcgaaaggcttggtcgagcgcattggcatcgacggttcgcgtatcgtgcataaagttaacggcgaaaaacacgtgctggaacatgagattaagaatcacgaaattggacttaaattggtcctggatcttcttacggacgaaaaatacggtgtgttgaaggatctcaaagaaatcgatgcagttgggcatcgcgtagtacatggcggcgagcgttttgccagtagcgtgaagattactgacgaagtcttaaagaccatcgagacgttgtcgttcttagctccgttacacaatccagcgaacattatgggtatcaagagcagcatgaaattattaccgggtgtgcctcaagttgccgtcctggatacagcgttccaccagaagatgccggagaaagcctatttgtacgcaatcccctatgagtactacgagaaatataaaattcgccgctatgggtttcatggaacctcacatcgttatgtgagtaaacgtgctgcggaaattatgggcaaaccgtacgatcagctcaagatcattaccgttcacgtgggtaacggcgcatcagttgcggcggtgaagaatggcgtatctgttgacacttccatgggtttcacaccacttgaaggtcttgtcatgggcacgcgcagcggcgatattgatccggccatcgtggaatttcttgagaaagaagaaggattgtcggccaaagaagtcgtcaacatcctcaacaagaaatctggtgtgtatgggctcaccaaaggctttagtagtgacatgcgtgacattgaagataatgctattgaaggtgatcctgtatgccgccttgcattcgatgtgtacgaatatcgtatcgcgaaatatattggcgcatacgctgcggccatgaacggtgttgacgcgatcgtctttaccgcaggagttggcgaaaatagcccgattatgcgcgaagaaattattgagaactacttgggctacttagggatcaagatcgataaagaagccaatgacttcaaaggtgaggagaagatcatttcaacgcccgattccaaagtgattgcgatggtagttccgaccaacgaggagctcatgatcgccaaagacacgaaagaaatcattgagaaagggttggacgagcttaagatctaatga

SEQ ID NO: 2582 - protein, 417 aa, synthetic construct
  REGION 1..417: note = Variant of acetate kinase
MHHHHHHGGSGMKVLVINSGSSSIKYQLLDMTNEKVLAKGLVERIGIDGSRIVHKVNGEKHVLEHEIKNHEIGLKLVLDLLTDEKYGVLKDLKEIDAVGHRVVHGGERFASSVKITDEVLKTIETLSFLAPLHNPANIMGIKSSMKLLPGVPQVAVLDTAFHQKMPEKAYLYAIPYEYYEKYKIRRYGFHGTSHRYVSKRAAEIMGKPYDQLKIITVHVGNGASVAAVKNGVSVDTSMGFTPLEGLVMGTRSGDIDPAIVEFLEKEEGLSAKEVVNILNKKSGVYGLTKGFSSDMRDIEDNAIEGDPVCRLAFDVYEYRIAKYIGAYAAAMNGVDAIVFTAGVGENSPIMREEIIENYLGYLGIKIDKEANDFKGEEKIISTPDSKVIAMVVPTNEELMIAKDTKEIIEKGLDELKI

SEQ ID NO: 2583 - DNA, 1257 bp, synthetic construct
  misc_feature 1..1257: note = Variant of acetate kinase
  source 1..1257: mol_type = other DNA
atgcaccatcatcatcatcatggcggtagcggcatgaaagttctggtgattaattctggtagctcctccatcaaatatcagctcctcgatatgaccaacgaaaaggtattagcgaaaggcttggtcgagcgcattggcatcgacggttcgcgtatcgtgcataaagttaacggcgaaaaacacgtgctggaacatgagattaagaatcacgaaattggacttaaattggtcctggatcttcttacggacgaaaaatacggtgtgttgaaggatctcaaagaaatcgatgcagttgggcatcgcgtagtacatggcggcgagcgttttgccagtagcgtgaagattactgacgaagtcttaaagaccatcgagacgttgtcgttcttagctccgttacacaatccagcgaacattatgggtatcaagagcagcatgaaattattaccgggtgtgcctcaagttgccatgtttgatacagcgttccaccagaagatgccggagaaagcctatttgtacgcaatcccctatgagtactacgagaaatataaaattcgccgctatgggtttcatggaacctcacatcgttatgtgagtaaacgtgctgcggaaattatgggcaaaccgtacgatcagctcaagatcattaccgttcacgtgggtaacggcgcatcagttgcggcggtgaagaatggcgtatctgttgacacttccatgggtttcacaccacttgaaggtcttgtcatgggcacgcgcagcggcgatattgatccggccatcgtggaatttcttgagaaagaagaaggattgtcggccaaagaagtcgtcaacatcctcaacaagaaatctggtgtgtatgggctcaccaaaggctttagtagtgacatgcgtgacattgaagataatgctattgaaggtgatcctgtatgccgccttgcattcgatgtgtacgaatatcgtatcgcgaaatatattggcgcatacgctgcggccatgaacggtgttgacgcgatcgtctttaccgcaggagttggcgaaaatagcccgattatgcgcgaagaaattattgagaactacttgggctacttagggatcaagatcgataaagaagccaatgacttcaaaggtgaggagaagatcatttcaacgcccgattccaaagtgattgcgatggtagttccgaccaacgaggagctcatgatcgccaaagacacgaaagaaatcattgagaaagggttggacgagcttaagatctaatga

SEQ ID NO: 2584 - protein, 417 aa, synthetic construct
  REGION 1..417: note = Variant of acetate kinase
MHHHHHHGGSGMKVLVINSGSSSIKYQLLDMTNEKVLAKGLVERIGIDGSRIVHKVNGEKHVLEHEIKNHEIGLKLVLDLLTDEKYGVLKDLKEIDAVGHRVVHGGERFASSVKITDEVLKTIETLSFLAPLHNPANIMGIKSSMKLLPGVPQVAMFDTAFHQKMPEKAYLYAIPYEYYEKYKIRRYGFHGTSHRYVSKRAAEIMGKPYDQLKIITVHVGNGASVAAVKNGVSVDTSMGFTPLEGLVMGTRSGDIDPAIVEFLEKEEGLSAKEVVNILNKKSGVYGLTKGFSSDMRDIEDNAIEGDPVCRLAFDVYEYRIAKYIGAYAAAMNGVDAIVFTAGVGENSPIMREEIIENYLGYLGIKIDKEANDFKGEEKIISTPDSKVIAMVVPTNEELMIAKDTKEIIEKGLDELKI

SEQ ID NO: 2585 - DNA, 1257 bp, synthetic construct
  misc_feature 1..1257: note = Variant of acetate kinase
  source 1..1257: mol_type = other DNA
atgcaccatcatcatcatcatggcggtagcggcatgaaagttctggtgattaattctggtagctcctccatcaaatatcagctcctcgatatgaccaacgaaaaggtattagcgaaaggcttggtcgagcgcattggcatcgacggttcgcgtatcgtgcataaagttaacggcgaaaaacacgtgctggaacatgagattaagaatcacgaaattggacttaaattggtcctggatcttcttacggacgaaaaatacggtgtgttgaaggatctcaaagaaatcgatgcagttgggcatcgcgtagtacatggcggcgagcgttttgccagtagcgtgaagattactgacgaagtcttaaagaccatcgagacgttgtcgttcttagctccgttacacaatccagcgaacattatgggtatcaagagcagcatgaaaggtttaccgggtgtgcctcaagttgccgtctttgatacagcgttccaccagaagatgccggagaaagcctatttgtacgcaatcccctatgagtactacgagaaatataaaattcgccgctatgggtttcatggaacctcacatcgttatgtgagtaaacgtgctgcggaaattatgggcaaaccgtacgatcagctcaagatcattaccgttcacgtgggtaacggcgcatcagttgcggcggtgaagaatggcgtatctgttgacacttccatgggtttcacaccacttgaaggtcttgtcatgggcacgcgcagcggcgatattgatccggccatcgtggaatttcttgagaaagaagaaggattgtcggccaaagaagtcgtcaacatcctcaacaagaaatctggtgtgtatgggctcaccaaaggctttagtagtgacatgcgtgacattgaagataatgctattgaaggtgatcctgtatgccgccttgcattcgatgtgtacgaatatcgtatcgcgaaatatattggcgcatacgctgcggccatgaacggtgttgacgcgatcgtctttaccgcaggagttggcgaaaatagcccgattatgcgcgaagaaattattgagaactacttgggctacttagggatcaagatcgataaagaagccaatgacttcaaaggtgaggagaagatcatttcaacgcccgattccaaagtgattgcgatggtagttccgaccaacgaggagctcatgatcgccaaagacacgaaagaaatcattgagaaagggttggacgagcttaagatctaatga

SEQ ID NO: 2586 - protein, 417 aa, synthetic construct
  REGION 1..417: note = Variant of acetate kinase
MHHHHHHGGSGMKVLVINSGSSSIKYQLLDMTNEKVLAKGLVERIGIDGSRIVHKVNGEKHVLEHEIKNHEIGLKLVLDLLTDEKYGVLKDLKEIDAVGHRVVHGGERFASSVKITDEVLKTIETLSFLAPLHNPANIMGIKSSMKGLPGVPQVAVFDTAFHQKMPEKAYLYAIPYEYYEKYKIRRYGFHGTSHRYVSKRAAEIMGKPYDQLKIITVHVGNGASVAAVKNGVSVDTSMGFTPLEGLVMGTRSGDIDPAIVEFLEKEEGLSAKEVVNILNKKSGVYGLTKGFSSDMRDIEDNAIEGDPVCRLAFDVYEYRIAKYIGAYAAAMNGVDAIVFTAGVGENSPIMREEIIENYLGYLGIKIDKEANDFKGEEKIISTPDSKVIAMVVPTNEELMIAKDTKEIIEKGLDELKI

SEQ ID NO: 2587 - DNA, 1257 bp, synthetic construct
  misc_feature 1..1257: note = Variant of acetate kinase
  source 1..1257: mol_type = other DNA
atgcaccatcatcatcatcatggcggtagcggcatgaaagttctggtgattaattctggtagctcctccatcaaatatcagctcctcgatatgaccaacgaaaaggtattagcgaaaggcttggtcgagcgcattggcatcgacggttcgcgtatcgtgcataaagttaacggcgaaaaacacgtgctggaacatgagattaagaatcacgaaattggacttaaattggtcctggatcttcttacggacgaaaaatacggtgtgttgaaggatctcaaagaaatcgatgcagttgggcatcgcgtagtacatggcggcgagcgttttgccagtagcgtgaagtatactgacgaagtcttaaagaccatcgagacgttgtcgttcttagctccgttacacaatccagcgaacattatgggtatcaagagcagcatgaaattattaccgggtgtgcctcaagttgccgtctttgatacagcgttccaccagaagatgccggagaaagcctatttgtacgcaatcccctatgagtactacgagaaatataaaattcgccgctatgggtttcatggaacctcacatcgttatgtgagtaaacgtgctgcggaaattatgggcaaaccgtacgatcagctcaagatcattaccgttcacgtgggtaacggcgcatcagttgcggcggtgaagaatggcgtatctgttgacacttccatgggtttcacaccacttgaaggtcttgtcatgggcacgcgcagcggcgatattgatccggccatcgtggaatttcttgagaaagaagaaggattgtcggccaaagaagtcgtcaacatcctcaacaagaaatctggtgtgtatgggctcaccaaaggctttagtagtgacatgcgtgacattgaagataatgctattgaaggtgatcctgtatgccgccttgcattcgatgtgtacgaatatcgtatcgcgaaatatattggcgcatacgctgcggccatgaacggtgttgacgcgatcgtctttaccgcaggagttggcgaaaatagcccgattatgcgcgaagaaattattgagaactacttgggctacttagggatcaagatcgataaagaagccaatgacttcaaaggtgaggagaagatcatttcaacgcccgattccaaagtgattgcgatggtagttccgaccaacgaggagctcatgatcgccaaagacacgaaagaaatcattgagaaagggttggacgagcttaagatctaatga

SEQ ID NO: 2588 - protein, 417 aa, synthetic construct
  REGION 1..417: note = Variant of acetate kinase
MHHHHHHGGSGMKVLVINSGSSSIKYQLLDMTNEKVLAKGLVERIGIDGSRIVHKVNGEKHVLEHEIKNHEIGLKLVLDLLTDEKYGVLKDLKEIDAVGHRVVHGGERFASSVKYTDEVLKTIETLSFLAPLHNPANIMGIKSSMKLLPGVPQVAVFDTAFHQKMPEKAYLYAIPYEYYEKYKIRRYGFHGTSHRYVSKRAAEIMGKPYDQLKIITVHVGNGASVAAVKNGVSVDTSMGFTPLEGLVMGTRSGDIDPAIVEFLEKEEGLSAKEVVNILNKKSGVYGLTKGFSSDMRDIEDNAIEGDPVCRLAFDVYEYRIAKYIGAYAAAMNGVDAIVFTAGVGENSPIMREEIIENYLGYLGIKIDKEANDFKGEEKIISTPDSKVIAMVVPTNEELMIAKDTKEIIEKGLDELKI

SEQ ID NO: 2589 - DNA, 1257 bp, synthetic construct
  misc_feature 1..1257: note = Variant of acetate kinase
  source 1..1257: mol_type = other DNA
atgcaccatcatcatcatcatggcggtagcggcatgaaagttctggtgattaattctggtagctcctccatcaaatatcagctcctcgatatgaccaacgaaaaggtattagcgaaaggcttggtcgagcgcattggcatcgacggttcgcgtatcgtgcataaagttaacggcgaaaaacacgtgctggaacatgagattaagaatcacgaaattggacttaaattggtcctggatcttcttacggacgaaaaatacggtgtgttgaaggatctcaaagaaatcgatgcagttgggcatcgcgtagtacatggcggcgagcgttttgccagtagcgtgaagattactgacgaagtcttaaagaccatcgagacgttgtcgttcttagctccgttacacaatccaaagaacattatgggtatcaagagcagcatgaaattattaccgggtgtgcctcaagttgccgtctttgatacagcgttccaccagaagatgccggagaaagcctatttgtacgcaatcccctatgagtactacgagaaatataaaattcgccgctatgggtttcatggaacctcacatcgttatgtgagtaaacgtgctgcggaaattatgggcaaaccgtacgatcagctcaagatcattaccgttcacgtgggtaacggcgcatcagttgcggcggtgaagaatggcgtatctgttgacacttccatgggtttcacaccacttgaaggtcttgtcatgggcacgcgcagcggcgatattgatccggccatcgtggaatttcttgagaaagaagaaggattgtcggccaaagaagtcgtcaacatcctcaacaagaaatctggtgtgtatgggctcaccaaaggctttagtagtgacatgcgtgacattgaagataatgctattgaaggtgatcctgtatgccgccttgcattcgatgtgtacgaatatcgtatcgcgaaatatattggcgcatacgctgcggccatgaacggtgttgacgcgatcgtctttaccgcaggagttggcgaaaatagcccgattatgcgcgaagaaattattgagaactacttgggctacttagggatcaagatcgataaagaagccaatgacttcaaaggtgaggagaagatcatttcaacgcccgattccaaagtgattgcgatggtagttccgaccaacgaggagctcatgatcgccaaagacacgaaagaaatcattgagaaagggttggacgagcttaagatctaatga

SEQ ID NO: 2590 - protein, 417 aa, synthetic construct
  REGION 1..417: note = Variant of acetate kinase
MHHHHHHGGSGMKVLVINSGSSSIKYQLLDMTNEKVLAKGLVERIGIDGSRIVHKVNGEKHVLEHEIKNHEIGLKLVLDLLTDEKYGVLKDLKEIDAVGHRVVHGGERFASSVKITDEVLKTIETLSFLAPLHNPKNIMGIKSSMKLLPGVPQVAVFDTAFHQKMPEKAYLYAIPYEYYEKYKIRRYGFHGTSHRYVSKRAAEIMGKPYDQLKIITVHVGNGASVAAVKNGVSVDTSMGFTPLEGLVMGTRSGDIDPAIVEFLEKEEGLSAKEVVNILNKKSGVYGLTKGFSSDMRDIEDNAIEGDPVCRLAFDVYEYRIAKYIGAYAAAMNGVDAIVFTAGVGENSPIMREEIIENYLGYLGIKIDKEANDFKGEEKIISTPDSKVIAMVVPTNEELMIAKDTKEIIEKGLDELKI

SEQ ID NO: 2591 - DNA, 1257 bp, synthetic construct
  misc_feature 1..1257: note = Variant of acetate kinase
  source 1..1257: mol_type = other DNA
atgcaccatcatcatcatcatggcggtagcggcatgaaagttctggtgattaattctggtagctcctccatcaaatatcagctcctcgatatgaccaacgaaaaggtattagcgaaaggcttggtcgagcgcattggcatcgacggttcgcgtatcgtgcataaagttaacggcgaaaaacacgtgctggaacatgagattaagaatcacgaaattggacttaaattggtcctggatcttcttacggacgaaaaatacggtgtgttgaaggatctcaaagaaatcgatgcagttgggcatcgcgtagtacatggcggcgagcgttttgccagtagcgtgaagattactgacgaagtcttaaagaccatcgagacgttgtcgttcttagctccgttacacaatccagcgaacattatgggtatcaagagcagcatgaaattattaccgggtgtgcctcaagttgccgtctttgatacagcgttccaccagaagatgccggagaaagcctatttgtacgcaatcccctatgagtactacgagaaatataaaattcgccgctatgggtttcatggaacctcacatcgtcttgtgagtaaacgtgctgcggaaattatgggcaaaccgtacgatcagctcaagatcattaccgttcacgtgggtaacggcgcatcagttgcggcggtgaagaatggcgtatctgttgacacttccatgggtttcacaccacttgaaggtcttgtcatgggcacgcgcagcggcgatattgatccggccatcgtggaatttcttgagaaagaagaaggattgtcggccaaagaagtcgtcaacatcctcaacaagaaatctggtgtgtatgggctcaccaaaggctttagtagtgacatgcgtgacattgaagataatgctattgaaggtgatcctgtatgccgccttgcattcgatgtgtacgaatatcgtatcgcgaaatatattggcgcatacgctgcggccatgaacggtgttgacgcgatcgtctttaccgcaggagttggcgaaaatagcccgattatgcgcgaagaaattattgagaactacttgggctacttagggatcaagatcgataaagaagccaatgacttcaaaggtgaggagaagatcatttcaacgcccgattccaaagtgattgcgatggtagttccgaccaacgaggagctcatgatcgccaaagacacgaaagaaatcattgagaaagggttggacgagcttaagatctaatga

SEQ ID NO: 2592 - protein, 417 aa, synthetic construct
  REGION 1..417: note = Variant of acetate kinase
MHHHHHHGGSGMKVLVINSGSSSIKYQLLDMTNEKVLAKGLVERIGIDGSRIVHKVNGEKHVLEHEIKNHEIGLKLVLDLLTDEKYGVLKDLKEIDAVGHRVVHGGERFASSVKITDEVLKTIETLSFLAPLHNPANIMGIKSSMKLLPGVPQVAVFDTAFHQKMPEKAYLYAIPYEYYEKYKIRRYGFHGTSHRLVSKRAAEIMGKPYDQLKIITVHVGNGASVAAVKNGVSVDTSMGFTPLEGLVMGTRSGDIDPAIVEFLEKEEGLSAKEVVNILNKKSGVYGLTKGFSSDMRDIEDNAIEGDPVCRLAFDVYEYRIAKYIGAYAAAMNGVDAIVFTAGVGENSPIMREEIIENYLGYLGIKIDKEANDFKGEEKIISTPDSKVIAMVVPTNEELMIAKDTKEIIEKGLDELKI

SEQ ID NO: 2593 - DNA, 1257 bp, synthetic construct
  misc_feature 1..1257: note = Variant of acetate kinase
  source 1..1257: mol_type = other DNA
atgcaccatcatcatcatcatggcggtagcggcatgaaagttctggtgattaattctggtagctcctccatcaaatatcagctcctcgatatgaccaacgaaaaggtattagcgaaaggcttggtcgagcgcattggcatcgacggttcgcgtatcgtgcataaagttaacggcgaaaaacacgtgctggaacatgagattaagaatcacgaaattggacttgtgttggtcctggatcttcttacggacgaaaaatacggtgtgttgaaggatctcaaagaaatcgatgcagttgggcatcgcgtagtacatggcggcgagcgttttgccagtagcgtgaagattactgacgaagtcttaaagaccatcgagacgttgtcgttcttagctccgttacacaatccagcgaacattatgggtatcaagagcagcatgaaattattaccgggtgtgcctcaagttgccgtctttgatacagcgttccaccagaagatgccggagaaagcctatttgtacgcaatcccctatgagtactacgagaaatataaaattcgccgctatgggtttcatggaacctcacatcgttatgtgagtaaacgtgctgcggaaattatgggcaaaccgtacgatcagctcaagatcattaccgttcacgtgggtaacggcgcatcagttgcggcggtgaagaatggcgtatctgttgacacttccatgggtttcacaccacttgaaggtcttgtcatgggcacgcgcagcggcgatattgatccggccatcgtggaatttcttgagaaagaagaaggattgtcggccaaagaagtcgtcaacatcctcaacaagaaatctggtgtgtatgggctcaccaaaggctttagtagtgacatgcgtgacattgaagataatgctattgaaggtgatcctgtatgccgccttgcattcgatgtgtacgaatatcgtatcgcgaaatatattggcgcatacgctgcggccatgaacggtgttgacgcgatcgtctttaccgcaggagttggcgaaaatagcccgattatgcgcgaagaaattattgagaactacttgggctacttagggatcaagatcgataaagaagccaatgacttcaaaggtgaggagaagatcatttcaacgcccgattccaaagtgattgcgatggtagttccgaccaacgaggagctcatgatcgccaaagacacgaaagaaatcattgagaaagggttggacgagcttaagatctaatga

SEQ ID NO: 2594 - protein, 417 aa, synthetic construct
  REGION 1..417: note = Variant of acetate kinase
MHHHHHHGGSGMKVLVINSGSSSIKYQLLDMTNEKVLAKGLVERIGIDGSRIVHKVNGEKHVLEHEIKNHEIGLVLVLDLLTDEKYGVLKDLKEIDAVGHRVVHGGERFASSVKITDEVLKTIETLSFLAPLHNPANIMGIKSSMKLLPGVPQVAVFDTAFHQKMPEKAYLYAIPYEYYEKYKIRRYGFHGTSHRYVSKRAAEIMGKPYDQLKIITVHVGNGASVAAVKNGVSVDTSMGFTPLEGLVMGTRSGDIDPAIVEFLEKEEGLSAKEVVNILNKKSGVYGLTKGFSSDMRDIEDNAIEGDPVCRLAFDVYEYRIAKYIGAYAAAMNGVDAIVFTAGVGENSPIMREEIIENYLGYLGIKIDKEANDFKGEEKIISTPDSKVIAMVVPTNEELMIAKDTKEIIEKGLDELKI

SEQ ID NO: 2595 - DNA, 1257 bp, synthetic construct
  misc_feature 1..1257: note = Variant of acetate kinase
  source 1..1257: mol_type = other DNA
atgcaccatcatcatcatcatggcggtagcggcatgaaagttctggtgattaattctggtagctcctccatcaaatatcagctcctcgatatgaccaacgaaaaggtattagcgaaaggcttggtcgagcgcattggcatcgacggttcgcgtatcgtgcataaagttaacggcgaaaaacacgtgctggaacatgagattaagaatcacgaaattggacttaaattggtcctggatcttcttacggacgaaaaatacggtgtgttgaaggatctcaaagaaatcgatgcagttgggcatcgcgtagtacatggcggcgagcgttttgccagtagcgtgaagattactgacgaagtcttaaagaccatcgagacgttgtcgttcttagctccgttacacaatccagcgaacattatgggtatcaagagcagcatgaaattattaccgggtgtgcctcaagttgccgtctttgatacagcgttccaccagaagatgccggagaaagcctatttgtacgcaatcccctatgagtactacgagaaatataaaattcgccgctatgggtttcatggaacctcacatcgttatgtgagtaaacgtgctgcggaaattatgggcaaaccgtacgatcagctcaagatcattaccgttcacgtgggtaacggcgcatcagttgcggcggtgaagaatggcgtatctgttgacacttccatgggtttcacaccacttgaaggtcttgtcatgggcacgcgcagcggcgatattgatccggccatcgtggaatttcttgagaaagaagaaggattgacggccaaagaagtcgtcaacatcctcaacaagaaatctggtgtgtatgggctcaccaaaggctttagtagtgacatgcgtgacattgaagataatgctattgaaggtgatcctgtatgccgccttgcattcgatgtgtacgaatatcgtatcgcgaaatatattggcgcatacgctgcggccatgaacggtgttgacgcgatcgtctttaccgcaggagttggcgaaaatagcccgattatgcgcgaagaaattattgagaactacttgggctacttagggatcaagatcgataaagaagccaatgacttcaaaggtgaggagaagatcatttcaacgcccgattccaaagtgattgcgatggtagttccgaccaacgaggagctcatgatcgccaaagacacgaaagaaatcattgagaaagggttggacgagcttaagatctaatga

SEQ ID NO: 2596 - protein, 417 aa, synthetic construct
  REGION 1..417: note = Variant of acetate kinase
MHHHHHHGGSGMKVLVINSGSSSIKYQLLDMTNEKVLAKGLVERIGIDGSRIVHKVNGEKHVLEHEIKNHEIGLKLVLDLLTDEKYGVLKDLKEIDAVGHRVVHGGERFASSVKITDEVLKTIETLSFLAPLHNPANIMGIKSSMKLLPGVPQVAVFDTAFHQKMPEKAYLYAIPYEYYEKYKIRRYGFHGTSHRYVSKRAAEIMGKPYDQLKIITVHVGNGASVAAVKNGVSVDTSMGFTPLEGLVMGTRSGDIDPAIVEFLEKEEGLTAKEVVNILNKKSGVYGLTKGFSSDMRDIEDNAIEGDPVCRLAFDVYEYRIAKYIGAYAAAMNGVDAIVFTAGVGENSPIMREEIIENYLGYLGIKIDKEANDFKGEEKIISTPDSKVIAMVVPTNEELMIAKDTKEIIEKGLDELKI

SEQ ID NO: 2597 - DNA, 1257 bp, synthetic construct
  misc_feature 1..1257: note = Variant of acetate kinase
  source 1..1257: mol_type = other DNA
atgcaccatcatcatcatcatggcggtagcggcatgaaagttctggtgattaattctggtagctcctccatcaaatatcagctcctcgatatgaccaacgaaaaggtattagcgaaaggcttggtcgagcgcattggcatcgacggttcgcgtatcgtgcataaagttaacggcgaaaaacacgtgctggaacatgagattaagaatcacgaaattggacttaaattggtcctggatcttcttacggacgaaaaatacggtgtgttgaaggatctcaaagaaatcgatgcagttgggcatcgcgtagtacatggcggcgagcgttttgccagtagcgtgaagattactgacgaagtcttaaagaccatcgagacgttgtcgttcttagctccgttacacaatccagcgaacattatgggttgtaagagcagcatgaaattattaccgggtgtgcctcaagttgccgtctttgatacagcgttccaccagaagatgccggagaaagcctatttgtacgcaatcccctatgagtactacgagaaatataaaattcgccgctatgggtttcatggaacctcacatcgttatgtgagtaaacgtgctgcggaaattatgggcaaaccgtacgatcagctcaagatcattaccgttcacgtgggtaacggcgcatcagttgcggcggtgaagaatggcgtatctgttgacacttccatgggtttcacaccacttgaaggtcttgtcatgggcacgcgcagcggcgatattgatccggccatcgtggaatttcttgagaaagaagaaggattgtcggccaaagaagtcgtcaacatcctcaacaagaaatctggtgtgtatgggctcaccaaaggctttagtagtgacatgcgtgacattgaagataatgctattgaaggtgatcctgtatgccgccttgcattcgatgtgtacgaatatcgtatcgcgaaatatattggcgcatacgctgcggccatgaacggtgttgacgcgatcgtctttaccgcaggagttggcgaaaatagcccgattatgcgcgaagaaattattgagaactacttgggctacttagggatcaagatcgataaagaagccaatgacttcaaaggtgaggagaagatcatttcaacgcccgattccaaagtgattgcgatggtagttccgaccaacgaggagctcatgatcgccaaagacacgaaagaaatcattgagaaagggttggacgagcttaagatctaatga

SEQ ID NO: 2598 - protein, 417 aa, synthetic construct
  REGION 1..417: note = Variant of acetate kinase
MHHHHHHGGSGMKVLVINSGSSSIKYQLLDMTNEKVLAKGLVERIGIDGSRIVHKVNGEKHVLEHEIKNHEIGLKLVLDLLTDEKYGVLKDLKEIDAVGHRVVHGGERFASSVKITDEVLKTIETLSFLAPLHNPANIMGCKSSMKLLPGVPQVAVFDTAFHQKMPEKAYLYAIPYEYYEKYKIRRYGFHGTSHRYVSKRAAEIMGKPYDQLKIITVHVGNGASVAAVKNGVSVDTSMGFTPLEGLVMGTRSGDIDPAIVEFLEKEEGLSAKEVVNILNKKSGVYGLTKGFSSDMRDIEDNAIEGDPVCRLAFDVYEYRIAKYIGAYAAAMNGVDAIVFTAGVGENSPIMREEIIENYLGYLGIKIDKEANDFKGEEKIISTPDSKVIAMVVPTNEELMIAKDTKEIIEKGLDELKI

SEQ ID NO: 2599 - DNA, 1257 bp, synthetic construct
  misc_feature 1..1257: note = Variant of acetate kinase
  source 1..1257: mol_type = other DNA
atgcaccatcatcatcatcatggcggtagcggcatgaaagttctggtgattaattctggtagctcctccatcaaatatcagctcctcgatatgaccaacgaaaaggtattagcgaaaggcttggtcgagcgcattggcatcgacggttcgcgtatcgtgcataaagttaacggcgaaaaacacgtgctggaacatgagattaagaatcacgaaattggacttaaattggtcctggatcttcttacggacgaaaaatacggtgtgttgaaggatctcaaagaaatcgatgcagttgggcatcgcgtagtacatggcggcgagcgttttgccagtagcgtgaagattactgacgaagtcttaaagaccatcgagacgttgtcgttcttagctccgttacacaatccagcgaacattatgggtatcaagagcagcatgaaattattaccgggtgtgcctcaagttgccgtctttgatacagcgttccaccagaagatgccggagaaagccttgttgtacgcaatcccctatgagtactacgagaaatataaaattcgccgctatgggtttcatggaacctcacatcgttatgtgagtaaacgtgctgcggaaattatgggcaaaccgtacgatcagctcaagatcattaccgttcacgtgggtaacggcgcatcagttgcggcggtgaagaatggcgtatctgttgacacttccatgggtttcacaccacttgaaggtcttgtcatgggcacgcgcagcggcgatattgatccggccatcgtggaatttcttgagaaagaagaaggattgtcggccaaagaagtcgtcaacatcctcaacaagaaatctggtgtgtatgggctcaccaaaggctttagtagtgacatgcgtgacattgaagataatgctattgaaggtgatcctgtatgccgccttgcattcgatgtgtacgaatatcgtatcgcgaaatatattggcgcatacgctgcggccatgaacggtgttgacgcgatcgtctttaccgcaggagttggcgaaaatagcccgattatgcgcgaagaaattattgagaactacttgggctacttagggatcaagatcgataaagaagccaatgacttcaaaggtgaggagaagatcatttcaacgcccgattccaaagtgattgcgatggtagttccgaccaacgaggagctcatgatcgccaaagacacgaaagaaatcattgagaaagggttggacgagcttaagatctaatga

SEQ ID NO: 2600 - protein, 417 aa, synthetic construct
  REGION 1..417: note = Variant of acetate kinase
MHHHHHHGGSGMKVLVINSGSSSIKYQLLDMTNEKVLAKGLVERIGIDGSRIVHKVNGEKHVLEHEIKNHEIGLKLVLDLLTDEKYGVLKDLKEIDAVGHRVVHGGERFASSVKITDEVLKTIETLSFLAPLHNPANIMGIKSSMKLLPGVPQVAVFDTAFHQKMPEKALLYAIPYEYYEKYKIRRYGFHGTSHRYVSKRAAEIMGKPYDQLKIITVHVGNGASVAAVKNGVSVDTSMGFTPLEGLVMGTRSGDIDPAIVEFLEKEEGLSAKEVVNILNKKSGVYGLTKGFSSDMRDIEDNAIEGDPVCRLAFDVYEYRIAKYIGAYAAAMNGVDAIVFTAGVGENSPIMREEIIENYLGYLGIKIDKEANDFKGEEKIISTPDSKVIAMVVPTNEELMIAKDTKEIIEKGLDELKI

SEQ ID NO: 2601 - DNA, 1257 bp, synthetic construct
  misc_feature 1..1257: note = Variant of acetate kinase
  source 1..1257: mol_type = other DNA
atgcaccatcatcatcatcatggcggtagcggcatgaaagttctggtgattaattctggtagctcctccatcaaatatcagctcctcgatatgaccaacgaaaaggtattagcgaaaggcttggtcgagcgcattggcatcgacggttcgcgtatcgtgcataaagttaacggcgaaaaacacgtgctggaacatgagattaagaatcacgaaattggacttaaattggtcctggatcttcttacggacgaaaaatacggtgtgttgaaggatctcaaagaaatcgatgcagttgggcatcgcgtagtacatggcggcgagcgttttgccagtagcgtgaagattactgacgaagtcttaaagaccatcgagacgttgtcgttcttagctccgttacacaatccagcgaacattatgggtatcaagagcagcatgaaatatttaccgggtgtgcctcaagttgccgtctttgatacagcgttccaccagaagatgccggagaaagcctatttgtacgcaatcccctatgagtactacgagaaatataaaattcgccgctatgggtttcatggaacctcacatcgttatgtgagtaaacgtgctgcggaaattatgggcaaaccgtacgatcagctcaagatcattaccgttcacgtgggtaacggcgcatcagttgcggcggtgaagaatggcgtatctgttgacacttccatgggtttcacaccacttgaaggtcttgtcatgggcacgcgcagcggcgatattgatccggccatcgtggaatttcttgagaaagaagaaggattgtcggccaaagaagtcgtcaacatcctcaacaagaaatctggtgtgtatgggctcaccaaaggctttagtagtgacatgcgtgacattgaagataatgctattgaaggtgatcctgtatgccgccttgcattcgatgtgtacgaatatcgtatcgcgaaatatattggcgcatacgctgcggccatgaacggtgttgacgcgatcgtctttaccgcaggagttggcgaaaatagcccgattatgcgcgaagaaattattgagaactacttgggctacttagggatcaagatcgataaagaagccaatgacttcaaaggtgaggagaagatcatttcaacgcccgattccaaagtgattgcgatggtagttccgaccaacgaggagctcatgatcgccaaagacacgaaagaaatcattgagaaagggttggacgagcttaagatctaatga

SEQ ID NO: 2602 - protein, 417 aa, synthetic construct
  REGION 1..417: note = Variant of acetate kinase
MHHHHHHGGSGMKVLVINSGSSSIKYQLLDMTNEKVLAKGLVERIGIDGSRIVHKVNGEKHVLEHEIKNHEIGLKLVLDLLTDEKYGVLKDLKEIDAVGHRVVHGGERFASSVKITDEVLKTIETLSFLAPLHNPANIMGIKSSMKYLPGVPQVAVFDTAFHQKMPEKAYLYAIPYEYYEKYKIRRYGFHGTSHRYVSKRAAEIMGKPYDQLKIITVHVGNGASVAAVKNGVSVDTSMGFTPLEGLVMGTRSGDIDPAIVEFLEKEEGLSAKEVVNILNKKSGVYGLTKGFSSDMRDIEDNAIEGDPVCRLAFDVYEYRIAKYIGAYAAAMNGVDAIVFTAGVGENSPIMREEIIENYLGYLGIKIDKEANDFKGEEKIISTPDSKVIAMVVPTNEELMIAKDTKEIIEKGLDELKI

SEQ ID NO: 2603 - DNA, 1257 bp, synthetic construct
  misc_feature 1..1257: note = Variant of acetate kinase
  source 1..1257: mol_type = other DNA
atgcaccatcatcatcatcatggcggtagcggcatgaaagttctggtgattaattctggtagctcctccatcaaatatcagctcctcgatatgaccaacgaaaaggtattagcgaaaggcttggtcgagcgcattggcatcgacggttcgcgtatcgtgcataaagttaacggcgaaaaacacgtgctggaacatgagattaagaatcacgaaattggacttaaattggtcctggatcttcttacggacgaaaaatacggtgtgttgaaggatctcaaagaaatcgatgcagttgggcatcgcgtagtacatggcggcgagcgttttgccagtagcgtgaagattactgacgaagtcttaaagaccatcgagacgttgtcgttcttagctccgttacacaatccagcgaacattatgggtatctggagcagcatgaaattattaccgggtgtgcctcaagttgccgtctttgatacagcgttccaccagaagatgccggagaaagcctatttgtacgcaatcccctatgagtactacgagaaatataaaattcgccgctatgggtttcatggaacctcacatcgttatgtgagtaaacgtgctgcggaaattatgggcaaaccgtacgatcagctcaagatcattaccgttcacgtgggtaacggcgcatcagttgcggcggtgaagaatggcgtatctgttgacacttccatgggtttcacaccacttgaaggtcttgtcatgggcacgcgcagcggcgatattgatccggccatcgtggaatttcttgagaaagaagaaggattgtcggccaaagaagtcgtcaacatcctcaacaagaaatctggtgtgtatgggctcaccaaaggctttagtagtgacatgcgtgacattgaagataatgctattgaaggtgatcctgtatgccgccttgcattcgatgtgtacgaatatcgtatcgcgaaatatattggcgcatacgctgcggccatgaacggtgttgacgcgatcgtctttaccgcaggagttggcgaaaatagcccgattatgcgcgaagaaattattgagaactacttgggctacttagggatcaagatcgataaagaagccaatgacttcaaaggtgaggagaagatcatttcaacgcccgattccaaagtgattgcgatggtagttccgaccaacgaggagctcatgatcgccaaagacacgaaagaaatcattgagaaagggttggacgagcttaagatctaatga

SEQ ID NO: 2604 - protein, 417 aa, synthetic construct
  REGION 1..417: note = Variant of acetate kinase
MHHHHHHGGSGMKVLVINSGSSSIKYQLLDMTNEKVLAKGLVERIGIDGSRIVHKVNGEKHVLEHEIKNHEIGLKLVLDLLTDEKYGVLKDLKEIDAVGHRVVHGGERFASSVKITDEVLKTIETLSFLAPLHNPANIMGIWSSMKLLPGVPQVAVFDTAFHQKMPEKAYLYAIPYEYYEKYKIRRYGFHGTSHRYVSKRAAEIMGKPYDQLKIITVHVGNGASVAAVKNGVSVDTSMGFTPLEGLVMGTRSGDIDPAIVEFLEKEEGLSAKEVVNILNKKSGVYGLTKGFSSDMRDIEDNAIEGDPVCRLAFDVYEYRIAKYIGAYAAAMNGVDAIVFTAGVGENSPIMREEIIENYLGYLGIKIDKEANDFKGEEKIISTPDSKVIAMVVPTNEELMIAKDTKEIIEKGLDELKI

SEQ ID NO: 2605 - DNA, 1257 bp, synthetic construct
  misc_feature 1..1257: note = Variant of acetate kinase
  source 1..1257: mol_type = other DNA
atgcaccatcatcatcatcatggcggtagcggcatgaaagttctggtgattaattctggtagctcctccatcaaatatcagctcctcgatatgaccaacgaaaaggtattagcgaaaggcttggtcgagcgcattggcatcgacggttcgcgtatcgtgcataaagttaacggcgaaaaacacgtgctggaacatgagattaagaatcacgaaattggacttaaattggtcctggatcttcttacggacgaaaaatacggtgtgttgaaggatctcaaagaaatcgatgcagttgggcatcgcgtagtacatggcggcgagcgttttgccagtagcgtgaagattactgacgaagtcttaaagaccatcgagacgttgtcgttcttagctccgttacacaatccagcgaacattatgggtatcaagagcagcatgaaaatgttaccgggtgtgcctcaagttgccgtctttgatacagcgttccaccagaagatgccggagaaagcctatttgtacgcaatcccctatgagtactacgagaaatataaaattcgccgctatgggtttcatggaacctcacatcgttatgtgagtaaacgtgctgcggaaattatgggcaaaccgtacgatcagctcaagatcattaccgttcacgtgggtaacggcgcatcagttgcggcggtgaagaatggcgtatctgttgacacttccatgggtttcacaccacttgaaggtcttgtcatgggcacgcgcagcggcgatattgatccggccatcgtggaatttcttgagaaagaagaaggattgtcggccaaagaagtcgtcaacatcctcaacaagaaatctggtgtgtatgggctcaccaaaggctttagtagtgacatgcgtgacattgaagataatgctattgaaggtgatcctgtatgccgccttgcattcgatgtgtacgaatatcgtatcgcgaaatatattggcgcatacgctgcggccatgaacggtgttgacgcgatcgtctttaccgcaggagttggcgaaaatagcccgattatgcgcgaagaaattattgagaactacttgggctacttagggatcaagatcgataaagaagccaatgacttcaaaggtgaggagaagatcatttcaacgcccgattccaaagtgattgcgatggtagttccgaccaacgaggagctcatgatcgccaaagacacgaaagaaatcattgagaaagggttggacgagcttaagatctaatga

SEQ ID NO: 2606 - protein, 417 aa, synthetic construct
  REGION 1..417: note = Variant of acetate kinase
MHHHHHHGGSGMKVLVINSGSSSIKYQLLDMTNEKVLAKGLVERIGIDGSRIVHKVNGEKHVLEHEIKNHEIGLKLVLDLLTDEKYGVLKDLKEIDAVGHRVVHGGERFASSVKITDEVLKTIETLSFLAPLHNPANIMGIKSSMKMLPGVPQVAVFDTAFHQKMPEKAYLYAIPYEYYEKYKIRRYGFHGTSHRYVSKRAAEIMGKPYDQLKIITVHVGNGASVAAVKNGVSVDTSMGFTPLEGLVMGTRSGDIDPAIVEFLEKEEGLSAKEVVNILNKKSGVYGLTKGFSSDMRDIEDNAIEGDPVCRLAFDVYEYRIAKYIGAYAAAMNGVDAIVFTAGVGENSPIMREEIIENYLGYLGIKIDKEANDFKGEEKIISTPDSKVIAMVVPTNEELMIAKDTKEIIEKGLDELKI

SEQ ID NO: 2607 - DNA, 1257 bp, synthetic construct
  misc_feature 1..1257: note = Variant of acetate kinase
  source 1..1257: mol_type = other DNA
atgcaccatcatcatcatcatggcggtagcggcatgaaagttctggtgattaattctggtagctcctccatcaaatatcagctcctcgatatgaccaacgaaaaggtattagcgaaaggcatggtcgagcgcattggcatcgacggttcgcgtatcgtgcataaagttaacggcgaaaaacacgtgctggaacatgagattaagaatcacgaaattggacttaaattggtcctggatcttcttacggacgaaaaatacggtgtgttgaaggatctcaaagaaatcgatgtagttgggcatcgcgtagtacatggcggcgagcgttttgccagtagcgtgaagattactgacgaagtcttaaagaccatcgagacgttgtcgttcttagctccgttacacaatccagcgaacattatgggtatcaagagcagcatgaaattattaccgggtgtgcctcaagttgccgtctttgatacagcgttccaccagaagatgccggagaaagcctatttgtacgcaatcccctatgagtactacgagaaatataaaattcgccgctatgggtttcatggaacctcacatcgttatgtgagtaaacgtgctgcggaaattatgggcaaaccgtacgatcagctcaagatcattaccgttcacgtgggtaacggcgcatcagttgcggcggtgaagaatggcgtatctgttgacacttccatgggtttcacaccacttgaaggtcttgtcatgggcacgcgcagcggcgatattgatccggccatcgtggaatttcttgagaaagaagaaggattgtcggccaaagaagtcgtcaacatcctcaacaagaaatctggtgtgtatgggctcaccaaaggctttagtagtgacatgcgtgacattgaagataatgctattgaaggtgatcctgtatgccgccttgcattcgatgtgtacgaatatcgtatcgcgaaatatattggcgcatacgctgcggccatgaacggtgttgacgcgatcgtctttaccgcaggagttggcgaaaatagcccgattatgcgcgaagaaattattgagaactacttgggctacttagggatcaagatcgataaagaagccaatgacttcaaaggtgaggagaagatcatttcaacgcccgattccaaagtgattgcgatggtagttccgaccaacgaggagctcatgatcgccaaagacacgaaagaaatcattgagaaagggttggacgagcttaagatctaatga

SEQ ID NO: 2608 - protein, 417 aa, synthetic construct
  REGION 1..417: note = Variant of acetate kinase
MHHHHHHGGSGMKVLVINSGSSSIKYQLLDMTNEKVLAKGMVERIGIDGSRIVHKVNGEKHVLEHEIKNHEIGLKLVLDLLTDEKYGVLKDLKEIDVVGHRVVHGGERFASSVKITDEVLKTIETLSFLAPLHNPANIMGIKSSMKLLPGVPQVAVFDTAFHQKMPEKAYLYAIPYEYYEKYKIRRYGFHGTSHRYVSKRAAEIMGKPYDQLKIITVHVGNGASVAAVKNGVSVDTSMGFTPLEGLVMGTRSGDIDPAIVEFLEKEEGLSAKEVVNILNKKSGVYGLTKGFSSDMRDIEDNAIEGDPVCRLAFDVYEYRIAKYIGAYAAAMNGVDAIVFTAGVGENSPIMREEIIENYLGYLGIKIDKEANDFKGEEKIISTPDSKVIAMVVPTNEELMIAKDTKEIIEKGLDELKI

SEQ ID NO: 2609 - DNA, 1257 bp, synthetic construct
  misc_feature 1..1257: note = Variant of acetate kinase
  source 1..1257: mol_type = other DNA
atgcaccatcatcatcatcatggcggtagcggcatgaaagttctggtgattaattctggtagctcctccatcaaatatcagctcctcgatatgaccaacgaaaaggtattagcgaaaggcttggtcgagcgcattggcatcgacggttcgcgtatcgtgcataaagttaacggcgaaaaacacgtgctggaacatgagattaagaatcacgaaattggacttaaattggtcctggatcttcttacggacgaaaaatacggtgtgttgaaggatctcaaagaaatcgatgcagttgggcatcgcgtagtacatggcggcgagcgttttgccagtagcgtgaagattactgacgaagtcttaaagaccatcgagacgttgtcgttcttagctccgttacacaatccagcgaacattatgggtatcaagagcagcatgaaattattaccgggtgtgcctcaagttgccgtctttgatacagcgttccaccagaagatgccggagaaagcctatttgtacgcaatcccctatgagtactacgagaaatataaaattcgccgctatgggtttcatggaacctcacatcgttatgtgagtaaacgtgctgcggaaattatgggcaaaccgtacgatcagctcaagatcattaccgttcacgtgggtaacggcgcatcagttgcggcggtgaagaatggcgtatctgttgacacttccatgggtttcacaccacttgaaggtcttgtcatgggcacgcgcagcggcgatattgatccggccatcgtggaatttcttgagaaagaagaaggattgtcggccaaagaagtcgtcaacatcctcaacaagaaatctggtgtgtatgggctcaccaaaggctttagtagtgacatgcgtgacattgaagataatgctattgaaggtgatcctgtatgccgccttgcattcgatgtgtacgaatatcgtatcgcgaaatatattggcgcatacgctgcggccatgaacggtgttgacgcgatcgtctttaccgcaggagttggcgaaaatagcccgattatgcgcgaagaaattattgagaactacttgggctacttagggatcaagatcgataaaaatgccaatgacttcaaaggtgaggagaagatcatttcaacgcccgattccaaagtgattgcgatggtagttccgaccaacgaggagctcatgatcgccaaagacacgaaagaaatcattgagaaagggttggacgagcttaagatctaatga

SEQ ID NO: 2610 - protein, 417 aa, synthetic construct
  REGION 1..417: note = Variant of acetate kinase
MHHHHHHGGSGMKVLVINSGSSSIKYQLLDMTNEKVLAKGLVERIGIDGSRIVHKVNGEKHVLEHEIKNHEIGLKLVLDLLTDEKYGVLKDLKEIDAVGHRVVHGGERFASSVKITDEVLKTIETLSFLAPLHNPANIMGIKSSMKLLPGVPQVAVFDTAFHQKMPEKAYLYAIPYEYYEKYKIRRYGFHGTSHRYVSKRAAEIMGKPYDQLKIITVHVGNGASVAAVKNGVSVDTSMGFTPLEGLVMGTRSGDIDPAIVEFLEKEEGLSAKEVVNILNKKSGVYGLTKGFSSDMRDIEDNAIEGDPVCRLAFDVYEYRIAKYIGAYAAAMNGVDAIVFTAGVGENSPIMREEIIENYLGYLGIKIDKNANDFKGEEKIISTPDSKVIAMVVPTNEELMIAKDTKEIIEKGLDELKI

SEQ ID NO: 2611 - DNA, 1257 bp, synthetic construct
  misc_feature 1..1257: note = Variant of acetate kinase
  source 1..1257: mol_type = other DNA
atgcaccatcatcatcatcatggcggtagcggcatgaaagttctggtgattaattctggtagctcctccatcaaatatcagctcctcgatatgaccaacgaaaaggtattagcgaaaggcttggtcgagcgcattggcatcgacggttcgcgtatcgtgcataaagttaacggcgaaaaacacgtgctggaacatgagattaagaatcacgaaattggaattaaattggtcctggatcttcttacggacgaaaaatacggtgtgttgaaggatctcaaagaaatcgatgcagttgggcatcgcgtagtacatggcggcgagcgttttgccagtagcgtgaagattactgacgaagtcttaaagaccatcgagacgttgtcgttcttagctccgttacacaatccagcgaacattatgggtatcaagagcagcatgaaattattaccgggtgtgcctcaagttgccgtctttgatacagcgttccaccagaagatgccggagaaagcctatttgtacgcaatcccctatgagtactacgagaaatataaaattcgccgctatgggtttcatggaacctcacatcgttatgtgagtaaacgtgctgcggaaattatgggcaaaccgtacgatcagctcaagatcattaccgttcacgtgggtaacggcgcatcagttgcggcggtgaagaatggcgtatctgttgacacttccatgggtttcacaccacttgaaggtcttgtcatgggcacgcgcagcggcgatattgatccggccatcgtggaatttcttgagaaagaagaaggattgtcggccaaagaagtcgtcaacatcctcaacaagaaatctggtgtgtatgggctcaccaaaggctttagtagtgacatgcgtgacattgaagataatgctattgaaggtgatcctgtatgccgccttgcattcgatgtgtacgaatatcgtatcgcgaaatatattggcgcatacgctgcggccatgaacggtgttgacgcgatcgtctttaccgcaggagttggcgaaaatagcccgattatgcgcgaagaaattattgagaactacttgggctacttagggatcaagatcgataaagaagccaatgacttcaaaggtgaggagaagatcatttcaacgcccgattccaaagtgattgcgatggtagttccgaccaacgaggagctcatgatcgccaaagacacgaaagaaatcattgagaaagggttggacgagcttaagatctaatga

SEQ ID NO: 2612 - protein, 417 aa, synthetic construct
  REGION 1..417: note = Variant of acetate kinase
MHHHHHHGGSGMKVLVINSGSSSIKYQLLDMTNEKVLAKGLVERIGIDGSRIVHKVNGEKHVLEHEIKNHEIGIKLVLDLLTDEKYGVLKDLKEIDAVGHRVVHGGERFASSVKITDEVLKTIETLSFLAPLHNPANIMGIKSSMKLLPGVPQVAVFDTAFHQKMPEKAYLYAIPYEYYEKYKIRRYGFHGTSHRYVSKRAAEIMGKPYDQLKIITVHVGNGASVAAVKNGVSVDTSMGFTPLEGLVMGTRSGDIDPAIVEFLEKEEGLSAKEVVNILNKKSGVYGLTKGFSSDMRDIEDNAIEGDPVCRLAFDVYEYRIAKYIGAYAAAMNGVDAIVFTAGVGENSPIMREEIIENYLGYLGIKIDKEANDFKGEEKIISTPDSKVIAMVVPTNEELMIAKDTKEIIEKGLDELKI

SEQ ID NO: 2613 - DNA, 1257 bp, synthetic construct
  misc_feature 1..1257: note = Variant of acetate kinase
  source 1..1257: mol_type = other DNA
atgcaccatcatcatcatcatggcggtagcggcatgaaagttctggtgattaattctggtagctcctccatcaaatatcagctcctcgatatgaccaacgaaaaggtattagcgaaaggcttggtcgagcgcattggcatcgacggttcgcgtctggtgcataaagttaacggcgaaaaacacgtgctggaacatgagattaagaatcacgaaattggacttaaattggtcctggatcttcttacggacgaaaaatacggtgtgttgaaggatctcaaagaaatcgatgcagttgggcatcgcgtagtacatggcggcgagcgttttgccagtagcgtgaagattactgacgaagtcttaaagaccatcgagacgttgtcgttcttagctccgttacacaatccagcgaacattatgggtatcaagagcagcatgaaattattaccgggtgtgcctcaagttgccgtctttgatacagcgttccaccagaagatgccggagaaagcctatttgtacgcaatcccctatgagtactacgagaaatataaaattcgccgctatgggtttcatggaacctcacatcgttatgtgagtaaacgtgctgcggaaattatgggcaaaccgtacgatcagctcaagatcattaccgttcacgtgggtaacggcgcatcagttgcggcggtgaagaatggcgtatctgttgacacttccatgggtttcacaccacttgaaggtcttgtcatgggcacgcgcagcggcgatattgatccggccatcgtggaatttcttgagaaagaagaaggattgtcggccaaagaagtcgtcaacatcctcaacaagaaatctggtgtgtatgggctcaccaaaggctttagtagtgacatgcgtgacattgaagataatgctattgaaggtgatcctgtatgccgccttgcattcgatgtgtacgaatatcgtatcgcgaaatatattggcgcatacgctgcggccatgaacggtgttgacgcgatcgtctttaccgcaggagttggcgaaaatagcccgattatgcgcgaagaaattattgagaactacttgggctacttagggatcaagatcgataaagaagccaatgacttcaaaggtgaggagaagatcatttcaacgcccgattccaaagtgattgcgatggtagttccgaccaacgaggagctcatgatcgccaaagacacgaaagaaatcattgagaaagggttggacgagcttaagatctaatga

SEQ ID NO: 2614 - protein, 417 aa, synthetic construct
  REGION 1..417: note = Variant of acetate kinase
MHHHHHHGGSGMKVLVINSGSSSIKYQLLDMTNEKVLAKGLVERIGIDGSRLVHKVNGEKHVLEHEIKNHEIGLKLVLDLLTDEKYGVLKDLKEIDAVGHRVVHGGERFASSVKITDEVLKTIETLSFLAPLHNPANIMGIKSSMKLLPGVPQVAVFDTAFHQKMPEKAYLYAIPYEYYEKYKIRRYGFHGTSHRYVSKRAAEIMGKPYDQLKIITVHVGNGASVAAVKNGVSVDTSMGFTPLEGLVMGTRSGDIDPAIVEFLEKEEGLSAKEVVNILNKKSGVYGLTKGFSSDMRDIEDNAIEGDPVCRLAFDVYEYRIAKYIGAYAAAMNGVDAIVFTAGVGENSPIMREEIIENYLGYLGIKIDKEANDFKGEEKIISTPDSKVIAMVVPTNEELMIAKDTKEIIEKGLDELKI

SEQ ID NO: 2615 - DNA, 1257 bp, synthetic construct
  misc_feature 1..1257: note = Variant of acetate kinase
  source 1..1257: mol_type = other DNA
atgcaccatcatcatcatcatggcggtagcggcatgaaagttctggtgattaattctggtagctcctccatcaaatatcagctcctcgatatgaccaacgaaaaggtattagcgaaaggcttggtcgagcgcattggcatcgacggttcgcgtatcgtgcataaagttaacggcgaaaaacacgtgctggaacatgagattaagaatcacgaaattggacttaaattggtcctggatcttcttacggacgaaaaatacggtgtgttgaaggatctcaaagaaatcgatgcagttgggcatcgcgtagtacatggcggcgagcgttttgccagtagcgtgaagattactgacgaagtcttaaagaccatcgagacgttgtcgttcttagctccgttacacaatccagcgaacattatgggtatcaagagcagcatgaaattattaccgggtgtgcctcaagttgccgtctttgatacagcgttccaccagaagatgccggagaaagcctatttgtacgcaatcccctatgagtactacgagaaatataaaattcgccgctatgggtttcatggaacctcacatcgttatgtgagtaaacgtgctgcggaaattatgggcaaaccgtacgatcagctcaagatcattaccgttcacgtgggtaacggcgcatcagttgcggcggtgaagaatggcgtatctgttgacacttccatgggtttcacaccacttgaaggtcttgtcatgggcacgcgcagcggcgatattgatccggccatcgtggaatttcttgagaaagaagaaggattgtcggccaaagaagtcgtcaacatcctcaacaagaaatctggtgtgtatgggctcaccaaaggctttagtagtgacatgcgtgacattgaagataatgctattgaaggtgatcctgtatgccgccttgcattcgatgtgtacgaatatcgtatcgcgaaatatattggcgcatacgctgcggccatgaacggtgttgacgcgatcgtctttaccgcaggagttggcgaaaatagcccgattatgcgctcggaaattattgagaactacttgggctacttagggatcaagatcgataaagaagccaatgacttcaaaggtgaggagaagatcatttcaacgcccgattccaaagtgattgcgatggtagttccgaccaacgaggagctcatgatcgccaaagacacgaaagaaatcattgagaaagggttggacgagcttaagatctaatga

SEQ ID NO: 2616 - protein, 417 aa, synthetic construct
  REGION 1..417: note = Variant of acetate kinase
MHHHHHHGGSGMKVLVINSGSSSIKYQLLDMTNEKVLAKGLVERIGIDGSRIVHKVNGEKHVLEHEIKNHEIGLKLVLDLLTDEKYGVLKDLKEIDAVGHRVVHGGERFASSVKITDEVLKTIETLSFLAPLHNPANIMGIKSSMKLLPGVPQVAVFDTAFHQKMPEKAYLYAIPYEYYEKYKIRRYGFHGTSHRYVSKRAAEIMGKPYDQLKIITVHVGNGASVAAVKNGVSVDTSMGFTPLEGLVMGTRSGDIDPAIVEFLEKEEGLSAKEVVNILNKKSGVYGLTKGFSSDMRDIEDNAIEGDPVCRLAFDVYEYRIAKYIGAYAAAMNGVDAIVFTAGVGENSPIMRSEIIENYLGYLGIKIDKEANDFKGEEKIISTPDSKVIAMVVPTNEELMIAKDTKEIIEKGLDELKI

SEQ ID NO: 2617 - DNA, 1257 bp, synthetic construct
  misc_feature 1..1257: note = Variant of acetate kinase
  source 1..1257: mol_type = other DNA
atgcaccatcatcatcatcatggcggtagcggcatgaaagttctggtgattaattctggtagctcctccatcaaatatcagctcctcgatatgaccaacgaaaaggtattagcgaaaggcttggtcgagcgcattggcatcgacggttcgcgtatcgtgcataaagttaacggcgaaaaacacgtgctggaacatgagattaagaatcacgaaattggacttaaattggtcctggatcttcttacggacgaaaaatacggtgtgttgaaggatctcaaagaaatcgatgcagttgggcatcgcgtagtacatggcggcgagcgttttgccagtagcgtgaagattactgacgaagtcttaaagaccatcgagacgttgtcgttcttagctccgttacacaatccagcgaacattatgggtatcaagagcagcatgaaattattaccgggtgtgcctcaagttgccgtctttgatacagcgttccaccagaagatgccggagaaagcctatttgtacgcaatcccctatgagtactacgagaaatataaaattcgccgctatgggtttcatggaacctcacatcgttatgtgagtaaacgtgctgcggaaattatgggcaaaccgtacgatcagctcaagatcattaccgttcacgtgggtaacggcgcatcagttgcggcggtgaagaatggcgtatctgttgacacttccatgggtttcacaccacttgaaggtcttgtcatgggcacgcgcagcggcgatattgatccggccatcgtggaatttcttgagaaagaagaaggattgtcggccaaagaagtcgtcaacatcctcaacaagaaatctggtgtgtatgggctcaccaaaggctttagtagtgacatgcgtgacattgaagataatgctattgaaggtgatcctgtatgccgccttgcattcgatgtgtacgaatatcgtatcgcgaaatatattggcgcatacgctgcggccatgaacggtgttgacgcgatcgtctttaccgcaggagttggcgaaaatagcccgattatgcgcgaagaaattattgagaactacttgggctacttagggatcaagatcgataaagaagccaatgacgtgaaaggtgaggagaagatcatttcaacgcccgattccaaagtgattgcgatggtagttccgaccaacgaggagctcatgatcgccaaagacacgaaagaaatcattgagaaagggttggacgagcttaagatctaatga

SEQ ID NO: 2618 - protein, 417 aa, synthetic construct
  REGION 1..417: note = Variant of acetate kinase
MHHHHHHGGSGMKVLVINSGSSSIKYQLLDMTNEKVLAKGLVERIGIDGSRIVHKVNGEKHVLEHEIKNHEIGLKLVLDLLTDEKYGVLKDLKEIDAVGHRVVHGGERFASSVKITDEVLKTIETLSFLAPLHNPANIMGIKSSMKLLPGVPQVAVFDTAFHQKMPEKAYLYAIPYEYYEKYKIRRYGFHGTSHRYVSKRAAEIMGKPYDQLKIITVHVGNGASVAAVKNGVSVDTSMGFTPLEGLVMGTRSGDIDPAIVEFLEKEEGLSAKEVVNILNKKSGVYGLTKGFSSDMRDIEDNAIEGDPVCRLAFDVYEYRIAKYIGAYAAAMNGVDAIVFTAGVGENSPIMREEIIENYLGYLGIKIDKEANDVKGEEKIISTPDSKVIAMVVPTNEELMIAKDTKEIIEKGLDELKI

SEQ ID NO: 2619 - DNA, 1257 bp, synthetic construct
  misc_feature 1..1257: note = Variant of acetate kinase
  source 1..1257: mol_type = other DNA
atgcaccatcatcatcatcatggcggtagcggcatgaaagttctggtgattaattctggtagctcctccatcaaatatctgctcctcgatatgaccaacgaaaaggtattagcgaaaggcttggtcgagcgcattggcatcgacggttcgcgtatcgtgcataaagttaacggcgaaaaacacgtgctggaacatgagattaagaatcacgaaattggacttaaattggtcctggatcttcttacggacgaaaaatacggtgtgttgaaggatctcaaagaaatcgatgcagttgggcatcgcgtagtacatggcggcgagcgttttgccagtagcgtgaagattactgacgaagtcttaaagaccatcgagacgttgtcgttcttagctccgttacacaatccagcgaacattatgggtatcaagagcagcatgaaattattaccgggtgtgcctcaagttgccgtctttgatacagcgttccaccagaagatgccggagaaagcctatttgtacgcaatcccctatgagtactacgagaaatataaaattcgccgctatgggtttcatggaacctcacatcgttatgtgagtaaacgtgctgcggaaattatgggcaaaccgtacgatcagctcaagatcattaccgttcacgtgggtaacggcgcatcagttgcggcggtgaagaatggcgtatctgttgacacttccatgggtttcacaccacttgaaggtcttgtcatgggcacgcgcagcggcgatattgatccggccatcgtggaatttcttgagaaagaagaaggattgtcggccaaagaagtcgtcaacatcctcaacaagaaatctggtgtgtatgggctcaccaaaggctttagtagtgacatgcgtgacattgaagataatgctattgaaggtgatcctgtatgccgccttgcattcgatgtgtacgaatatcgtatcgcgaaatatattggcgcatacgctgcggccatgaacggtgttgacgcgatcgtctttaccgcaggagttggcgaaaatagcccgattatgcgcgaagaaattattgagaactacttgggctacttagggatcaagatcgataaagaagccaatgacttcaaaggtgaggagaagatcatttcaacgcccgattccaaagtgattgcgatggtagttccgaccaacgaggagctcatgatcgccaaagacacgaaagaaatcattgagaaagggttggacgagcttaagatctaatga

SEQ ID NO: 2620 - protein, 417 aa, synthetic construct
  REGION 1..417: note = Variant of acetate kinase
MHHHHHHGGSGMKVLVINSGSSSIKYLLLDMTNEKVLAKGLVERIGIDGSRIVHKVNGEKHVLEHEIKNHEIGLKLVLDLLTDEKYGVLKDLKEIDAVGHRVVHGGERFASSVKITDEVLKTIETLSFLAPLHNPANIMGIKSSMKLLPGVPQVAVFDTAFHQKMPEKAYLYAIPYEYYEKYKIRRYGFHGTSHRYVSKRAAEIMGKPYDQLKIITVHVGNGASVAAVKNGVSVDTSMGFTPLEGLVMGTRSGDIDPAIVEFLEKEEGLSAKEVVNILNKKSGVYGLTKGFSSDMRDIEDNAIEGDPVCRLAFDVYEYRIAKYIGAYAAAMNGVDAIVFTAGVGENSPIMREEIIENYLGYLGIKIDKEANDFKGEEKIISTPDSKVIAMVVPTNEELMIAKDTKEIIEKGLDELKI

SEQ ID NO: 2621 - DNA, 1257 bp, synthetic construct
  misc_feature 1..1257: note = Variant of acetate kinase
  source 1..1257: mol_type = other DNA
atgcaccatcatcatcatcatggcggtagcggcatgaaagttctggtgattaattctggtagctcctccatcaaatatcagctcctcgatatgaccaacgaaaaggtattagcgaaaggcttggtcgagcgcattggcatcgacggttcgcgtatcgtgcataaagttaacggcgaaaaacacgtgctggaacatgagattaagaatcacgaaattggacttaaattggtcctggatcttcttacggacgaaaaatacggtgtgttgaaggatctcaaagaaatcgatgcagttgggcatcgcgtagtacatggcggcgagcgttttgccagtagcgtgaagactactgacgaagtcttaaagaccatcgagacgttgtcgttcttagctccgttacacaatccagcgaacattatgggtatcaagagcagcatgaaattattaccgggtgtgcctcaagttgccgtctttgatacagcgttccaccagaagatgccggagaaagcctatttgtacgcaatcccctatgagtactacgagaaatataaaattcgccgctatgggtttcatggaacctcacatcgttatgtgagtaaacgtgctgcggaaattatgggcaaaccgtacgatcagctcaagatcattaccgttcacgtgggtaacggcgcatcagttgcggcggtgaagaatggcgtatctgttgacacttccatgggtttcacaccacttgaaggtcttgtcatgggcacgcgcagcggcgatattgatccggccatcgtggaatttcttgagaaagaagaaggattgtcggccaaagaagtcgtcaacatcctcaacaagaaatctggtgtgtatgggctcaccaaaggctttagtagtgacatgcgtgacattgaagataatgctattgaaggtgatcctgtatgccgccttgcattcgatgtgtacgaatatcgtatcgcgaaatatattggcgcatacgctgcggccatgaacggtgttgacgcgatcgtctttaccgcaggagttggcgaaaatagcccgattatgcgcgaagaaattattgagaactacttgggctacttagggatcaagatcgataaagaagccaatgacttcaaaggtgaggagaagatcatttcaacgcccgattccaaagtgattgcgatggtagttccgaccaacgaggagctcatgatcgccaaagacacgaaagaaatcattgagaaagggttggacgagcttaagatctaatga

SEQ ID NO: 2622 - protein, 417 aa, synthetic construct
  REGION 1..417: note = Variant of acetate kinase
MHHHHHHGGSGMKVLVINSGSSSIKYQLLDMTNEKVLAKGLVERIGIDGSRIVHKVNGEKHVLEHEIKNHEIGLKLVLDLLTDEKYGVLKDLKEIDAVGHRVVHGGERFASSVKTTDEVLKTIETLSFLAPLHNPANIMGIKSSMKLLPGVPQVAVFDTAFHQKMPEKAYLYAIPYEYYEKYKIRRYGFHGTSHRYVSKRAAEIMGKPYDQLKIITVHVGNGASVAAVKNGVSVDTSMGFTPLEGLVMGTRSGDIDPAIVEFLEKEEGLSAKEVVNILNKKSGVYGLTKGFSSDMRDIEDNAIEGDPVCRLAFDVYEYRIAKYIGAYAAAMNGVDAIVFTAGVGENSPIMREEIIENYLGYLGIKIDKEANDFKGEEKIISTPDSKVIAMVVPTNEELMIAKDTKEIIEKGLDELKI

SEQ ID NO: 2623 - DNA, 1257 bp, synthetic construct
  misc_feature 1..1257: note = Variant of acetate kinase
  source 1..1257: mol_type = other DNA
atgcaccatcatcatcatcatggcggtagcggcatgaaagttctggtgattaattctggtagctcctccatcaaatatcagctcctcgatatgaccaacgaaaaggtattagcgaaaggcttggtcgagcgcattggcatcgacggttcgcgtatcgtgcataaagttaacggcgaaaaacacgtgctggaacatgagattaagaatcacgaaattggacttaaattggtcctggatcttcttacggacgaaaaatacggtgtgttgaaggatctcaaagaaatcgatgcagttgggcatcgcgtagtacatggcggcgagcgttttgccagtagcgtgaagattactgacgaagtcttaaagaccatcgagacgttgtcgttcttagctccgttacacaatccaaggaacattatgggtatcaagagcagcatgaaattattaccgggtgtgcctcaagttgccgtctttgatacagcgttccaccagaagatgccggagaaagcctatttgtacgcaatcccctatgagtactacgagaaatataaaattcgccgctatgggtttcatggaacctcacatcgttatgtgagtaaacgtgctgcggaaattatgggcaaaccgtacgatcagctcaagatcattaccgttcacgtgggtaacggcgcatcagttgcggcggtgaagaatggcgtatctgttgacacttccatgggtttcacaccacttgaaggtcttgtcatgggcacgcgcagcggcgatattgatccggccatcgtggaatttcttgagaaagaagaaggattgtcggccaaagaagtcgtcaacatcctcaacaagaaatctggtgtgtatgggctcaccaaaggctttagtagtgacatgcgtgacattgaagataatgctattgaaggtgatcctgtatgccgccttgcattcgatgtgtacgaatatcgtatcgcgaaatatattggcgcatacgctgcggccatgaacggtgttgacgcgatcgtctttaccgcaggagttggcgaaaatagcccgattatgcgcgaagaaattattgagaactacttgggctacttagggatcaagatcgataaagaagccaatgacttcaaaggtgaggagaagatcatttcaacgcccgattccaaagtgattgcgatggtagttccgaccaacgaggagctcatgatcgccaaagacacgaaagaaatcattgagaaagggttggacgagcttaagatctaatga

SEQ ID NO: 2624 - protein, 417 aa, synthetic construct
  REGION 1..417: note = Variant of acetate kinase
MHHHHHHGGSGMKVLVINSGSSSIKYQLLDMTNEKVLAKGLVERIGIDGSRIVHKVNGEKHVLEHEIKNHEIGLKLVLDLLTDEKYGVLKDLKEIDAVGHRVVHGGERFASSVKITDEVLKTIETLSFLAPLHNPRNIMGIKSSMKLLPGVPQVAVFDTAFHQKMPEKAYLYAIPYEYYEKYKIRRYGFHGTSHRYVSKRAAEIMGKPYDQLKIITVHVGNGASVAAVKNGVSVDTSMGFTPLEGLVMGTRSGDIDPAIVEFLEKEEGLSAKEVVNILNKKSGVYGLTKGFSSDMRDIEDNAIEGDPVCRLAFDVYEYRIAKYIGAYAAAMNGVDAIVFTAGVGENSPIMREEIIENYLGYLGIKIDKEANDFKGEEKIISTPDSKVIAMVVPTNEELMIAKDTKEIIEKGLDELKI

SEQ ID NO: 2625 - DNA, 1257 bp, synthetic construct
  misc_feature 1..1257: note = Variant of acetate kinase
  source 1..1257: mol_type = other DNA
atgcaccatcatcatcatcatggcggtagcggcatgaaagttctggtgattaattctggtagctcctccatcaaatatcagctcctcgatatgaccaacgaaaaggtattagcgaaaggcttggtcgagcgcattggcatcgacggttcgcgtatcgtgcataaagttaacggcgaaaaacacgtgctggaacatgagattaagaatcacgaaattggacttaaattggtcctggatcttcttacggacgaaaaatacggtgtgttgaaggatctcaaagaaatcgatgcagttgggcatcgcgtagtacatggcggcgagcgttttgccagtagcgtgaagattactgacgaagtcttaaagaccatcgagacgttgtcgttcttagctccgttacacaatgtggcgaacattatgggtatcaagagcagcatgaaattattaccgggtgtgcctcaagttgccgtctttgatacagcgttccaccagaagatgccggagaaagcctatttgtacgcaatcccctatgagtactacgagaaatataaaattcgccgctatgggtttcatggaacctcacatcgttatgtgagtaaacgtgctgcggaaattatgggcaaaccgtacgatcagctcaagatcattaccgttcacgtgggtaacggcgcatcagttgcggcggtgaagaatggcgtatctgttgacacttccatgggtttcacaccacttgaaggtcttgtcatgggcacgcgcagcggcgatattgatccggccatcgtggaatttcttgagaaagaagaaggattgtcggccaaagaagtcgtcaacatcctcaacaagaaatctggtgtgtatgggctcaccaaaggctttagtagtgacatgcgtgacattgaagataatgctattgaaggtgatcctgtatgccgccttgcattcgatgtgtacgaatatcgtatcgcgaaatatattggcgcatacgctgcggccatgaacggtgttgacgcgatcgtctttaccgcaggagttggcgaaaatagcccgattatgcgcgaagaaattattgagaactacttgggctacttagggatcaagatcgataaagaagccaatgacttcaaaggtgaggagaagatcatttcaacgcccgattccaaagtgattgcgatggtagttccgaccaacgaggagctcatgatcgccaaagacacgaaagaaatcattgagaaagggttggacgagcttaagatctaatga

SEQ ID NO: 2626 - protein, 417 aa, synthetic construct
  REGION 1..417: note = Variant of acetate kinase
MHHHHHHGGSGMKVLVINSGSSSIKYQLLDMTNEKVLAKGLVERIGIDGSRIVHKVNGEKHVLEHEIKNHEIGLKLVLDLLTDEKYGVLKDLKEIDAVGHRVVHGGERFASSVKITDEVLKTIETLSFLAPLHNVANIMGIKSSMKLLPGVPQVAVFDTAFHQKMPEKAYLYAIPYEYYEKYKIRRYGFHGTSHRYVSKRAAEIMGKPYDQLKIITVHVGNGASVAAVKNGVSVDTSMGFTPLEGLVMGTRSGDIDPAIVEFLEKEEGLSAKEVVNILNKKSGVYGLTKGFSSDMRDIEDNAIEGDPVCRLAFDVYEYRIAKYIGAYAAAMNGVDAIVFTAGVGENSPIMREEIIENYLGYLGIKIDKEANDFKGEEKIISTPDSKVIAMVVPTNEELMIAKDTKEIIEKGLDELKI

SEQ ID NO: 2627 - DNA, 1257 bp, synthetic construct
  misc_feature 1..1257: note = Variant of acetate kinase
  source 1..1257: mol_type = other DNA
atgcaccatcatcatcatcatggcggtagcggcatgaaagttctggtgattaattctggtagctcctccatcaaatatcagctcctcgatatgaccaacgaaaaggtattagcgaaaggcttggtcgagcgcattggcatcgacggttcgcgtatcgtgcataaagttaacggcgaaaaacacgtgctggaacatgagattaagaatcacgaaattggacttaaattggtcctggatcttcttacggacgaaaaatacggtgtgttgaaggatctcaaagaaatcgatgcagttgggcatcgcgtagtacatggcggcgagcgttttgccagtagcgtgaagattactgacgaagtcttaaagaccatcgagacgttgtcgttcttagctccgttacacaatccagcgaacattatgggtatcaagagcagcatgaaattattaccgggtgtgcctcaagttgccgtctttgatacagcgttccaccagaagatgccggagaaagcctatttgtacgcaatcccctatgagtactacgagaaatataaaattcgccgctatgggtttcatggaacctcacatcgttatgtgagtaaacgtgctgcggaaattatgggcaaaccgtacgatcagctcaagatcattaccgttcacgtgggtaacggcgcatcagttgcggcggtgaagaatggcgtatctgttgacacttccatgggtttcacaccacttgaaggtcttgtcatgggcacgcgcagcggcgatattgatccggccatcgtggaatttcttgagaaagaagaaggattgtcggccaaagaagtcgtcaacatcctcaaccggaaatctggtgtgtatgggctcaccaaaggctttagtagtgacatgcgtgacattgaagataatgctattgaaggtgatcctgtatgccgccttgcattcgatgtgtacgaatatcgtatcgcgaaatatattggcgcatacgctgcggccatgaacggtgttgacgcgatcgtctttaccgcaggagttggcgaaaatagcccgattatgcgcgaagaaattattgagaactacttgggctacttagggatcaagatcgataaagaagccaatgacttcaaaggtgaggagaagatcatttcaacgcccgattccaaagtgattgcgatggtagttccgaccaacgaggagctcatgatcgccaaagacacgaaagaaatcattgagaaagggttggacgagcttaagatctaatga

SEQ ID NO: 2628 - protein, 417 aa, synthetic construct
  REGION 1..417: note = Variant of acetate kinase
MHHHHHHGGSGMKVLVINSGSSSIKYQLLDMTNEKVLAKGLVERIGIDGSRIVHKVNGEKHVLEHEIKNHEIGLKLVLDLLTDEKYGVLKDLKEIDAVGHRVVHGGERFASSVKITDEVLKTIETLSFLAPLHNPANIMGIKSSMKLLPGVPQVAVFDTAFHQKMPEKAYLYAIPYEYYEKYKIRRYGFHGTSHRYVSKRAAEIMGKPYDQLKIITVHVGNGASVAAVKNGVSVDTSMGFTPLEGLVMGTRSGDIDPAIVEFLEKEEGLSAKEVVNILNRKSGVYGLTKGFSSDMRDIEDNAIEGDPVCRLAFDVYEYRIAKYIGAYAAAMNGVDAIVFTAGVGENSPIMREEIIENYLGYLGIKIDKEANDFKGEEKIISTPDSKVIAMVVPTNEELMIAKDTKEIIEKGLDELKI

SEQ ID NO: 2629 - DNA, 1257 bp, synthetic construct
  misc_feature 1..1257: note = Variant of acetate kinase
  source 1..1257: mol_type = other DNA
atgcaccatcatcatcatcatggcggtagcggcatgaaagttctggtgattaattctggtagctcctccatcaaatatcagctcctcgatatgaccaacgaaaaggtattagcgaaaggcttggtcgagcgcattggcatcgacggttcgcgtatcgtgcataaagttaacggcgaaaaacacgtgctggaacatgagattaagaatcacgaaattggacttaaattggtcctggatcttcttacggacgaaaaatacggtgtgttgaaggatctcaaagaaatcgatgcagttgggcatcgcgtagtacatggcggcgagcgttttgccagtagcgtgaagattactgacgaagtcttaaagaccatcgagacgttgtcgttcttagctccgttacacaatccagcgattattatgggtatcaagagcagcatgaaattattaccgggtgtgcctcaagttgccgtctttgatacagcgttccaccagaagatgccggagaaagcctatttgtacgcaatcccctatgagtactacgagaaatataaaattcgccgctatgggtttcatggaacctcacatcgttatgtgagtaaacgtgctgcggaaattatgggcaaaccgtacgatcagctcaagatcattaccgttcacgtgggtaacggcgcatcagttgcggcggtgaagaatggcgtatctgttgacacttccatgggtttcacaccacttgaaggtcttgtcatgggcacgcgcagcggcgatattgatccggccatcgtggaatttcttgagaaagaagaaggattgtcggccaaagaagtcgtcaacatcctcaacaagaaatctggtgtgtatgggctcaccaaaggctttagtagtgacatgcgtgacattgaagataatgctattgaaggtgatcctgtatgccgccttgcattcgatgtgtacgaatatcgtatcgcgaaatatattggcgcatacgctgcggccatgaacggtgttgacgcgatcgtctttaccgcaggagttggcgaaaatagcccgattatgcgcgaagaaattattgagaactacttgggctacttagggatcaagatcgataaagaagccaatgacttcaaaggtgaggagaagatcatttcaacgcccgattccaaagtgattgcgatggtagttccgaccaacgaggagctcatgatcgccaaagacacgaaagaaatcattgagaaagggttggacgagcttaagatctaatga

SEQ ID NO: 2630 - protein, 417 aa, synthetic construct
  REGION 1..417: note = Variant of acetate kinase
MHHHHHHGGSGMKVLVINSGSSSIKYQLLDMTNEKVLAKGLVERIGIDGSRIVHKVNGEKHVLEHEIKNHEIGLKLVLDLLTDEKYGVLKDLKEIDAVGHRVVHGGERFASSVKITDEVLKTIETLSFLAPLHNPAIIMGIKSSMKLLPGVPQVAVFDTAFHQKMPEKAYLYAIPYEYYEKYKIRRYGFHGTSHRYVSKRAAEIMGKPYDQLKIITVHVGNGASVAAVKNGVSVDTSMGFTPLEGLVMGTRSGDIDPAIVEFLEKEEGLSAKEVVNILNKKSGVYGLTKGFSSDMRDIEDNAIEGDPVCRLAFDVYEYRIAKYIGAYAAAMNGVDAIVFTAGVGENSPIMREEIIENYLGYLGIKIDKEANDFKGEEKIISTPDSKVIAMVVPTNEELMIAKDTKEIIEKGLDELKI

SEQ ID NO: 2631 - DNA, 1257 bp, synthetic construct
  misc_feature 1..1257: note = Variant of acetate kinase
  source 1..1257: mol_type = other DNA
atgcaccatcatcatcatcatggcggtagcggcatgaaagttctggtgattaattctggtagctcctccatcaaatatcagctcctcgatatgaccaacgaaaaggtattagcgaaaggcttggtcgagcgcattggcatcgacggttcgcgtatcgtgcataaagttaacggcgaaaaacacgtgctggaacatgagattaagaatcacgaaattggacttaaattggtcctggatcttcttacggacgaaaaatacggtgtgttgaaggatctcaaagaaatcgatgcagttgggcatcgcgtagtacatggcggcgagcgttttgccagtagcgtgaagattactgacgaagtcttaaagaccatcgagacgtgctcgttcttagctccgttacacaatccagcgaacattatgggtatcaagagcagcatgaaattattaccgggtgtgcctcaagttgccgtctttgatacagcgttccaccagaagatgccggagaaagcctatttgtacgcaatcccctatgagtactacgagaaatataaaattcgccgctatgggtttcatggaacctcacatcgttatgtgagtaaacgtgctgcggaaattatgggcaaaccgtacgatcagctcaagatcattaccgttcacgtgggtaacggcgcatcagttgcggcggtgaagaatggcgtatctgttgacacttccatgggtttcacaccacttgaaggtcttgtcatgggcacgcgcagcggcgatattgatccggccatcgtggaatttcttgagaaagaagaaggattgtcggccaaagaagtcgtcaacatcctcaacaagaaatctggtgtgtatgggctcaccaaaggctttagtagtgacatgcgtgacattgaagataatgctattgaaggtgatcctgtatgccgccttgcattcgatgtgtacgaatatcgtatcgcgaaatatattggcgcatacgctgcggccatgaacggtgttgacgcgatcgtctttaccgcaggagttggcgaaaatagcccgattatgcgcgaagaaattattgagaactacttgggctacttagggatcaagatcgataaagaagccaatgacttcaaaggtgaggagaagatcatttcaacgcccgattccaaagtgattgcgatggtagttccgaccaacgaggagctcatgatcgccaaagacacgaaagaaatcattgagaaagggttggacgagcttaagatctaatga

SEQ ID NO: 2632 - protein, 417 aa, synthetic construct
  REGION 1..417: note = Variant of acetate kinase
MHHHHHHGGSGMKVLVINSGSSSIKYQLLDMTNEKVLAKGLVERIGIDGSRIVHKVNGEKHVLEHEIKNHEIGLKLVLDLLTDEKYGVLKDLKEIDAVGHRVVHGGERFASSVKITDEVLKTIETCSFLAPLHNPANIMGIKSSMKLLPGVPQVAVFDTAFHQKMPEKAYLYAIPYEYYEKYKIRRYGFHGTSHRYVSKRAAEIMGKPYDQLKIITVHVGNGASVAAVKNGVSVDTSMGFTPLEGLVMGTRSGDIDPAIVEFLEKEEGLSAKEVVNILNKKSGVYGLTKGFSSDMRDIEDNAIEGDPVCRLAFDVYEYRIAKYIGAYAAAMNGVDAIVFTAGVGENSPIMREEIIENYLGYLGIKIDKEANDFKGEEKIISTPDSKVIAMVVPTNEELMIAKDTKEIIEKGLDELKI

SEQ ID NO: 2633 - DNA, 1257 bp, synthetic construct
  misc_feature 1..1257: note = Variant of acetate kinase
  source 1..1257: mol_type = other DNA
atgcaccatcatcatcatcatggcggtagcggcatgaaagttctggtgattaattctggtagctcctccatcaaatatcagctcctcgatatgaccaacgaaaaggtattagcgaaaggcttggtcgagcgcattggcatcgacggttcgcgtatcgtgcataaagttaacggcgaaaaacacgtgctggaacatgagattaagaatcacgaaattggacttaaattggtcctggatcttcttacggacgaaaaatacggtgtgttgaaggatctcaaagaaatcgatgcagttgggcatcgcgtagtacatggcggcgagcgttttgccagtagcgtgaagattactgacgaagtcttaaagaccatcgagacgttgtcgttcttagctccgttacacaatccagcgaacattatgggtatcaagagcagcatgaaattattaccgggtgtgcctcaagttgccgtctttgatacagcgttccaccagaagatgccggagaaagcctatttgtacgcaatcccctatgagtactacgagaaatataaaattcgccgctatgggtttcatggaacctcacatcgttatgtgagtaaacgtgctgcggaaattatgggcaaaccgtacgatcagctcaagatcattaccgttcacgtgggtaacggcgcatcagttgcggcggtgaagaatggcgtatctgttgacacttccatgggtttcacaccacttgaaggtcttgtcatgggcacgcgcagcggcgatattgatccggccatcgtggaatttcttgagaaagaagaaggattgtcggccaaagaagtcgtcaacatcctcaacaagaaatctggtgtgtatgggctcaccaaaggctttagtagtgacatgcgtgacattgaagataatgctattgaaggtgatcctgtatgccgccttgcattcgatgtgtacgaatatcgtatcgcgaaatatattggcgcatacgctgcggccatgaacggtgttgacgcgatcgtctttaccgcaggagttggcgaaaatagcccgattatgcgcgaagaaattattgagaactacttgggctacttagggatcaagatcgataaagaagccaatgacttcaaaggtgaggagaagatcatttcaacgcccgattccaaagtgattgcgatggtagttccgaccaacgaggagctcatgatcgccaaagaccttaaagaaatcattgagaaagggttggacgagcttaagatctaatga

SEQ ID NO: 2634 - protein, 417 aa, synthetic construct
  REGION 1..417: note = Variant of acetate kinase
MHHHHHHGGSGMKVLVINSGSSSIKYQLLDMTNEKVLAKGLVERIGIDGSRIVHKVNGEKHVLEHEIKNHEIGLKLVLDLLTDEKYGVLKDLKEIDAVGHRVVHGGERFASSVKITDEVLKTIETLSFLAPLHNPANIMGIKSSMKLLPGVPQVAVFDTAFHQKMPEKAYLYAIPYEYYEKYKIRRYGFHGTSHRYVSKRAAEIMGKPYDQLKIITVHVGNGASVAAVKNGVSVDTSMGFTPLEGLVMGTRSGDIDPAIVEFLEKEEGLSAKEVVNILNKKSGVYGLTKGFSSDMRDIEDNAIEGDPVCRLAFDVYEYRIAKYIGAYAAAMNGVDAIVFTAGVGENSPIMREEIIENYLGYLGIKIDKEANDFKGEEKIISTPDSKVIAMVVPTNEELMIAKDLKEIIEKGLDELKI

SEQ ID NO: 2635 - DNA, 1257 bp, synthetic construct
  misc_feature 1..1257: note = Variant of acetate kinase
  source 1..1257: mol_type = other DNA
atgcaccatcatcatcatcatggcggtagcggcatgaaagttctggtgattaattctggtagctcctccatcaaatatcagctcctcgatatgaccaacgaaaaggtattagcgaaaggcttggtcgagcgcattggcatcgacggttcgcgtatcgtgcataaagttaacggcgaaaaacacgtgctggaacatgagattaagaatcacgaaattggacttaaattggtcctggatcttcttacggacgaaaaatacggtgtgttgaaggatctcaaagaaatcgatgcagttgggcatcgcgtagtacatggcggcgagcgttttgccagtagcgtgaagattactgacgaagtcttaaagaccatcgagacgttgtcgttcttagctccgttacacaatccagcgaacattatgggtatcaagagcagcatgaaattattaccgggtgtgcctcaagttgccgtctttgatacagcgttccaccagaagatgccggagaaagcctatttgtacgcaatcccctatgagtactacgagaaatataaaattcgccgctatgggtttcatggaacctcacatcgttatgtgagtaaacgtgctgcggaaattatgggcaaaccgtacgatcagctcaagatcattaccgttcacgtgggtaacggcgcatcagttgcggcggtgaagaatggcgtatctgttgacacttccatgggtttcacaccacttgaaggtcttgtcatgggcacgcgcagcggcgatattgatccggccatcgtggaatttcttgagaaagaagaaggattgtcggccaaagaagtcgtcaacatcctcaacaagaaatctggtgtgctggggctcaccaaaggctttagtagtgacatgcgtgacattgaagataatgctattgaaggtgatcctgtatgccgccttgcattcgatgtgtacgaatatcgtatcgcgaaatatattggcgcatacgctgcggccatgaacggtgttgacgcgatcgtctttaccgcaggagttggcgaaaatagcccgattatgcgcgaagaaattattgagaactacttgggctacttagggatcaagatcgataaagaagccaatgacttcaaaggtgaggagaagatcatttcaacgcccgattccaaagtgattgcgatggtagttccgaccaacgaggagctcatgatcgccaaagacacgaaagaaatcattgagaaagggttggacgagcttaagatctaatga

SEQ ID NO: 2636 - protein, 417 aa, synthetic construct
  REGION 1..417: note = Variant of acetate kinase
MHHHHHHGGSGMKVLVINSGSSSIKYQLLDMTNEKVLAKGLVERIGIDGSRIVHKVNGEKHVLEHEIKNHEIGLKLVLDLLTDEKYGVLKDLKEIDAVGHRVVHGGERFASSVKITDEVLKTIETLSFLAPLHNPANIMGIKSSMKLLPGVPQVAVFDTAFHQKMPEKAYLYAIPYEYYEKYKIRRYGFHGTSHRYVSKRAAEIMGKPYDQLKIITVHVGNGASVAAVKNGVSVDTSMGFTPLEGLVMGTRSGDIDPAIVEFLEKEEGLSAKEVVNILNKKSGVLGLTKGFSSDMRDIEDNAIEGDPVCRLAFDVYEYRIAKYIGAYAAAMNGVDAIVFTAGVGENSPIMREEIIENYLGYLGIKIDKEANDFKGEEKIISTPDSKVIAMVVPTNEELMIAKDTKEIIEKGLDELKI

SEQ ID NO: 2637 - DNA, 1257 bp, synthetic construct
  misc_feature 1..1257: note = Variant of acetate kinase
  source 1..1257: mol_type = other DNA
atgcaccatcatcatcatcatggcggtagcggcatgaaagttctggtgattaattctggtagctcctccatcaaatatcagctcctcgatatgaccaacgaaaaggtattagcgaaaggcttggtcgagcgcattggcatcgacggttcgcgtatcgtgcataaagttaacggcgaaaaacacgtgctggaacatgagattaagaatcacgaaattggacttaaattggtcctggatcttcttacggacgaaaaatacggtgtgttgaaggatctcaaagaaatcgatgcagttgggcatcgcgtagtacatggcggcgagcgttttgccagtagcgtgaagattactgacgaagtcttaaagaccatcgagacgttgtcgttcttagctccgttacacaatccagcgaacattatgggtcgtaagagcagcatgaaattattaccgggtgtgcctcaagttgccgtctttgatacagcgttccaccagaagatgccggagaaagcctatttgtacgcaatcccctatgagtactacgagaaatataaaattcgccgctatgggtttcatggaacctcacatcgttatgtgagtaaacgtgctgcggaaattatgggcaaaccgtacgatcagctcaagatcattaccgttcacgtgggtaacggcgcatcagttgcggcggtgaagaatggcgtatctgttgacacttccatgggtttcacaccacttgaaggtcttgtcatgggcacgcgcagcggcgatattgatccggccatcgtggaatttcttgagaaagaagaaggattgtcggccaaagaagtcgtcaacatcctcaacaagaaatctggtgtgtatgggctcaccaaaggctttagtagtgacatgcgtgacattgaagataatgctattgaaggtgatcctgtatgccgccttgcattcgatgtgtacgaatatcgtatcgcgaaatatattggcgcatacgctgcggccatgaacggtgttgacgcgatcgtctttaccgcaggagttggcgaaaatagcccgattatgcgcgaagaaattattgagaactacttgggctacttagggatcaagatcgataaagaagccaatgacttcaaaggtgaggagaagatcatttcaacgcccgattccaaagtgattgcgatggtagttccgaccaacgaggagctcatgatcgccaaagacacgaaagaaatcattgagaaagggttggacgagcttaagatctaatga

SEQ ID NO: 2638 - protein, 417 aa, synthetic construct
  REGION 1..417: note = Variant of acetate kinase
MHHHHHHGGSGMKVLVINSGSSSIKYQLLDMTNEKVLAKGLVERIGIDGSRIVHKVNGEKHVLEHEIKNHEIGLKLVLDLLTDEKYGVLKDLKEIDAVGHRVVHGGERFASSVKITDEVLKTIETLSFLAPLHNPANIMGRKSSMKLLPGVPQVAVFDTAFHQKMPEKAYLYAIPYEYYEKYKIRRYGFHGTSHRYVSKRAAEIMGKPYDQLKIITVHVGNGASVAAVKNGVSVDTSMGFTPLEGLVMGTRSGDIDPAIVEFLEKEEGLSAKEVVNILNKKSGVYGLTKGFSSDMRDIEDNAIEGDPVCRLAFDVYEYRIAKYIGAYAAAMNGVDAIVFTAGVGENSPIMREEIIENYLGYLGIKIDKEANDFKGEEKIISTPDSKVIAMVVPTNEELMIAKDTKEIIEKGLDELKI

SEQ ID NO: 2639 - DNA, 1257 bp, synthetic construct
  misc_feature 1..1257: note = Variant of acetate kinase
  source 1..1257: mol_type = other DNA
atgcaccatcatcatcatcatggcggtagcggcatgaaagttctggtgattaattgcggtagctcctccatcaaatatcagctcctcgatatgaccaacgaaaaggtattagcgaaaggcttggtcgagcgcattggcatcgacggttcgcgtatcgtgcataaagttaacggcgaaaaacacgtgctggaacatgagattaagaatcacgaaattggacttaaattggtcctggatcttcttacggacgaaaaatacggtgtgttgaaggatctcaaagaaatcgatgcagttgggcatcgcgtagtacatggcggcgagcgttttgccagtagcgtgaagattactgacgaagtcttaaagaccatcgagacgttgtcgttcttagctccgttacacaatccagcgaacattatgggtatcaagagcagcatgaaattattaccgggtgtgcctcaagttgccgtctttgatacagcgttccaccagaagatgccggagaaagcctatttgtacgcaatcccctatgagtactacgagaaatataaaattcgccgctatgggtttcatggaacctcacatcgttatgtgagtaaacgtgctgcggaaattatgggcaaaccgtacgatcagctcaagatcattaccgttcacgtgggtaacggcgcatcagttgcggcggtgaagaatggcgtatctgttgacacttccatgggtttcacaccacttgaaggtcttgtcatgggcacgcgcagcggcgatattgatccggccatcgtggaatttcttgagaaagaagaaggattgtcggccaaagaagtcgtcaacatcctcaacaagaaatctggtgtgtatgggctcaccaaaggctttagtagtgacatgcgtgacattgaagataatgctattgaaggtgatcctgtatgccgccttgcattcgatgtgtacgaatatcgtatcgcgaaatatattggcgcatacgctgcggccatgaacggtgttgacgcgatcgtctttaccgcaggagttggcgaaaatagcccgattatgcgcgaagaaattattgagaactacttgggctacttagggatcaagatcgataaagaagccaatgacttcaaaggtgaggagaagatcatttcaacgcccgattccaaagtgattgcgatggtagttccgaccaacgaggagctcatgatcgccaaagacacgaaagaaatcattgagaaagggttggacgagcttaagatctaatga

SEQ ID NO: 2640 - protein, 417 aa, synthetic construct
  REGION 1..417: note = Variant of acetate kinase
MHHHHHHGGSGMKVLVINCGSSSIKYQLLDMTNEKVLAKGLVERIGIDGSRIVHKVNGEKHVLEHEIKNHEIGLKLVLDLLTDEKYGVLKDLKEIDAVGHRVVHGGERFASSVKITDEVLKTIETLSFLAPLHNPANIMGIKSSMKLLPGVPQVAVFDTAFHQKMPEKAYLYAIPYEYYEKYKIRRYGFHGTSHRYVSKRAAEIMGKPYDQLKIITVHVGNGASVAAVKNGVSVDTSMGFTPLEGLVMGTRSGDIDPAIVEFLEKEEGLSAKEVVNILNKKSGVYGLTKGFSSDMRDIEDNAIEGDPVCRLAFDVYEYRIAKYIGAYAAAMNGVDAIVFTAGVGENSPIMREEIIENYLGYLGIKIDKEANDFKGEEKIISTPDSKVIAMVVPTNEELMIAKDTKEIIEKGLDELKI

SEQ ID NO: 2641 - DNA, 1257 bp, synthetic construct
  misc_feature 1..1257: note = Variant of acetate kinase
  source 1..1257: mol_type = other DNA
atgcaccatcatcatcatcatggcggtagcggcatgaaagttctggtgattaattctggtagctcctccatcaaatatcagctcctcgatatgaccaacgaaaaggtattagcgaaaggcttggtcgagcgcattggcatcgacggttcgcgtatcgtgcataaagttaacggcgaaaaacacgtgctggaacatgagattaagaatcacgaaattggacttaaattggtcctggatcttcttacggacgaaaaatacggtgtgttgaaggatctcaaagaaatcgatgcagttgggcatcgcgtagtacatggcggcgagcgttttgccagtagcgtgaagattactgacgaagtcttaaagaccatcgagacgttgtcgttcttagctccgttacacaatccagcggctattatgggtatcaagagcagcatgaaattattaccgggtgtgcctcaagttgccgtctttgatacagcgttccaccagaagatgccggagaaagcctatttgtacgcaatcccctatgagtactacgagaaatataaaattcgccgctatgggtttcatggaacctcacatcgttatgtgagtaaacgtgctgcggaaattatgggcaaaccgtacgatcagctcaagatcattaccgttcacgtgggtaacggcgcatcagttgcggcggtgaagaatggcgtatctgttgacacttccatgggtttcacaccacttgaaggtcttgtcatgggcacgcgcagcggcgatattgatccggccatcgtggaatttcttgagaaagaagaaggattgtcggccaaagaagtcgtcaacatcctcaacaagaaatctggtgtgtatgggctcaccaaaggctttagtagtgacatgcgtgacattgaagataatgctattgaaggtgatcctgtatgccgccttgcattcgatgtgtacgaatatcgtatcgcgaaatatattggcgcatacgctgcggccatgaacggtgttgacgcgatcgtctttaccgcaggagttggcgaaaatagcccgattatgcgcgaagaaattattgagaactacttgggctacttagggatcaagatcgataaagaagccaatgacttcaaaggtgaggagaagatcatttcaacgcccgattccaaagtgattgcgatggtagttccgaccaacgaggagctcatgatcgccaaagacacgaaagaaatcattgagaaagggttggacgagcttaagatctaatga

SEQ ID NO: 2642 - protein, 417 aa, synthetic construct
  REGION 1..417: note = Variant of acetate kinase
MHHHHHHGGSGMKVLVINSGSSSIKYQLLDMTNEKVLAKGLVERIGIDGSRIVHKVNGEKHVLEHEIKNHEIGLKLVLDLLTDEKYGVLKDLKEIDAVGHRVVHGGERFASSVKITDEVLKTIETLSFLAPLHNPAAIMGIKSSMKLLPGVPQVAVFDTAFHQKMPEKAYLYAIPYEYYEKYKIRRYGFHGTSHRYVSKRAAEIMGKPYDQLKIITVHVGNGASVAAVKNGVSVDTSMGFTPLEGLVMGTRSGDIDPAIVEFLEKEEGLSAKEVVNILNKKSGVYGLTKGFSSDMRDIEDNAIEGDPVCRLAFDVYEYRIAKYIGAYAAAMNGVDAIVFTAGVGENSPIMREEIIENYLGYLGIKIDKEANDFKGEEKIISTPDSKVIAMVVPTNEELMIAKDTKEIIEKGLDELKI

SEQ ID NO: 2643 - DNA, 1257 bp, synthetic construct
  misc_feature 1..1257: note = Variant of acetate kinase
  source 1..1257: mol_type = other DNA
atgcaccatcatcatcatcatggcggtagcggcatgaaagttctggtgattaattctggtagctcctccatcaaatatcagctcctcgatatgaccaacgaaaaggtattagcgaaaggcttggtcgagcgcattggcatcgacggttcgcgtatcgtgcataaagttaacggcgaaaaacacgtgctggaacatgagattaagaatcacgaaattggacttaaattggtcctggatcttcttacggacgaaaaatacggtgtgttgaaggatctcaaagaaatcgatgcagttgggcatcgcgtagtacatggcggcgagcgttttgccagtagcgtgaagattactgacgaagtcttaaagaccatcgagacgttgtcgttcttagctccgttacacaatccaatgaacattatgggtatcaagagcagcatgaaattattaccgggtgtgcctcaagttgccgtctttgatacagcgttccaccagaagatgccggagaaagcctatttgtacgcaatcccctatgagtactacgagaaatataaaattcgccgctatgggtttcatggaacctcacatcgttatgtgagtaaacgtgctgcggaaattatgggcaaaccgtacgatcagctcaagatcattaccgttcacgtgggtaacggcgcatcagttgcggcggtgaagaatggcgtatctgttgacacttccatgggtttcacaccacttgaaggtcttgtcatgggcacgcgcagcggcgatattgatccggccatcgtggaatttcttgagaaagaagaaggattgtcggccaaagaagtcgtcaacatcctcaacaagaaatctggtgtgtatgggctcaccaaaggctttagtagtgacatgcgtgacattgaagataatgctattgaaggtgatcctgtatgccgccttgcattcgatgtgtacgaatatcgtatcgcgaaatatattggcgcatacgctgcggccatgaacggtgttgacgcgatcgtctttaccgcaggagttggcgaaaatagcccgattatgcgcgaagaaattattgagaactacttgggctacttagggatcaagatcgataaagaagccaatgacttcaaaggtgaggagaagatcatttcaacgcccgattccaaagtgattgcgatggtagttccgaccaacgaggagctcatgatcgccaaagacacgaaagaaatcattgagaaagggttggacgagcttaagatctaatga

SEQ ID NO: 2644 - protein, 417 aa, synthetic construct
  REGION 1..417: note = Variant of acetate kinase
MHHHHHHGGSGMKVLVINSGSSSIKYQLLDMTNEKVLAKGLVERIGIDGSRIVHKVNGEKHVLEHEIKNHEIGLKLVLDLLTDEKYGVLKDLKEIDAVGHRVVHGGERFASSVKITDEVLKTIETLSFLAPLHNPMNIMGIKSSMKLLPGVPQVAVFDTAFHQKMPEKAYLYAIPYEYYEKYKIRRYGFHGTSHRYVSKRAAEIMGKPYDQLKIITVHVGNGASVAAVKNGVSVDTSMGFTPLEGLVMGTRSGDIDPAIVEFLEKEEGLSAKEVVNILNKKSGVYGLTKGFSSDMRDIEDNAIEGDPVCRLAFDVYEYRIAKYIGAYAAAMNGVDAIVFTAGVGENSPIMREEIIENYLGYLGIKIDKEANDFKGEEKIISTPDSKVIAMVVPTNEELMIAKDTKEIIEKGLDELKI

SEQ ID NO: 2645 - DNA, 1257 bp, synthetic construct
  misc_feature 1..1257: note = Variant of acetate kinase
  source 1..1257: mol_type = other DNA
atgcaccatcatcatcatcatggcggtagcggcatgaaagttctggtgattaattctggtagctcctccatcaaatatcagctcctcgatatgaccaacgaaaaggtattagcgaaaggcttggtcgagcgcattctgatcgacggttcgcgtatcgtgcataaagttaacggcgaaaaacacgtgctggaacatgagattaagaatcacgaaattggacttaaattggtcctggatcttcttacggacgaaaaatacggtgtgttgaaggatctcaaagaaatcgatgcagttgggcatcgcgtagtacatggcggcgagcgttttgccagtagcgtgaagattactgacgaagtcttaaagaccatcgagacgttgtcgttcttagctccgttacacaatccagcgaacattatgggtatcaagagcagcatgaaattattaccgggtgtgcctcaagttgccgtctttgatacagcgttccaccagaagatgccggagaaagcctatttgtacgcaatcccctatgagtactacgagaaatataaaattcgccgctatgggtttcatggaacctcacatcgttatgtgagtaaacgtgctgcggaaattatgggcaaaccgtacgatcagctcaagatcattaccgttcacgtgggtaacggcgcatcagttgcggcggtgaagaatggcgtatctgttgacacttccatgggtttcacaccacttgaaggtcttgtcatgggcacgcgcagcggcgatattgatccggccatcgtggaatttcttgagaaagaagaaggattgtcggccaaagaagtcgtcaacatcctcaacaagaaatctggtgtgtatgggctcaccaaaggctttagtagtgacatgcgtgacattgaagataatgctattgaaggtgatcctgtatgccgccttgcattcgatgtgtacgaatatcgtatcgcgaaatatattggcgcatacgctgcggccatgaacggtgttgacgcgatcgtctttaccgcaggagttggcgaaaatagcccgattatgcgcgaagaaattattgagaactacttgggctacttagggatcaagatcgataaagaagccaatgacttcaaaggtgaggagaagatcatttcaacgcccgattccaaagtgattgcgatggtagttccgaccaacgaggagctcatgatcgccaaagacacgaaagaaatcattgagaaagggttggacgagcttaagatctaatga

SEQ ID NO: 2646 - protein, 417 aa, synthetic construct
  REGION 1..417: note = Variant of acetate kinase
MHHHHHHGGSGMKVLVINSGSSSIKYQLLDMTNEKVLAKGLVERILIDGSRIVHKVNGEKHVLEHEIKNHEIGLKLVLDLLTDEKYGVLKDLKEIDAVGHRVVHGGERFASSVKITDEVLKTIETLSFLAPLHNPANIMGIKSSMKLLPGVPQVAVFDTAFHQKMPEKAYLYAIPYEYYEKYKIRRYGFHGTSHRYVSKRAAEIMGKPYDQLKIITVHVGNGASVAAVKNGVSVDTSMGFTPLEGLVMGTRSGDIDPAIVEFLEKEEGLSAKEVVNILNKKSGVYGLTKGFSSDMRDIEDNAIEGDPVCRLAFDVYEYRIAKYIGAYAAAMNGVDAIVFTAGVGENSPIMREEIIENYLGYLGIKIDKEANDFKGEEKIISTPDSKVIAMVVPTNEELMIAKDTKEIIEKGLDELKI

SEQ ID NO: 2647 - DNA, 1257 bp, synthetic construct
  misc_feature 1..1257: note = Variant of acetate kinase
  source 1..1257: mol_type = other DNA
atgcaccatcatcatcatcatggcggtagcggcatgaaagttctggtgattaattctggtagctcctccatcaaatatcagctcctcgatatgaccaacgaaaaggtattagcgaaaggcttggtcgagcgcattggcatcgacggttcgcgtatcgtgcataaagttaacggcgaaaaacacgtgctggaacatgagattaagaatcacgaaattggacttaaattggtcctggatcttcttacggacgaaaaatacggtgtgttgaaggatctcaaagaaatcgatgcagttgggcatcgcgtagtacatggcggcgagcgttttgccagtagcgtgaagattactgacgaagtcttaaagaccatcgagacgttgtcgttcttagctccgttacacaatccagcgaacattatgggtatctttagcagcatgaaattattaccgggtgtgcctcaagttgccgtctttgatacagcgttccaccagaagatgccggagaaagcctatttgtacgcaatcccctatgagtactacgagaaatataaaattcgccgctatgggtttcatggaacctcacatcgttatgtgagtaaacgtgctgcggaaattatgggcaaaccgtacgatcagctcaagatcattaccgttcacgtgggtaacggcgcatcagttgcggcggtgaagaatggcgtatctgttgacacttccatgggtttcacaccacttgaaggtcttgtcatgggcacgcgcagcggcgatattgatccggccatcgtggaatttcttgagaaagaagaaggattgtcggccaaagaagtcgtcaacatcctcaacaagaaatctggtgtgtatgggctcaccaaaggctttagtagtgacatgcgtgacattgaagataatgctattgaaggtgatcctgtatgccgccttgcattcgatgtgtacgaatatcgtatcgcgaaatatattggcgcatacgctgcggccatgaacggtgttgacgcgatcgtctttaccgcaggagttggcgaaaatagcccgattatgcgcgaagaaattattgagaactacttgggctacttagggatcaagatcgataaagaagccaatgacttcaaaggtgaggagaagatcatttcaacgcccgattccaaagtgattgcgatggtagttccgaccaacgaggagctcatgatcgccaaagacacgaaagaaatcattgagaaagggttggacgagcttaagatctaatga

SEQ ID NO: 2648 - protein, 417 aa, synthetic construct
  REGION 1..417: note = Variant of acetate kinase
MHHHHHHGGSGMKVLVINSGSSSIKYQLLDMTNEKVLAKGLVERIGIDGSRIVHKVNGEKHVLEHEIKNHEIGLKLVLDLLTDEKYGVLKDLKEIDAVGHRVVHGGERFASSVKITDEVLKTIETLSFLAPLHNPANIMGIFSSMKLLPGVPQVAVFDTAFHQKMPEKAYLYAIPYEYYEKYKIRRYGFHGTSHRYVSKRAAEIMGKPYDQLKIITVHVGNGASVAAVKNGVSVDTSMGFTPLEGLVMGTRSGDIDPAIVEFLEKEEGLSAKEVVNILNKKSGVYGLTKGFSSDMRDIEDNAIEGDPVCRLAFDVYEYRIAKYIGAYAAAMNGVDAIVFTAGVGENSPIMREEIIENYLGYLGIKIDKEANDFKGEEKIISTPDSKVIAMVVPTNEELMIAKDTKEIIEKGLDELKI

SEQ ID NO: 2649 - DNA, 1257 bp, synthetic construct
  misc_feature 1..1257: note = Variant of acetate kinase
  source 1..1257: mol_type = other DNA
atgcaccatcatcatcatcatggcggtagcggcatgaaagttattgtgattaattctggtagctcctccatcaaatatcagctcctcgatatgaccaacgaaaaggtattagcgaaaggcttggtcgagcgcattggcatcgacggttcgcgtatcgtgcataaagttaacggcgaaaaacacgtgctggaacatgagattaagaatcacgaaattggacttaaattggtcctggatcttcttacggacgaaaaatacggtgtgttgaaggatctcaaagaaatcgatgcagttgggcatcgcgtagtacatggcggcgagcgttttgccagtagcgtgaagattactgacgaagtcttaaagaccatcgagacgttgtcgttcttagctccgttacacaatccagcgaacattatgggtatcaagagcagcatgaaattattaccgggtgtgcctcaagttgccgtctttgatacagcgttccaccagaagatgccggagaaagcctatttgtacgcaatcccctatgagtactacgagaaatataaaattcgccgctatgggtttcatggaacctcacatcgttatgtgagtaaacgtgctgcggaaattatgggcaaaccgtacgatcagctcaagatcattaccgttcacgtgggtaacggcgcatcagttgcggcggtgaagaatggcgtatctgttgacacttccatgggtttcacaccacttgaaggtcttgtcatgggcacgcgcagcggcgatattgatccggccatcgtggaatttcttgagaaagaagaaggattgtcggccaaagaagtcgtcaacatcctcaacaagaaatctggtgtgtatgggctcaccaaaggctttagtagtgacatgcgtgacattgaagataatgctattgaaggtgatcctgtatgccgccttgcattcgatgtgtacgaatatcgtatcgcgaaatatattggcgcatacgctgcggccatgaacggtgttgacgcgatcgtctttaccgcaggagttggcgaaaatagcccgattatgcgcgaagaaattattgagaactacttgggctacttagggatcaagatcgataaagaagccaatgacttcaaaggtgaggagaagatcatttcaacgcccgattccaaagtgattgcgatggtagttccgaccaacgaggagctcatgatcgccaaagacacgaaagaaatcattgagaaagggttggacgagcttaagatctaatga

SEQ ID NO: 2650 - protein, 417 aa, synthetic construct
  REGION 1..417: note = Variant of acetate kinase
MHHHHHHGGSGMKVIVINSGSSSIKYQLLDMTNEKVLAKGLVERIGIDGSRIVHKVNGEKHVLEHEIKNHEIGLKLVLDLLTDEKYGVLKDLKEIDAVGHRVVHGGERFASSVKITDEVLKTIETLSFLAPLHNPANIMGIKSSMKLLPGVPQVAVFDTAFHQKMPEKAYLYAIPYEYYEKYKIRRYGFHGTSHRYVSKRAAEIMGKPYDQLKIITVHVGNGASVAAVKNGVSVDTSMGFTPLEGLVMGTRSGDIDPAIVEFLEKEEGLSAKEVVNILNKKSGVYGLTKGFSSDMRDIEDNAIEGDPVCRLAFDVYEYRIAKYIGAYAAAMNGVDAIVFTAGVGENSPIMREEIIENYLGYLGIKIDKEANDFKGEEKIISTPDSKVIAMVVPTNEELMIAKDTKEIIEKGLDELKI

SEQ ID NO: 2651 - DNA, 1257 bp, synthetic construct
  misc_feature 1..1257: note = Variant of acetate kinase
  source 1..1257: mol_type = other DNA
atgcaccatcatcatcatcatggcggtagcggcatgaaagttctggtgattaattctggtagctcctccatcaaatatcagctcctcgatatgaccaacgaaaaggtattagcgaaaggcttggtcgagcgcattggcatcgacggttcgcgtatcgtgcataaagttaacggcgaaaaacacgtgctggaacatgagattaagaatcacgaaattggacttaaattggtcctggatcttcttacggacgaaaaatacggtgtgttgaaggatctcaaagaaatcgatgcagttgggcatcgcgtagtacatggcggcgagcgttttgccagtagcgtgaagattactgacgaagtcttaaagaccatcgagacgttgtcgttcttagctccgttacacaatccagcgaacattatgggtatcaagagcagcatgaaattattaccgggtgtgcctcaagttgccgtctttgatacagcgttccaccagaagatgccggagaaagcctatttgtacgcaatcccctatgagtactacgagaaatataaaattcgccgctatgggtttcatggaacctcacatcgttatgtgagtaaacgtgctgcggaaattatgggcaaaccgtacgatcagctcaagatcattaccgttcacgtgggtaacggcgcatcagttgcggcggtgaagaatggcgtatctgttgacacttccatgggtttcacaccacttgaaggtcttgtcatgggcacgcgcagcggcgatattgatccggccatcgtggaatttcttgagaaagaagaaggattgtcggccaaagaagtcgtcagtatcctcaacaagaaatctggtgtgtatgggctcaccaaaggctttagtagtgacatgcgtgacattgaagataatgctattgaaggtgatcctgtatgccgccttgcattcgatgtgtacgaatatcgtatcgcgaaatatattggcgcatacgctgcggccatgaacggtgttgacgcgatcgtctttaccgcaggagttggcgaaaatagcccgattatgcgcgaagaaattattgagaactacttgggctacttagggatcaagatcgataaagaagccaatgacttcaaaggtgaggagaagatcatttcaacgcccgattccaaagtgattgcgatggtagttccgaccaacgaggagctcatgatcgccaaagacacgaaagaaatcattgagaaagggttggacgagcttaagatctaatga

SEQ ID NO: 2652 - protein, 417 aa, synthetic construct
  REGION 1..417: note = Variant of acetate kinase
MHHHHHHGGSGMKVLVINSGSSSIKYQLLDMTNEKVLAKGLVERIGIDGSRIVHKVNGEKHVLEHEIKNHEIGLKLVLDLLTDEKYGVLKDLKEIDAVGHRVVHGGERFASSVKITDEVLKTIETLSFLAPLHNPANIMGIKSSMKLLPGVPQVAVFDTAFHQKMPEKAYLYAIPYEYYEKYKIRRYGFHGTSHRYVSKRAAEIMGKPYDQLKIITVHVGNGASVAAVKNGVSVDTSMGFTPLEGLVMGTRSGDIDPAIVEFLEKEEGLSAKEVVSILNKKSGVYGLTKGFSSDMRDIEDNAIEGDPVCRLAFDVYEYRIAKYIGAYAAAMNGVDAIVFTAGVGENSPIMREEIIENYLGYLGIKIDKEANDFKGEEKIISTPDSKVIAMVVPTNEELMIAKDTKEIIEKGLDELKI

SEQ ID NO: 2653 - DNA, 1257 bp, synthetic construct
  misc_feature 1..1257: note = Variant of acetate kinase
  source 1..1257: mol_type = other DNA
atgcaccatcatcatcatcatggcggtagcggcatgaaagttctggtgattaattctggtagctcctccatcaaatatcagctcctcgatatgaccaacgaaaaggtattagcgaaaggcttggtcgagcgcattggcatcgacggttcgcgtatcgtgcataaagttaacggcgaaaaacacgtgctggaacatgagattaagaatcacgaaattggacttaaattggtcctggatcttcttacggacgaaaaatacggtgtgttgaaggatctcaaagaaatcgatgcagttgggcatcgcgtagtacatggcggcgagcgttttgccagtagcgtgaagattactgacgaagtcttaaagaccatcgagacgttgtcgttcttagctccgttacacaatccagcgaacattatgggtatcaagagcagcgataaattattaccgggtgtgcctcaagttgccgtctttgatacagcgttccaccagaagatgccggagaaagcctatttgtacgcaatcccctatgagtactacgagaaatataaaattcgccgctatgggtttcatggaacctcacatcgttatgtgagtaaacgtgctgcggaaattatgggcaaaccgtacgatcagctcaagatcattaccgttcacgtgggtaacggcgcatcagttgcggcggtgaagaatggcgtatctgttgacacttccatgggtttcacaccacttgaaggtcttgtcatgggcacgcgcagcggcgatattgatccggccatcgtggaatttcttgagaaagaagaaggattgtcggccaaagaagtcgtcaacatcctcaacaagaaatctggtgtgtatgggctcaccaaaggctttagtagtgacatgcgtgacattgaagataatgctattgaaggtgatcctgtatgccgccttgcattcgatgtgtacgaatatcgtatcgcgaaatatattggcgcatacgctgcggccatgaacggtgttgacgcgatcgtctttaccgcaggagttggcgaaaatagcccgattatgcgcgaagaaattattgagaactacttgggctacttagggatcaagatcgataaagaagccaatgacttcaaaggtgaggagaagatcatttcaacgcccgattccaaagtgattgcgatggtagttccgaccaacgaggagctcatgatcgccaaagacacgaaagaaatcattgagaaagggttggacgagcttaagatctaatga

SEQ ID NO: 2654 - protein, 417 aa, synthetic construct
  REGION 1..417: note = Variant of acetate kinase
MHHHHHHGGSGMKVLVINSGSSSIKYQLLDMTNEKVLAKGLVERIGIDGSRIVHKVNGEKHVLEHEIKNHEIGLKLVLDLLTDEKYGVLKDLKEIDAVGHRVVHGGERFASSVKITDEVLKTIETLSFLAPLHNPANIMGIKSSDKLLPGVPQVAVFDTAFHQKMPEKAYLYAIPYEYYEKYKIRRYGFHGTSHRYVSKRAAEIMGKPYDQLKIITVHVGNGASVAAVKNGVSVDTSMGFTPLEGLVMGTRSGDIDPAIVEFLEKEEGLSAKEVVNILNKKSGVYGLTKGFSSDMRDIEDNAIEGDPVCRLAFDVYEYRIAKYIGAYAAAMNGVDAIVFTAGVGENSPIMREEIIENYLGYLGIKIDKEANDFKGEEKIISTPDSKVIAMVVPTNEELMIAKDTKEIIEKGLDELKI

SEQ ID NO: 2655 - DNA, 1257 bp, synthetic construct
  misc_feature 1..1257: note = Variant of acetate kinase
  source 1..1257: mol_type = other DNA
atgcaccatcatcatcatcatggcggtagcggcatgaaagttctggtgattaattctggtagctcctccatcaaatatcagctcctcgatatgaccaacgaaaaggtattagcgaaaggcttggtcgagcgcattggcatcgacggttcgcgtatcgtgcataaagttaacggcgaaaaacacgtgctggaacatgagattaagaatcacgaaattggacttaaattggtcctggatcttcttacggacgaaaaatacggtgtgttgaaggatctcaaagaaatcgatgcagttgggcatcgcgtagtacatggcggcgagcgttttgccagtagcgtgaaggggactgacgaagtcttaaagaccatcgagacgttgtcgttcttagctccgttacacaatccagcgaacattatgggtatcaagagcagcatgaaattattaccgggtgtgcctcaagttgccgtctttgatacagcgttccaccagaagatgccggagaaagcctatttgtacgcaatcccctatgagtactacgagaaatataaaattcgccgctatgggtttcatggaacctcacatcgttatgtgagtaaacgtgctgcggaaattatgggcaaaccgtacgatcagctcaagatcattaccgttcacgtgggtaacggcgcatcagttgcggcggtgaagaatggcgtatctgttgacacttccatgggtttcacaccacttgaaggtcttgtcatgggcacgcgcagcggcgatattgatccggccatcgtggaatttcttgagaaagaagaaggattgtcggccaaagaagtcgtcaacatcctcaacaagaaatctggtgtgtatgggctcaccaaaggctttagtagtgacatgcgtgacattgaagataatgctattgaaggtgatcctgtatgccgccttgcattcgatgtgtacgaatatcgtatcgcgaaatatattggcgcatacgctgcggccatgaacggtgttgacgcgatcgtctttaccgcaggagttggcgaaaatagcccgattatgcgcgaagaaattattgagaactacttgggctacttagggatcaagatcgataaagaagccaatgacttcaaaggtgaggagaagatcatttcaacgcccgattccaaagtgattgcgatggtagttccgaccaacgaggagctcatgatcgccaaagacacgaaagaaatcattgagaaagggttggacgagcttaagatctaatga

SEQ ID NO: 2656 - protein, 417 aa, synthetic construct
  REGION 1..417: note = Variant of acetate kinase
MHHHHHHGGSGMKVLVINSGSSSIKYQLLDMTNEKVLAKGLVERIGIDGSRIVHKVNGEKHVLEHEIKNHEIGLKLVLDLLTDEKYGVLKDLKEIDAVGHRVVHGGERFASSVKGTDEVLKTIETLSFLAPLHNPANIMGIKSSMKLLPGVPQVAVFDTAFHQKMPEKAYLYAIPYEYYEKYKIRRYGFHGTSHRYVSKRAAEIMGKPYDQLKIITVHVGNGASVAAVKNGVSVDTSMGFTPLEGLVMGTRSGDIDPAIVEFLEKEEGLSAKEVVNILNKKSGVYGLTKGFSSDMRDIEDNAIEGDPVCRLAFDVYEYRIAKYIGAYAAAMNGVDAIVFTAGVGENSPIMREEIIENYLGYLGIKIDKEANDFKGEEKIISTPDSKVIAMVVPTNEELMIAKDTKEIIEKGLDELKI

SEQ ID NO: 2657 - DNA, 1257 bp, synthetic construct
  misc_feature 1..1257: note = Variant of acetate kinase
  source 1..1257: mol_type = other DNA
atgcaccatcatcatcatcatggcggtagcggcatgaaagttctggtgattaattctggtagctcctccatcaaatatcagctcctcgatatgaccaacgaaaaggtattagcgaaaggcttggtcgagcgcattcagatcgacggttcgcgtatcgtgcataaagttaacggcgaaaaacacgtgctggaacatgagattaagaatcacgaaattggacttaaattggtcctggatcttcttacggacgaaaaatacggtgtgttgaaggatctcaaagaaatcgatgcagttgggcatcgcgtagtacatggcggcgagcgttttgccagtagcgtgaagattactgacgaagtcttaaagaccatcgagacgttgtcgttcttagctccgttacacaatccagcgaacattatgggtatcaagagcagcatgaaattattaccgggtgtgcctcaagttgccgtctttgatacagcgttccaccagaagatgccggagaaagcctatttgtacgcaatcccctatgagtactacgagaaatataaaattcgccgctatgggtttcatggaacctcacatcgttatgtgagtaaacgtgctgcggaaattatgggcaaaccgtacgatcagctcaagatcattaccgttcacgtgggtaacggcgcatcagttgcggcggtgaagaatggcgtatctgttgacacttccatgggtttcacaccacttgaaggtcttgtcatgggcacgcgcagcggcgatattgatccggccatcgtggaatttcttgagaaagaagaaggattgtcggccaaagaagtcgtcaacatcctcaacaagaaatctggtgtgtatgggctcaccaaaggctttagtagtgacatgcgtgacattgaagataatgctattgaaggtgatcctgtatgccgccttgcattcgatgtgtacgaatatcgtatcgcgaaatatattggcgcatacgctgcggccatgaacggtgttgacgcgatcgtctttaccgcaggagttggcgaaaatagcccgattatgcgcgaagaaattattgagaactacttgggctacttagggatcaagatcgataaagaagccaatgacttcaaaggtgaggagaagatcatttcaacgcccgattccaaagtgattgcgatggtagttccgaccaacgaggagctcatgatcgccaaagacacgaaagaaatcattgagaaagggttggacgagcttaagatctaatga

SEQ ID NO: 2658 - protein, 417 aa, synthetic construct
  REGION 1..417: note = Variant of acetate kinase
MHHHHHHGGSGMKVLVINSGSSSIKYQLLDMTNEKVLAKGLVERIQIDGSRIVHKVNGEKHVLEHEIKNHEIGLKLVLDLLTDEKYGVLKDLKEIDAVGHRVVHGGERFASSVKITDEVLKTIETLSFLAPLHNPANIMGIKSSMKLLPGVPQVAVFDTAFHQKMPEKAYLYAIPYEYYEKYKIRRYGFHGTSHRYVSKRAAEIMGKPYDQLKIITVHVGNGASVAAVKNGVSVDTSMGFTPLEGLVMGTRSGDIDPAIVEFLEKEEGLSAKEVVNILNKKSGVYGLTKGFSSDMRDIEDNAIEGDPVCRLAFDVYEYRIAKYIGAYAAAMNGVDAIVFTAGVGENSPIMREEIIENYLGYLGIKIDKEANDFKGEEKIISTPDSKVIAMVVPTNEELMIAKDTKEIIEKGLDELKI

SEQ ID NO: 2659 - DNA, 1257 bp, synthetic construct
  misc_feature 1..1257: note = Variant of acetate kinase
  source 1..1257: mol_type = other DNA
atgcaccatcatcatcatcatggcggtagcggcatgaaagttctggtgattaattctggtagctcctccatcaaatatcagctcctcgatatgaccaacgaaaaggtattagcgaaaggcttggtcgagcgcattggcatcgacggttcgcgtatcgtgcataaagttaacggcgaaaaacacgtgctggaacatgagattaagaatcacgaaattggacttaaattggtcctggatcttcttacggacgaaaaatacggtgtgttgaaggatctcaaagaaatcgatgcagttgggcatcgcgtagtacatggcggcgagcgttttgccagtagcgtgaagattactgacgaagtcttaaagaccatcgagacgttgtcgttcttagctccgttacacaatccagcgaacattatgggtatcaagagcagcatgaaattattaccgggtgtgcctcaagttgccgtctttgatacagcgttccaccagaagatgccggagaaagcctatttgtacgcaatcccctatgagtactacgagaaatataaaattcgccgctatgggtttcatggaacctcacatcgttatgtgagtaaacgtgctgcggaaattctgggcaaaccgtacgatcagctcaagatcattaccgttcacgtgggtaacggcgcatcagttgcggcggtgaagaatggcgtatctgttgacacttccatgggtttcacaccacttgaaggtcttgtcatgggcacgcgcagcggcgatattgatccggccatcgtggaatttcttgagaaagaagaaggattgtcggccaaagaagtcgtcaacatcctcaacaagaaatctggtgtgtatgggctcaccaaaggctttagtagtgacatgcgtgacattgaagataatgctattgaaggtgatcctgtatgccgccttgcattcgatgtgtacgaatatcgtatcgcgaaatatattggcgcatacgctgcggccatgaacggtgttgacgcgatcgtctttaccgcaggagttggcgaaaatagcccgattatgcgcgaagaaattattgagaactacttgggctacttagggatcaagatcgataaagaagccaatgacttcaaaggtgaggagaagatcatttcaacgcccgattccaaagtgattgcgatggtagttccgaccaacgaggagctcatgatcgccaaagacacgaaagaaatcattgagaaagggttggacgagcttaagatctaatga

SEQ ID NO: 2660 - protein, 417 aa, synthetic construct
  REGION 1..417: note = Variant of acetate kinase
MHHHHHHGGSGMKVLVINSGSSSIKYQLLDMTNEKVLAKGLVERIGIDGSRIVHKVNGEKHVLEHEIKNHEIGLKLVLDLLTDEKYGVLKDLKEIDAVGHRVVHGGERFASSVKITDEVLKTIETLSFLAPLHNPANIMGIKSSMKLLPGVPQVAVFDTAFHQKMPEKAYLYAIPYEYYEKYKIRRYGFHGTSHRYVSKRAAEILGKPYDQLKIITVHVGNGASVAAVKNGVSVDTSMGFTPLEGLVMGTRSGDIDPAIVEFLEKEEGLSAKEVVNILNKKSGVYGLTKGFSSDMRDIEDNAIEGDPVCRLAFDVYEYRIAKYIGAYAAAMNGVDAIVFTAGVGENSPIMREEIIENYLGYLGIKIDKEANDFKGEEKIISTPDSKVIAMVVPTNEELMIAKDTKEIIEKGLDELKI

SEQ ID NO: 2661 - DNA, 1257 bp, synthetic construct
  misc_feature 1..1257: note = Variant of acetate kinase
  source 1..1257: mol_type = other DNA
atgcaccatcatcatcatcatggcggtagcggcatgaaagttctggtgattaattctggtagctcctccatcaaatatcagctcctcgatatgaccaacgaaaaggtattagcgaaaggcttggtcgagcgcattggcatcgacggttcgcgtatcgtgcataaagttaacggcgaaaaacacgtgctggaacatgagattaagaatcacgaaattggacttaaattgcatctggatcttcttacggacgaaaaatacggtgtgttgaaggatctcaaagaaatcgatgcagttgggcatcgcgtagtacatggcggcgagcgttttgccagtagcgtgaagattactgacgaagtcttaaagaccatcgagacgttgtcgttcttagctccgttacacaatccagcgaacattatgggtatcaagagcagcatgaaattattaccgggtgtgcctcaagttgccgtctttgatacagcgttccaccagaagatgccggagaaagcctatttgtacgcaatcccctatgagtactacgagaaatataaaattcgccgctatgggtttcatggaacctcacatcgttatgtgagtaaacgtgctgcggaaattatgggcaaaccgtacgatcagctcaagatcattaccgttcacgtgggtaacggcgcatcagttgcggcggtgaagaatggcgtatctgttgacacttccatgggtttcacaccacttgaaggtcttgtcatgggcacgcgcagcggcgatattgatccggccatcgtggaatttcttgagaaagaagaaggattgtcggccaaagaagtcgtcaacatcctcaacaagaaatctggtgtgtatgggctcaccaaaggctttagtagtgacatgcgtgacattgaagataatgctattgaaggtgatcctgtatgccgccttgcattcgatgtgtacgaatatcgtatcgcgaaatatattggcgcatacgctgcggccatgaacggtgttgacgcgatcgtctttaccgcaggagttggcgaaaatagcccgattatgcgcgaagaaattattgagaactacttgggctacttagggatcaagatcgataaagaagccaatgacttcaaaggtgaggagaagatcatttcaacgcccgattccaaagtgattgcgatggtagttccgaccaacgaggagctcatgatcgccaaagacacgaaagaaatcattgagaaagggttggacgagcttaagatctaatga

SEQ ID NO: 2662 - protein, 417 aa, synthetic construct
  REGION 1..417: note = Variant of acetate kinase
MHHHHHHGGSGMKVLVINSGSSSIKYQLLDMTNEKVLAKGLVERIGIDGSRIVHKVNGEKHVLEHEIKNHEIGLKLHLDLLTDEKYGVLKDLKEIDAVGHRVVHGGERFASSVKITDEVLKTIETLSFLAPLHNPANIMGIKSSMKLLPGVPQVAVFDTAFHQKMPEKAYLYAIPYEYYEKYKIRRYGFHGTSHRYVSKRAAEIMGKPYDQLKIITVHVGNGASVAAVKNGVSVDTSMGFTPLEGLVMGTRSGDIDPAIVEFLEKEEGLSAKEVVNILNKKSGVYGLTKGFSSDMRDIEDNAIEGDPVCRLAFDVYEYRIAKYIGAYAAAMNGVDAIVFTAGVGENSPIMREEIIENYLGYLGIKIDKEANDFKGEEKIISTPDSKVIAMVVPTNEELMIAKDTKEIIEKGLDELKI

SEQ ID NO: 2663 - DNA, 1257 bp, synthetic construct
  misc_feature 1..1257: note = Variant of acetate kinase
  source 1..1257: mol_type = other DNA
atgcaccatcatcatcatcatggcggtagcggcatgaaagttctggtgattaattctggtagctcctccatcaaatatcagctcctcgatatgaccaacgaaaaggtattagcgaaaggcttggtcgagcgcattggcatcgacggttcgcgtatcgtgcataaagttaacggcgaaaaacacgtgctggaacatgagattaagaatcacgaaattggacttaaattggtcctggatcttcttacggacgaaaaatacggtgtgttgaaggatctcaaagaaatcgatgcagttgggcatcgcgtagtacatggcggcgagcgttttgccagtagcgtgaagattactgacgaagtcttaaagaccatcgagacgttgtcgttcttagctccgttacacaatccagcgaacattatgggttggaagagcagcatgaaattattaccgggtgtgcctcaagttgccgtctttgatacagcgttccaccagaagatgccggagaaagcctatttgtacgcaatcccctatgagtactacgagaaatataaaattcgccgctatgggtttcatggaacctcacatcgttatgtgagtaaacgtgctgcggaaattatgggcaaaccgtacgatcagctcaagatcattaccgttcacgtgggtaacggcgcatcagttgcggcggtgaagaatggcgtatctgttgacacttccatgggtttcacaccacttgaaggtcttgtcatgggcacgcgcagcggcgatattgatccggccatcgtggaatttcttgagaaagaagaaggattgtcggccaaagaagtcgtcaacatcctcaacaagaaatctggtgtgtatgggctcaccaaaggctttagtagtgacatgcgtgacattgaagataatgctattgaaggtgatcctgtatgccgccttgcattcgatgtgtacgaatatcgtatcgcgaaatatattggcgcatacgctgcggccatgaacggtgttgacgcgatcgtctttaccgcaggagttggcgaaaatagcccgattatgcgcgaagaaattattgagaactacttgggctacttagggatcaagatcgataaagaagccaatgacttcaaaggtgaggagaagatcatttcaacgcccgattccaaagtgattgcgatggtagttccgaccaacgaggagctcatgatcgccaaagacacgaaagaaatcattgagaaagggttggacgagcttaagatctaatga

SEQ ID NO: 2664 - protein, 417 aa, synthetic construct
  REGION 1..417: note = Variant of acetate kinase
MHHHHHHGGSGMKVLVINSGSSSIKYQLLDMTNEKVLAKGLVERIGIDGSRIVHKVNGEKHVLEHEIKNHEIGLKLVLDLLTDEKYGVLKDLKEIDAVGHRVVHGGERFASSVKITDEVLKTIETLSFLAPLHNPANIMGWKSSMKLLPGVPQVAVFDTAFHQKMPEKAYLYAIPYEYYEKYKIRRYGFHGTSHRYVSKRAAEIMGKPYDQLKIITVHVGNGASVAAVKNGVSVDTSMGFTPLEGLVMGTRSGDIDPAIVEFLEKEEGLSAKEVVNILNKKSGVYGLTKGFSSDMRDIEDNAIEGDPVCRLAFDVYEYRIAKYIGAYAAAMNGVDAIVFTAGVGENSPIMREEIIENYLGYLGIKIDKEANDFKGEEKIISTPDSKVIAMVVPTNEELMIAKDTKEIIEKGLDELKI

SEQ ID NO: 2665 - DNA, 1257 bp, synthetic construct
  misc_feature 1..1257: note = Variant of acetate kinase
  source 1..1257: mol_type = other DNA
atgcaccatcatcatcatcatggcggtagcggcatgaaagttctggtgattaattctggtagctcctccatcaaatatcagctcctcgatatgaccaacgaaaaggtattagcgaaaggcttggtcgagcgcattggcatcgacggttcgcgtatcgtgcataaagttaacggcgaaaaacacgtgctggaacatgagattaagaatcacgaaattggacttaaattggtcctggatcttcttacggacgaaaaatacggtgtgttgaaggatctcaaagaaatcgatgcagttgggcatcgcgtagtacatggcggcgagcgttttgccagtagcgtgaagcagactgacgaagtcttaaagaccatcgagacgttgtcgttcttagctccgttacacaatccagcgaacattatgggtatcaagagcagcatgaaattattaccgggtgtgcctcaagttgccgtctttgatacagcgttccaccagaagatgccggagaaagcctatttgtacgcaatcccctatgagtactacgagaaatataaaattcgccgctatgggtttcatggaacctcacatcgttatgtgagtaaacgtgctgcggaaattatgggcaaaccgtacgatcagctcaagatcattaccgttcacgtgggtaacggcgcatcagttgcggcggtgaagaatggcgtatctgttgacacttccatgggtttcacaccacttgaaggtcttgtcatgggcacgcgcagcggcgatattgatccggccatcgtggaatttcttgagaaagaagaaggattgtcggccaaagaagtcgtcaacatcctcaacaagaaatctggtgtgtatgggctcaccaaaggctttagtagtgacatgcgtgacattgaagataatgctattgaaggtgatcctgtatgccgccttgcattcgatgtgtacgaatatcgtatcgcgaaatatattggcgcatacgctgcggccatgaacggtgttgacgcgatcgtctttaccgcaggagttggcgaaaatagcccgattatgcgcgaagaaattattgagaactacttgggctacttagggatcaagatcgataaagaagccaatgacttcaaaggtgaggagaagatcatttcaacgcccgattccaaagtgattgcgatggtagttccgaccaacgaggagctcatgatcgccaaagacacgaaagaaatcattgagaaagggttggacgagcttaagatctaatga

SEQ ID NO: 2666 - protein, 417 aa, synthetic construct
  REGION 1..417: note = Variant of acetate kinase
MHHHHHHGGSGMKVLVINSGSSSIKYQLLDMTNEKVLAKGLVERIGIDGSRIVHKVNGEKHVLEHEIKNHEIGLKLVLDLLTDEKYGVLKDLKEIDAVGHRVVHGGERFASSVKQTDEVLKTIETLSFLAPLHNPANIMGIKSSMKLLPGVPQVAVFDTAFHQKMPEKAYLYAIPYEYYEKYKIRRYGFHGTSHRYVSKRAAEIMGKPYDQLKIITVHVGNGASVAAVKNGVSVDTSMGFTPLEGLVMGTRSGDIDPAIVEFLEKEEGLSAKEVVNILNKKSGVYGLTKGFSSDMRDIEDNAIEGDPVCRLAFDVYEYRIAKYIGAYAAAMNGVDAIVFTAGVGENSPIMREEIIENYLGYLGIKIDKEANDFKGEEKIISTPDSKVIAMVVPTNEELMIAKDTKEIIEKGLDELKI

SEQ ID NO: 2667 - DNA, 1257 bp, synthetic construct
  misc_feature 1..1257: note = Variant of acetate kinase
  source 1..1257: mol_type = other DNA
atgcaccatcatcatcatcatggcggtagcggcatgaaagttctggtgattaattctggtagctcctccatcaaatatcagctcctcgatatgaccaacgaaaaggtattagcgaaaggcttggtcgagcgcattggcatcgacggttcgcgtatcgtgcataaagttaacggcgaaaaacacgtgctggaacatgagattaagaatcacgaaattggacttaaattggtcctggatcttcttacggacgaaaaatacggtgtgttgaaggatctcaaagaaatcgatgcagttgggcatcgcgtagtacatggcggcgagcgttttgccagtagcgtgaagattactgacgaagtcttaaagaccatcgagacgttgtcgttcttagctccgttacacaatccagcgaacattatgggtatcaagagcagcatgaaattattaccgggtgtgcctcaagttgccaagtttgatacagcgttccaccagaagatgccggagaaagcctatttgtacgcaatcccctatgagtactacgagaaatataaaattcgccgctatgggtttcatggaacctcacatcgttatgtgagtaaacgtgctgcggaaattatgggcaaaccgtacgatcagctcaagatcattaccgttcacgtgggtaacggcgcatcagttgcggcggtgaagaatggcgtatctgttgacacttccatgggtttcacaccacttgaaggtcttgtcatgggcacgcgcagcggcgatattgatccggccatcgtggaatttcttgagaaagaagaaggattgtcggccaaagaagtcgtcaacatcctcaacaagaaatctggtgtgtatgggctcaccaaaggctttagtagtgacatgcgtgacattgaagataatgctattgaaggtgatcctgtatgccgccttgcattcgatgtgtacgaatatcgtatcgcgaaatatattggcgcatacgctgcggccatgaacggtgttgacgcgatcgtctttaccgcaggagttggcgaaaatagcccgattatgcgcgaagaaattattgagaactacttgggctacttagggatcaagatcgataaagaagccaatgacttcaaaggtgaggagaagatcatttcaacgcccgattccaaagtgattgcgatggtagttccgaccaacgaggagctcatgatcgccaaagacacgaaagaaatcattgagaaagggttggacgagcttaagatctaatga

SEQ ID NO: 2668 - protein, 417 aa, synthetic construct
  REGION 1..417: note = Variant of acetate kinase
MHHHHHHGGSGMKVLVINSGSSSIKYQLLDMTNEKVLAKGLVERIGIDGSRIVHKVNGEKHVLEHEIKNHEIGLKLVLDLLTDEKYGVLKDLKEIDAVGHRVVHGGERFASSVKITDEVLKTIETLSFLAPLHNPANIMGIKSSMKLLPGVPQVAKFDTAFHQKMPEKAYLYAIPYEYYEKYKIRRYGFHGTSHRYVSKRAAEIMGKPYDQLKIITVHVGNGASVAAVKNGVSVDTSMGFTPLEGLVMGTRSGDIDPAIVEFLEKEEGLSAKEVVNILNKKSGVYGLTKGFSSDMRDIEDNAIEGDPVCRLAFDVYEYRIAKYIGAYAAAMNGVDAIVFTAGVGENSPIMREEIIENYLGYLGIKIDKEANDFKGEEKIISTPDSKVIAMVVPTNEELMIAKDTKEIIEKGLDELKI

SEQ ID NO: 2669 - DNA, 1257 bp, synthetic construct
  misc_feature 1..1257: note = Variant of acetate kinase
  source 1..1257: mol_type = other DNA
atgcaccatcatcatcatcatggcggtagcggcatgaaagttctggtgattaattctggtagctcctccatcaaatatcagctcctcgatatgaccaacgaaaaggtattagcgaaaggcttggtcgagcgcattggcatcgacggttcgcgtatcgtgcataaagttaacggcgaaaaacacgtgctggaacatgagattaagaatcacgaaattggacttaaattggtcctggatcttcttacggacgaaaaatacggtgtgttgaaggatctcaaagaaatcgatgcagttgggcatcgcgtagtacatggcggcgagcgttttgccagtagcgtgaagattactgacgaagtcttaaagaccatcgagacgttgtcgttcttagctccgttacacaatccagcgaacattatgggtatcaagagcagcatgaaattattaccgggtgtgcctcaagttgccgtctttgatacagcgttccaccagaagatgccggagaaagcctatttgtacgcaatcccctatgagtactacgagaaatataaaattcgccgctatgggtttcatggaacctcacatcgttatgtgagtaaacgtgctgcggaaattatgggcaaaccgtacgatcagctcaagatcattaccgttcacgtgggtaacggcgcatcagttgcggcggtgaagaatggcgtatctgttgacacttccatgggtttcacaccacttgaaggtcttgtcatgggcacgcgcagcggcgatattgatccggccatcgtggaatttcttgagaaagaagaaggattgtcggccaaagaagtcgtcaacatcctcaacaagaaatctggtgtgtatgggctcaccaaaggctttagtagtgacatgcgtgacattgaagataatgctattgaaggtgatcctgtatgccgccttgcattcgatgtgtacgaatatcgtatcgcgaaatatattggcgcatacgctgcggccatgaacggtgttgacgcgatcgtctttaccgcaggagttggcgaaaatagcagtattatgcgcgaagaaattattgagaactacttgggctacttagggatcaagatcgataaagaagccaatgacttcaaaggtgaggagaagatcatttcaacgcccgattccaaagtgattgcgatggtagttccgaccaacgaggagctcatgatcgccaaagacacgaaagaaatcattgagaaagggttggacgagcttaagatctaatga

SEQ ID NO: 2670 - protein, 417 aa, synthetic construct
  REGION 1..417: note = Variant of acetate kinase
MHHHHHHGGSGMKVLVINSGSSSIKYQLLDMTNEKVLAKGLVERIGIDGSRIVHKVNGEKHVLEHEIKNHEIGLKLVLDLLTDEKYGVLKDLKEIDAVGHRVVHGGERFASSVKITDEVLKTIETLSFLAPLHNPANIMGIKSSMKLLPGVPQVAVFDTAFHQKMPEKAYLYAIPYEYYEKYKIRRYGFHGTSHRYVSKRAAEIMGKPYDQLKIITVHVGNGASVAAVKNGVSVDTSMGFTPLEGLVMGTRSGDIDPAIVEFLEKEEGLSAKEVVNILNKKSGVYGLTKGFSSDMRDIEDNAIEGDPVCRLAFDVYEYRIAKYIGAYAAAMNGVDAIVFTAGVGENSSIMREEIIENYLGYLGIKIDKEANDFKGEEKIISTPDSKVIAMVVPTNEELMIAKDTKEIIEKGLDELKI

SEQ ID NO: 2671 - DNA, 1257 bp, synthetic construct
  misc_feature 1..1257: note = Variant of acetate kinase
  source 1..1257: mol_type = other DNA
atgcaccatcatcatcatcatggcggtagcggcatgaaagttctggtgattaattctggtagctcctccatcaaatatcagctcctcgatatgaccaacgaaaaggtattagcgaaaggcttggtcgagcgcattggcatcgacggttcgcgtatcgtgcataaagttaacggcgaaaaacacgtgctggaacatgagattaagaatcacgaaattggacttaaattggtcctggatcttcttacggacgaaaaatacggtgtgttgaaggatctcaaagaaatcgatgcagttgggcatcgcgtagtacatggcggcgagcgttttgccagtagcgtgaagattactgacgaagtcttaaagaccatcgagacgttgtcgttcttagctccgttacacaatccagcgaacattatgggtatcaagagcagcatgaaattattaccgggtgtgcctcaagttgccgtctttgatacagcgttccaccagaagatgccggagaaagcctatttgtacgcaatcccctatgagtactacgagaaatataaaattcgccgctatgggtttcatggaacctcacatcgttatgtgagtaaacgtgctgcggaaattatgggcaaaccgtacgatcagctcaagatcattaccgttcacgtgggtaacggcgcatcagttgcggcggtgaagaatggcgtatctgttgacacttccatgggtttcacaccacttgaaggtcttgtcatgggcacgcgcagcggcgatattgatccggccatcgtggaatttcttgagaaagaagaaggattgtcggccaaagaagtcgtcaacatcctcaacaagaaatctggtgtgtatgggctcaccaaaggctttagtagtgacatgcgtgacattgaagataatgctattgaaggtgatcctgtatgccgccttgcactggatgtgtacgaatatcgtatcgcgaaatatattggcgcatacgctgcggccatgaacggtgttgacgcgatcgtctttaccgcaggagttggcgaaaatagcccgattatgcgcgaagaaattattgagaactacttgggctacttagggatcaagatcgataaagaagccaatgacttcaaaggtgaggagaagatcatttcaacgcccgattccaaagtgattgcgatggtagttccgaccaacgaggagctcatgatcgccaaagacacgaaagaaatcattgagaaagggttggacgagcttaagatctaatga

SEQ ID NO: 2672 - protein, 417 aa, synthetic construct
  REGION 1..417: note = Variant of acetate kinase
MHHHHHHGGSGMKVLVINSGSSSIKYQLLDMTNEKVLAKGLVERIGIDGSRIVHKVNGEKHVLEHEIKNHEIGLKLVLDLLTDEKYGVLKDLKEIDAVGHRVVHGGERFASSVKITDEVLKTIETLSFLAPLHNPANIMGIKSSMKLLPGVPQVAVFDTAFHQKMPEKAYLYAIPYEYYEKYKIRRYGFHGTSHRYVSKRAAEIMGKPYDQLKIITVHVGNGASVAAVKNGVSVDTSMGFTPLEGLVMGTRSGDIDPAIVEFLEKEEGLSAKEVVNILNKKSGVYGLTKGFSSDMRDIEDNAIEGDPVCRLALDVYEYRIAKYIGAYAAAMNGVDAIVFTAGVGENSPIMREEIIENYLGYLGIKIDKEANDFKGEEKIISTPDSKVIAMVVPTNEELMIAKDTKEIIEKGLDELKI

SEQ ID NO: 2673 - DNA, 1257 bp, synthetic construct
  misc_feature 1..1257: note = Variant of acetate kinase
  source 1..1257: mol_type = other DNA
atgcaccatcatcatcatcatggcggtagcggcatgaaagttctggtgattaattctggtagctcctccatcaaatatcagctcctcgatatgaccaacgaaaaggtattagcgaaaggcttggtcgagcgcattggcatcgacggttcgcgtatcgtgcataaagttaacggcgaaaaacacgtgctggaacatgagattaagaatcacgaaattggacttaaattggtcctggatcttcttacggacgaaaaatacggtgtgttgaaggatctcaaagaaatcgatgcagttgggcatcgcgtagtacatggcggcgagcgttttgccagtagcgtgaagattactgacgaagtcttaaagaccatcgagacgttgtcgttcttagctccgttacacaatccagcgaacattatgggtatcaagagcagcatgaaattattaccgggtgtgcctcaagttgccgtctttgatacagcgttccaccagaagatgccggagaaagcctatttgtacgcaatcccctatgagtactacgagaaatataaaattcgccgctatgggtttcatggaacctcacatcgttatgtgagtaaacgtgctgcggaaattatgggcaaaccgtacgatcagctcaagatcattaccgttcacgtgggtaacggcgcatcagttgcggcggtgaagaatggcgtatctgttgacacttccatgggtttcacaccacttgaaggtcttgtcatgggcacgcgcagcggcgatattgatccggccatcgtggaatttcttgagaaagaagaaggattgtcggccaaagaagtcgtcaacatcctcaacaagaaatctggtgtgtatgggctcaccaaaggctttagtagtgacatgcgtgacattgaagataatgctattgaaggtgatcctgtatgccgccttgcattcgatgtgtacgaatatcgtatcgcgaaatatattggcgcatacgctgcggccatgaacggtgttgacgcgatcgtctttaccgcaggagttggcgaaaatagccgtattatgcgcgaagaaattattgagaactacttgggctacttagggatcaagatcgataaagaagccaatgacttcaaaggtgaggagaagatcatttcaacgcccgattccaaagtgattgcgatggtagttccgaccaacgaggagctcatgatcgccaaagacacgaaagaaatcattgagaaagggttggacgagcttaagatctaatga

SEQ ID NO: 2674 - protein, 417 aa, synthetic construct
  REGION 1..417: note = Variant of acetate kinase
MHHHHHHGGSGMKVLVINSGSSSIKYQLLDMTNEKVLAKGLVERIGIDGSRIVHKVNGEKHVLEHEIKNHEIGLKLVLDLLTDEKYGVLKDLKEIDAVGHRVVHGGERFASSVKITDEVLKTIETLSFLAPLHNPANIMGIKSSMKLLPGVPQVAVFDTAFHQKMPEKAYLYAIPYEYYEKYKIRRYGFHGTSHRYVSKRAAEIMGKPYDQLKIITVHVGNGASVAAVKNGVSVDTSMGFTPLEGLVMGTRSGDIDPAIVEFLEKEEGLSAKEVVNILNKKSGVYGLTKGFSSDMRDIEDNAIEGDPVCRLAFDVYEYRIAKYIGAYAAAMNGVDAIVFTAGVGENSRIMREEIIENYLGYLGIKIDKEANDFKGEEKIISTPDSKVIAMVVPTNEELMIAKDTKEIIEKGLDELKI

SEQ ID NO: 2675 - DNA, 1257 bp, synthetic construct
  misc_feature 1..1257: note = Variant of acetate kinase
  source 1..1257: mol_type = other DNA
atgcaccatcatcatcatcatggcggtagcggcatgaaagttctggtgattaattctggtagctcctccatcaaatatcagctcctcgatatgaccaacgaaaaggtattagcgaaaggcttggtcgagcgcattggcatcgacggttcgcgtatcgtgcataaagttaacggcgaaaaacacgtgctggaacatgagattaagaatcacgaaattggacttaaattggtcctggatcttcttacggacgaaaaatacggtgtgttgaaggatctcaaagaaatcgatgcagttgggcatcgcgtagtacatggcggcgagcgttttgccagtagcgtgaagattactgacgaagtcttaaagaccatcgagacgttgtcgttcttagctccgttacacaatccagcgaacattatgggtatcaagagcagcatgaaattattaccgggtgtgcctcaagttgccgtctttgatacagcgttccaccagaagatgccggagaaagcctatttgtacgcaatcccctatgagtactacgagaaatataaaattcgccgctatgggtttcatggaacctcacatcgttatgtgagtaaacgtgctgcggaaattatgggcaaaccgtacgatcagctcaagatcattaccgttcacgtgggtaacggcgcatcagttgcggcggtgaagaatggcgtatctgttgacacttccatgggtttcacaccacttgaaggtcttgtcatgggcacgcgcagcggcgatattgatccggccatcgtggaatttcttgagaaagaagaaggattgtcggccaaagaagtcgtcaacatcctcaacaagaaatctggtgtgtatgggctcaccaaaggctttagtagtgacatgcgtgacattgaagataatgctattgaaggtgatcctgtatgccgccttgcattcgatgtgtacgaatatcgtatcgcgaaatatattggcgcatacgctgcggccatgaacggtgttgacgcgatcgtctttaccgcaggagttggcgaaaatagcccgattatgcgcgaagaaattattgagaactacttgggctacttagggatcaagatcgataaagaagccaataggttcaaaggtgaggagaagatcatttcaacgcccgattccaaagtgattgcgatggtagttccgaccaacgaggagctcatgatcgccaaagacacgaaagaaatcattgagaaagggttggacgagcttaagatctaatga

SEQ ID NO: 2676 - protein, 417 aa, synthetic construct
  REGION 1..417: note = Variant of acetate kinase
MHHHHHHGGSGMKVLVINSGSSSIKYQLLDMTNEKVLAKGLVERIGIDGSRIVHKVNGEKHVLEHEIKNHEIGLKLVLDLLTDEKYGVLKDLKEIDAVGHRVVHGGERFASSVKITDEVLKTIETLSFLAPLHNPANIMGIKSSMKLLPGVPQVAVFDTAFHQKMPEKAYLYAIPYEYYEKYKIRRYGFHGTSHRYVSKRAAEIMGKPYDQLKIITVHVGNGASVAAVKNGVSVDTSMGFTPLEGLVMGTRSGDIDPAIVEFLEKEEGLSAKEVVNILNKKSGVYGLTKGFSSDMRDIEDNAIEGDPVCRLAFDVYEYRIAKYIGAYAAAMNGVDAIVFTAGVGENSPIMREEIIENYLGYLGIKIDKEANRFKGEEKIISTPDSKVIAMVVPTNEELMIAKDTKEIIEKGLDELKI

SEQ ID NO: 2677 - DNA, 1257 bp, synthetic construct
  misc_feature 1..1257: note = Variant of acetate kinase
  source 1..1257: mol_type = other DNA
atgcaccatcatcatcatcatggcggtagcggcatgaaagttctggtgattaattctggtagctcctccatcaaatatcagctcctcgatatgaccaacgaaaaggtattagcgaaaggcttggtcgagcgcattggcatcgacggttcgcgtatcgtgcataaagttaacggcgaaaaacacgtgctggaacatgagattaagaatcacgaaattggacttaaattggtcctggatcttcttacggacgaaaaatacggtgtgttgaaggatctcaaagaaatcgatgcagttgggcatcgcgtagtacatggcggcgagcgttttgccagtagcgtgaagattactgacgaagtcttaaagaccatcgagacgttgtcgttcttagctccgttacacaatccagcgaacattatgggtatcaagagcagcatgaaatgtttaccgggtgtgcctcaagttgccgtctttgatacagcgttccaccagaagatgccggagaaagcctatttgtacgcaatcccctatgagtactacgagaaatataaaattcgccgctatgggtttcatggaacctcacatcgttatgtgagtaaacgtgctgcggaaattatgggcaaaccgtacgatcagctcaagatcattaccgttcacgtgggtaacggcgcatcagttgcggcggtgaagaatggcgtatctgttgacacttccatgggtttcacaccacttgaaggtcttgtcatgggcacgcgcagcggcgatattgatccggccatcgtggaatttcttgagaaagaagaaggattgtcggccaaagaagtcgtcaacatcctcaacaagaaatctggtgtgtatgggctcaccaaaggctttagtagtgacatgcgtgacattgaagataatgctattgaaggtgatcctgtatgccgccttgcattcgatgtgtacgaatatcgtatcgcgaaatatattggcgcatacgctgcggccatgaacggtgttgacgcgatcgtctttaccgcaggagttggcgaaaatagcccgattatgcgcgaagaaattattgagaactacttgggctacttagggatcaagatcgataaagaagccaatgacttcaaaggtgaggagaagatcatttcaacgcccgattccaaagtgattgcgatggtagttccgaccaacgaggagctcatgatcgccaaagacacgaaagaaatcattgagaaagggttggacgagcttaagatctaatga

SEQ ID NO: 2678 - protein, 417 aa, synthetic construct
  REGION 1..417: note = Variant of acetate kinase
MHHHHHHGGSGMKVLVINSGSSSIKYQLLDMTNEKVLAKGLVERIGIDGSRIVHKVNGEKHVLEHEIKNHEIGLKLVLDLLTDEKYGVLKDLKEIDAVGHRVVHGGERFASSVKITDEVLKTIETLSFLAPLHNPANIMGIKSSMKCLPGVPQVAVFDTAFHQKMPEKAYLYAIPYEYYEKYKIRRYGFHGTSHRYVSKRAAEIMGKPYDQLKIITVHVGNGASVAAVKNGVSVDTSMGFTPLEGLVMGTRSGDIDPAIVEFLEKEEGLSAKEVVNILNKKSGVYGLTKGFSSDMRDIEDNAIEGDPVCRLAFDVYEYRIAKYIGAYAAAMNGVDAIVFTAGVGENSPIMREEIIENYLGYLGIKIDKEANDFKGEEKIISTPDSKVIAMVVPTNEELMIAKDTKEIIEKGLDELKI

SEQ ID NO: 2679 - DNA, 1257 bp, synthetic construct
  misc_feature 1..1257: note = Variant of acetate kinase
  source 1..1257: mol_type = other DNA
atgcaccatcatcatcatcatggcggtagcggcatgaaagttctggtgattaattctggtagctcctccatcaaatatcagctcctcgatatgaccaacgaaaaggtattagcgaaaggcttggtcgagcgcattggcatcgacggttcgcgtatcgtgcataaagttaacggcgaaaaacacgtgctggaacatgagattaagaatcacgaaattggacttaaattggtcctggatcttcttacggacgaaaaatacggtgtgttgaaggatctcaaagaaatcgatgcagttgggcatcgcgtagtacatggcggcgagcgttttgccagtagcgtgaagattactgacgaagtcttaaagaccatcgagacgttgtcgttcttagctccgttacacaatccagcgaacattatgggtatcaagagcagcatgaaattattaccgggtgtgcctcaagttgccgtctttgatacagcgttccaccagaagatgccggagaaagcctatttgtacgcaatcccctatgagtactacgagaaatataaaattcgccgctatgggtttcatggaacctcacatcgttatgtgagtaaacgtgctgcggaaattatgggcaaaccgtacgatcagctcaagatcattaccgttcacgtgggtaacggcgcatcagttgcggcggtgaagaatggcgtatctgttgacacttccatgggtttcacaccacttgaaggtcttgtcatgggcacgcgcagcggcgatattgatccggccatcgtggaatttcttgagaaagaagaaggattgtcggccaaagaagtcgtcaacatcctcaacaagaaatctggtgtgtatgggctcaccaaaggctttagtagtgacatgcgtgacattgaagataatgctattgaaggtgatcctgtatgccgccttgcattcgatgtgtacgaatatcgtatcgcgaaatatattggcgcatacgctgcggccatgaacggtgttgacgcgatcgtctttaccgcaggagttggcgaaaatagcccgattatgcgccatgaaattattgagaactacttgggctacttagggatcaagatcgataaagaagccaatgacttcaaaggtgaggagaagatcatttcaacgcccgattccaaagtgattgcgatggtagttccgaccaacgaggagctcatgatcgccaaagacacgaaagaaatcattgagaaagggttggacgagcttaagatctaatga

SEQ ID NO: 2680 - protein, 417 aa, synthetic construct
  REGION 1..417: note = Variant of acetate kinase
MHHHHHHGGSGMKVLVINSGSSSIKYQLLDMTNEKVLAKGLVERIGIDGSRIVHKVNGEKHVLEHEIKNHEIGLKLVLDLLTDEKYGVLKDLKEIDAVGHRVVHGGERFASSVKITDEVLKTIETLSFLAPLHNPANIMGIKSSMKLLPGVPQVAVFDTAFHQKMPEKAYLYAIPYEYYEKYKIRRYGFHGTSHRYVSKRAAEIMGKPYDQLKIITVHVGNGASVAAVKNGVSVDTSMGFTPLEGLVMGTRSGDIDPAIVEFLEKEEGLSAKEVVNILNKKSGVYGLTKGFSSDMRDIEDNAIEGDPVCRLAFDVYEYRIAKYIGAYAAAMNGVDAIVFTAGVGENSPIMRHEIIENYLGYLGIKIDKEANDFKGEEKIISTPDSKVIAMVVPTNEELMIAKDTKEIIEKGLDELKI

SEQ ID NO: 2681 - DNA, 1257 bp, synthetic construct
  misc_feature 1..1257: note = Variant of acetate kinase
  source 1..1257: mol_type = other DNA
atgcaccatcatcatcatcatggcggtagcggcatgaaagttctggtgattaattctggtagctcctccatcaaatatcagctcctcgatatgaccaacgaaaaggtattagcgaaaggcttggtcgagcgcattggcatcgacggttcgcgtatcgtgcataaagttaacggcgaaaaacacgtgctggaacatgagattaagaatcacgaaattggacttaaattggtcctggatcttcttacggacgaaaaatacggtgtgttgaaggatctcaaagaaatcgatgcagttgggcatcgcgtagtacatggcggcgagcgttttgccagtagcgtgaagattactgacgaagtcttaaagaccatcgagacgttgtcgttcttagctccgttacacaatccacttaacattatgggtatcaagagcagcatgaaattattaccgggtgtgcctcaagttgccgtctttgatacagcgttccaccagaagatgccggagaaagcctatttgtacgcaatcccctatgagtactacgagaaatataaaattcgccgctatgggtttcatggaacctcacatcgttatgtgagtaaacgtgctgcggaaattatgggcaaaccgtacgatcagctcaagatcattaccgttcacgtgggtaacggcgcatcagttgcggcggtgaagaatggcgtatctgttgacacttccatgggtttcacaccacttgaaggtcttgtcatgggcacgcgcagcggcgatattgatccggccatcgtggaatttcttgagaaagaagaaggattgtcggccaaagaagtcgtcaacatcctcaacaagaaatctggtgtgtatgggctcaccaaaggctttagtagtgacatgcgtgacattgaagataatgctattgaaggtgatcctgtatgccgccttgcattcgatgtgtacgaatatcgtatcgcgaaatatattggcgcatacgctgcggccatgaacggtgttgacgcgatcgtctttaccgcaggagttggcgaaaatagcccgattatgcgcgaagaaattattgagaactacttgggctacttagggatcaagatcgataaagaagccaatgacttcaaaggtgaggagaagatcatttcaacgcccgattccaaagtgattgcgatggtagttccgaccaacgaggagctcatgatcgccaaagacacgaaagaaatcattgagaaagggttggacgagcttaagatctaatga

SEQ ID NO: 2682 - protein, 417 aa, synthetic construct
  REGION 1..417: note = Variant of acetate kinase
MHHHHHHGGSGMKVLVINSGSSSIKYQLLDMTNEKVLAKGLVERIGIDGSRIVHKVNGEKHVLEHEIKNHEIGLKLVLDLLTDEKYGVLKDLKEIDAVGHRVVHGGERFASSVKITDEVLKTIETLSFLAPLHNPLNIMGIKSSMKLLPGVPQVAVFDTAFHQKMPEKAYLYAIPYEYYEKYKIRRYGFHGTSHRYVSKRAAEIMGKPYDQLKIITVHVGNGASVAAVKNGVSVDTSMGFTPLEGLVMGTRSGDIDPAIVEFLEKEEGLSAKEVVNILNKKSGVYGLTKGFSSDMRDIEDNAIEGDPVCRLAFDVYEYRIAKYIGAYAAAMNGVDAIVFTAGVGENSPIMREEIIENYLGYLGIKIDKEANDFKGEEKIISTPDSKVIAMVVPTNEELMIAKDTKEIIEKGLDELKI

SEQ ID NO: 2683 - DNA, 1257 bp, synthetic construct
  misc_feature 1..1257: note = Variant of acetate kinase
  source 1..1257: mol_type = other DNA
atgcaccatcatcatcatcatggcggtagcggcatgaaagttctggtgattaattctggtagctcctccatcaaatatcagctcctcgatatgaccaacgaaaaggtattagcgaaaggcttggtcgagcgcattggcatcgacggttcgcgtatcgtgcataaagttaacggcgaaaaacacgtgctggaacatgagattaaggatcacgaaattggacttaaattggtcctggatcttcttacggacgaaaaatacggtgtgttgaaggatctcaaagaaatcgatgcagttgggcatcgcgtagtacatggcggcgagcgttttgccagtagcgtgaagattactgacgaagtcttaaagaccatcgagacgttgtcgttcttagctccgttacacaatccagcgaacattatgggtatcaagagcagcatgaaattattaccgggtgtgcctcaagttgccgtctttgatacagcgttccaccagaagatgccggagaaagcctatttgtacgcaatcccctatgagtactacgagaaatataaaattcgccgctatgggtttcatggaacctcacatcgttatgtgagtaaacgtgctgcggaaattatgggcaaaccgtacgatcagctcaagatcattaccgttcacgtgggtaacggcgcatcagttgcggcggtgaagaatggcgtatctgttgacacttccatgggtttcacaccacttgaaggtcttgtcatgggcacgcgcagcggcgatattgatccggccatcgtggaatttcttgagaaagaagaaggattgtcggccaaagaagtcgtcaacatcctcaacaagaaatctggtgtgtatgggctcaccaaaggctttagtagtgacatgcgtgacattgaagataatgctattgaaggtgatcctgtatgccgccttgcattcgatgtgtacgaatatcgtatcgcgaaatatattggcgcatacgctgcggccatgaacggtgttgacgcgatcgtctttaccgcaggagttggcgaaaatagcccgattatgcgcgaagaaattattgagaactacttgggctacttagggatcaagatcgataaagaagccaatgacttcaaaggtgaggagaagatcatttcaacgcccgattccaaagtgattgcgatggtagttccgaccaacgaggagctcatgatcgccaaagacacgaaagaaatcattgagaaagggttggacgagcttaagatctaatga

SEQ ID NO: 2684 - protein, 417 aa, synthetic construct
  REGION 1..417: note = Variant of acetate kinase
MHHHHHHGGSGMKVLVINSGSSSIKYQLLDMTNEKVLAKGLVERIGIDGSRIVHKVNGEKHVLEHEIKDHEIGLKLVLDLLTDEKYGVLKDLKEIDAVGHRVVHGGERFASSVKITDEVLKTIETLSFLAPLHNPANIMGIKSSMKLLPGVPQVAVFDTAFHQKMPEKAYLYAIPYEYYEKYKIRRYGFHGTSHRYVSKRAAEIMGKPYDQLKIITVHVGNGASVAAVKNGVSVDTSMGFTPLEGLVMGTRSGDIDPAIVEFLEKEEGLSAKEVVNILNKKSGVYGLTKGFSSDMRDIEDNAIEGDPVCRLAFDVYEYRIAKYIGAYAAAMNGVDAIVFTAGVGENSPIMREEIIENYLGYLGIKIDKEANDFKGEEKIISTPDSKVIAMVVPTNEELMIAKDTKEIIEKGLDELKI

SEQ ID NO: 2685 - DNA, 1257 bp, synthetic construct
  misc_feature 1..1257: note = Variant of acetate kinase
  source 1..1257: mol_type = other DNA
atgcaccatcatcatcatcatggcggtagcggcatgaaagttctggtgattaattctggtagctcctccatcaaatatcagctcctcgatatgaccaacgaaaaggtattagcgaaaggcttggtcgagcgcattggcatcgacggttcgcgtatcgtgcataaagttaacggcgaaaaacacgtgctggaacatgagattccgaatcacgaaattggacttaaattggtcctggatcttcttacggacgaaaaatacggtgtgttgaaggatctcaaagaaatcgatgcagttgggcatcgcgtagtacatggcggcgagcgttttgccagtagcgtgaagattactgacgaagtcttaaagaccatcgagacgttgtcgttcttagctccgttacacaatccagcgaacattatgggtatcaagagcagcatgaaattattaccgggtgtgcctcaagttgccgtctttgatacagcgttccaccagaagatgccggagaaagcctatttgtacgcaatcccctatgagtactacgagaaatataaaattcgccgctatgggtttcatggaacctcacatcgttatgtgagtaaacgtgctgcggaaattatgggcaaaccgtacgatcagctcaagatcattaccgttcacgtgggtaacggcgcatcagttgcggcggtgaagaatggcgtatctgttgacacttccatgggtttcacaccacttgaaggtcttgtcatgggcacgcgcagcggcgatattgatccggccatcgtggaatttcttgagaaagaagaaggattgtcggccaaagaagtcgtcaacatcctcaacaagaaatctggtgtgtatgggctcaccaaaggctttagtagtgacatgcgtgacattgaagataatgctattgaaggtgatcctgtatgccgccttgcattcgatgtgtacgaatatcgtatcgcgaaatatattggcgcatacgctgcggccatgaacggtgttgacgcgatcgtctttaccgcaggagttggcgaaaatagcccgattatgcgcgaagaaattattgagaactacttgggctacttagggatcaagatcgataaagaagccaatgacttcaaaggtgaggagaagatcatttcaacgcccgattccaaagtgattgcgatggtagttccgaccaacgaggagctcatgatcgccaaagacacgaaagaaatcattgagaaagggttggacgagcttaagatctaatga

SEQ ID NO: 2686 - protein, 417 aa, synthetic construct
  REGION 1..417: note = Variant of acetate kinase
MHHHHHHGGSGMKVLVINSGSSSIKYQLLDMTNEKVLAKGLVERIGIDGSRIVHKVNGEKHVLEHEIPNHEIGLKLVLDLLTDEKYGVLKDLKEIDAVGHRVVHGGERFASSVKITDEVLKTIETLSFLAPLHNPANIMGIKSSMKLLPGVPQVAVFDTAFHQKMPEKAYLYAIPYEYYEKYKIRRYGFHGTSHRYVSKRAAEIMGKPYDQLKIITVHVGNGASVAAVKNGVSVDTSMGFTPLEGLVMGTRSGDIDPAIVEFLEKEEGLSAKEVVNILNKKSGVYGLTKGFSSDMRDIEDNAIEGDPVCRLAFDVYEYRIAKYIGAYAAAMNGVDAIVFTAGVGENSPIMREEIIENYLGYLGIKIDKEANDFKGEEKIISTPDSKVIAMVVPTNEELMIAKDTKEIIEKGLDELKI

SEQ ID NO: 2687 - DNA, 1257 bp, synthetic construct
  misc_feature 1..1257: note = Variant of acetate kinase
  source 1..1257: mol_type = other DNA
atgcaccatcatcatcatcatggcggtagcggcatgaaagttctggtgattaattctggtagctcctccatcaaatatcagctcctcgatatgaccaacgaaaaggtattagcgaaaggcttggtcgagcgcattggcatcgacggttcgcgtatcgtgcataaagttaacggcgaaaaacacgtgctggaacatgagattaagaatcacgaaattggacttaaattggtcctggatcttcttacggacgaaaaatacggtgtgttgaaggatctcaaagaaatcgatgcagttgggcatcgcgtagtacatggcggcgagcgttttgccagtagcgtgaagattactgacgaagtcttaaagaccatcgagacgttgtcgttcttagctccgttacacaatccagcgaacattatgggtatcaagagcagcatgaaattattaccgggtgtgcctcaagttgccgtctttgatacagcgttccaccagaagatgccggagaaagcctatttgtacgcaatcccctatgagtactacgagaaatataaaattcgccgctatgggtttcatggaacctcacatcgttatgtgagtaaacgtgctgcggaaattatgggcaaaccgtacgatcagctcaagatcattaccgttcacgtgggtaacggcgcatcagttgcggcggtgaagaatggcgtatctgttgacacttccatgggtttcacaccacttgaaggtcttgtcatgggcacgcgcagcggcgatattgatccggccatcgtggaatttcttgagaaagaagaaggattgtcggccaaagaagtcgtcaacatcctcaacaagaaatctggtgtgtatgggctcaccaaaggctttagtagtgacatgcgtgacattgaagataatgctattgaaggtgatcctgtatgccgccttgcattcgatgtgtacgaatatcgtatcgcgaaatatattggcgcatacgctgcggccatgaacggtgttgacgcgatcgtctttaccgcaggagttggcgaaaatagcccgattatgcgcgaagaaattattgagaactacttgggctacttagggatcaagatcgataaagaagccaatgacttcaaaggtgaggagaagatcatttcaacgcccgattccaaagtgattgcgatggtaatcccgaccaacgaggagctcatgatcgccaaagacacgaaagaaatcattgagaaagggttggacgagcttaagatctaatga

SEQ ID NO: 2688 - protein, 417 aa, synthetic construct
  REGION 1..417: note = Variant of acetate kinase
MHHHHHHGGSGMKVLVINSGSSSIKYQLLDMTNEKVLAKGLVERIGIDGSRIVHKVNGEKHVLEHEIKNHEIGLKLVLDLLTDEKYGVLKDLKEIDAVGHRVVHGGERFASSVKITDEVLKTIETLSFLAPLHNPANIMGIKSSMKLLPGVPQVAVFDTAFHQKMPEKAYLYAIPYEYYEKYKIRRYGFHGTSHRYVSKRAAEIMGKPYDQLKIITVHVGNGASVAAVKNGVSVDTSMGFTPLEGLVMGTRSGDIDPAIVEFLEKEEGLSAKEVVNILNKKSGVYGLTKGFSSDMRDIEDNAIEGDPVCRLAFDVYEYRIAKYIGAYAAAMNGVDAIVFTAGVGENSPIMREEIIENYLGYLGIKIDKEANDFKGEEKIISTPDSKVIAMVIPTNEELMIAKDTKEIIEKGLDELKI

SEQ ID NO: 2689 - DNA, 1257 bp, synthetic construct
  misc_feature 1..1257: note = Variant of acetate kinase
  source 1..1257: mol_type = other DNA
atgcaccatcatcatcatcatggcggtagcggcatgaaagttctggtgattaattctggtagctcctccatcaaatatcagctcctcgatatgaccaacgaaaaggtattagcgaaaggcttggtcgagcgcattggcatcgacggttcgcgtatcgtgcataaagttaacggcgaaaaacacgtgctggaacatgagattaagaatcacgaagtgggacttaaattggtcctggatcttcttacggacgaaaaatacggtgtgttgaaggatctcaaagaaatcgatgcagttgggcatcgcgtagtacatggcggcgagcgttttgccagtagcgtgaagattactgacgaagtcttaaagaccatcgagacgttgtcgttcttagctccgttacacaatccagcgaacattatgggtatcaagagcagcatgaaattattaccgggtgtgcctcaagttgccgtctttgatacagcgttccaccagaagatgccggagaaagcctatttgtacgcaatcccctatgagtactacgagaaatataaaattcgccgctatgggtttcatggaacctcacatcgttatgtgagtaaacgtgctgcggaaattatgggcaaaccgtacgatcagctcaagatcattaccgttcacgtgggtaacggcgcatcagttgcggcggtgaagaatggcgtatctgttgacacttccatgggtttcacaccacttgaaggtcttgtcatgggcacgcgcagcggcgatattgatccggccatcgtggaatttcttgagaaagaagaaggattgtcggccaaagaagtcgtcaacatcctcaacaagaaatctggtgtgtatgggctcaccaaaggctttagtagtgacatgcgtgacattgaagataatgctattgaaggtgatcctgtatgccgccttgcattcgatgtgtacgaatatcgtatcgcgaaatatattggcgcatacgctgcggccatgaacggtgttgacgcgatcgtctttaccgcaggagttggcgaaaatagcccgattatgcgcgaagaaattattgagaactacttgggctacttagggatcaagatcgataaagaagccaatgacttcaaaggtgaggagaagatcatttcaacgcccgattccaaagtgattgcgatggtagttccgaccaacgaggagctcatgatcgccaaagacacgaaagaaatcattgagaaagggttggacgagcttaagatctaatga

SEQ ID NO: 2690 - protein, 417 aa, synthetic construct
  REGION 1..417: note = Variant of acetate kinase
MHHHHHHGGSGMKVLVINSGSSSIKYQLLDMTNEKVLAKGLVERIGIDGSRIVHKVNGEKHVLEHEIKNHEVGLKLVLDLLTDEKYGVLKDLKEIDAVGHRVVHGGERFASSVKITDEVLKTIETLSFLAPLHNPANIMGIKSSMKLLPGVPQVAVFDTAFHQKMPEKAYLYAIPYEYYEKYKIRRYGFHGTSHRYVSKRAAEIMGKPYDQLKIITVHVGNGASVAAVKNGVSVDTSMGFTPLEGLVMGTRSGDIDPAIVEFLEKEEGLSAKEVVNILNKKSGVYGLTKGFSSDMRDIEDNAIEGDPVCRLAFDVYEYRIAKYIGAYAAAMNGVDAIVFTAGVGENSPIMREEIIENYLGYLGIKIDKEANDFKGEEKIISTPDSKVIAMVVPTNEELMIAKDTKEIIEKGLDELKI

SEQ ID NO: 2691 - DNA, 1257 bp, synthetic construct
  misc_feature 1..1257: note = Variant of acetate kinase
  source 1..1257: mol_type = other DNA
atgcaccatcatcatcatcatggcggtagcggcatgaaagttctggtgattaattctggtagctcctccatcaaatatcagctcctcgatatgaccaacgaaaaggtattagcgaaaggcttggtcgagcgcattggcatcgacggttgtcgtatcgtgcataaagttaacggcgaaaaacacgtgctggaacatgagattaagaatcacgaaattggacttaaattggtcctggatcttcttacggacgaaaaatacggtgtgttgaaggatctcaaagaaatcgatgcagttgggcatcgcgtagtacatggcggcgagcgttttgccagtagcgtgaagattactgacgaagtcttaaagaccatcgagacgttgtcgttcttagctccgttacacaatccagcgaacattatgggtatcaagagcagcatgaaattattaccgggtgtgcctcaagttgccgtctttgatacagcgttccaccagaagatgccggagaaagcctatttgtacgcaatcccctatgagtactacgagaaatataaaattcgccgctatgggtttcatggaacctcacatcgttatgtgagtaaacgtgctgcggaaattatgggcaaaccgtacgatcagctcaagatcattaccgttcacgtgggtaacggcgcatcagttgcggcggtgaagaatggcgtatctgttgacacttccatgggtttcacaccacttgaaggtcttgtcatgggcacgcgcagcggcgatattgatccggccatcgtggaatttcttgagaaagaagaaggattgtcggccaaagaagtcgtcaacatcctcaacaagaaatctggtgtgtatgggctcaccaaaggctttagtagtgacatgcgtgacattgaagataatgctattgaaggtgatcctgtatgccgccttgcattcgatgtgtacgaatatcgtatcgcgaaatatattggcgcatacgctgcggccatgaacggtgttgacgcgatcgtctttaccgcaggagttggcgaaaatagcccgattatgcgcgaagaaattattgagaactacttgggctacttagggatcaagatcgataaagaagccaatgacttcaaaggtgaggagaagatcatttcaacgcccgattccaaagtgattgcgatggtagttccgaccaacgaggagctcatgatcgccaaagacacgaaagaaatcattgagaaagggttggacgagcttaagatctaatga

SEQ ID NO: 2692 - protein, 417 aa, synthetic construct
  REGION 1..417: note = Variant of acetate kinase
MHHHHHHGGSGMKVLVINSGSSSIKYQLLDMTNEKVLAKGLVERIGIDGCRIVHKVNGEKHVLEHEIKNHEIGLKLVLDLLTDEKYGVLKDLKEIDAVGHRVVHGGERFASSVKITDEVLKTIETLSFLAPLHNPANIMGIKSSMKLLPGVPQVAVFDTAFHQKMPEKAYLYAIPYEYYEKYKIRRYGFHGTSHRYVSKRAAEIMGKPYDQLKIITVHVGNGASVAAVKNGVSVDTSMGFTPLEGLVMGTRSGDIDPAIVEFLEKEEGLSAKEVVNILNKKSGVYGLTKGFSSDMRDIEDNAIEGDPVCRLAFDVYEYRIAKYIGAYAAAMNGVDAIVFTAGVGENSPIMREEIIENYLGYLGIKIDKEANDFKGEEKIISTPDSKVIAMVVPTNEELMIAKDTKEIIEKGLDELKI

SEQ ID NO: 2693 - DNA, 1257 bp, synthetic construct
  misc_feature 1..1257: note = Variant of acetate kinase
  source 1..1257: mol_type = other DNA
atgcaccatcatcatcatcatggcggtagcggcatgaaagttctggtgattaattctggtagctcctccatcaaatatcagctcctcgatatgaccaacgaaaaggtattagcgaaaggcttggtcgagcgcattggcatcgacggttcgcgtatcgtgcataaagttaacggcgaaaaacacgtgctggaacatgcgattaagaatcacgaaattggacttaaattggtcctggatcttcttacggacgaaaaatacggtgtgttgaaggatctcaaagaaatcgatgcagttgggcatcgcgtagtacatggcggcgagcgttttgccagtagcgtgaagattactgacgaagtcttaaagaccatcgagacgttgtcgttcttagctccgttacacaatccagcgaacattatgggtatcaagagcagcatgaaattattaccgggtgtgcctcaagttgccgtctttgatacagcgttccaccagaagatgccggagaaagcctatttgtacgcaatcccctatgagtactacgagaaatataaaattcgccgctatgggtttcatggaacctcacatcgttatgtgagtaaacgtgctgcggaaattatgggcaaaccgtacgatcagctcaagatcattaccgttcacgtgggtaacggcgcatcagttgcggcggtgaagaatggcgtatctgttgacacttccatgggtttcacaccacttgaaggtcttgtcatgggcacgcgcagcggcgatattgatccggccatcgtggaatttcttgagaaagaagaaggattgtcggccaaagaagtcgtcaacatcctcaacaagaaatctggtgtgtatgggctcaccaaaggctttagtagtgacatgcgtgacattgaagataatgctattgaaggtgatcctgtatgccgccttgcattcgatgtgtacgaatatcgtatcgcgaaatatattggcgcatacgctgcggccatgaacggtgttgacgcgatcgtctttaccgcaggagttggcgaaaatagcccgattatgcgcgaagaaattattgagaactacttgggctacttagggatcaagatcgataaagaagccaatgacttcaaaggtgaggagaagatcatttcaacgcccgattccaaagtgattgcgatggtagttccgaccaacgaggagctcatgatcgccaaagacacgaaagaaatcattgagaaagggttggacgagcttaagatctaatga

SEQ ID NO: 2694 - protein, 417 aa, synthetic construct
  REGION 1..417: note = Variant of acetate kinase
MHHHHHHGGSGMKVLVINSGSSSIKYQLLDMTNEKVLAKGLVERIGIDGSRIVHKVNGEKHVLEHAIKNHEIGLKLVLDLLTDEKYGVLKDLKEIDAVGHRVVHGGERFASSVKITDEVLKTIETLSFLAPLHNPANIMGIKSSMKLLPGVPQVAVFDTAFHQKMPEKAYLYAIPYEYYEKYKIRRYGFHGTSHRYVSKRAAEIMGKPYDQLKIITVHVGNGASVAAVKNGVSVDTSMGFTPLEGLVMGTRSGDIDPAIVEFLEKEEGLSAKEVVNILNKKSGVYGLTKGFSSDMRDIEDNAIEGDPVCRLAFDVYEYRIAKYIGAYAAAMNGVDAIVFTAGVGENSPIMREEIIENYLGYLGIKIDKEANDFKGEEKIISTPDSKVIAMVVPTNEELMIAKDTKEIIEKGLDELKI

SEQ ID NO: 2695 - DNA, 1257 bp, synthetic construct
  misc_feature 1..1257: note = Variant of acetate kinase
  source 1..1257: mol_type = other DNA
atgcaccatcatcatcatcatggcggtagcggcatgaaagttctggtgattaattctggtagctcctccatcaaatatcagctcctcgatatgaccaacgaaaaggtattagcgaaaggcttggtcgagcgcattggcatcgacggttcgcgtatcgtgcataaagttaacggcgaaaaacacgtgctggaacatgagattaagaatcacgaaattggacttaaattggtcctggatcttcttacggacgaaaaatacggtgtgttgaaggatctcaaagaaatcgatgcagttgggcatcgcgtagtacatggcggcgagcgttttgccagtagcgtgaagattactgacgaagtcttaaagaccatcgagacgttgtcgttcttagctccgttacacaatccagcgaacattatgggtatcaagagcagcatgaaattattaccgggtgtgcctcaagttgcctcgtttgatacagcgttccaccagaagatgccggagaaagcctatttgtacgcaatcccctatgagtactacgagaaatataaaattcgccgctatgggtttcatggaacctcacatcgttatgtgagtaaacgtgctgcggaaattatgggcaaaccgtacgatcagctcaagatcattaccgttcacgtgggtaacggcgcatcagttgcggcggtgaagaatggcgtatctgttgacacttccatgggtttcacaccacttgaaggtcttgtcatgggcacgcgcagcggcgatattgatccggccatcgtggaatttcttgagaaagaagaaggattgtcggccaaagaagtcgtcaacatcctcaacaagaaatctggtgtgtatgggctcaccaaaggctttagtagtgacatgcgtgacattgaagataatgctattgaaggtgatcctgtatgccgccttgcattcgatgtgtacgaatatcgtatcgcgaaatatattggcgcatacgctgcggccatgaacggtgttgacgcgatcgtctttaccgcaggagttggcgaaaatagcccgattatgcgcgaagaaattattgagaactacttgggctacttagggatcaagatcgataaagaagccaatgacttcaaaggtgaggagaagatcatttcaacgcccgattccaaagtgattgcgatggtagttccgaccaacgaggagctcatgatcgccaaagacacgaaagaaatcattgagaaagggttggacgagcttaagatctaatga

SEQ ID NO: 2696 - protein, 417 aa, synthetic construct
  REGION 1..417: note = Variant of acetate kinase
MHHHHHHGGSGMKVLVINSGSSSIKYQLLDMTNEKVLAKGLVERIGIDGSRIVHKVNGEKHVLEHEIKNHEIGLKLVLDLLTDEKYGVLKDLKEIDAVGHRVVHGGERFASSVKITDEVLKTIETLSFLAPLHNPANIMGIKSSMKLLPGVPQVASFDTAFHQKMPEKAYLYAIPYEYYEKYKIRRYGFHGTSHRYVSKRAAEIMGKPYDQLKIITVHVGNGASVAAVKNGVSVDTSMGFTPLEGLVMGTRSGDIDPAIVEFLEKEEGLSAKEVVNILNKKSGVYGLTKGFSSDMRDIEDNAIEGDPVCRLAFDVYEYRIAKYIGAYAAAMNGVDAIVFTAGVGENSPIMREEIIENYLGYLGIKIDKEANDFKGEEKIISTPDSKVIAMVVPTNEELMIAKDTKEIIEKGLDELKI

SEQ ID NO: 2697 - DNA, 1257 bp, synthetic construct
  misc_feature 1..1257: note = Variant of acetate kinase
  source 1..1257: mol_type = other DNA
atgcaccatcatcatcatcatggcggtagcggcatgaaagttctggtgattaattctggtagctcctccatcaaatatcagctcctcgatatgaccaacgaaaaggtattagcgaaaggcttggtcgagcgcattggcatcgacggttcgcgtatcgtgcataaagttaacggcgaaaaacacgtgctggaacatgagattaagaatcacgaaattggacttaaattggtcctggatcttcttacggacgaaaaatacggtgtgttgaaggatctcaaagaaatcgatgcagttgggcatcgcgtagtacatggcggcgagcgttttgccagtagcgtgaagattactgacgaagtcttaaagaccatcgagacgttgtcgttcttagctccgttacacaatccagcgaacattatgggtatcaagagcagcatgaaattattaccgggtgtgcctcaagttgccgtctttgatacagcgttccaccagaagatgccggagaaagcctatttgtacgcaatcccctatgagtactacgagaaatataaaattcgccgctatgggtttcatggaacctcacatcgttatgtgagtaaacgtgctgcggaaattatgggcaaaccgtacgatcagctcaagatcattaccgttcacgtgggtaacggcgcatcagttgcggcggtgaagaatggcgtatctgttgacacttccatgggtttcacaccacttgaaggtcttgtcatgggcacgcgcagcggcgatattgatccggccatcgtggaatttcttgagaaagaagaaggattgtcggccaaagaagtcgtctggatcctcaacaagaaatctggtgtgtatgggctcaccaaaggctttagtagtgacatgcgtgacattgaagataatgctattgaaggtgatcctgtatgccgccttgcattcgatgtgtacgaatatcgtatcgcgaaatatattggcgcatacgctgcggccatgaacggtgttgacgcgatcgtctttaccgcaggagttggcgaaaatagcccgattatgcgcgaagaaattattgagaactacttgggctacttagggatcaagatcgataaagaagccaatgacttcaaaggtgaggagaagatcatttcaacgcccgattccaaagtgattgcgatggtagttccgaccaacgaggagctcatgatcgccaaagacacgaaagaaatcattgagaaagggttggacgagcttaagatctaatga

SEQ ID NO: 2698 - protein, 417 aa, synthetic construct
  REGION 1..417: note = Variant of acetate kinase
MHHHHHHGGSGMKVLVINSGSSSIKYQLLDMTNEKVLAKGLVERIGIDGSRIVHKVNGEKHVLEHEIKNHEIGLKLVLDLLTDEKYGVLKDLKEIDAVGHRVVHGGERFASSVKITDEVLKTIETLSFLAPLHNPANIMGIKSSMKLLPGVPQVAVFDTAFHQKMPEKAYLYAIPYEYYEKYKIRRYGFHGTSHRYVSKRAAEIMGKPYDQLKIITVHVGNGASVAAVKNGVSVDTSMGFTPLEGLVMGTRSGDIDPAIVEFLEKEEGLSAKEVVWILNKKSGVYGLTKGFSSDMRDIEDNAIEGDPVCRLAFDVYEYRIAKYIGAYAAAMNGVDAIVFTAGVGENSPIMREEIIENYLGYLGIKIDKEANDFKGEEKIISTPDSKVIAMVVPTNEELMIAKDTKEIIEKGLDELKI

SEQ ID NO: 2699 - DNA, 1257 bp, synthetic construct
  misc_feature 1..1257: note = Variant of acetate kinase
  source 1..1257: mol_type = other DNA
atgcaccatcatcatcatcatggcggtagcggcatgaaagttctggtgattaattctggtagctcctccatcaaatatcagctcctcgatatgaccaacgaaaaggtattagcgaaaggcttggtcgagcgcattggcatcgacggttcgcgtatcgtgcataaagttaacggcgaaaaacacgtgctggaacatgagattaagaatcacgaaattggacttaaattggtcctggatcttcttacggacgaaaaatacggtgtgttgaaggatctcaaagaaatcgatgcagttgggcatcgcgtagtacatggcggcgagcgttttgccagtagcgtgaagattactgacgaagtcttaaagaccatcgagacgttgtcgttcttagctccgttacacaatccagcgaacattatgggtatcaagagcagcatgaaattattaccgggtgtgcctcaagttgccgcttttgatacagcgttccaccagaagatgccggagaaagcctatttgtacgcaatcccctatgagtactacgagaaatataaaattcgccgctatgggtttcatggaacctcacatcgttatgtgagtaaacgtgctgcggaaattatgggcaaaccgtacgatcagctcaagatcattaccgttcacgtgggtaacggcgcatcagttgcggcggtgaagaatggcgtatctgttgacacttccatgggtttcacaccacttgaaggtcttgtcatgggcacgcgcagcggcgatattgatccggccatcgtggaatttcttgagaaagaagaaggattgtcggccaaagaagtcgtcaacatcctcaacaagaaatctggtgtgtatgggctcaccaaaggctttagtagtgacatgcgtgacattgaagataatgctattgaaggtgatcctgtatgccgccttgcattcgatgtgtacgaatatcgtatcgcgaaatatattggcgcatacgctgcggccatgaacggtgttgacgcgatcgtctttaccgcaggagttggcgaaaatagcccgattatgcgcgaagaaattattgagaactacttgggctacttagggatcaagatcgataaagaagccaatgacttcaaaggtgaggagaagatcatttcaacgcccgattccaaagtgattgcgatggtagttccgaccaacgaggagctcatgatcgccaaagacacgaaagaaatcattgagaaagggttggacgagcttaagatctaatga

SEQ ID NO: 2700 - protein, 417 aa, synthetic construct
  REGION 1..417: note = Variant of acetate kinase
MHHHHHHGGSGMKVLVINSGSSSIKYQLLDMTNEKVLAKGLVERIGIDGSRIVHKVNGEKHVLEHEIKNHEIGLKLVLDLLTDEKYGVLKDLKEIDAVGHRVVHGGERFASSVKITDEVLKTIETLSFLAPLHNPANIMGIKSSMKLLPGVPQVAAFDTAFHQKMPEKAYLYAIPYEYYEKYKIRRYGFHGTSHRYVSKRAAEIMGKPYDQLKIITVHVGNGASVAAVKNGVSVDTSMGFTPLEGLVMGTRSGDIDPAIVEFLEKEEGLSAKEVVNILNKKSGVYGLTKGFSSDMRDIEDNAIEGDPVCRLAFDVYEYRIAKYIGAYAAAMNGVDAIVFTAGVGENSPIMREEIIENYLGYLGIKIDKEANDFKGEEKIISTPDSKVIAMVVPTNEELMIAKDTKEIIEKGLDELKI

SEQ ID NO: 2701 - DNA, 1257 bp, synthetic construct
  misc_feature 1..1257: note = Variant of acetate kinase
  source 1..1257: mol_type = other DNA
atgcaccatcatcatcatcatggcggtagcggcatgaaagttctggtgattaattctggtagctcctccatcaaatatcagctcctcgatatgaccaacgaaaaggtattagcgaaaggcttggtcgagcgcattggcatcgacggttcgcgtattgtgcataaagttaacggcgaaaaacacgtgctggaacatgagattaaggatcacgaaattggacttaaattggtcctggatcttcttacggacgaaaaatacggtgtgttgaaggatctcaaagaaatcgatgcagttgggcatcgcgtagtacatggcggcgagcgttttgccagtagcgtgaagattactgacgaagtcttaaagaccatcgagacgttgtcgttcttagctccgttacacaatccagcgaacattatgggtatcaagagcagcatgaaattaatgccgggtgtgcctcaagttgccgtctttgatacagcgttccaccagaagatgccggagaaagcctatttgtacgcaatcccctatgagtactacgagaaatataaaattcgccgctatgggtttcatggaacctcacatcgttatgtgagtaaacgtgctgcggaaattatgggcaaaccgtacgatcagctcaagatcattaccgttcacgtgggtaacggcgcatcagttgcggcggtgaagaatggcgtatctgttgacacttccatgggtttcacaccacttgaaggtcttgtcatgggcacgcgcagcggcgatattgatccggccatcgtggaatttcttgagaaagaagaaggattgtcggccaaagaagtcgtcaacatcctcaacaagaaatctggtgtgtatgggctcaccaaaggctttagtagtgacatgcgtgacattgaagataatgctattgaaggtgatcctgtatgccgccttgcattcgatgtgtacgaatatcgtatcgcgaaatatattggcgcatacgctgcggccatgaacggtgttgacgcgatcgtctttaccgcaggagttggcgaaaatagcagcattatgcgcgaagaaattattgagaactacttgggctacttagggatcaagatcgataaagaagccaatcgcttcaaaggtgaggagaagatcatttcaacgcccgattccaaagtgattgcgatggtaattccgaccaacgaggagctcatgatcgccaaagacacgaaagaaatcattgagaaagggttggacgagcttaagatctaatga

SEQ ID NO: 2702 - protein, 417 aa, synthetic construct
  REGION 1..417: note = Variant of acetate kinase
MHHHHHHGGSGMKVLVINSGSSSIKYQLLDMTNEKVLAKGLVERIGIDGSRIVHKVNGEKHVLEHEIKDHEIGLKLVLDLLTDEKYGVLKDLKEIDAVGHRVVHGGERFASSVKITDEVLKTIETLSFLAPLHNPANIMGIKSSMKLMPGVPQVAVFDTAFHQKMPEKAYLYAIPYEYYEKYKIRRYGFHGTSHRYVSKRAAEIMGKPYDQLKIITVHVGNGASVAAVKNGVSVDTSMGFTPLEGLVMGTRSGDIDPAIVEFLEKEEGLSAKEVVNILNKKSGVYGLTKGFSSDMRDIEDNAIEGDPVCRLAFDVYEYRIAKYIGAYAAAMNGVDAIVFTAGVGENSSIMREEIIENYLGYLGIKIDKEANRFKGEEKIISTPDSKVIAMVIPTNEELMIAKDTKEIIEKGLDELKI

SEQ ID NO: 2703 - DNA, 1257 bp, synthetic construct
  misc_feature 1..1257: note = Variant of acetate kinase
  source 1..1257: mol_type = other DNA
atgcaccatcatcatcatcatggcggtagcggcatgaaagttctggtgattaattctggtagctcctccatcaaatatcagctcctcgatatgaccaacgaaaaggtattagcgaaaggcttggtcgagcgcattggcatcgacggttcgcgtcttgtgcataaagttaacggcgaaaaacacgtgctggaacatgagattaaggatcacgaaattggacttaaattggtcctggatcttcttacggacgaaaaatacggtgtgttgaaggatctcaaagaaatcgatgcagttgggcatcgcgtagtacatggcggcgagcgttttgccagtagcgtgaagattactgacgaagtcttaaagaccatcgagacgttgtcgttcttagctccgttacacaatccagcgaacattatgggtatcaagagcagcatgaaattaatgccgggtgtgcctcaagttgccgtctttgatacagcgttccaccagaagatgccggagaaagcctatttgtacgcaatcccctatgagtactacgagaaatataaaattcgccgctatgggtttcatggaacctcacatcgttatgtgagtaaacgtgctgcggaaattatgggcaaaccgtacgatcagctcaagatcattaccgttcacgtgggtaacggcgcatcagttgcggcggtgaagaatggcgtatctgttgacacttccatgggtttcacaccacttgaaggtcttgtcatgggcacgcgcagcggcgatattgatccggccatcgtggaatttcttgagaaagaagaaggattgtcggccaaagaagtcgtcaacatcctcaacaagaaatctggtgtgtatgggctcaccaaaggctttagtagtgacatgcgtgacattgaagataatgctattgaaggtgatcctgtatgccgccttgcattcgatgtgtacgaatatcgtatcgcgaaatatattggcgcatacgctgcggccatgaacggtgttgacgcgatcgtctttaccgcaggagttggcgaaaatagcagcattatgcgcgaagaaattattgagaactacttgggctacttagggatcaagatcgataaagaagccaatgacttcaaaggtgaggagaagatcatttcaacgcccgattccaaagtgattgcgatggtaattccgaccaacgaggagctcatgatcgccaaagacacgaaagaaatcattgagaaagggttggacgagcttaagatctaatga

SEQ ID NO: 2704 - protein, 417 aa, synthetic construct
  REGION 1..417: note = Variant of acetate kinase
MHHHHHHGGSGMKVLVINSGSSSIKYQLLDMTNEKVLAKGLVERIGIDGSRLVHKVNGEKHVLEHEIKDHEIGLKLVLDLLTDEKYGVLKDLKEIDAVGHRVVHGGERFASSVKITDEVLKTIETLSFLAPLHNPANIMGIKSSMKLMPGVPQVAVFDTAFHQKMPEKAYLYAIPYEYYEKYKIRRYGFHGTSHRYVSKRAAEIMGKPYDQLKIITVHVGNGASVAAVKNGVSVDTSMGFTPLEGLVMGTRSGDIDPAIVEFLEKEEGLSAKEVVNILNKKSGVYGLTKGFSSDMRDIEDNAIEGDPVCRLAFDVYEYRIAKYIGAYAAAMNGVDAIVFTAGVGENSSIMREEIIENYLGYLGIKIDKEANDFKGEEKIISTPDSKVIAMVIPTNEELMIAKDTKEIIEKGLDELKI

SEQ ID NO: 2705 - DNA, 1257 bp, synthetic construct
  misc_feature 1..1257: note = Variant of acetate kinase
  source 1..1257: mol_type = other DNA
atgcaccatcatcatcatcatggcggtagcggcatgaaagttctggtgattaattctggtagctcctccatcaaatatcagctcctcgatatgaccaacgaaaaggtattagcgaaaggcttggtcgagcgcattggcatcgacggttcgcgtcttgtgcataaagttaacggcgaaaaacacgtgctggaacatgagattaagaatcacgaaattggacttaaattggtcctggatcttcttacggacgaaaaatacggtgtgttgaaggatctcaaagaaatcgatgcagttgggcatcgcgtagtacatggcggcgagcgttttgccagtagcgtgaagattactgacgaagtcttaaagaccatcgagacgttgtcgttcttagctccgttacacaatccagcgaacattatgggtatcaagagcagcatgaaattaatgccgggtgtgcctcaagttgccgtctttgatacagcgttccaccagaagatgccggagaaagcctatttgtacgcaatcccctatgagtactacgagaaatataaaattcgccgctatgggtttcatggaacctcacatcgttatgtgagtaaacgtgctgcggaaattatgggcaaaccgtacgatcagctcaagatcattaccgttcacgtgggtaacggcgcatcagttgcggcggtgaagaatggcgtatctgttgacacttccatgggtttcacaccacttgaaggtcttgtcatgggcacgcgcagcggcgatattgatccggccatcgtggaatttcttgagaaagaagaaggattgtcggccaaagaagtcgtcaacatcctcaacaagaaatctggtgtgtatgggctcaccaaaggctttagtagtgacatgcgtgacattgaagataatgctattgaaggtgatcctgtatgccgccttgcattcgatgtgtacgaatatcgtatcgcgaaatatattggcgcatacgctgcggccatgaacggtgttgacgcgatcgtctttaccgcaggagttggcgaaaatagcagcattatgcgcgaagaaattattgagaactacttgggctacttagggatcaagatcgataaagaagccaatcgcttcaaaggtgaggagaagatcatttcaacgcccgattccaaagtgattgcgatggtagttccgaccaacgaggagctcatgatcgccaaagacacgaaagaaatcattgagaaagggttggacgagcttaagatctaatga

SEQ ID NO: 2706 - protein, 417 aa, synthetic construct
  REGION 1..417: note = Variant of acetate kinase
MHHHHHHGGSGMKVLVINSGSSSIKYQLLDMTNEKVLAKGLVERIGIDGSRLVHKVNGEKHVLEHEIKNHEIGLKLVLDLLTDEKYGVLKDLKEIDAVGHRVVHGGERFASSVKITDEVLKTIETLSFLAPLHNPANIMGIKSSMKLMPGVPQVAVFDTAFHQKMPEKAYLYAIPYEYYEKYKIRRYGFHGTSHRYVSKRAAEIMGKPYDQLKIITVHVGNGASVAAVKNGVSVDTSMGFTPLEGLVMGTRSGDIDPAIVEFLEKEEGLSAKEVVNILNKKSGVYGLTKGFSSDMRDIEDNAIEGDPVCRLAFDVYEYRIAKYIGAYAAAMNGVDAIVFTAGVGENSSIMREEIIENYLGYLGIKIDKEANRFKGEEKIISTPDSKVIAMVVPTNEELMIAKDTKEIIEKGLDELKI

SEQ ID NO: 2707 - DNA, 1257 bp, synthetic construct
  misc_feature 1..1257: note = Variant of acetate kinase
  source 1..1257: mol_type = other DNA
atgcaccatcatcatcatcatggcggtagcggcatgaaagttctggtgattaattctggtagctcctccatcaaatatcagctcctcgatatgaccaacgaaaaggtattagcgaaaggcttggtcgagcgcattggcatcgacggttcgcgtatcgtgcataaagttaacggcgaaaaacacgtgctggaacatgagattaagaatcacgaaattggacttaaattggtcctggatcttcttacggacgaaaaatacggtgtgttgaaggatctcaaagaaatcgatgcagttgggcatcgcgtagtacatggcggcgagcgttttgccagtagcgtgaagattactgacgaagtcttaaagaccatcgagacgttgtcgttcttagctccgttacacaatccagcgaacattatgggtatcaagagcagcatgaaagtgttaccgggtgtgcctcaagttgccgtctttgatacagcgttccaccagaagatgccggagaaagcctatttgtacgcaatcccctatgagtactacgagaaatataaaattcgccgctatgggtttcatggaacctcacatcgttatgtgagtaaacgtgctgcggaaattctgggcaaaccgtacgatcagctcaagatcattaccgttcacgtgggtaacggcgcatcagttgcggcggtgaagaatggcgtatctgttgacacttccatgggtttcacaccacttgaaggtcttgtcatgggcacgcgcagcggcgatattgatccggccatcgtggaatttcttgagaaagaagaaggattgtcggccaaagaagtcgtcaacatcctcaacaagaaatctggtgtgtatgggctcaccaaaggctttagtagtgacatgcgtgacattgaagataatgctattgaaggtgatcctgtatgccgccttgcattagatgtgtacgaatatcgtatcgcgaaatatattggcgcatacgctgcggccatgaacggtgttgacgcgatcgtctttaccgcaggagttggcgaaaatagcccgattatgcgcgaagaaattattgagaactacttgggctacttagggatcaagatcgataaagaagccaatgacgttaaaggtgaggagaagatcatttcaacgcccgattccaaagtgattgcgatggtagttccgaccaacgaggagctcatgatcgccaaagacacgaaagaaatcgttgagaaagggttggacgagcttaagatctaatga

SEQ ID NO: 2708 - protein, 417 aa, synthetic construct
  REGION 1..417: note = Variant of acetate kinase
MHHHHHHGGSGMKVLVINSGSSSIKYQLLDMTNEKVLAKGLVERIGIDGSRIVHKVNGEKHVLEHEIKNHEIGLKLVLDLLTDEKYGVLKDLKEIDAVGHRVVHGGERFASSVKITDEVLKTIETLSFLAPLHNPANIMGIKSSMKVLPGVPQVAVFDTAFHQKMPEKAYLYAIPYEYYEKYKIRRYGFHGTSHRYVSKRAAEILGKPYDQLKIITVHVGNGASVAAVKNGVSVDTSMGFTPLEGLVMGTRSGDIDPAIVEFLEKEEGLSAKEVVNILNKKSGVYGLTKGFSSDMRDIEDNAIEGDPVCRLALDVYEYRIAKYIGAYAAAMNGVDAIVFTAGVGENSPIMREEIIENYLGYLGIKIDKEANDVKGEEKIISTPDSKVIAMVVPTNEELMIAKDTKEIVEKGLDELKI

SEQ ID NO: 2709 - DNA, 1257 bp, synthetic construct
  misc_feature 1..1257: note = Variant of acetate kinase
  source 1..1257: mol_type = other DNA
atgcaccatcatcatcatcatggcggtagcggcatgaaagttctggtgattaattctggtagctcctccatcaaatatcagctcctcgatatgaccaacgaaaaggtattagcgaaaggcttggtcgagcgcattggcatcgacggttcgcgtattgtgcataaagttaacggcgaaaaacacgtgctggaacatgagattaaggatcacgaaattggacttaaattggtcctggatcttcttacggacgaaaaatacggtgtgttgaaggatctcaaagaaatcgatgcagttgggcatcgcgtagtacatggcggcgagcgttttgccagtagcgtgaagattactgacgaagtcttaaagaccatcgagacgttgtcgttcttagctccgttacacaatccagcgaacattatgggtatcaagagcagcatgaaattaatgccgggtgtgcctcaagttgccgtctttgatacagcgttccaccagaagatgccggagaaagcctatttgtacgcaatcccctatgagtactacgagaaatataaaattcgccgctatgggtttcatggaacctcacatcgttatgtgagtaaacgtgctgcggaaattatgggcaaaccgtacgatcagctcaagatcattaccgttcacgtgggtaacggcgcatcagttgcggcggtgaagaatggcgtatctgttgacacttccatgggtttcacaccacttgaaggtcttgtcatgggcacgcgcagcggcgatattgatccggccatcgtggaatttcttgagaaagaagaaggattgtcggccaaagaagtcgtcaacatcctcaacaagaaatctggtgtgtatgggctcaccaaaggctttagtagtgacatgcgtgacattgaagataatgctattgaaggtgatcctgtatgccgccttgcattcgatgtgtacgaatatcgtatcgcgaaatatattggcgcatacgctgcggccatgaacggtgttgacgcgatcgtctttaccgcaggagttggcgaaaatagcagcattatgcgcgaagaaattattgagaactacttgggctacttagggatcaagatcgataaagaagccaatgatttcaaaggtgaggagaagatcatttcaacgcccgattccaaagtgattgcgatggtaattccgaccaacgaggagctcatgatcgccaaagacacgaaagaaatcattgagaaagggttggacgagcttaagatctaatga

SEQ ID NO: 2710 - protein, 417 aa, synthetic construct
  REGION 1..417: note = Variant of acetate kinase
MHHHHHHGGSGMKVLVINSGSSSIKYQLLDMTNEKVLAKGLVERIGIDGSRIVHKVNGEKHVLEHEIKDHEIGLKLVLDLLTDEKYGVLKDLKEIDAVGHRVVHGGERFASSVKITDEVLKTIETLSFLAPLHNPANIMGIKSSMKLMPGVPQVAVFDTAFHQKMPEKAYLYAIPYEYYEKYKIRRYGFHGTSHRYVSKRAAEIMGKPYDQLKIITVHVGNGASVAAVKNGVSVDTSMGFTPLEGLVMGTRSGDIDPAIVEFLEKEEGLSAKEVVNILNKKSGVYGLTKGFSSDMRDIEDNAIEGDPVCRLAFDVYEYRIAKYIGAYAAAMNGVDAIVFTAGVGENSSIMREEIIENYLGYLGIKIDKEANDFKGEEKIISTPDSKVIAMVIPTNEELMIAKDTKEIIEKGLDELKI

SEQ ID NO: 2711 - DNA, 1257 bp, synthetic construct
  misc_feature 1..1257: note = Variant of acetate kinase
  source 1..1257: mol_type = other DNA
atgcaccatcatcatcatcatggcggtagcggcatgaaagttctggtgattaattctggtagctcctccatcaaatatcagctcctcgatatgaccaacgaaaaggtattagcgaaaggcttggtcgagcgcattggcatcgacggttcgcgtcttgtgcataaagttaacggcgaaaaacacgtgctggaacatgagattaagaatcacgaaattggacttaaattggtcctggatcttcttacggacgaaaaatacggtgtgttgaaggatctcaaagaaatcgatgcagttgggcatcgcgtagtacatggcggcgagcgttttgccagtagcgtgaagattactgacgaagtcttaaagaccatcgagacgttgtcgttcttagctccgttacacaatccagcgaacattatgggtatcaagagcagcatgaaattattaccgggtgtgcctcaagttgccgtctttgatacagcgttccaccagaagatgccggagaaagcctatttgtacgcaatcccctatgagtactacgagaaatataaaattcgccgctatgggtttcatggaacctcacatcgttatgtgagtaaacgtgctgcggaaattatgggcaaaccgtacgatcagctcaagatcattaccgttcacgtgggtaacggcgcatcagttgcggcggtgaagaatggcgtatctgttgacacttccatgggtttcacaccacttgaaggtcttgtcatgggcacgcgcagcggcgatattgatccggccatcgtggaatttcttgagaaagaagaaggattgtcggccaaagaagtcgtcaacatcctcaacaagaaatctggtgtgtatgggctcaccaaaggctttagtagtgacatgcgtgacattgaagataatgctattgaaggtgatcctgtatgccgccttgcattcgatgtgtacgaatatcgtatcgcgaaatatattggcgcatacgctgcggccatgaacggtgttgacgcgatcgtctttaccgcaggagttggcgaaaatagcagcattatgcgcgaagaaattattgagaactacttgggctacttagggatcaagatcgataaagaagccaatcgcttcaaaggtgaggagaagatcatttcaacgcccgattccaaagtgattgcgatggtagttccgaccaacgaggagctcatgatcgccaaagacacgaaagaaatcattgagaaagggttggacgagcttaagatctaatga

SEQ ID NO: 2712 - protein, 417 aa, synthetic construct
  REGION 1..417: note = Variant of acetate kinase
MHHHHHHGGSGMKVLVINSGSSSIKYQLLDMTNEKVLAKGLVERIGIDGSRLVHKVNGEKHVLEHEIKNHEIGLKLVLDLLTDEKYGVLKDLKEIDAVGHRVVHGGERFASSVKITDEVLKTIETLSFLAPLHNPANIMGIKSSMKLLPGVPQVAVFDTAFHQKMPEKAYLYAIPYEYYEKYKIRRYGFHGTSHRYVSKRAAEIMGKPYDQLKIITVHVGNGASVAAVKNGVSVDTSMGFTPLEGLVMGTRSGDIDPAIVEFLEKEEGLSAKEVVNILNKKSGVYGLTKGFSSDMRDIEDNAIEGDPVCRLAFDVYEYRIAKYIGAYAAAMNGVDAIVFTAGVGENSSIMREEIIENYLGYLGIKIDKEANRFKGEEKIISTPDSKVIAMVVPTNEELMIAKDTKEIIEKGLDELKI

SEQ ID NO: 2713 - DNA, 1257 bp, synthetic construct
  misc_feature 1..1257: note = Variant of acetate kinase
  source 1..1257: mol_type = other DNA
atgcaccatcatcatcatcatggcggtagcggcatgaaagttctggtgattaattctggtagctcctccatcaaatatcagctcctcgatatgaccaacgaaaaggtattagcgaaaggcttggtcgagcgcattggcatcgacggttcgcgtattgtgcataaagttaacggcgaaaaacacgtgctggaacatgagattaaggatcacgaaattggacttaaattggtcctggatcttcttacggacgaaaaatacggtgtgttgaaggatctcaaagaaatcgatgcagttgggcatcgcgtagtacatggcggcgagcgttttgccagtagcgtgaagattactgacgaagtcttaaagaccatcgagacgttgtcgttcttagctccgttacacaatccagcgaacattatgggtatcaagagcagcatgaaattaatgccgggtgtgcctcaagttgccgtctttgatacagcgttccaccagaagatgccggagaaagcctatttgtacgcaatcccctatgagtactacgagaaatataaaattcgccgctatgggtttcatggaacctcacatcgttatgtgagtaaacgtgctgcggaaattatgggcaaaccgtacgatcagctcaagatcattaccgttcacgtgggtaacggcgcatcagttgcggcggtgaagaatggcgtatctgttgacacttccatgggtttcacaccacttgaaggtcttgtcatgggcacgcgcagcggcgatattgatccggccatcgtggaatttcttgagaaagaagaaggattgtcggccaaagaagtcgtcaacatcctcaacaagaaatctggtgtgtatgggctcaccaaaggctttagtagtgacatgcgtgacattgaagataatgctattgaaggtgatcctgtatgccgccttgcattcgatgtgtacgaatatcgtatcgcgaaatatattggcgcatacgctgcggccatgaacggtgttgacgcgatcgtctttaccgcaggagttggcgaaaatagcagcattatgcgcgaagaaattattgagaactacttgggctacttagggatcaagatcgataaagaagccaatgacttcaaaggtgaggagaagatcatttcaacgcccgattccaaagtgattgcgatggtagttccgaccaacgaggagctcatgatcgccaaagacacgaaagaaatcattgagaaagggttggacgagcttaagatctaatga

SEQ ID NO: 2714 - protein, 417 aa, synthetic construct
  REGION 1..417: note = Variant of acetate kinase
MHHHHHHGGSGMKVLVINSGSSSIKYQLLDMTNEKVLAKGLVERIGIDGSRIVHKVNGEKHVLEHEIKDHEIGLKLVLDLLTDEKYGVLKDLKEIDAVGHRVVHGGERFASSVKITDEVLKTIETLSFLAPLHNPANIMGIKSSMKLMPGVPQVAVFDTAFHQKMPEKAYLYAIPYEYYEKYKIRRYGFHGTSHRYVSKRAAEIMGKPYDQLKIITVHVGNGASVAAVKNGVSVDTSMGFTPLEGLVMGTRSGDIDPAIVEFLEKEEGLSAKEVVNILNKKSGVYGLTKGFSSDMRDIEDNAIEGDPVCRLAFDVYEYRIAKYIGAYAAAMNGVDAIVFTAGVGENSSIMREEIIENYLGYLGIKIDKEANDFKGEEKIISTPDSKVIAMVVPTNEELMIAKDTKEIIEKGLDELKI

SEQ ID NO: 2715 - DNA, 1257 bp, synthetic construct
  misc_feature 1..1257: note = Variant of acetate kinase
  source 1..1257: mol_type = other DNA
atgcaccatcatcatcatcatggcggtagcggcatgaaagttctggtgattaattctggtagctcctccatcaaatatcagctcctcgatatgaccaacgaaaaggtattagcgaaaggcttggtcgagcgcattggcatcgacggttcgcgtcttgtgcataaagttaacggcgaaaaacacgtgctggaacatgagattaagaatcacgaaattggacttaaattggtcctggatcttcttacggacgaaaaatacggtgtgttgaaggatctcaaagaaatcgatgcagttgggcatcgcgtagtacatggcggcgagcgttttgccagtagcgtgaagattactgacgaagtcttaaagaccatcgagacgttgtcgttcttagctccgttacacaatccactgaacattatgggtatcaagagcagcatgaaattactgccgggtgtgcctcaagttgccgtctttgatacagcgttccaccagaagatgccggagaaagcctatttgtacgcaatcccctatgagtactacgagaaatataaaattcgccgctatgggtttcatggaacctcacatcgttatgtgagtaaacgtgctgcggaaattatgggcaaaccgtacgatcagctcaagatcattaccgttcacgtgggtaacggcgcatcagttgcggcggtgaagaatggcgtatctgttgacacttccatgggtttcacaccacttgaaggtcttgtcatgggcacgcgcagcggcgatattgatccggccatcgtggaatttcttgagaaagaagaaggattgtcggccaaagaagtcgtcaacatcctcaacaagaaatctggtgtgtatgggctcaccaaaggctttagtagtgacatgcgtgacattgaagataatgctattgaaggtgatcctgtatgccgccttgcattcgatgtgtacgaatatcgtatcgcgaaatatattggcgcatacgctgcggccatgaacggtgttgacgcgatcgtctttaccgcaggagttggcgaaaatagcagcattatgcgcgaagaaattattgagaactacttgggctacttagggatcaagatcgataaagaagccaatcgcttcaaaggtgaggagaagatcatttcaacgcccgattccaaagtgattgcgatggtagttccgaccaacgaggagctcatgatcgccaaagacacgaaagaaatcattgagaaagggttggacgagcttaagatctaatga

SEQ ID NO: 2716 - protein, 417 aa, synthetic construct
  REGION 1..417: note = Variant of acetate kinase
MHHHHHHGGSGMKVLVINSGSSSIKYQLLDMTNEKVLAKGLVERIGIDGSRLVHKVNGEKHVLEHEIKNHEIGLKLVLDLLTDEKYGVLKDLKEIDAVGHRVVHGGERFASSVKITDEVLKTIETLSFLAPLHNPLNIMGIKSSMKLLPGVPQVAVFDTAFHQKMPEKAYLYAIPYEYYEKYKIRRYGFHGTSHRYVSKRAAEIMGKPYDQLKIITVHVGNGASVAAVKNGVSVDTSMGFTPLEGLVMGTRSGDIDPAIVEFLEKEEGLSAKEVVNILNKKSGVYGLTKGFSSDMRDIEDNAIEGDPVCRLAFDVYEYRIAKYIGAYAAAMNGVDAIVFTAGVGENSSIMREEIIENYLGYLGIKIDKEANRFKGEEKIISTPDSKVIAMVVPTNEELMIAKDTKEIIEKGLDELKI

SEQ ID NO: 2717 - DNA, 1257 bp, synthetic construct
  misc_feature 1..1257: note = Variant of acetate kinase
  source 1..1257: mol_type = other DNA
atgcaccatcatcatcatcatggcggtagcggcatgaaagttctggtgattaattctggtagctcctccatcaaatatcagctcctcgatatgaccaacgaaaaggtattagcgaaaggcttggtcgagcgcattggcatcgacggttcgcgtattgtgcataaagttaacggcgaaaaacacgtgctggaacatgagattaagaatcacgaaattggacttaaattggtcctggatcttcttacggacgaaaaatacggtgtgttgaaggatctcaaagaaatcgatgcagttgggcatcgcgtagtacatggcggcgagcgttttgccagtagcgtgaagattactgacgaagtcttaaagaccatcgagacgttgtcgttcttagctccgttacacaatccagcgaacattatgggtatcaagagcagcatgaaattaatgccgggtgtgcctcaagttgccgtctttgatacagcgttccaccagaagatgccggagaaagcctatttgtacgcaatcccctatgagtactacgagaaatataaaattcgccgctatgggtttcatggaacctcacatcgttatgtgagtaaacgtgctgcggaaattatgggcaaaccgtacgatcagctcaagatcattaccgttcacgtgggtaacggcgcatcagttgcggcggtgaagaatggcgtatctgttgacacttccatgggtttcacaccacttgaaggtcttgtcatgggcacgcgcagcggcgatattgatccggccatcgtggaatttcttgagaaagaagaaggattgtcggccaaagaagtcgtcaacatcctcaacaagaaatctggtgtgtatgggctcaccaaaggctttagtagtgacatgcgtgacattgaagataatgctattgaaggtgatcctgtatgccgccttgcattcgatgtgtacgaatatcgtatcgcgaaatatattggcgcatacgctgcggccatgaacggtgttgacgcgatcgtctttaccgcaggagttggcgaaaatagcagcattatgcgcgaagaaattattgagaactacttgggctacttagggatcaagatcgataaagaagccaatgacttcaaaggtgaggagaagatcatttcaacgcccgattccaaagtgattgcgatggtagttccgaccaacgaggagctcatgatcgccaaagacacgaaagaaatcattgagaaagggttggacgagcttaagatctaatga

SEQ ID NO: 2718 - protein, 417 aa, synthetic construct
  REGION 1..417: note = Variant of acetate kinase
MHHHHHHGGSGMKVLVINSGSSSIKYQLLDMTNEKVLAKGLVERIGIDGSRIVHKVNGEKHVLEHEIKNHEIGLKLVLDLLTDEKYGVLKDLKEIDAVGHRVVHGGERFASSVKITDEVLKTIETLSFLAPLHNPANIMGIKSSMKLMPGVPQVAVFDTAFHQKMPEKAYLYAIPYEYYEKYKIRRYGFHGTSHRYVSKRAAEIMGKPYDQLKIITVHVGNGASVAAVKNGVSVDTSMGFTPLEGLVMGTRSGDIDPAIVEFLEKEEGLSAKEVVNILNKKSGVYGLTKGFSSDMRDIEDNAIEGDPVCRLAFDVYEYRIAKYIGAYAAAMNGVDAIVFTAGVGENSSIMREEIIENYLGYLGIKIDKEANDFKGEEKIISTPDSKVIAMVVPTNEELMIAKDTKEIIEKGLDELKI

SEQ ID NO: 2719 - DNA, 1257 bp, synthetic construct
  misc_feature 1..1257: note = Variant of acetate kinase
  source 1..1257: mol_type = other DNA
atgcaccatcatcatcatcatggcggtagcggcatgaaagttctggtgattaattctggtagctcctccatcaaatatcagctcctcgatatgaccaacgaaaaggtattagcgaaaggcttggtcgagcgcattggcatcgacggttcgcgtattgtgcataaagttaacggcgaaaaacacgtgctggaacatgagattaagaatcacgaaattggacttaaattggtcctggatcttcttacggacgaaaaatacggtgtgttgaaggatctcaaagaaatcgatgcagttgggcatcgcgtagtacatggcggcgagcgttttgccagtagcgtgaagattactgacgaagtcttaaagaccatcgagacgttgtcgttcttagctccgttacacaatccagcgaacattatgggtatcaagagcagcatgaaattattaccgggtgtgcctcaagttgccgtctttgatacagcgttccaccagaagatgccggagaaagcctatttgtacgcaatcccctatgagtactacgagaaatataaaattcgccgctatgggtttcatggaacctcacatcgttatgtgagtaaacgtgctgcggaaattatgggcaaaccgtacgatcagctcaagatcattaccgttcacgtgggtaacggcgcatcagttgcggcggtgaagaatggcgtatctgttgacacttccatgggtttcacaccacttgaaggtcttgtcatgggcacgcgcagcggcgatattgatccggccatcgtggaatttcttgagaaagaagaaggattgtcggccaaagaagtcgtcaacatcctcaacaagaaatctggtgtgtatgggctcaccaaaggctttagtagtgacatgcgtgacattgaagataatgctattgaaggtgatcctgtatgccgccttgcattcgatgtgtacgaatatcgtatcgcgaaatatattggcgcatacgctgcggccatgaacggtgttgacgcgatcgtctttaccgcaggagttggcgaaaatagcagcattatgcgcgaagaaattattgagaactacttgggctacttagggatcaagatcgataaagaagccaatcgcttcaaaggtgaggagaagatcatttcaacgcccgattccaaagtgattgcgatggtaattccgaccaacgaggagctcatgatcgccaaagacacgaaagaaatcattgagaaagggttggacgagcttaagatctaatga

SEQ ID NO: 2720 - protein, 417 aa, synthetic construct
  REGION 1..417: note = Variant of acetate kinase
MHHHHHHGGSGMKVLVINSGSSSIKYQLLDMTNEKVLAKGLVERIGIDGSRIVHKVNGEKHVLEHEIKNHEIGLKLVLDLLTDEKYGVLKDLKEIDAVGHRVVHGGERFASSVKITDEVLKTIETLSFLAPLHNPANIMGIKSSMKLLPGVPQVAVFDTAFHQKMPEKAYLYAIPYEYYEKYKIRRYGFHGTSHRYVSKRAAEIMGKPYDQLKIITVHVGNGASVAAVKNGVSVDTSMGFTPLEGLVMGTRSGDIDPAIVEFLEKEEGLSAKEVVNILNKKSGVYGLTKGFSSDMRDIEDNAIEGDPVCRLAFDVYEYRIAKYIGAYAAAMNGVDAIVFTAGVGENSSIMREEIIENYLGYLGIKIDKEANRFKGEEKIISTPDSKVIAMVIPTNEELMIAKDTKEIIEKGLDELKI

SEQ ID NO: 2721 - DNA, 1257 bp, synthetic construct
  misc_feature 1..1257: note = Variant of acetate kinase
  source 1..1257: mol_type = other DNA
atgcaccatcatcatcatcatggcggtagcggcatgaaagttctggtgattaattctggtagctcctccatcaaatatcagctcctcgatatgaccaacgaaaaggtattagcgaaaggcttggtcgagcgcattggcatcgacggttcgcgtcttgtgcataaagttaacggcgaaaaacacgtgctggaacatgagattaagaatcacgaaattggacttaaattggtcctggatcttcttacggacgaaaaatacggtgtgttgaaggatctcaaagaaatcgatgcagttgggcatcgcgtagtacatggcggcgagcgttttgccagtagcgtgaagattactgacgaagtcttaaagaccatcgagacgttgtcgttcttagctccgttacacaatccagcgaacattatgggtatcaagagcagcatgaaattactgccgggtgtgcctcaagttgccgtctttgatacagcgttccaccagaagatgccggagaaagcctatttgtacgcaatcccctatgagtactacgagaaatataaaattcgccgctatgggtttcatggaacctcacatcgttatgtgagtaaacgtgctgcggaaattatgggcaaaccgtacgatcagctcaagatcattaccgttcacgtgggtaacggcgcatcagttgcggcggtgaagaatggcgtatctgttgacacttccatgggtttcacaccacttgaaggtcttgtcatgggcacgcgcagcggcgatattgatccggccatcgtggaatttcttgagaaagaagaaggattgtcggccaaagaagtcgtcaacatcctcaacaagaaatctggtgtgtatgggctcaccaaaggctttagtagtgacatgcgtgacattgaagataatgctattgaaggtgatcctgtatgccgccttgcattcgatgtgtacgaatatcgtatcgcgaaatatattggcgcatacgctgcggccatgaacggtgttgacgcgatcgtctttaccgcaggagttggcgaaaatagcagcattatgcgcgaagaaattattgagaactacttgggctacttagggatcaagatcgataaagaagccaatgatttcaaaggtgaggagaagatcatttcaacgcccgattccaaagtgattgcgatggtaattccgaccaacgaggagctcatgatcgccaaagacacgaaagaaatcattgagaaagggttggacgagcttaagatctaatga

SEQ ID NO: 2722 - protein, 417 aa, synthetic construct
  REGION 1..417: note = Variant of acetate kinase
MHHHHHHGGSGMKVLVINSGSSSIKYQLLDMTNEKVLAKGLVERIGIDGSRLVHKVNGEKHVLEHEIKNHEIGLKLVLDLLTDEKYGVLKDLKEIDAVGHRVVHGGERFASSVKITDEVLKTIETLSFLAPLHNPANIMGIKSSMKLLPGVPQVAVFDTAFHQKMPEKAYLYAIPYEYYEKYKIRRYGFHGTSHRYVSKRAAEIMGKPYDQLKIITVHVGNGASVAAVKNGVSVDTSMGFTPLEGLVMGTRSGDIDPAIVEFLEKEEGLSAKEVVNILNKKSGVYGLTKGFSSDMRDIEDNAIEGDPVCRLAFDVYEYRIAKYIGAYAAAMNGVDAIVFTAGVGENSSIMREEIIENYLGYLGIKIDKEANDFKGEEKIISTPDSKVIAMVIPTNEELMIAKDTKEIIEKGLDELKI

SEQ ID NO: 2723 - DNA, 1257 bp, synthetic construct
  misc_feature 1..1257: note = Variant of acetate kinase
  source 1..1257: mol_type = other DNA
atgcaccatcatcatcatcatggcggtagcggcatgaaagttctggtgattaattctggtagctcctccatcaaatatcagctcctcgatatgaccaacgaaaaggtattagcgaaaggcttggtcgagcgcattggcatcgacggttcgcgtattgtgcataaagttaacggcgaaaaacacgtgctggaacatgagattaagaatcacgaaattggacttaaattggtcctggatcttcttacggacgaaaaatacggtgtgttgaaggatctcaaagaaatcgatgcagttgggcatcgcgtagtacatggcggcgagcgttttgccagtagcgtgaagattactgacgaagtcttaaagaccatcgagacgttgtcgttcttagctccgttacacaatccactgaacattatgggtatcaagagcagcatgaaattattaccgggtgtgcctcaagttgccgtctttgatacagcgttccaccagaagatgccggagaaagcctatttgtacgcaatcccctatgagtactacgagaaatataaaattcgccgctatgggtttcatggaacctcacatcgttatgtgagtaaacgtgctgcggaaattatgggcaaaccgtacgatcagctcaagatcattaccgttcacgtgggtaacggcgcatcagttgcggcggtgaagaatggcgtatctgttgacacttccatgggtttcacaccacttgaaggtcttgtcatgggcacgcgcagcggcgatattgatccggccatcgtggaatttcttgagaaagaagaaggattgtcggccaaagaagtcgtcaacatcctcaacaagaaatctggtgtgtatgggctcaccaaaggctttagtagtgacatgcgtgacattgaagataatgctattgaaggtgatcctgtatgccgccttgcattcgatgtgtacgaatatcgtatcgcgaaatatattggcgcatacgctgcggccatgaacggtgttgacgcgatcgtctttaccgcaggagttggcgaaaatagcagcattatgcgcgaagaaattattgagaactacttgggctacttagggatcaagatcgataaagaagccaatgatttcaaaggtgaggagaagatcatttcaacgcccgattccaaagtgattgcgatggtagttccgaccaacgaggagctcatgatcgccaaagacacgaaagaaatcattgagaaagggttggacgagcttaagatctaatga

SEQ ID NO: 2724 - protein, 417 aa, synthetic construct
  REGION 1..417: note = Variant of acetate kinase
MHHHHHHGGSGMKVLVINSGSSSIKYQLLDMTNEKVLAKGLVERIGIDGSRIVHKVNGEKHVLEHEIKNHEIGLKLVLDLLTDEKYGVLKDLKEIDAVGHRVVHGGERFASSVKITDEVLKTIETLSFLAPLHNPLNIMGIKSSMKLLPGVPQVAVFDTAFHQKMPEKAYLYAIPYEYYEKYKIRRYGFHGTSHRYVSKRAAEIMGKPYDQLKIITVHVGNGASVAAVKNGVSVDTSMGFTPLEGLVMGTRSGDIDPAIVEFLEKEEGLSAKEVVNILNKKSGVYGLTKGFSSDMRDIEDNAIEGDPVCRLAFDVYEYRIAKYIGAYAAAMNGVDAIVFTAGVGENSSIMREEIIENYLGYLGIKIDKEANDFKGEEKIISTPDSKVIAMVVPTNEELMIAKDTKEIIEKGLDELKI

SEQ ID NO: 2725 - DNA, 1257 bp, synthetic construct
  misc_feature 1..1257: note = Variant of acetate kinase
  source 1..1257: mol_type = other DNA
atgcaccatcatcatcatcatggcggtagcggcatgaaagttctggtgattaattctggtagctcctccatcaaatatcagctcctcgatatgaccaacgaaaaggtattagcgaaaggcttggtcgagcgcattggcatcgacggttcgcgtattgtgcataaagttaacggcgaaaaacacgtgctggaacatgagattaagaatcacgaaattggacttaaattggtcctggatcttcttacggacgaaaaatacggtgtgttgaaggatctcaaagaaatcgatgcagttgggcatcgcgtagtacatggcggcgagcgttttgccagtagcgtgaagattactgacgaagtcttaaagaccatcgagacgttgtcgttcttagctccgttacacaatccagcgaacattatgggtatcaagagcagcatgaaattattaccgggtgtgcctcaagttgccgtctttgatacagcgttccaccagaagatgccggagaaagcctatttgtacgcaatcccctatgagtactacgagaaatataaaattcgccgctatgggtttcatggaacctcacatcgttatgtgagtaaacgtgctgcggaaattatgggcaaaccgtacgatcagctcaagatcattaccgttcacgtgggtaacggcgcatcagttgcggcggtgaagaatggcgtatctgttgacacttccatgggtttcacaccacttgaaggtcttgtcatgggcacgcgcagcggcgatattgatccggccatcgtggaatttcttgagaaagaagaaggattgtcggccaaagaagtcgtcaacatcctcaacaagaaatctggtgtgtatgggctcaccaaaggctttagtagtgacatgcgtgacattgaagataatgctattgaaggtgatcctgtatgccgccttgcattcgatgtgtacgaatatcgtatcgcgaaatatattggcgcatacgctgcggccatgaacggtgttgacgcgatcgtctttaccgcaggagttggcgaaaatagcagcattatgcgcgaagaaattattgagaactacttgggctacttagggatcaagatcgataaagaagccaatcgcttcaaaggtgaggagaagatcatttcaacgcccgattccaaagtgattgcgatggtagttccgaccaacgaggagctcatgatcgccaaagacacgaaagaaatcattgagaaagggttggacgagcttaagatctaatga

SEQ ID NO: 2726 - protein, 417 aa, synthetic construct
  REGION 1..417: note = Variant of acetate kinase
MHHHHHHGGSGMKVLVINSGSSSIKYQLLDMTNEKVLAKGLVERIGIDGSRIVHKVNGEKHVLEHEIKNHEIGLKLVLDLLTDEKYGVLKDLKEIDAVGHRVVHGGERFASSVKITDEVLKTIETLSFLAPLHNPANIMGIKSSMKLLPGVPQVAVFDTAFHQKMPEKAYLYAIPYEYYEKYKIRRYGFHGTSHRYVSKRAAEIMGKPYDQLKIITVHVGNGASVAAVKNGVSVDTSMGFTPLEGLVMGTRSGDIDPAIVEFLEKEEGLSAKEVVNILNKKSGVYGLTKGFSSDMRDIEDNAIEGDPVCRLAFDVYEYRIAKYIGAYAAAMNGVDAIVFTAGVGENSSIMREEIIENYLGYLGIKIDKEANRFKGEEKIISTPDSKVIAMVVPTNEELMIAKDTKEIIEKGLDELKI

SEQ ID NO: 2727 - DNA, 1257 bp, synthetic construct
  misc_feature 1..1257: note = Variant of acetate kinase
  source 1..1257: mol_type = other DNA
atgcaccatcatcatcatcatggcggtagcggcatgaaagttctggtgattaattctggtagctcctccatcaaatatcagctcctcgatatgaccaacgaaaaggtattagcgaaaggcttggtcgagcgcattggcatcgacggttcgcgtattgtgcataaagttaacggcgaaaaacacgtgctggaacatgagattaaggatcacgaaattggacttaaattggtcctggatcttcttacggacgaaaaatacggtgtgttgaaggatctcaaagaaatcgatgcagttgggcatcgcgtagtacatggcggcgagcgttttgccagtagcgtgaagattactgacgaagtcttaaagaccatcgagacgttgtcgttcttagctccgttacacaatccactgaacattatgggtatcaagagcagcatgaaattactgccgggtgtgcctcaagttgccgtctttgatacagcgttccaccagaagatgccggagaaagcctatttgtacgcaatcccctatgagtactacgagaaatataaaattcgccgctatgggtttcatggaacctcacatcgttatgtgagtaaacgtgctgcggaaattatgggcaaaccgtacgatcagctcaagatcattaccgttcacgtgggtaacggcgcatcagttgcggcggtgaagaatggcgtatctgttgacacttccatgggtttcacaccacttgaaggtcttgtcatgggcacgcgcagcggcgatattgatccggccatcgtggaatttcttgagaaagaagaaggattgtcggccaaagaagtcgtcaacatcctcaacaagaaatctggtgtgtatgggctcaccaaaggctttagtagtgacatgcgtgacattgaagataatgctattgaaggtgatcctgtatgccgccttgcattcgatgtgtacgaatatcgtatcgcgaaatatattggcgcatacgctgcggccatgaacggtgttgacgcgatcgtctttaccgcaggagttggcgaaaatagcagcattatgcgcgaagaaattattgagaactacttgggctacttagggatcaagatcgataaagaagccaatgatttcaaaggtgaggagaagatcatttcaacgcccgattccaaagtgattgcgatggtagttccgaccaacgaggagctcatgatcgccaaagacacgaaagaaatcattgagaaagggttggacgagcttaagatctaatga

SEQ ID NO: 2728 - protein, 417 aa, synthetic construct
  REGION 1..417: note = Variant of acetate kinase
MHHHHHHGGSGMKVLVINSGSSSIKYQLLDMTNEKVLAKGLVERIGIDGSRIVHKVNGEKHVLEHEIKDHEIGLKLVLDLLTDEKYGVLKDLKEIDAVGHRVVHGGERFASSVKITDEVLKTIETLSFLAPLHNPLNIMGIKSSMKLLPGVPQVAVFDTAFHQKMPEKAYLYAIPYEYYEKYKIRRYGFHGTSHRYVSKRAAEIMGKPYDQLKIITVHVGNGASVAAVKNGVSVDTSMGFTPLEGLVMGTRSGDIDPAIVEFLEKEEGLSAKEVVNILNKKSGVYGLTKGFSSDMRDIEDNAIEGDPVCRLAFDVYEYRIAKYIGAYAAAMNGVDAIVFTAGVGENSSIMREEIIENYLGYLGIKIDKEANDFKGEEKIISTPDSKVIAMVVPTNEELMIAKDTKEIIEKGLDELKI

SEQ ID NO: 2729 - DNA, 1257 bp, synthetic construct
  misc_feature 1..1257: note = Variant of acetate kinase
  source 1..1257: mol_type = other DNA
atgcaccatcatcatcatcatggcggtagcggcatgaaagttctggtgattaattctggtagctcctccatcaaatatcagctcctcgatatgaccaacgaaaaggtattagcgaaaggcttggtcgagcgcattggcatcgacggttcgcgtatcgtgcataaagttaacggcgaaaaacacgtgctggaacatgagattaaaaatcacgaaattggacttaaattggtcctggatcttcttacggacgaaaaatacggtgtgttgaaggatctcaaagaaatcgatgcagttgggcatcgcgtagtacatggcggcgagcgttttgccagtagcgtgaagattactgacgaagtcttaaagaccatcgagacgttgtcgttcttagctccgttacacaatccagtgaacattatgggtatcaagagcagcatgaaattattaccgggtgtgcctcaagttgccgtctttgatacagcgttccaccagaagatgccggagaaagcctatttgtacgcaatcccctatgagtactacgagaaatataaaattcgccgctatgggtttcatggaacctcacatcgttatgtgagtaaacgtgctgcggaaattatgggcaaaccgtacgatcagctcaagatcattaccgttcacgtgggtaacggcgcatcagttgcggcggtgaagaatggcgtatctgttgacacttccatgggtttcacaccacttgaaggtcttgtcatgggcacgcgcagcggcgatattgatccggccatcgtggaatttcttgagaaagaagaaggattgtcggccaaagaagtcgtcaacatcctcaacaagaaatctggtgtgtatgggctcaccaaaggctttagtagtgacatgcgtgacattgaagataatgctattgaaggtgatcctgtatgccgccttgcattagatgtgtacgaatatcgtatcgcgaaatatattggcgcatacgctgcggccatgaacggtgttgacgcgatcgtctttaccgcaggagttggcgaaaatagcccgattatgcgccatgaaattattgagaactacttgggctacttagggatcaagatcgataaagaagccaatgacgttaaaggtgaggagaagatcatttcaacgcccgattccaaagtgattgcgatggtagttccgaccaacgaggagctcatgatcgccaaagacacgaaagaaatcgttgagaaagggttggacgagcttaagatctaatga

SEQ ID NO: 2730 - protein, 417 aa, synthetic construct
  REGION 1..417: note = Variant of acetate kinase
MHHHHHHGGSGMKVLVINSGSSSIKYQLLDMTNEKVLAKGLVERIGIDGSRIVHKVNGEKHVLEHEIKNHEIGLKLVLDLLTDEKYGVLKDLKEIDAVGHRVVHGGERFASSVKITDEVLKTIETLSFLAPLHNPVNIMGIKSSMKLLPGVPQVAVFDTAFHQKMPEKAYLYAIPYEYYEKYKIRRYGFHGTSHRYVSKRAAEIMGKPYDQLKIITVHVGNGASVAAVKNGVSVDTSMGFTPLEGLVMGTRSGDIDPAIVEFLEKEEGLSAKEVVNILNKKSGVYGLTKGFSSDMRDIEDNAIEGDPVCRLALDVYEYRIAKYIGAYAAAMNGVDAIVFTAGVGENSPIMRHEIIENYLGYLGIKIDKEANDVKGEEKIISTPDSKVIAMVVPTNEELMIAKDTKEIVEKGLDELKI

SEQ ID NO: 2731 - DNA, 1257 bp, synthetic construct
  misc_feature 1..1257: note = Variant of acetate kinase
  source 1..1257: mol_type = other DNA
atgcaccatcatcatcatcatggcggtagcggcatgaaagttctggtgattaattctggtagctcctccatcaaatatcagctcctcgatatgaccaacgaaaaggtattagcgaaaggcttggtcgagcgcattggcatcgacggttcgcgtatcgtgcataaagttaacggcgaaaaacacgtgctggaacatgagattaagaatcacgaaattggacttaaattggtcctggatcttcttacggacgaaaaatacggtgtgttgaaggatctcaaagaaatcgatgcagttgggcatcgcgtagtacatggcggcgagcgttttgccagtagcgtgaagattactgacgaagtcttaaagaccatcgagacgttgtcgttcttagctccgttacacaatccagcgaacattatgggtatcaagagcagcatgaaagtgttaccgggtgtgcctcaagttgccgtctttgatacagcgttccaccagaagatgccggagaaagcctatttgtacgcaatcccctatgagtactacgagaaatataaaattcgccgctatgggtttcatggaacctcacatcgttatgtgagtaaacgtgctgcggaaattatgggcaaaccgtacgatcagctcaagatcattaccgttcacgtgggtaacggcgcatcagttgcggcggtgaagaatggcgtatctgttgacacttccatgggtttcacaccacttgaaggtcttgtcatgggcacgcgcagcggcgatattgatccggccatcgtggaatttcttgagaaagaagaaggattgtcggccaaagaagtcgtcaacatcctcaacaagaaatctggtgtgtatgggctcaccaaaggctttagtagtgacatgcgtgacattgaagataatgctattgaaggtgatcctgtatgccgccttgcattagatgtgtacgaatatcgtatcgcgaaatatattggcgcatacgctgcggccatgaacggtgttgacgcgatcgtctttaccgcaggagttggcgaaaatagcccgattatgcgccatgaaattattgagaactacttgggctacttagggatcaagatcgataaagaagccaatgacttcaaaggtgaggagaagatcatttcaacgcccgattccaaagtgattgcgatggtagttccgaccaacgaggagctcatgatcgccaaagacacgaaagaaatcgttgagaaagggttggacgagcttaagatctaatga

SEQ ID NO: 2732 - protein, 417 aa, synthetic construct
  REGION 1..417: note = Variant of acetate kinase
MHHHHHHGGSGMKVLVINSGSSSIKYQLLDMTNEKVLAKGLVERIGIDGSRIVHKVNGEKHVLEHEIKNHEIGLKLVLDLLTDEKYGVLKDLKEIDAVGHRVVHGGERFASSVKITDEVLKTIETLSFLAPLHNPANIMGIKSSMKVLPGVPQVAVFDTAFHQKMPEKAYLYAIPYEYYEKYKIRRYGFHGTSHRYVSKRAAEIMGKPYDQLKIITVHVGNGASVAAVKNGVSVDTSMGFTPLEGLVMGTRSGDIDPAIVEFLEKEEGLSAKEVVNILNKKSGVYGLTKGFSSDMRDIEDNAIEGDPVCRLALDVYEYRIAKYIGAYAAAMNGVDAIVFTAGVGENSPIMRHEIIENYLGYLGIKIDKEANDFKGEEKIISTPDSKVIAMVVPTNEELMIAKDTKEIVEKGLDELKI

SEQ ID NO: 2733 - DNA, 1257 bp, synthetic construct
  misc_feature 1..1257: note = Variant of acetate kinase
  source 1..1257: mol_type = other DNA
atgcaccatcatcatcatcatggcggtagcggcatgaaagttctggtgattaattctggtagctcctccatcaaatatcagctcctcgatatgaccaacgaaaaggtattagcgaaaggcttggtcgagcgcattggcatcgacggttcgcgtcttgtgcataaagttaacggcgaaaaacacgtgctggaacatgagattaagaatcacgaaattggacttaaattggtcctggatcttcttacggacgaaaaatacggtgtgttgaaggatctcaaagaaatcgatgcagttgggcatcgcgtagtacatggcggcgagcgttttgccagtagcgtgaagattactgacgaagtcttaaagaccatcgagacgttgtcgttcttagctccgttacacaatccagcgaacattatgggtatcaagagcagcatgaaattaatgccgggtgtgcctcaagttgccgtctttgatacagcgttccaccagaagatgccggagaaagcctatttgtacgcaatcccctatgagtactacgagaaatataaaattcgccgctatgggtttcatggaacctcacatcgttatgtgagtaaacgtgctgcggaaattatgggcaaaccgtacgatcagctcaagatcattaccgttcacgtgggtaacggcgcatcagttgcggcggtgaagaatggcgtatctgttgacacttccatgggtttcacaccacttgaaggtcttgtcatgggcacgcgcagcggcgatattgatccggccatcgtggaatttcttgagaaagaagaaggattgtcggccaaagaagtcgtcaacatcctcaacaagaaatctggtgtgtatgggctcaccaaaggctttagtagtgacatgcgtgacattgaagataatgctattgaaggtgatcctgtatgccgccttgcattcgatgtgtacgaatatcgtatcgcgaaatatattggcgcatacgctgcggccatgaacggtgttgacgcgatcgtctttaccgcaggagttggcgaaaatagcagcattatgcgcgaagaaattattgagaactacttgggctacttagggatcaagatcgataaagaagccaatgacttcaaaggtgaggagaagatcatttcaacgcccgattccaaagtgattgcgatggtagttccgaccaacgaggagctcatgatcgccaaagacacgaaagaaatcattgagaaagggttggacgagcttaagatctaatga

SEQ ID NO: 2734 - protein, 417 aa, synthetic construct
  REGION 1..417: note = Variant of acetate kinase
MHHHHHHGGSGMKVLVINSGSSSIKYQLLDMTNEKVLAKGLVERIGIDGSRLVHKVNGEKHVLEHEIKNHEIGLKLVLDLLTDEKYGVLKDLKEIDAVGHRVVHGGERFASSVKITDEVLKTIETLSFLAPLHNPANIMGIKSSMKLMPGVPQVAVFDTAFHQKMPEKAYLYAIPYEYYEKYKIRRYGFHGTSHRYVSKRAAEIMGKPYDQLKIITVHVGNGASVAAVKNGVSVDTSMGFTPLEGLVMGTRSGDIDPAIVEFLEKEEGLSAKEVVNILNKKSGVYGLTKGFSSDMRDIEDNAIEGDPVCRLAFDVYEYRIAKYIGAYAAAMNGVDAIVFTAGVGENSSIMREEIIENYLGYLGIKIDKEANDFKGEEKIISTPDSKVIAMVVPTNEELMIAKDTKEIIEKGLDELKI

SEQ ID NO: 2735 - DNA, 1257 bp, synthetic construct
  misc_feature 1..1257: note = Variant of acetate kinase
  source 1..1257: mol_type = other DNA
atgcaccatcatcatcatcatggcggtagcggcatgaaagttctggtgattaattctggtagctcctccatcaaatatcagctcctcgatatgaccaacgaaaaggtattagcgaaaggcttggtcgagcgcattggcatcgacggttcgcgtattgtgcataaagttaacggcgaaaaacacgtgctggaacatgagattaagaatcacgaaattggacttaaattggtcctggatcttcttacggacgaaaaatacggtgtgttgaaggatctcaaagaaatcgatgcagttgggcatcgcgtagtacatggcggcgagcgttttgccagtagcgtgaagattactgacgaagtcttaaagaccatcgagacgttgtcgttcttagctccgttacacaatccagcgaacattatgggtatcaagagcagcatgaaattaatgccgggtgtgcctcaagttgccgtctttgatacagcgttccaccagaagatgccggagaaagcctatttgtacgcaatcccctatgagtactacgagaaatataaaattcgccgctatgggtttcatggaacctcacatcgttatgtgagtaaacgtgctgcggaaattatgggcaaaccgtacgatcagctcaagatcattaccgttcacgtgggtaacggcgcatcagttgcggcggtgaagaatggcgtatctgttgacacttccatgggtttcacaccacttgaaggtcttgtcatgggcacgcgcagcggcgatattgatccggccatcgtggaatttcttgagaaagaagaaggattgtcggccaaagaagtcgtcaacatcctcaacaagaaatctggtgtgtatgggctcaccaaaggctttagtagtgacatgcgtgacattgaagataatgctattgaaggtgatcctgtatgccgccttgcattcgatgtgtacgaatatcgtatcgcgaaatatattggcgcatacgctgcggccatgaacggtgttgacgcgatcgtctttaccgcaggagttggcgaaaatagccgcattatgcgcgaagaaattattgagaactacttgggctacttagggatcaagatcgataaagaagccaatcgcttcaaaggtgaggagaagatcatttcaacgcccgattccaaagtgattgcgatggtagttccgaccaacgaggagctcatgatcgccaaagacacgaaagaaatcattgagaaagggttggacgagcttaagatctaatga

SEQ ID NO: 2736 - protein, 417 aa, synthetic construct
  REGION 1..417: note = Variant of acetate kinase
MHHHHHHGGSGMKVLVINSGSSSIKYQLLDMTNEKVLAKGLVERIGIDGSRIVHKVNGEKHVLEHEIKNHEIGLKLVLDLLTDEKYGVLKDLKEIDAVGHRVVHGGERFASSVKITDEVLKTIETLSFLAPLHNPANIMGIKSSMKLMPGVPQVAVFDTAFHQKMPEKAYLYAIPYEYYEKYKIRRYGFHGTSHRYVSKRAAEIMGKPYDQLKIITVHVGNGASVAAVKNGVSVDTSMGFTPLEGLVMGTRSGDIDPAIVEFLEKEEGLSAKEVVNILNKKSGVYGLTKGFSSDMRDIEDNAIEGDPVCRLAFDVYEYRIAKYIGAYAAAMNGVDAIVFTAGVGENSRIMREEIIENYLGYLGIKIDKEANRFKGEEKIISTPDSKVIAMVVPTNEELMIAKDTKEIIEKGLDELKI

SEQ ID NO: 2737 - DNA, 1257 bp, synthetic construct
  misc_feature 1..1257: note = Variant of acetate kinase
  source 1..1257: mol_type = other DNA
atgcaccatcatcatcatcatggcggtagcggcatgaaagttctggtgattaattctggtagctcctccatcaaatatcagctcctcgatatgaccaacgaaaaggtattagcgaaaggcttggtcgagcgcattggcatcgacggttcgcgtattgtgcataaagttaacggcgaaaaacacgtgctggaacatgagattaagaatcacgaaattggacttaaattggtcctggatcttcttacggacgaaaaatacggtgtgttgaaggatctcaaagaaatcgatgcagttgggcatcgcgtagtacatggcggcgagcgttttgccagtagcgtgaagattactgacgaagtcttaaagaccatcgagacgttgtcgttcttagctccgttacacaatccagcgaacattatgggtatcaagagcagcatgaaattaatgccgggtgtgcctcaagttgccgtctttgatacagcgttccaccagaagatgccggagaaagcctatttgtacgcaatcccctatgagtactacgagaaatataaaattcgccgctatgggtttcatggaacctcacatcgttatgtgagtaaacgtgctgcggaaattatgggcaaaccgtacgatcagctcaagatcattaccgttcacgtgggtaacggcgcatcagttgcggcggtgaagaatggcgtatctgttgacacttccatgggtttcacaccacttgaaggtcttgtcatgggcacgcgcagcggcgatattgatccggccatcgtggaatttcttgagaaagaagaaggattgtcggccaaagaagtcgtcaacatcctcaacaagaaatctggtgtgtatgggctcaccaaaggctttagtagtgacatgcgtgacattgaagataatgctattgaaggtgatcctgtatgccgccttgcattcgatgtgtacgaatatcgtatcgcgaaatatattggcgcatacgctgcggccatgaacggtgttgacgcgatcgtctttaccgcaggagttggcgaaaatagccgcattatgcgcgaagaaattattgagaactacttgggctacttagggatcaagatcgataaagaagccaatgacttcaaaggtgaggagaagatcatttcaacgcccgattccaaagtgattgcgatggtagttccgaccaacgaggagctcatgatcgccaaagacacgaaagaaatcattgagaaagggttggacgagcttaagatctaatga

SEQ ID NO: 2738 - protein, 417 aa, synthetic construct
  REGION 1..417: note = Variant of acetate kinase
MHHHHHHGGSGMKVLVINSGSSSIKYQLLDMTNEKVLAKGLVERIGIDGSRIVHKVNGEKHVLEHEIKNHEIGLKLVLDLLTDEKYGVLKDLKEIDAVGHRVVHGGERFASSVKITDEVLKTIETLSFLAPLHNPANIMGIKSSMKLMPGVPQVAVFDTAFHQKMPEKAYLYAIPYEYYEKYKIRRYGFHGTSHRYVSKRAAEIMGKPYDQLKIITVHVGNGASVAAVKNGVSVDTSMGFTPLEGLVMGTRSGDIDPAIVEFLEKEEGLSAKEVVNILNKKSGVYGLTKGFSSDMRDIEDNAIEGDPVCRLAFDVYEYRIAKYIGAYAAAMNGVDAIVFTAGVGENSRIMREEIIENYLGYLGIKIDKEANDFKGEEKIISTPDSKVIAMVVPTNEELMIAKDTKEIIEKGLDELKI

SEQ ID NO: 2739 - DNA, 1257 bp, synthetic construct
  misc_feature 1..1257: note = Variant of acetate kinase
  source 1..1257: mol_type = other DNA
atgcaccatcatcatcatcatggcggtagcggcatgaaagttctggtgattaattctggtagctcctccatcaaatatcagctcctcgatatgaccaacgaaaaggtattagcgaaaggcttggtcgagcgcattggcatcgacggttcgcgtcttgtgcataaagttaacggcgaaaaacacgtgctggaacatgagattaagaatcacgaaattggacttaaattggtcctggatcttcttacggacgaaaaatacggtgtgttgaaggatctcaaagaaatcgatgcagttgggcatcgcgtagtacatggcggcgagcgttttgccagtagcgtgaagattactgacgaagtcttaaagaccatcgagacgttgtcgttcttagctccgttacacaatccactgaacattatgggtatcaagagcagcatgaaattattaccgggtgtgcctcaagttgccgtctttgatacagcgttccaccagaagatgccggagaaagcctatttgtacgcaatcccctatgagtactacgagaaatataaaattcgccgctatgggtttcatggaacctcacatcgttatgtgagtaaacgtgctgcggaaattatgggcaaaccgtacgatcagctcaagatcattaccgttcacgtgggtaacggcgcatcagttgcggcggtgaagaatggcgtatctgttgacacttccatgggtttcacaccacttgaaggtcttgtcatgggcacgcgcagcggcgatattgatccggccatcgtggaatttcttgagaaagaagaaggattgtcggccaaagaagtcgtcaacatcctcaacaagaaatctggtgtgtatgggctcaccaaaggctttagtagtgacatgcgtgacattgaagataatgctattgaaggtgatcctgtatgccgccttgcattcgatgtgtacgaatatcgtatcgcgaaatatattggcgcatacgctgcggccatgaacggtgttgacgcgatcgtctttaccgcaggagttggcgaaaatagcagcattatgcgcgaagaaattattgagaactacttgggctacttagggatcaagatcgataaagaagccaatgatttcaaaggtgaggagaagatcatttcaacgcccgattccaaagtgattgcgatggtagttccgaccaacgaggagctcatgatcgccaaagacacgaaagaaatcattgagaaagggttggacgagcttaagatctaatga

SEQ ID NO: 2740 - protein, 417 aa, synthetic construct
  REGION 1..417: note = Variant of acetate kinase
MHHHHHHGGSGMKVLVINSGSSSIKYQLLDMTNEKVLAKGLVERIGIDGSRLVHKVNGEKHVLEHEIKNHEIGLKLVLDLLTDEKYGVLKDLKEIDAVGHRVVHGGERFASSVKITDEVLKTIETLSFLAPLHNPLNIMGIKSSMKLLPGVPQVAVFDTAFHQKMPEKAYLYAIPYEYYEKYKIRRYGFHGTSHRYVSKRAAEIMGKPYDQLKIITVHVGNGASVAAVKNGVSVDTSMGFTPLEGLVMGTRSGDIDPAIVEFLEKEEGLSAKEVVNILNKKSGVYGLTKGFSSDMRDIEDNAIEGDPVCRLAFDVYEYRIAKYIGAYAAAMNGVDAIVFTAGVGENSSIMREEIIENYLGYLGIKIDKEANDFKGEEKIISTPDSKVIAMVVPTNEELMIAKDTKEIIEKGLDELKI

SEQ ID NO: 2741 - DNA, 1257 bp, synthetic construct
  misc_feature 1..1257: note = Variant of acetate kinase
  source 1..1257: mol_type = other DNA
atgcaccatcatcatcatcatggcggtagcggcatgaaagttctggtgattaattctggtagctcctccatcaaatatcagctcctcgatatgaccaacgaaaaggtattagcgaaaggcttggtcgagcgcattggcatcgacggttcgcgtcttgtgcataaagttaacggcgaaaaacacgtgctggaacatgagattaaggatcacgaaattggacttaaattggtcctggatcttcttacggacgaaaaatacggtgtgttgaaggatctcaaagaaatcgatgcagttgggcatcgcgtagtacatggcggcgagcgttttgccagtagcgtgaagattactgacgaagtcttaaagaccatcgagacgttgtcgttcttagctccgttacacaatccagcgaacattatgggtatcaagagcagcatgaaattattaccgggtgtgcctcaagttgccgtctttgatacagcgttccaccagaagatgccggagaaagcctatttgtacgcaatcccctatgagtactacgagaaatataaaattcgccgctatgggtttcatggaacctcacatcgttatgtgagtaaacgtgctgcggaaattatgggcaaaccgtacgatcagctcaagatcattaccgttcacgtgggtaacggcgcatcagttgcggcggtgaagaatggcgtatctgttgacacttccatgggtttcacaccacttgaaggtcttgtcatgggcacgcgcagcggcgatattgatccggccatcgtggaatttcttgagaaagaagaaggattgtcggccaaagaagtcgtcaacatcctcaacaagaaatctggtgtgtatgggctcaccaaaggctttagtagtgacatgcgtgacattgaagataatgctattgaaggtgatcctgtatgccgccttgcattcgatgtgtacgaatatcgtatcgcgaaatatattggcgcatacgctgcggccatgaacggtgttgacgcgatcgtctttaccgcaggagttggcgaaaatagccgcattatgcgcgaagaaattattgagaactacttgggctacttagggatcaagatcgataaagaagccaatcgcttcaaaggtgaggagaagatcatttcaacgcccgattccaaagtgattgcgatggtaattccgaccaacgaggagctcatgatcgccaaagacacgaaagaaatcattgagaaagggttggacgagcttaagatctaatga

SEQ ID NO: 2742 - protein, 417 aa, synthetic construct
  REGION 1..417: note = Variant of acetate kinase
MHHHHHHGGSGMKVLVINSGSSSIKYQLLDMTNEKVLAKGLVERIGIDGSRLVHKVNGEKHVLEHEIKDHEIGLKLVLDLLTDEKYGVLKDLKEIDAVGHRVVHGGERFASSVKITDEVLKTIETLSFLAPLHNPANIMGIKSSMKLLPGVPQVAVFDTAFHQKMPEKAYLYAIPYEYYEKYKIRRYGFHGTSHRYVSKRAAEIMGKPYDQLKIITVHVGNGASVAAVKNGVSVDTSMGFTPLEGLVMGTRSGDIDPAIVEFLEKEEGLSAKEVVNILNKKSGVYGLTKGFSSDMRDIEDNAIEGDPVCRLAFDVYEYRIAKYIGAYAAAMNGVDAIVFTAGVGENSRIMREEIIENYLGYLGIKIDKEANRFKGEEKIISTPDSKVIAMVIPTNEELMIAKDTKEIIEKGLDELKI

SEQ ID NO: 2743 - DNA, 1257 bp, synthetic construct
  misc_feature 1..1257: note = Variant of acetate kinase
  source 1..1257: mol_type = other DNA
atgcaccatcatcatcatcatggcggtagcggcatgaaagttctggtgattaattctggtagctcctccatcaaatatcagctcctcgatatgaccaacgaaaaggtattagcgaaaggcttggtcgagcgcattggcatcgacggttcgcgtattgtgcataaagttaacggcgaaaaacacgtgctggaacatgagattaagaatcacgaaattggacttaaattggtcctggatcttcttacggacgaaaaatacggtgtgttgaaggatctcaaagaaatcgatgcagttgggcatcgcgtagtacatggcggcgagcgttttgccagtagcgtgaagattactgacgaagtcttaaagaccatcgagacgttgtcgttcttagctccgttacacaatccagcgaacattatgggtatcaagagcagcatgaaattattaccgggtgtgcctcaagttgccgtctttgatacagcgttccaccagaagatgccggagaaagcctatttgtacgcaatcccctatgagtactacgagaaatataaaattcgccgctatgggtttcatggaacctcacatcgttatgtgagtaaacgtgctgcggaaattatgggcaaaccgtacgatcagctcaagatcattaccgttcacgtgggtaacggcgcatcagttgcggcggtgaagaatggcgtatctgttgacacttccatgggtttcacaccacttgaaggtcttgtcatgggcacgcgcagcggcgatattgatccggccatcgtggaatttcttgagaaagaagaaggattgtcggccaaagaagtcgtcaacatcctcaacaagaaatctggtgtgtatgggctcaccaaaggctttagtagtgacatgcgtgacattgaagataatgctattgaaggtgatcctgtatgccgccttgcattcgatgtgtacgaatatcgtatcgcgaaatatattggcgcatacgctgcggccatgaacggtgttgacgcgatcgtctttaccgcaggagttggcgaaaatagcagcattatgcgcgaagaaattattgagaactacttgggctacttagggatcaagatcgataaagaagccaatgatttcaaaggtgaggagaagatcatttcaacgcccgattccaaagtgattgcgatggtaattccgaccaacgaggagctcatgatcgccaaagacacgaaagaaatcattgagaaagggttggacgagcttaagatctaatga

SEQ ID NO: 2744 - protein, 417 aa, synthetic construct
  REGION 1..417: note = Variant of acetate kinase
MHHHHHHGGSGMKVLVINSGSSSIKYQLLDMTNEKVLAKGLVERIGIDGSRIVHKVNGEKHVLEHEIKNHEIGLKLVLDLLTDEKYGVLKDLKEIDAVGHRVVHGGERFASSVKITDEVLKTIETLSFLAPLHNPANIMGIKSSMKLLPGVPQVAVFDTAFHQKMPEKAYLYAIPYEYYEKYKIRRYGFHGTSHRYVSKRAAEIMGKPYDQLKIITVHVGNGASVAAVKNGVSVDTSMGFTPLEGLVMGTRSGDIDPAIVEFLEKEEGLSAKEVVNILNKKSGVYGLTKGFSSDMRDIEDNAIEGDPVCRLAFDVYEYRIAKYIGAYAAAMNGVDAIVFTAGVGENSSIMREEIIENYLGYLGIKIDKEANDFKGEEKIISTPDSKVIAMVIPTNEELMIAKDTKEIIEKGLDELKI

SEQ ID NO: 2745 - DNA, 1257 bp, synthetic construct
  misc_feature 1..1257: note = Variant of acetate kinase
  source 1..1257: mol_type = other DNA
atgcaccatcatcatcatcatggcggtagcggcatgaaagttctggtgattaattctggtagctcctccatcaaatatcagctcctcgatatgaccaacgaaaaggtattagcgaaaggcttggtcgagcgcattggcatcgacggttcgcgtatcgtgcataaagttaacggcgaaaaacacgtgctggaacatgagattaagaatcacgaaattggacttaaattggtcctggatcttcttacggacgaaaaatacggtgtgttgaaggatctcaaagaaatcgatgcagttgggcatcgcgtagtacatggcggcgagcgttttgccagtagcgtgaagattactgacgaagtcttaaagaccatcgagacgttgtcgttcttagctccgttacacaatccagcgaacattatgggtatcaagagcagcatgaaagtgttaccgggtgtgcctcaagttgccgtctttgatacagcgttccaccagaagatgccggagaaagcctatttgtacgcaatcccctatgagtactacgagaaatataaaattcgccgctatgggtttcatggaacctcacatcgttatgtgagtaaacgtgctgcggaaattatgggcaaaccgtacgatcagctcaagatcattaccgttcacgtgggtaacggcgcatcagttgcggcggtgaagaatggcgtatctgttgacacttccatgggtttcacaccacttgaaggtcttgtcatgggcacgcgcagcggcgatattgatccggccatcgtggaatttcttgagaaagaagaaggattgtcggccaaagaagtcgtcaacatcctcaacaagaaatctggtgtgtatgggctcaccaaaggctttagtagtgacatgcgtgacattgaagataatgctattgaaggtgatcctgtatgccgccttgcattagatgtgtacgaatatcgtatcgcgaaatatattggcgcatacgctgcggccatgaacggtgttgacgcgatcgtctttaccgcaggagttggcgaaaatagcccgattatgcgcgaagaaattattgagaactacttgggctacttagggatcaagatcgataaagaagccaatgacttcaaaggtgaggagaagatcatttcaacgcccgattccaaagtgattgcgatggtagttccgaccaacgaggagctcatgatcgccaaagacacgaaagaaatcattgagaaagggttggacgagcttaagatctaatga

SEQ ID NO: 2746 - protein, 417 aa, synthetic construct
  REGION 1..417: note = Variant of acetate kinase
MHHHHHHGGSGMKVLVINSGSSSIKYQLLDMTNEKVLAKGLVERIGIDGSRIVHKVNGEKHVLEHEIKNHEIGLKLVLDLLTDEKYGVLKDLKEIDAVGHRVVHGGERFASSVKITDEVLKTIETLSFLAPLHNPANIMGIKSSMKVLPGVPQVAVFDTAFHQKMPEKAYLYAIPYEYYEKYKIRRYGFHGTSHRYVSKRAAEIMGKPYDQLKIITVHVGNGASVAAVKNGVSVDTSMGFTPLEGLVMGTRSGDIDPAIVEFLEKEEGLSAKEVVNILNKKSGVYGLTKGFSSDMRDIEDNAIEGDPVCRLALDVYEYRIAKYIGAYAAAMNGVDAIVFTAGVGENSPIMREEIIENYLGYLGIKIDKEANDFKGEEKIISTPDSKVIAMVVPTNEELMIAKDTKEIIEKGLDELKI

SEQ ID NO: 2747 - DNA, 1257 bp, synthetic construct
  misc_feature 1..1257: note = Variant of acetate kinase
  source 1..1257: mol_type = other DNA
atgcaccatcatcatcatcatggcggtagcggcatgaaagttctggtgattaattctggtagctcctccatcaaatatcagctcctcgatatgaccaacgaaaaggtattagcgaaaggcttggtcgagcgcattggcatcgacggttcgcgtattgtgcataaagttaacggcgaaaaacacgtgctggaacatgagattaaggatcacgaaattggacttaaattggtcctggatcttcttacggacgaaaaatacggtgtgttgaaggatctcaaagaaatcgatgcagttgggcatcgcgtagtacatggcggcgagcgttttgccagtagcgtgaagattactgacgaagtcttaaagaccatcgagacgttgtcgttcttagctccgttacacaatccagcgaacattatgggtatcaagagcagcatgaaattaatgccgggtgtgcctcaagttgccgtctttgatacagcgttccaccagaagatgccggagaaagcctatttgtacgcaatcccctatgagtactacgagaaatataaaattcgccgctatgggtttcatggaacctcacatcgttatgtgagtaaacgtgctgcggaaattatgggcaaaccgtacgatcagctcaagatcattaccgttcacgtgggtaacggcgcatcagttgcggcggtgaagaatggcgtatctgttgacacttccatgggtttcacaccacttgaaggtcttgtcatgggcacgcgcagcggcgatattgatccggccatcgtggaatttcttgagaaagaagaaggattgtcggccaaagaagtcgtcaacatcctcaacaagaaatctggtgtgtatgggctcaccaaaggctttagtagtgacatgcgtgacattgaagataatgctattgaaggtgatcctgtatgccgccttgcattcgatgtgtacgaatatcgtatcgcgaaatatattggcgcatacgctgcggccatgaacggtgttgacgcgatcgtctttaccgcaggagttggcgaaaatagcccgattatgcgcgaagaaattattgagaactacttgggctacttagggatcaagatcgataaagaagccaatcgcttcaaaggtgaggagaagatcatttcaacgcccgattccaaagtgattgcgatggtaattccgaccaacgaggagctcatgatcgccaaagacacgaaagaaatcattgagaaagggttggacgagcttaagatctaatga

SEQ ID NO: 2748 - protein, 417 aa, synthetic construct
  REGION 1..417: note = Variant of acetate kinase
MHHHHHHGGSGMKVLVINSGSSSIKYQLLDMTNEKVLAKGLVERIGIDGSRIVHKVNGEKHVLEHEIKDHEIGLKLVLDLLTDEKYGVLKDLKEIDAVGHRVVHGGERFASSVKITDEVLKTIETLSFLAPLHNPANIMGIKSSMKLMPGVPQVAVFDTAFHQKMPEKAYLYAIPYEYYEKYKIRRYGFHGTSHRYVSKRAAEIMGKPYDQLKIITVHVGNGASVAAVKNGVSVDTSMGFTPLEGLVMGTRSGDIDPAIVEFLEKEEGLSAKEVVNILNKKSGVYGLTKGFSSDMRDIEDNAIEGDPVCRLAFDVYEYRIAKYIGAYAAAMNGVDAIVFTAGVGENSPIMREEIIENYLGYLGIKIDKEANRFKGEEKIISTPDSKVIAMVIPTNEELMIAKDTKEIIEKGLDELKI

SEQ ID NO: 2749 - DNA, 1257 bp, synthetic construct
  misc_feature 1..1257: note = Variant of acetate kinase
  source 1..1257: mol_type = other DNA
atgcaccatcatcatcatcatggcggtagcggcatgaaagttctggtgattaattctggtagctcctccatcaaatatcagctcctcgatatgaccaacgaaaaggtattagcgaaaggcttggtcgagcgcattggcatcgacggttcgcgtatcgtgcataaagttaacggcgaaaaacacgtgctggaacatgagattaagaatcacgaaattggacttaaattggtcctggatcttcttacggacgaaaaatacggtgtgttgaaggatctcaaagaaatcgatgcagttgggcatcgcgtagtacatggcggcgagcgttttgccagtagcgtgaagattactgacgaagtcttaaagaccatcgagacgttgtcgttcttagctccgttacacaatccactgaacattatgggtatcaagagcagcatgaaattaatgccgggtgtgcctcaagttgccgtctttgatacagcgttccaccagaagatgccggagaaagcctatttgtacgcaatcccctatgagtactacgagaaatataaaattcgccgctatgggtttcatggaacctcacatcgttatgtgagtaaacgtgctgcggaaattatgggcaaaccgtacgatcagctcaagatcattaccgttcacgtgggtaacggcgcatcagttgcggcggtgaagaatggcgtatctgttgacacttccatgggtttcacaccacttgaaggtcttgtcatgggcacgcgcagcggcgatattgatccggccatcgtggaatttcttgagaaagaagaaggattgtcggccaaagaagtcgtcaacatcctcaacaagaaatctggtgtgtatgggctcaccaaaggctttagtagtgacatgcgtgacattgaagataatgctattgaaggtgatcctgtatgccgccttgcattcgatgtgtacgaatatcgtatcgcgaaatatattggcgcatacgctgcggccatgaacggtgttgacgcgatcgtctttaccgcaggagttggcgaaaatagcagcattatgcgcgaagaaattattgagaactacttgggctacttagggatcaagatcgataaagaagccaatgatttcaaaggtgaggagaagatcatttcaacgcccgattccaaagtgattgcgatggtaattccgaccaacgaggagctcatgatcgccaaagacacgaaagaaatcattgagaaagggttggacgagcttaagatctaatga

SEQ ID NO: 2750 - protein, 417 aa, synthetic construct
  REGION 1..417: note = Variant of acetate kinase
MHHHHHHGGSGMKVLVINSGSSSIKYQLLDMTNEKVLAKGLVERIGIDGSRIVHKVNGEKHVLEHEIKNHEIGLKLVLDLLTDEKYGVLKDLKEIDAVGHRVVHGGERFASSVKITDEVLKTIETLSFLAPLHNPLNIMGIKSSMKLMPGVPQVAVFDTAFHQKMPEKAYLYAIPYEYYEKYKIRRYGFHGTSHRYVSKRAAEIMGKPYDQLKIITVHVGNGASVAAVKNGVSVDTSMGFTPLEGLVMGTRSGDIDPAIVEFLEKEEGLSAKEVVNILNKKSGVYGLTKGFSSDMRDIEDNAIEGDPVCRLAFDVYEYRIAKYIGAYAAAMNGVDAIVFTAGVGENSSIMREEIIENYLGYLGIKIDKEANDFKGEEKIISTPDSKVIAMVIPTNEELMIAKDTKEIIEKGLDELKI

SEQ ID NO: 2751 - DNA, 1257 bp, synthetic construct
  misc_feature 1..1257: note = Variant of acetate kinase
  source 1..1257: mol_type = other DNA
atgcaccatcatcatcatcatggcggtagcggcatgaaagttctggtgattaattctggtagctcctccatcaaatatcagctcctcgatatgaccaacgaaaaggtattagcgaaaggcttggtcgagcgcattggcatcgacggttcgcgtattgtgcataaagttaacggcgaaaaacacgtgctggaacatgagattaagaatcacgaaattggacttaaattggtcctggatcttcttacggacgaaaaatacggtgtgttgaaggatctcaaagaaatcgatgcagttgggcatcgcgtagtacatggcggcgagcgttttgccagtagcgtgaagattactgacgaagtcttaaagaccatcgagacgttgtcgttcttagctccgttacacaatccactgaacattatgggtatcaagagcagcatgaaattactgccgggtgtgcctcaagttgccgtctttgatacagcgttccaccagaagatgccggagaaagcctatttgtacgcaatcccctatgagtactacgagaaatataaaattcgccgctatgggtttcatggaacctcacatcgttatgtgagtaaacgtgctgcggaaattatgggcaaaccgtacgatcagctcaagatcattaccgttcacgtgggtaacggcgcatcagttgcggcggtgaagaatggcgtatctgttgacacttccatgggtttcacaccacttgaaggtcttgtcatgggcacgcgcagcggcgatattgatccggccatcgtggaatttcttgagaaagaagaaggattgtcggccaaagaagtcgtcaacatcctcaacaagaaatctggtgtgtatgggctcaccaaaggctttagtagtgacatgcgtgacattgaagataatgctattgaaggtgatcctgtatgccgccttgcattcgatgtgtacgaatatcgtatcgcgaaatatattggcgcatacgctgcggccatgaacggtgttgacgcgatcgtctttaccgcaggagttggcgaaaatagcccgattatgcgcgaagaaattattgagaactacttgggctacttagggatcaagatcgataaagaagccaatcgcttcaaaggtgaggagaagatcatttcaacgcccgattccaaagtgattgcgatggtagttccgaccaacgaggagctcatgatcgccaaagacacgaaagaaatcattgagaaagggttggacgagcttaagatctaatga

SEQ ID NO: 2752 - protein, 417 aa, synthetic construct
  REGION 1..417: note = Variant of acetate kinase
MHHHHHHGGSGMKVLVINSGSSSIKYQLLDMTNEKVLAKGLVERIGIDGSRIVHKVNGEKHVLEHEIKNHEIGLKLVLDLLTDEKYGVLKDLKEIDAVGHRVVHGGERFASSVKITDEVLKTIETLSFLAPLHNPLNIMGIKSSMKLLPGVPQVAVFDTAFHQKMPEKAYLYAIPYEYYEKYKIRRYGFHGTSHRYVSKRAAEIMGKPYDQLKIITVHVGNGASVAAVKNGVSVDTSMGFTPLEGLVMGTRSGDIDPAIVEFLEKEEGLSAKEVVNILNKKSGVYGLTKGFSSDMRDIEDNAIEGDPVCRLAFDVYEYRIAKYIGAYAAAMNGVDAIVFTAGVGENSPIMREEIIENYLGYLGIKIDKEANRFKGEEKIISTPDSKVIAMVVPTNEELMIAKDTKEIIEKGLDELKI

SEQ ID NO: 2753 - DNA, 1257 bp, synthetic construct
  misc_feature 1..1257: note = Variant of acetate kinase
  source 1..1257: mol_type = other DNA
atgcaccatcatcatcatcatggcggtagcggcatgaaagttctggtgattaattctggtagctcctccatcaaatatcagctcctcgatatgaccaacgaaaaggtattagcgaaaggcttggtcgagcgcattggcatcgacggttcgcgtattgtgcataaagttaacggcgaaaaacacgtgctggaacatgagattaagaatcacgaaattggacttaaattggtcctggatcttcttacggacgaaaaatacggtgtgttgaaggatctcaaagaaatcgatgcagttgggcatcgcgtagtacatggcggcgagcgttttgccagtagcgtgaagattactgacgaagtcttaaagaccatcgagacgttgtcgttcttagctccgttacacaatccagcgaacattatgggtatcaagagcagcatgaaattactgccgggtgtgcctcaagttgccgtctttgatacagcgttccaccagaagatgccggagaaagcctatttgtacgcaatcccctatgagtactacgagaaatataaaattcgccgctatgggtttcatggaacctcacatcgttatgtgagtaaacgtgctgcggaaattatgggcaaaccgtacgatcagctcaagatcattaccgttcacgtgggtaacggcgcatcagttgcggcggtgaagaatggcgtatctgttgacacttccatgggtttcacaccacttgaaggtcttgtcatgggcacgcgcagcggcgatattgatccggccatcgtggaatttcttgagaaagaagaaggattgtcggccaaagaagtcgtcaacatcctcaacaagaaatctggtgtgtatgggctcaccaaaggctttagtagtgacatgcgtgacattgaagataatgctattgaaggtgatcctgtatgccgccttgcattcgatgtgtacgaatatcgtatcgcgaaatatattggcgcatacgctgcggccatgaacggtgttgacgcgatcgtctttaccgcaggagttggcgaaaatagccgcattatgcgcgaagaaattattgagaactacttgggctacttagggatcaagatcgataaagaagccaatgacttcaaaggtgaggagaagatcatttcaacgcccgattccaaagtgattgcgatggtaattccgaccaacgaggagctcatgatcgccaaagacacgaaagaaatcattgagaaagggttggacgagcttaagatctaatga

SEQ ID NO: 2754 - protein, 417 aa, synthetic construct
  REGION 1..417: note = Variant of acetate kinase
MHHHHHHGGSGMKVLVINSGSSSIKYQLLDMTNEKVLAKGLVERIGIDGSRIVHKVNGEKHVLEHEIKNHEIGLKLVLDLLTDEKYGVLKDLKEIDAVGHRVVHGGERFASSVKITDEVLKTIETLSFLAPLHNPANIMGIKSSMKLLPGVPQVAVFDTAFHQKMPEKAYLYAIPYEYYEKYKIRRYGFHGTSHRYVSKRAAEIMGKPYDQLKIITVHVGNGASVAAVKNGVSVDTSMGFTPLEGLVMGTRSGDIDPAIVEFLEKEEGLSAKEVVNILNKKSGVYGLTKGFSSDMRDIEDNAIEGDPVCRLAFDVYEYRIAKYIGAYAAAMNGVDAIVFTAGVGENSRIMREEIIENYLGYLGIKIDKEANDFKGEEKIISTPDSKVIAMVIPTNEELMIAKDTKEIIEKGLDELKI

SEQ ID NO: 2755 - DNA, 1257 bp, synthetic construct
  misc_feature 1..1257: note = Variant of acetate kinase
  source 1..1257: mol_type = other DNA
atgcaccatcatcatcatcatggcggtagcggcatgaaagttctggtgattaattctggtagctcctccatcaaatatcagctcctcgatatgaccaacgaaaaggtattagcgaaaggcttggtcgagcgcattggcatcgacggttcgcgtattgtgcataaagttaacggcgaaaaacacgtgctggaacatgagattaaggatcacgaaattggacttaaattggtcctggatcttcttacggacgaaaaatacggtgtgttgaaggatctcaaagaaatcgatgcagttgggcatcgcgtagtacatggcggcgagcgttttgccagtagcgtgaagattactgacgaagtcttaaagaccatcgagacgttgtcgttcttagctccgttacacaatccagcgaacattatgggtatcaagagcagcatgaaattattaccgggtgtgcctcaagttgccgtctttgatacagcgttccaccagaagatgccggagaaagcctatttgtacgcaatcccctatgagtactacgagaaatataaaattcgccgctatgggtttcatggaacctcacatcgttatgtgagtaaacgtgctgcggaaattatgggcaaaccgtacgatcagctcaagatcattaccgttcacgtgggtaacggcgcatcagttgcggcggtgaagaatggcgtatctgttgacacttccatgggtttcacaccacttgaaggtcttgtcatgggcacgcgcagcggcgatattgatccggccatcgtggaatttcttgagaaagaagaaggattgtcggccaaagaagtcgtcaacatcctcaacaagaaatctggtgtgtatgggctcaccaaaggctttagtagtgacatgcgtgacattgaagataatgctattgaaggtgatcctgtatgccgccttgcattcgatgtgtacgaatatcgtatcgcgaaatatattggcgcatacgctgcggccatgaacggtgttgacgcgatcgtctttaccgcaggagttggcgaaaatagccgcattatgcgcgaagaaattattgagaactacttgggctacttagggatcaagatcgataaagaagccaatgatttcaaaggtgaggagaagatcatttcaacgcccgattccaaagtgattgcgatggtaattccgaccaacgaggagctcatgatcgccaaagacacgaaagaaatcattgagaaagggttggacgagcttaagatctaatga

SEQ ID NO: 2756 - protein, 417 aa, synthetic construct
  REGION 1..417: note = Variant of acetate kinase
MHHHHHHGGSGMKVLVINSGSSSIKYQLLDMTNEKVLAKGLVERIGIDGSRIVHKVNGEKHVLEHEIKDHEIGLKLVLDLLTDEKYGVLKDLKEIDAVGHRVVHGGERFASSVKITDEVLKTIETLSFLAPLHNPANIMGIKSSMKLLPGVPQVAVFDTAFHQKMPEKAYLYAIPYEYYEKYKIRRYGFHGTSHRYVSKRAAEIMGKPYDQLKIITVHVGNGASVAAVKNGVSVDTSMGFTPLEGLVMGTRSGDIDPAIVEFLEKEEGLSAKEVVNILNKKSGVYGLTKGFSSDMRDIEDNAIEGDPVCRLAFDVYEYRIAKYIGAYAAAMNGVDAIVFTAGVGENSRIMREEIIENYLGYLGIKIDKEANDFKGEEKIISTPDSKVIAMVIPTNEELMIAKDTKEIIEKGLDELKI

SEQ ID NO: 2757 - DNA, 1257 bp, synthetic construct
  misc_feature 1..1257: note = Variant of acetate kinase
  source 1..1257: mol_type = other DNA
atgcaccatcatcatcatcatggcggtagcggcatgaaagttctggtgattaattctggtagctcctccatcaaatatcagctcctcgatatgaccaacgaaaaggtattagcgaaaggcttggtcgagcgcattggcatcgacggttcgcgtatcgtgcataaagttaacggcgaaaaacacgtgctggaacatgagattaagaatcacgaaattggacttaaattggtcctggatcttcttacggacgaaaaatacggtgtgttgaaggatctcaaagaaatcgatgcagttgggcatcgcgtagtacatggcggcgagcgttttgccagtagcgtgaagattactgacgaagtcttaaagaccatcgagacgttgtcgttcttagctccgttacacaatccagcgaacattatgggtatcaagagcagcatgaaagtgttaccgggtgtgcctcaagttgccgtctttgatacagcgttccaccagaagatgccggagaaagcctatttgtacgcaatcccctatgagtactacgagaaatataaaattcgccgctatgggtttcatggaacctcacatcgttatgtgagtaaacgtgctgcggaaattctgggcaaaccgtacgatcagctcaagatcattaccgttcacgtgggtaacggcgcatcagttgcggcggtgaagaatggcgtatctgttgacacttccatgggtttcacaccacttgaaggtcttgtcatgggcacgcgcagcggcgatattgatccggccatcgtggaatttcttgagaaagaagaaggattgtcggccaaagaagtcgtcaacatcctcaacaagaaatctggtgtgtatgggctcaccaaaggctttagtagtgacatgcgtgacattgaagataatgctattgaaggtgatcctgtatgccgccttgcattcgatgtgtacgaatatcgtatcgcgaaatatattggcgcatacgctgcggccatgaacggtgttgacgcgatcgtctttaccgcaggagttggcgaaaatagcccgattatgcgcgaagaaattattgagaactacttgggctacttagggatcaagatcgataaagaagccaatgacttcaaaggtgaggagaagatcatttcaacgcccgattccaaagtgattgcgatggtagttccgaccaacgaggagctcatgatcgccaaagacacgaaagaaatcattgagaaagggttggacgagcttaagatctaatga

SEQ ID NO: 2758 - protein, 417 aa, synthetic construct
  REGION 1..417: note = Variant of acetate kinase
MHHHHHHGGSGMKVLVINSGSSSIKYQLLDMTNEKVLAKGLVERIGIDGSRIVHKVNGEKHVLEHEIKNHEIGLKLVLDLLTDEKYGVLKDLKEIDAVGHRVVHGGERFASSVKITDEVLKTIETLSFLAPLHNPANIMGIKSSMKVLPGVPQVAVFDTAFHQKMPEKAYLYAIPYEYYEKYKIRRYGFHGTSHRYVSKRAAEILGKPYDQLKIITVHVGNGASVAAVKNGVSVDTSMGFTPLEGLVMGTRSGDIDPAIVEFLEKEEGLSAKEVVNILNKKSGVYGLTKGFSSDMRDIEDNAIEGDPVCRLAFDVYEYRIAKYIGAYAAAMNGVDAIVFTAGVGENSPIMREEIIENYLGYLGIKIDKEANDFKGEEKIISTPDSKVIAMVVPTNEELMIAKDTKEIIEKGLDELKI

SEQ ID NO: 2759 - DNA, 1257 bp, synthetic construct
  misc_feature 1..1257: note = Variant of acetate kinase
  source 1..1257: mol_type = other DNA
atgcaccatcatcatcatcatggcggtagcggcatgaaagttctggtgattaattctggtagctcctccatcaaatatcagctcctcgatatgaccaacgaaaaggtattagcgaaaggcttggtcgagcgcattggcatcgacggttcgcgtattgtgcataaagttaacggcgaaaaacacgtgctggaacatgagattaaggatcacgaaattggacttaaattggtcctggatcttcttacggacgaaaaatacggtgtgttgaaggatctcaaagaaatcgatgcagttgggcatcgcgtagtacatggcggcgagcgttttgccagtagcgtgaagattactgacgaagtcttaaagaccatcgagacgttgtcgttcttagctccgttacacaatccactgaacattatgggtatcaagagcagcatgaaattattaccgggtgtgcctcaagttgccgtctttgatacagcgttccaccagaagatgccggagaaagcctatttgtacgcaatcccctatgagtactacgagaaatataaaattcgccgctatgggtttcatggaacctcacatcgttatgtgagtaaacgtgctgcggaaattatgggcaaaccgtacgatcagctcaagatcattaccgttcacgtgggtaacggcgcatcagttgcggcggtgaagaatggcgtatctgttgacacttccatgggtttcacaccacttgaaggtcttgtcatgggcacgcgcagcggcgatattgatccggccatcgtggaatttcttgagaaagaagaaggattgtcggccaaagaagtcgtcaacatcctcaacaagaaatctggtgtgtatgggctcaccaaaggctttagtagtgacatgcgtgacattgaagataatgctattgaaggtgatcctgtatgccgccttgcattcgatgtgtacgaatatcgtatcgcgaaatatattggcgcatacgctgcggccatgaacggtgttgacgcgatcgtctttaccgcaggagttggcgaaaatagcccgattatgcgcgaagaaattattgagaactacttgggctacttagggatcaagatcgataaagaagccaatcgcttcaaaggtgaggagaagatcatttcaacgcccgattccaaagtgattgcgatggtaattccgaccaacgaggagctcatgatcgccaaagacacgaaagaaatcattgagaaagggttggacgagcttaagatctaatga

SEQ ID NO: 2760 - protein, 417 aa, synthetic construct
  REGION 1..417: note = Variant of acetate kinase
MHHHHHHGGSGMKVLVINSGSSSIKYQLLDMTNEKVLAKGLVERIGIDGSRIVHKVNGEKHVLEHEIKDHEIGLKLVLDLLTDEKYGVLKDLKEIDAVGHRVVHGGERFASSVKITDEVLKTIETLSFLAPLHNPLNIMGIKSSMKLLPGVPQVAVFDTAFHQKMPEKAYLYAIPYEYYEKYKIRRYGFHGTSHRYVSKRAAEIMGKPYDQLKIITVHVGNGASVAAVKNGVSVDTSMGFTPLEGLVMGTRSGDIDPAIVEFLEKEEGLSAKEVVNILNKKSGVYGLTKGFSSDMRDIEDNAIEGDPVCRLAFDVYEYRIAKYIGAYAAAMNGVDAIVFTAGVGENSPIMREEIIENYLGYLGIKIDKEANRFKGEEKIISTPDSKVIAMVIPTNEELMIAKDTKEIIEKGLDELKI

SEQ ID NO: 2761 - DNA, 1257 bp, synthetic construct
  misc_feature 1..1257: note = Variant of acetate kinase
  source 1..1257: mol_type = other DNA
atgcaccatcatcatcatcatggcggtagcggcatgaaagttctggtgattaattctggtagctcctccatcaaatatcagctcctcgatatgaccaacgaaaaggtattagcgaaaggcttggtcgagcgcattggcatcgacggttcgcgtattgtgcataaagttaacggcgaaaaacacgtgctggaacatgagattaaggatcacgaaattggacttaaattggtcctggatcttcttacggacgaaaaatacggtgtgttgaaggatctcaaagaaatcgatgcagttgggcatcgcgtagtacatggcggcgagcgttttgccagtagcgtgaagattactgacgaagtcttaaagaccatcgagacgttgtcgttcttagctccgttacacaatccactgaacattatgggtatcaagagcagcatgaaattactgccgggtgtgcctcaagttgccgtctttgatacagcgttccaccagaagatgccggagaaagcctatttgtacgcaatcccctatgagtactacgagaaatataaaattcgccgctatgggtttcatggaacctcacatcgttatgtgagtaaacgtgctgcggaaattatgggcaaaccgtacgatcagctcaagatcattaccgttcacgtgggtaacggcgcatcagttgcggcggtgaagaatggcgtatctgttgacacttccatgggtttcacaccacttgaaggtcttgtcatgggcacgcgcagcggcgatattgatccggccatcgtggaatttcttgagaaagaagaaggattgtcggccaaagaagtcgtcaacatcctcaacaagaaatctggtgtgtatgggctcaccaaaggctttagtagtgacatgcgtgacattgaagataatgctattgaaggtgatcctgtatgccgccttgcattcgatgtgtacgaatatcgtatcgcgaaatatattggcgcatacgctgcggccatgaacggtgttgacgcgatcgtctttaccgcaggagttggcgaaaatagcccgattatgcgcgaagaaattattgagaactacttgggctacttagggatcaagatcgataaagaagccaatcgcttcaaaggtgaggagaagatcatttcaacgcccgattccaaagtgattgcgatggtagttccgaccaacgaggagctcatgatcgccaaagacacgaaagaaatcattgagaaagggttggacgagcttaagatctaatga

SEQ ID NO: 2762 - protein, 417 aa, synthetic construct
  REGION 1..417: note = Variant of acetate kinase
MHHHHHHGGSGMKVLVINSGSSSIKYQLLDMTNEKVLAKGLVERIGIDGSRIVHKVNGEKHVLEHEIKDHEIGLKLVLDLLTDEKYGVLKDLKEIDAVGHRVVHGGERFASSVKITDEVLKTIETLSFLAPLHNPLNIMGIKSSMKLLPGVPQVAVFDTAFHQKMPEKAYLYAIPYEYYEKYKIRRYGFHGTSHRYVSKRAAEIMGKPYDQLKIITVHVGNGASVAAVKNGVSVDTSMGFTPLEGLVMGTRSGDIDPAIVEFLEKEEGLSAKEVVNILNKKSGVYGLTKGFSSDMRDIEDNAIEGDPVCRLAFDVYEYRIAKYIGAYAAAMNGVDAIVFTAGVGENSPIMREEIIENYLGYLGIKIDKEANRFKGEEKIISTPDSKVIAMVVPTNEELMIAKDTKEIIEKGLDELKI

SEQ ID NO: 2763 - DNA, 1257 bp, synthetic construct
  misc_feature 1..1257: note = Variant of acetate kinase
  source 1..1257: mol_type = other DNA
atgcaccatcatcatcatcatggcggtagcggcatgaaagttctggtgattaattctggtagctcctccatcaaatatcagctcctcgatatgaccaacgaaaaggtattagcgaaaggcttggtcgagcgcattggcatcgacggttcgcgtatcgtgcataaagttaacggcgaaaaacacgtgctggaacatgagattaagaatcacgaaattggacttaaattggtcctggatcttcttacggacgaaaaatacggtgtgttgaaggatctcaaagaaatcgatgcagttgggcatcgcgtagtacatggcggcgagcgttttgccagtagcgtgaagattactgacgaagtcttaaagaccatcgagacgttgtcgttcttagctccgttacacaatccagcgaacattatgggtatcaagagcagcatgaaagtgttaccgggtgtgcctcaagttgccgtctttgatacagcgttccaccagaagatgccggagaaagcctatttgtacgcaatcccctatgagtactacgagaaatataaaattcgccgctatgggtttcatggaacctcacatcgttatgtgagtaaacgtgctgcggaaattctgggcaaaccgtacgatcagctcaagatcattaccgttcacgtgggtaacggcgcatcagttgcggcggtgaagaatggcgtatctgttgacacttccatgggtttcacaccacttgaaggtcttgtcatgggcacgcgcagcggcgatattgatccggccatcgtggaatttcttgagaaagaagaaggattgtcggccaaagaagtcgtcaacatcctcaacaagaaatctggtgtgtatgggctcaccaaaggctttagtagtgacatgcgtgacattgaagataatgctattgaaggtgatcctgtatgccgccttgcattcgatgtgtacgaatatcgtatcgcgaaatatattggcgcatacgctgcggccatgaacggtgttgacgcgatcgtctttaccgcaggagttggcgaaaatagcccgattatgcgccatgaaattattgagaactacttgggctacttagggatcaagatcgataaagaagccaatgacttcaaaggtgaggagaagatcatttcaacgcccgattccaaagtgattgcgatggtagttccgaccaacgaggagctcatgatcgccaaagacacgaaagaaatcattgagaaagggttggacgagcttaagatctaatga

SEQ ID NO: 2764 - protein, 417 aa, synthetic construct
  REGION 1..417: note = Variant of acetate kinase
MHHHHHHGGSGMKVLVINSGSSSIKYQLLDMTNEKVLAKGLVERIGIDGSRIVHKVNGEKHVLEHEIKNHEIGLKLVLDLLTDEKYGVLKDLKEIDAVGHRVVHGGERFASSVKITDEVLKTIETLSFLAPLHNPANIMGIKSSMKVLPGVPQVAVFDTAFHQKMPEKAYLYAIPYEYYEKYKIRRYGFHGTSHRYVSKRAAEILGKPYDQLKIITVHVGNGASVAAVKNGVSVDTSMGFTPLEGLVMGTRSGDIDPAIVEFLEKEEGLSAKEVVNILNKKSGVYGLTKGFSSDMRDIEDNAIEGDPVCRLAFDVYEYRIAKYIGAYAAAMNGVDAIVFTAGVGENSPIMRHEIIENYLGYLGIKIDKEANDFKGEEKIISTPDSKVIAMVVPTNEELMIAKDTKEIIEKGLDELKI

SEQ ID NO: 2765 - DNA, 1257 bp, synthetic construct
  misc_feature 1..1257: note = Variant of acetate kinase
  source 1..1257: mol_type = other DNA
atgcaccatcatcatcatcatggcggtagcggcatgaaagttctggtgattaattctggtagctcctccatcaaatatcagctcctcgatatgaccaacgaaaaggtattagcgaaaggcttggtcgagcgcattggcatcgacggttcgcgtattgtgcataaagttaacggcgaaaaacacgtgctggaacatgagattaagaatcacgaaattggacttaaattggtcctggatcttcttacggacgaaaaatacggtgtgttgaaggatctcaaagaaatcgatgcagttgggcatcgcgtagtacatggcggcgagcgttttgccagtagcgtgaagattactgacgaagtcttaaagaccatcgagacgttgtcgttcttagctccgttacacaatccagcgaacattatgggtatcaagagcagcatgaaattaatgccgggtgtgcctcaagttgccgtctttgatacagcgttccaccagaagatgccggagaaagcctatttgtacgcaatcccctatgagtactacgagaaatataaaattcgccgctatgggtttcatggaacctcacatcgttatgtgagtaaacgtgctgcggaaattatgggcaaaccgtacgatcagctcaagatcattaccgttcacgtgggtaacggcgcatcagttgcggcggtgaagaatggcgtatctgttgacacttccatgggtttcacaccacttgaaggtcttgtcatgggcacgcgcagcggcgatattgatccggccatcgtggaatttcttgagaaagaagaaggattgtcggccaaagaagtcgtcaacatcctcaacaagaaatctggtgtgtatgggctcaccaaaggctttagtagtgacatgcgtgacattgaagataatgctattgaaggtgatcctgtatgccgccttgcattcgatgtgtacgaatatcgtatcgcgaaatatattggcgcatacgctgcggccatgaacggtgttgacgcgatcgtctttaccgcaggagttggcgaaaatagcccgattatgcgcgaagaaattattgagaactacttgggctacttagggatcaagatcgataaagaagccaatcgcttcaaaggtgaggagaagatcatttcaacgcccgattccaaagtgattgcgatggtagttccgaccaacgaggagctcatgatcgccaaagacacgaaagaaatcattgagaaagggttggacgagcttaagatctaatga

SEQ ID NO: 2766 - protein, 417 aa, synthetic construct
  REGION 1..417: note = Variant of acetate kinase
MHHHHHHGGSGMKVLVINSGSSSIKYQLLDMTNEKVLAKGLVERIGIDGSRIVHKVNGEKHVLEHEIKNHEIGLKLVLDLLTDEKYGVLKDLKEIDAVGHRVVHGGERFASSVKITDEVLKTIETLSFLAPLHNPANIMGIKSSMKLMPGVPQVAVFDTAFHQKMPEKAYLYAIPYEYYEKYKIRRYGFHGTSHRYVSKRAAEIMGKPYDQLKIITVHVGNGASVAAVKNGVSVDTSMGFTPLEGLVMGTRSGDIDPAIVEFLEKEEGLSAKEVVNILNKKSGVYGLTKGFSSDMRDIEDNAIEGDPVCRLAFDVYEYRIAKYIGAYAAAMNGVDAIVFTAGVGENSPIMREEIIENYLGYLGIKIDKEANRFKGEEKIISTPDSKVIAMVVPTNEELMIAKDTKEIIEKGLDELKI

SEQ ID NO: 2767 - DNA, 1257 bp, synthetic construct
  misc_feature 1..1257: note = Variant of acetate kinase
  source 1..1257: mol_type = other DNA
atgcaccatcatcatcatcatggcggtagcggcatgaaagttctggtgattaattctggtagctcctccatcaaatatcagctcctcgatatgaccaacgaaaaggtattagcgaaaggcttggtcgagcgcattggcatcgacggttcgcgtcttgtgcataaagttaacggcgaaaaacacgtgctggaacatgagattaaggatcacgaaattggacttaaattggtcctggatcttcttacggacgaaaaatacggtgtgttgaaggatctcaaagaaatcgatgcagttgggcatcgcgtagtacatggcggcgagcgttttgccagtagcgtgaagattactgacgaagtcttaaagaccatcgagacgttgtcgttcttagctccgttacacaatccagcgaacattatgggtatcaagagcagcatgaaattattaccgggtgtgcctcaagttgccgtctttgatacagcgttccaccagaagatgccggagaaagcctatttgtacgcaatcccctatgagtactacgagaaatataaaattcgccgctatgggtttcatggaacctcacatcgttatgtgagtaaacgtgctgcggaaattatgggcaaaccgtacgatcagctcaagatcattaccgttcacgtgggtaacggcgcatcagttgcggcggtgaagaatggcgtatctgttgacacttccatgggtttcacaccacttgaaggtcttgtcatgggcacgcgcagcggcgatattgatccggccatcgtggaatttcttgagaaagaagaaggattgtcggccaaagaagtcgtcaacatcctcaacaagaaatctggtgtgtatgggctcaccaaaggctttagtagtgacatgcgtgacattgaagataatgctattgaaggtgatcctgtatgccgccttgcattcgatgtgtacgaatatcgtatcgcgaaatatattggcgcatacgctgcggccatgaacggtgttgacgcgatcgtctttaccgcaggagttggcgaaaatagccgcattatgcgcgaagaaattattgagaactacttgggctacttagggatcaagatcgataaagaagccaatcgcttcaaaggtgaggagaagatcatttcaacgcccgattccaaagtgattgcgatggtagttccgaccaacgaggagctcatgatcgccaaagacacgaaagaaatcattgagaaagggttggacgagcttaagatctaatga

SEQ ID NO: 2768 - protein, 417 aa, synthetic construct
  REGION 1..417: note = Variant of acetate kinase
MHHHHHHGGSGMKVLVINSGSSSIKYQLLDMTNEKVLAKGLVERIGIDGSRLVHKVNGEKHVLEHEIKDHEIGLKLVLDLLTDEKYGVLKDLKEIDAVGHRVVHGGERFASSVKITDEVLKTIETLSFLAPLHNPANIMGIKSSMKLLPGVPQVAVFDTAFHQKMPEKAYLYAIPYEYYEKYKIRRYGFHGTSHRYVSKRAAEIMGKPYDQLKIITVHVGNGASVAAVKNGVSVDTSMGFTPLEGLVMGTRSGDIDPAIVEFLEKEEGLSAKEVVNILNKKSGVYGLTKGFSSDMRDIEDNAIEGDPVCRLAFDVYEYRIAKYIGAYAAAMNGVDAIVFTAGVGENSRIMREEIIENYLGYLGIKIDKEANRFKGEEKIISTPDSKVIAMVVPTNEELMIAKDTKEIIEKGLDELKI

SEQ ID NO: 2769 - DNA, 1257 bp, synthetic construct
  misc_feature 1..1257: note = Variant of acetate kinase
  source 1..1257: mol_type = other DNA
atgcaccatcatcatcatcatggcggtagcggcatgaaagttctggtgattaattctggtagctcctccatcaaatatcagctcctcgatatgaccaacgaaaaggtattagcgaaaggcttggtcgagcgcattggcatcgacggttcgcgtcttgtgcataaagttaacggcgaaaaacacgtgctggaacatgagattaaggatcacgaaattggacttaaattggtcctggatcttcttacggacgaaaaatacggtgtgttgaaggatctcaaagaaatcgatgcagttgggcatcgcgtagtacatggcggcgagcgttttgccagtagcgtgaagattactgacgaagtcttaaagaccatcgagacgttgtcgttcttagctccgttacacaatccagcgaacattatgggtatcaagagcagcatgaaattattaccgggtgtgcctcaagttgccgtctttgatacagcgttccaccagaagatgccggagaaagcctatttgtacgcaatcccctatgagtactacgagaaatataaaattcgccgctatgggtttcatggaacctcacatcgttatgtgagtaaacgtgctgcggaaattatgggcaaaccgtacgatcagctcaagatcattaccgttcacgtgggtaacggcgcatcagttgcggcggtgaagaatggcgtatctgttgacacttccatgggtttcacaccacttgaaggtcttgtcatgggcacgcgcagcggcgatattgatccggccatcgtggaatttcttgagaaagaagaaggattgtcggccaaagaagtcgtcaacatcctcaacaagaaatctggtgtgtatgggctcaccaaaggctttagtagtgacatgcgtgacattgaagataatgctattgaaggtgatcctgtatgccgccttgcattcgatgtgtacgaatatcgtatcgcgaaatatattggcgcatacgctgcggccatgaacggtgttgacgcgatcgtctttaccgcaggagttggcgaaaatagccgcattatgcgcgaagaaattattgagaactacttgggctacttagggatcaagatcgataaagaagccaatgatttcaaaggtgaggagaagatcatttcaacgcccgattccaaagtgattgcgatggtagttccgaccaacgaggagctcatgatcgccaaagacacgaaagaaatcattgagaaagggttggacgagcttaagatctaatga

SEQ ID NO: 2770 - protein, 417 aa, synthetic construct
  REGION 1..417: note = Variant of acetate kinase
MHHHHHHGGSGMKVLVINSGSSSIKYQLLDMTNEKVLAKGLVERIGIDGSRLVHKVNGEKHVLEHEIKDHEIGLKLVLDLLTDEKYGVLKDLKEIDAVGHRVVHGGERFASSVKITDEVLKTIETLSFLAPLHNPANIMGIKSSMKLLPGVPQVAVFDTAFHQKMPEKAYLYAIPYEYYEKYKIRRYGFHGTSHRYVSKRAAEIMGKPYDQLKIITVHVGNGASVAAVKNGVSVDTSMGFTPLEGLVMGTRSGDIDPAIVEFLEKEEGLSAKEVVNILNKKSGVYGLTKGFSSDMRDIEDNAIEGDPVCRLAFDVYEYRIAKYIGAYAAAMNGVDAIVFTAGVGENSRIMREEIIENYLGYLGIKIDKEANDFKGEEKIISTPDSKVIAMVVPTNEELMIAKDTKEIIEKGLDELKI

SEQ ID NO: 2771 - DNA, 1257 bp, synthetic construct
  misc_feature 1..1257: note = Variant of acetate kinase
  source 1..1257: mol_type = other DNA
atgcaccatcatcatcatcatggcggtagcggcatgaaagttctggtgattaattctggtagctcctccatcaaatatcagctcctcgatatgaccaacgaaaaggtattagcgaaaggcttggtcgagcgcattggcatcgacggttcgcgtatcgtgcataaagttaacggcgaaaaacacgtgctggaacatgagattaagaatcacgaaattggacttaaattggtcctggatcttcttacggacgaaaaatacggtgtgttgaaggatctcaaagaaatcgatgcagttgggcatcgcgtagtacatggcggcgagcgttttgccagtagcgtgaagattactgacgaagtcttaaagaccatcgagacgttgtcgttcttagctccgttacacaatccagtgaacattatgggtatcaagagcagcatgaaattattaccgggtgtgcctcaagttgccgtctttgatacagcgttccaccagaagatgccggagaaagcctatttgtacgcaatcccctatgagtactacgagaaatataaaattcgccgctatgggtttcatggaacctcacatcgttatgtgagtaaacgtgctgcggaaattatgggcaaaccgtacgatcagctcaagatcattaccgttcacgtgggtaacggcgcatcagttgcggcggtgaagaatggcgtatctgttgacacttccatgggtttcacaccacttgaaggtcttgtcatgggcacgcgcagcggcgatattgatccggccatcgtggaatttcttgagaaagaagaaggattgtcggccaaagaagtcgtcaacatcctcaacaagaaatctggtgtgtatgggctcaccaaaggctttagtagtgacatgcgtgacattgaagataatgctattgaaggtgatcctgtatgccgccttgcatttgatgtgtacgaatatcgtatcgcgaaatatattggcgcatacgctgcggccatgaacggtgttgacgcgatcgtctttaccgcaggagttggcgaaaatagcccgattatgcgcgaagaaattattgagaactacttgggctacttagggatcaagatcgataaagaagccaatgacgttaaaggtgaggagaagatcatttcaacgcccgattccaaagtgattgcgatggtagttccgaccaacgaggagctcatgatcgccaaagacacgaaagaaatcattgagaaagggttggacgagcttaagatctaatga

SEQ ID NO: 2772 - protein, 417 aa, synthetic construct
  REGION 1..417: note = Variant of acetate kinase
MHHHHHHGGSGMKVLVINSGSSSIKYQLLDMTNEKVLAKGLVERIGIDGSRIVHKVNGEKHVLEHEIKNHEIGLKLVLDLLTDEKYGVLKDLKEIDAVGHRVVHGGERFASSVKITDEVLKTIETLSFLAPLHNPVNIMGIKSSMKLLPGVPQVAVFDTAFHQKMPEKAYLYAIPYEYYEKYKIRRYGFHGTSHRYVSKRAAEIMGKPYDQLKIITVHVGNGASVAAVKNGVSVDTSMGFTPLEGLVMGTRSGDIDPAIVEFLEKEEGLSAKEVVNILNKKSGVYGLTKGFSSDMRDIEDNAIEGDPVCRLAFDVYEYRIAKYIGAYAAAMNGVDAIVFTAGVGENSPIMREEIIENYLGYLGIKIDKEANDVKGEEKIISTPDSKVIAMVVPTNEELMIAKDTKEIIEKGLDELKI

SEQ ID NO: 2773 - DNA, 1257 bp, synthetic construct
  misc_feature 1..1257: note = Variant of acetate kinase
  source 1..1257: mol_type = other DNA
atgcaccatcatcatcatcatggcggtagcggcatgaaagttctggtgattaattctggtagctcctccatcaaatatcagctcctcgatatgaccaacgaaaaggtattagcgaaaggcttggtcgagcgcattggcatcgacggttcgcgtatcgtgcataaagttaacggcgaaaaacacgtgctggaacatgagattccgaatcacgaaattggacttaaattggtcctggatcttcttacggacgaaaaatacggtgtgttgaaggatctcaaagaaatcgatgcagttgggcatcgcgtagtacatggcggcgagcgttttgccagtagcgtgaagattactgacgaagtcttaaagaccatcgagacgttgtcgttcttagctccgttacacaatccagtgaacattatgggtatcaagagcagcatgaaattattaccgggtgtgcctcaagttgccgtctttgatacagcgttccaccagaagatgccggagaaagcctatttgtacgcaatcccctatgagtactacgagaaatataaaattcgccgctatgggtttcatggaacctcacatcgttatgtgagtaaacgtgctgcggaaattatgggcaaaccgtacgatcagctcaagatcattaccgttcacgtgggtaacggcgcatcagttgcggcggtgaagaatggcgtatctgttgacacttccatgggtttcacaccacttgaaggtcttgtcatgggcacgcgcagcggcgatattgatccggccatcgtggaatttcttgagaaagaagaaggattgtcggccaaagaagtcgtcaacatcctcaacaagaaatctggtgtgtatgggctcaccaaaggctttagtagtgacatgcgtgacattgaagataatgctattgaaggtgatcctgtatgccgccttgcattagatgtgtacgaatatcgtatcgcgaaatatattggcgcatacgctgcggccatgaacggtgttgacgcgatcgtctttaccgcaggagttggcgaaaatagcccgattatgcgcgaagaaattattgagaactacttgggctacttagggatcaagatcgataaagaagccaatgactttaaaggtgaggagaagatcatttcaacgcccgattccaaagtgattgcgatggtagttccgaccaacgaggagctcatgatcgccaaagacacgaaagaaatcgttgagaaagggttggacgagcttaagatctaatga

SEQ ID NO: 2774 - protein, 417 aa, synthetic construct
  REGION 1..417: note = Variant of acetate kinase
MHHHHHHGGSGMKVLVINSGSSSIKYQLLDMTNEKVLAKGLVERIGIDGSRIVHKVNGEKHVLEHEIPNHEIGLKLVLDLLTDEKYGVLKDLKEIDAVGHRVVHGGERFASSVKITDEVLKTIETLSFLAPLHNPVNIMGIKSSMKLLPGVPQVAVFDTAFHQKMPEKAYLYAIPYEYYEKYKIRRYGFHGTSHRYVSKRAAEIMGKPYDQLKIITVHVGNGASVAAVKNGVSVDTSMGFTPLEGLVMGTRSGDIDPAIVEFLEKEEGLSAKEVVNILNKKSGVYGLTKGFSSDMRDIEDNAIEGDPVCRLALDVYEYRIAKYIGAYAAAMNGVDAIVFTAGVGENSPIMREEIIENYLGYLGIKIDKEANDFKGEEKIISTPDSKVIAMVVPTNEELMIAKDTKEIVEKGLDELKI

SEQ ID NO: 2775 - DNA, 1257 bp, synthetic construct
  misc_feature 1..1257: note = Variant of acetate kinase
  source 1..1257: mol_type = other DNA
atgcaccatcatcatcatcatggcggtagcggcatgaaagttctggtgattaattctggtagctcctccatcaaatatcagctcctcgatatgaccaacgaaaaggtattagcgaaaggcttggtcgagcgcattggcatcgacggttcgcgtatcgtgcataaagttaacggcgaaaaacacgtgctggaacatgagattaagaatcacgaaattggacttaaattggtcctggatcttcttacggacgaaaaatacggtgtgttgaaggatctcaaagaaatcgatgcagttgggcatcgcgtagtacatggcggcgagcgttttgccagtagcgtgaagattactgacgaagtcttaaagaccatcgagacgttgtcgttcttagctccgttacacaatccagtgaacattatgggtatcaagagcagcatgaaattattaccgggtgtgcctcaagttgccgtctttgatacagcgttccaccagaagatgccggagaaagcctatttgtacgcaatcccctatgagtactacgagaaatataaaattcgccgctatgggtttcatggaacctcacatcgttatgtgagtaaacgtgctgcggaaattctgggcaaaccgtacgatcagctcaagatcattaccgttcacgtgggtaacggcgcatcagttgcggcggtgaagaatggcgtatctgttgacacttccatgggtttcacaccacttgaaggtcttgtcatgggcacgcgcagcggcgatattgatccggccatcgtggaatttcttgagaaagaagaaggattgtcggccaaagaagtcgtcaacatcctcaacaagaaatctggtgtgtatgggctcaccaaaggctttagtagtgacatgcgtgacattgaagataatgctattgaaggtgatcctgtatgccgccttgcattagatgtgtacgaatatcgtatcgcgaaatatattggcgcatacgctgcggccatgaacggtgttgacgcgatcgtctttaccgcaggagttggcgaaaatagcccgattatgcgccatgaaattattgagaactacttgggctacttagggatcaagatcgataaagaagccaatgactttaaaggtgaggagaagatcatttcaacgcccgattccaaagtgattgcgatggtagttccgaccaacgaggagctcatgatcgccaaagacacgaaagaaatcgttgagaaagggttggacgagcttaagatctaatga

SEQ ID NO: 2776 - protein, 417 aa, synthetic construct
  REGION 1..417: note = Variant of acetate kinase
MHHHHHHGGSGMKVLVINSGSSSIKYQLLDMTNEKVLAKGLVERIGIDGSRIVHKVNGEKHVLEHEIKNHEIGLKLVLDLLTDEKYGVLKDLKEIDAVGHRVVHGGERFASSVKITDEVLKTIETLSFLAPLHNPVNIMGIKSSMKLLPGVPQVAVFDTAFHQKMPEKAYLYAIPYEYYEKYKIRRYGFHGTSHRYVSKRAAEILGKPYDQLKIITVHVGNGASVAAVKNGVSVDTSMGFTPLEGLVMGTRSGDIDPAIVEFLEKEEGLSAKEVVNILNKKSGVYGLTKGFSSDMRDIEDNAIEGDPVCRLALDVYEYRIAKYIGAYAAAMNGVDAIVFTAGVGENSPIMRHEIIENYLGYLGIKIDKEANDFKGEEKIISTPDSKVIAMVVPTNEELMIAKDTKEIVEKGLDELKI

SEQ ID NO: 2777 - DNA, 1257 bp, synthetic construct
  misc_feature 1..1257: note = Variant of acetate kinase
  source 1..1257: mol_type = other DNA
atgcaccatcatcatcatcatggcggtagcggcatgaaagttctggtgattaattctggtagctcctccatcaaatatcagctcctcgatatgaccaacgaaaaggtattagcgaaaggcttggtcgagcgcattggcatcgacggttcgcgtatcgtgcataaagttaacggcgaaaaacacgtgctggaacatgagattaaaaatcacgaaattggacttaaattggtcctggatcttcttacggacgaaaaatacggtgtgttgaaggatctcaaagaaatcgatgcagttgggcatcgcgtagtacatggcggcgagcgttttgccagtagcgtgaagattactgacgaagtcttaaagaccatcgagacgttgtcgttcttagctccgttacacaatccagcgaacattatgggtatcaagagcagcatgaaagtgttaccgggtgtgcctcaagttgccgtctttgatacagcgttccaccagaagatgccggagaaagcctatttgtacgcaatcccctatgagtactacgagaaatataaaattcgccgctatgggtttcatggaacctcacatcgttatgtgagtaaacgtgctgcggaaattatgggcaaaccgtacgatcagctcaagatcattaccgttcacgtgggtaacggcgcatcagttgcggcggtgaagaatggcgtatctgttgacacttccatgggtttcacaccacttgaaggtcttgtcatgggcacgcgcagcggcgatattgatccggccatcgtggaatttcttgagaaagaagaaggattgtcggccaaagaagtcgtcaacatcctcaacaagaaatctggtgtgtatgggctcaccaaaggctttagtagtgacatgcgtgacattgaagataatgctattgaaggtgatcctgtatgccgccttgcatttgatgtgtacgaatatcgtatcgcgaaatatattggcgcatacgctgcggccatgaacggtgttgacgcgatcgtctttaccgcaggagttggcgaaaatagcccgattatgcgccatgaaattattgagaactacttgggctacttagggatcaagatcgataaagaagccaatgacttcaaaggtgaggagaagatcatttcaacgcccgattccaaagtgattgcgatggtagttccgaccaacgaggagctcatgatcgccaaagacacgaaagaaatcgttgagaaagggttggacgagcttaagatctaatga

SEQ ID NO: 2778 - protein, 417 aa, synthetic construct
  REGION 1..417: note = Variant of acetate kinase
MHHHHHHGGSGMKVLVINSGSSSIKYQLLDMTNEKVLAKGLVERIGIDGSRIVHKVNGEKHVLEHEIKNHEIGLKLVLDLLTDEKYGVLKDLKEIDAVGHRVVHGGERFASSVKITDEVLKTIETLSFLAPLHNPANIMGIKSSMKVLPGVPQVAVFDTAFHQKMPEKAYLYAIPYEYYEKYKIRRYGFHGTSHRYVSKRAAEIMGKPYDQLKIITVHVGNGASVAAVKNGVSVDTSMGFTPLEGLVMGTRSGDIDPAIVEFLEKEEGLSAKEVVNILNKKSGVYGLTKGFSSDMRDIEDNAIEGDPVCRLAFDVYEYRIAKYIGAYAAAMNGVDAIVFTAGVGENSPIMRHEIIENYLGYLGIKIDKEANDFKGEEKIISTPDSKVIAMVVPTNEELMIAKDTKEIVEKGLDELKI

SEQ ID NO: 2779 - DNA, 1257 bp, synthetic construct
  misc_feature 1..1257: note = Variant of acetate kinase
  source 1..1257: mol_type = other DNA
atgcaccatcatcatcatcatggcggtagcggcatgaaagttctggtgattaattctggtagctcctccatcaaatatcagctcctcgatatgaccaacgaaaaggtattagcgaaaggcttggtcgagcgcattggcatcgacggttcgcgtcttgtgcataaagttaacggcgaaaaacacgtgctggaacatgagattaagaatcacgaaattggacttaaattggtcctggatcttcttacggacgaaaaatacggtgtgttgaaggatctcaaagaaatcgatgcagttgggcatcgcgtagtacatggcggcgagcgttttgccagtagcgtgaagattactgacgaagtcttaaagaccatcgagacgttgtcgttcttagctccgttacacaatccagcgaacattatgggtatcaagagcagcatgaaattaatgccgggtgtgcctcaagttgccgtctttgatacagcgttccaccagaagatgccggagaaagcctatttgtacgcaatcccctatgagtactacgagaaatataaaattcgccgctatgggtttcatggaacctcacatcgttatgtgagtaaacgtgctgcggaaattatgggcaaaccgtacgatcagctcaagatcattaccgttcacgtgggtaacggcgcatcagttgcggcggtgaagaatggcgtatctgttgacacttccatgggtttcacaccacttgaaggtcttgtcatgggcacgcgcagcggcgatattgatccggccatcgtggaatttcttgagaaagaagaaggattgtcggccaaagaagtcgtcaacatcctcaacaagaaatctggtgtgtatgggctcaccaaaggctttagtagtgacatgcgtgacattgaagataatgctattgaaggtgatcctgtatgccgccttgcattcgatgtgtacgaatatcgtatcgcgaaatatattggcgcatacgctgcggccatgaacggtgttgacgcgatcgtctttaccgcaggagttggcgaaaatagcccgattatgcgcgaagaaattattgagaactacttgggctacttagggatcaagatcgataaagaagccaatcgcttcaaaggtgaggagaagatcatttcaacgcccgattccaaagtgattgcgatggtagttccgaccaacgaggagctcatgatcgccaaagacacgaaagaaatcattgagaaagggttggacgagcttaagatctaatga

SEQ ID NO: 2780 - protein, 417 aa, synthetic construct
  REGION 1..417: note = Variant of acetate kinase
MHHHHHHGGSGMKVLVINSGSSSIKYQLLDMTNEKVLAKGLVERIGIDGSRLVHKVNGEKHVLEHEIKNHEIGLKLVLDLLTDEKYGVLKDLKEIDAVGHRVVHGGERFASSVKITDEVLKTIETLSFLAPLHNPANIMGIKSSMKLMPGVPQVAVFDTAFHQKMPEKAYLYAIPYEYYEKYKIRRYGFHGTSHRYVSKRAAEIMGKPYDQLKIITVHVGNGASVAAVKNGVSVDTSMGFTPLEGLVMGTRSGDIDPAIVEFLEKEEGLSAKEVVNILNKKSGVYGLTKGFSSDMRDIEDNAIEGDPVCRLAFDVYEYRIAKYIGAYAAAMNGVDAIVFTAGVGENSPIMREEIIENYLGYLGIKIDKEANRFKGEEKIISTPDSKVIAMVVPTNEELMIAKDTKEIIEKGLDELKI

SEQ ID NO: 2781 - DNA, 1257 bp, synthetic construct
  misc_feature 1..1257: note = Variant of acetate kinase
  source 1..1257: mol_type = other DNA
atgcaccatcatcatcatcatggcggtagcggcatgaaagttctggtgattaattctggtagctcctccatcaaatatcagctcctcgatatgaccaacgaaaaggtattagcgaaaggcttggtcgagcgcattggcatcgacggttcgcgtatcgtgcataaagttaacggcgaaaaacacgtgctggaacatgagattaaaaatcacgaaattggacttaaattggtcctggatcttcttacggacgaaaaatacggtgtgttgaaggatctcaaagaaatcgatgcagttgggcatcgcgtagtacatggcggcgagcgttttgccagtagcgtgaagattactgacgaagtcttaaagaccatcgagacgttgtcgttcttagctccgttacacaatccagcgaacattatgggtatcaagagcagcatgaaactgttaccgggtgtgcctcaagttgccgtctttgatacagcgttccaccagaagatgccggagaaagcctatttgtacgcaatcccctatgagtactacgagaaatataaaattcgccgctatgggtttcatggaacctcacatcgttatgtgagtaaacgtgctgcggaaattctgggcaaaccgtacgatcagctcaagatcattaccgttcacgtgggtaacggcgcatcagttgcggcggtgaagaatggcgtatctgttgacacttccatgggtttcacaccacttgaaggtcttgtcatgggcacgcgcagcggcgatattgatccggccatcgtggaatttcttgagaaagaagaaggattgtcggccaaagaagtcgtcaacatcctcaacaagaaatctggtgtgtatgggctcaccaaaggctttagtagtgacatgcgtgacattgaagataatgctattgaaggtgatcctgtatgccgccttgcattagatgtgtacgaatatcgtatcgcgaaatatattggcgcatacgctgcggccatgaacggtgttgacgcgatcgtctttaccgcaggagttggcgaaaatagcccgattatgcgccatgaaattattgagaactacttgggctacttagggatcaagatcgataaagaagccaatgacttcaaaggtgaggagaagatcatttcaacgcccgattccaaagtgattgcgatggtagttccgaccaacgaggagctcatgatcgccaaagacacgaaagaaatcattgagaaagggttggacgagcttaagatctaatga

SEQ ID NO: 2782 - protein, 417 aa, synthetic construct
  REGION 1..417: note = Variant of acetate kinase
MHHHHHHGGSGMKVLVINSGSSSIKYQLLDMTNEKVLAKGLVERIGIDGSRIVHKVNGEKHVLEHEIKNHEIGLKLVLDLLTDEKYGVLKDLKEIDAVGHRVVHGGERFASSVKITDEVLKTIETLSFLAPLHNPANIMGIKSSMKLLPGVPQVAVFDTAFHQKMPEKAYLYAIPYEYYEKYKIRRYGFHGTSHRYVSKRAAEILGKPYDQLKIITVHVGNGASVAAVKNGVSVDTSMGFTPLEGLVMGTRSGDIDPAIVEFLEKEEGLSAKEVVNILNKKSGVYGLTKGFSSDMRDIEDNAIEGDPVCRLALDVYEYRIAKYIGAYAAAMNGVDAIVFTAGVGENSPIMRHEIIENYLGYLGIKIDKEANDFKGEEKIISTPDSKVIAMVVPTNEELMIAKDTKEIIEKGLDELKI

SEQ ID NO: 2783 - DNA, 1257 bp, synthetic construct
  misc_feature 1..1257: note = Variant of acetate kinase
  source 1..1257: mol_type = other DNA
atgcaccatcatcatcatcatggcggtagcggcatgaaagttctggtgattaattctggtagctcctccatcaaatatcagctcctcgatatgaccaacgaaaaggtattagcgaaaggcttggtcgagcgcattggcatcgacggttcgcgtatcgtgcataaagttaacggcgaaaaacacgtgctggaacatgagattaagaatcacgaaattggacttaaattggtcctggatcttcttacggacgaaaaatacggtgtgttgaaggatctcaaagaaatcgatgcagttgggcatcgcgtagtacatggcggcgagcgttttgccagtagcgtgaagattactgacgaagtcttaaagaccatcgagacgttgtcgttcttagctccgttacacaatccagcgaacattatgggtatcaagagcagcatgaaattattaccgggtgtgcctcaagttgccgtctttgatacagcgttccaccagaagatgccggagaaagcctatttgtacgcaatcccctatgagtactacgagaaatataaaattcgccgctatgggtttcatggaacctcacatcgttatgtgagtaaacgtgctgcggaaattatgggcaaaccgtacgatcagctcaagatcattaccgttcacgtgggtaacggcgcatcagttgcggcggtgaagaatggcgtatctgttgacacttccatgggtttcacaccacttgaaggtcttgtcatgggcacgcgcagcggcgatattgatccggccatcgtggaatttcttgagaaagaagaaggattgtcggccaaagaagtcgtcaacatcctcaacaagaaatctggtgtgtatgggctcaccaaaggctttagtagtgacatgcgtgacattgaagataatgctattgaaggtgatcctgtatgccgccttgcattagatgtgtacgaatatcgtatcgcgaaatatattggcgcatacgctgcggccatgaacggtgttgacgcgatcgtctttaccgcaggagttggcgaaaatagcccgattatgcgccatgaaattattgagaactacttgggctacttagggatcaagatcgataaagaagccaatgacttcaaaggtgaggagaagatcatttcaacgcccgattccaaagtgattgcgatggtagttccgaccaacgaggagctcatgatcgccaaagacacgaaagaaatcgttgagaaagggttggacgagcttaagatctaatga

SEQ ID NO: 2784 - protein, 417 aa, synthetic construct
  REGION 1..417: note = Variant of acetate kinase
MHHHHHHGGSGMKVLVINSGSSSIKYQLLDMTNEKVLAKGLVERIGIDGSRIVHKVNGEKHVLEHEIKNHEIGLKLVLDLLTDEKYGVLKDLKEIDAVGHRVVHGGERFASSVKITDEVLKTIETLSFLAPLHNPANIMGIKSSMKLLPGVPQVAVFDTAFHQKMPEKAYLYAIPYEYYEKYKIRRYGFHGTSHRYVSKRAAEIMGKPYDQLKIITVHVGNGASVAAVKNGVSVDTSMGFTPLEGLVMGTRSGDIDPAIVEFLEKEEGLSAKEVVNILNKKSGVYGLTKGFSSDMRDIEDNAIEGDPVCRLALDVYEYRIAKYIGAYAAAMNGVDAIVFTAGVGENSPIMRHEIIENYLGYLGIKIDKEANDFKGEEKIISTPDSKVIAMVVPTNEELMIAKDTKEIVEKGLDELKI

SEQ ID NO: 2785 - DNA, 1257 bp, synthetic construct
  misc_feature 1..1257: note = Variant of acetate kinase
  source 1..1257: mol_type = other DNA
atgcaccatcatcatcatcatggcggtagcggcatgaaagttctggtgattaattctggtagctcctccatcaaatatcagctcctcgatatgaccaacgaaaaggtattagcgaaaggcttggtcgagcgcattggcatcgacggttcgcgtatcgtgcataaagttaacggcgaaaaacacgtgctggaacatgagattaagaatcacgaaattggacttaaattggtcctggatcttcttacggacgaaaaatacggtgtgttgaaggatctcaaagaaatcgatgcagttgggcatcgcgtagtacatggcggcgagcgttttgccagtagcgtgaagattactgacgaagtcttaaagaccatcgagacgttgtcgttcttagctccgttacacaatccagcgaacattatgggtatcaagaacagcatgaaattattaccgggtgtgcctcaagttgccgtctttgatacagcgttccaccagaagatgccggagaaagcctatttgtacgcaatcccctatgagtactacgagaaatataaaattcgccgctatgggtttcatggaacctcacatcgttatgtgagtaaacgtgctgcggaaattatgggcaaaccgtacgatcagctcaagatcattaccgttcacgtgggtaacggcgcatcagttgcggcggtgaagaatggcgtatctgttgacacttccatgggtttcacaccacttgaaggtcttgtcatgggcacgcgcagcggcgatattgatccggccatcgtggaatttcttgagaaagaagaaggattgtcggccaaagaagtcgtcaacatcctcaacaagaaatctggtgtgtatgggctcaccaaaggctttagtagtgacatgcgtgacattgaagataatgctattgaaggtgatcctgtatgccgccttgcattagatgtgtacgaatatcgtatcgcgaaatatattggcgcatacgctgcggccatgaacggtgttgacgcgatcgtctttaccgcaggagttggcgaaaatagcccgattatgcgcgaagaaattattgagaactacttgggctacttagggatcaagatcgataaagaagccaatgacttcaaaggtgaggagaagatcatttcaacgcccgattccaaagtgattgcgatggtagttccgaccaacgaggagctcatgatcgccaaagacacgaaagaaatcgttgagaaagggttggacgagcttaagatctaatga

SEQ ID NO: 2786 - protein, 417 aa, synthetic construct
  REGION 1..417: note = Variant of acetate kinase
MHHHHHHGGSGMKVLVINSGSSSIKYQLLDMTNEKVLAKGLVERIGIDGSRIVHKVNGEKHVLEHEIKNHEIGLKLVLDLLTDEKYGVLKDLKEIDAVGHRVVHGGERFASSVKITDEVLKTIETLSFLAPLHNPANIMGIKNSMKLLPGVPQVAVFDTAFHQKMPEKAYLYAIPYEYYEKYKIRRYGFHGTSHRYVSKRAAEIMGKPYDQLKIITVHVGNGASVAAVKNGVSVDTSMGFTPLEGLVMGTRSGDIDPAIVEFLEKEEGLSAKEVVNILNKKSGVYGLTKGFSSDMRDIEDNAIEGDPVCRLALDVYEYRIAKYIGAYAAAMNGVDAIVFTAGVGENSPIMREEIIENYLGYLGIKIDKEANDFKGEEKIISTPDSKVIAMVVPTNEELMIAKDTKEIVEKGLDELKI

SEQ ID NO: 2787 - DNA, 1257 bp, synthetic construct
  misc_feature 1..1257: note = Variant of acetate kinase
  source 1..1257: mol_type = other DNA
atgcaccatcatcatcatcatggcggtagcggcatgaaagttctggtgattaattctggtagctcctccatcaaatatcagctcctcgatatgaccaacgaaaaggtattagcgaaaggcttggtcgagcgcattggcatcgacggttcgcgtatcgtgcataaagttaacggcgaaaaacacgtgctggaacatgagattaagaatcacgaaattggacttaaattggtcctggatcttcttacggacgaaaaatacggtgtgttgaaggatctcaaagaaatcgatgcagttgggcatcgcgtagtacatggcggcgagcgttttgccagtagcgtgaagattactgacgaagtcttaaagaccatcgagacgttgtcgttcttagctccgttacacaatccagtgaacattatgggtatcaagagcagcatgaaattattaccgggtgtgcctcaagttgccgtctttgatacagcgttccaccagaagatgccggagaaagcctatttgtacgcaatcccctatgagtactacgagaaatataaaattcgccgctatgggtttcatggaacctcacatcgttatgtgagtaaacgtgctgcggaaattatgggcaaaccgtacgatcagctcaagatcattaccgttcacgtgggtaacggcgcatcagttgcggcggtgaagaatggcgtatctgttgacacttccatgggtttcacaccacttgaaggtcttgtcatgggcacgcgcagcggcgatattgatccggccatcgtggaatttcttgagaaagaagaaggattgtcggccaaagaagtcgtcaacatcctcaacaagaaatctggtgtgtatgggctcaccaaaggctttagtagtgacatgcgtgacattgaagataatgctattgaaggtgatcctgtatgccgccttgcatttgatgtgtacgaatatcgtatcgcgaaatatattggcgcatacgctgcggccatgaacggtgttgacgcgatcgtctttaccgcaggagttggcgaaaatagcccgattatgcgccatgaaattattgagaactacttgggctacttagggatcaagatcgataaagaagccaatgacgttaaaggtgaggagaagatcatttcaacgcccgattccaaagtgattgcgatggtagttccgaccaacgaggagctcatgatcgccaaagacacgaaagaaatcattgagaaagggttggacgagcttaagatctaatga

SEQ ID NO: 2788 - protein, 417 aa, synthetic construct
  REGION 1..417: note = Variant of acetate kinase
MHHHHHHGGSGMKVLVINSGSSSIKYQLLDMTNEKVLAKGLVERIGIDGSRIVHKVNGEKHVLEHEIKNHEIGLKLVLDLLTDEKYGVLKDLKEIDAVGHRVVHGGERFASSVKITDEVLKTIETLSFLAPLHNPVNIMGIKSSMKLLPGVPQVAVFDTAFHQKMPEKAYLYAIPYEYYEKYKIRRYGFHGTSHRYVSKRAAEIMGKPYDQLKIITVHVGNGASVAAVKNGVSVDTSMGFTPLEGLVMGTRSGDIDPAIVEFLEKEEGLSAKEVVNILNKKSGVYGLTKGFSSDMRDIEDNAIEGDPVCRLAFDVYEYRIAKYIGAYAAAMNGVDAIVFTAGVGENSPIMRHEIIENYLGYLGIKIDKEANDVKGEEKIISTPDSKVIAMVVPTNEELMIAKDTKEIIEKGLDELKI

SEQ ID NO: 2789 - DNA, 1257 bp, synthetic construct
  misc_feature 1..1257: note = Variant of acetate kinase
  source 1..1257: mol_type = other DNA
atgcaccatcatcatcatcatggcggtagcggcatgaaagttctggtgattaattctggtagctcctccatcaaatatcagctcctcgatatgaccaacgaaaaggtattagcgaaaggcttggtcgagcgcattggcatcgacggttcgcgtatcgtgcataaagttaacggcgaaaaacacgtgctggaacatgagattaagaatcacgaaattggacttaaattggtcctggatcttcttacggacgaaaaatacggtgtgttgaaggatctcaaagaaatcgatgcagttgggcatcgcgtagtacatggcggcgagcgttttgccagtagcgtgaagattactgacgaagtcttaaagaccatcgagacgttgtcgttcttagctccgttacacaatccagcgaacattatgggtatcaagagcagcatgaaagtgttaccgggtgtgcctcaagttgccgtctttgatacagcgttccaccagaagatgccggagaaagcctatttgtacgcaatcccctatgagtactacgagaaatataaaattcgccgctatgggtttcatggaacctcacatcgttatgtgagtaaacgtgctgcggaaattatgggcaaaccgtacgatcagctcaagatcattaccgttcacgtgggtaacggcgcatcagttgcggcggtgaagaatggcgtatctgttgacacttccatgggtttcacaccacttgaaggtcttgtcatgggcacgcgcagcggcgatattgatccggccatcgtggaatttcttgagaaagaagaaggattgtcggccaaagaagtcgtcaacatcctcaacaagaaatctggtgtgtatgggctcaccaaaggctttagtagtgacatgcgtgacattgaagataatgctattgaaggtgatcctgtatgccgccttgcatttgatgtgtacgaatatcgtatcgcgaaatatattggcgcatacgctgcggccatgaacggtgttgacgcgatcgtctttaccgcaggagttggcgaaaatagcccgattatgcgccatgaaattattgagaactacttgggctacttagggatcaagatcgataaagaagccaatgacttcaaaggtgaggagaagatcatttcaacgcccgattccaaagtgattgcgatggtagttccgaccaacgaggagctcatgatcgccaaagacacgaaagaaatcattgagaaagggttggacgagcttaagatctaatga

SEQ ID NO: 2790 - protein, 417 aa, synthetic construct
  REGION 1..417: note = Variant of acetate kinase
MHHHHHHGGSGMKVLVINSGSSSIKYQLLDMTNEKVLAKGLVERIGIDGSRIVHKVNGEKHVLEHEIKNHEIGLKLVLDLLTDEKYGVLKDLKEIDAVGHRVVHGGERFASSVKITDEVLKTIETLSFLAPLHNPANIMGIKSSMKVLPGVPQVAVFDTAFHQKMPEKAYLYAIPYEYYEKYKIRRYGFHGTSHRYVSKRAAEIMGKPYDQLKIITVHVGNGASVAAVKNGVSVDTSMGFTPLEGLVMGTRSGDIDPAIVEFLEKEEGLSAKEVVNILNKKSGVYGLTKGFSSDMRDIEDNAIEGDPVCRLAFDVYEYRIAKYIGAYAAAMNGVDAIVFTAGVGENSPIMRHEIIENYLGYLGIKIDKEANDFKGEEKIISTPDSKVIAMVVPTNEELMIAKDTKEIIEKGLDELKI

SEQ ID NO: 2791 - DNA, 1257 bp, synthetic construct
  misc_feature 1..1257: note = Variant of acetate kinase
  source 1..1257: mol_type = other DNA
atgcaccatcatcatcatcatggcggtagcggcatgaaagttctggtgattaattctggtagctcctccatcaaatatcagctcctcgatatgaccaacgaaaaggtattagcgaaaggcttggtcgagcgcattggcatcgacggttcgcgtatcgtgcataaagttaacggcgaaaaacacgtgctggaacatgagattccgaatcacgaaattggacttaaattggtcctggatcttcttacggacgaaaaatacggtgtgttgaaggatctcaaagaaatcgatgcagttgggcatcgcgtagtacatggcggcgagcgttttgccagtagcgtgaagattactgacgaagtcttaaagaccatcgagacgttgtcgttcttagctccgttacacaatccagcgaacattatgggtatcaagagcagcatgaaattattaccgggtgtgcctcaagttgccgtctttgatacagcgttccaccagaagatgccggagaaagcctatttgtacgcaatcccctatgagtactacgagaaatataaaattcgccgctatgggtttcatggaacctcacatcgttatgtgagtaaacgtgctgcggaaattatgggcaaaccgtacgatcagctcaagatcattaccgttcacgtgggtaacggcgcatcagttgcggcggtgaagaatggcgtatctgttgacacttccatgggtttcacaccacttgaaggtcttgtcatgggcacgcgcagcggcgatattgatccggccatcgtggaatttcttgagaaagaagaaggattgtcggccaaagaagtcgtcaacatcctcaacaagaaatctggtgtgtatgggctcaccaaaggctttagtagtgacatgcgtgacattgaagataatgctattgaaggtgatcctgtatgccgccttgcattagatgtgtacgaatatcgtatcgcgaaatatattggcgcatacgctgcggccatgaacggtgttgacgcgatcgtctttaccgcaggagttggcgaaaatagcccgattatgcgcgaagaaattattgagaactacttgggctacttagggatcaagatcgataaagaagccaatgacttcaaaggtgaggagaagatcatttcaacgcccgattccaaagtgattgcgatggtagttccgaccaacgaggagctcatgatcgccaaagacacgaaagaaatcattgagaaagggttggacgagcttaagatctaatga

SEQ ID NO: 2792 - protein, 417 aa, synthetic construct
  REGION 1..417: note = Variant of acetate kinase
MHHHHHHGGSGMKVLVINSGSSSIKYQLLDMTNEKVLAKGLVERIGIDGSRIVHKVNGEKHVLEHEIPNHEIGLKLVLDLLTDEKYGVLKDLKEIDAVGHRVVHGGERFASSVKITDEVLKTIETLSFLAPLHNPANIMGIKSSMKLLPGVPQVAVFDTAFHQKMPEKAYLYAIPYEYYEKYKIRRYGFHGTSHRYVSKRAAEIMGKPYDQLKIITVHVGNGASVAAVKNGVSVDTSMGFTPLEGLVMGTRSGDIDPAIVEFLEKEEGLSAKEVVNILNKKSGVYGLTKGFSSDMRDIEDNAIEGDPVCRLALDVYEYRIAKYIGAYAAAMNGVDAIVFTAGVGENSPIMREEIIENYLGYLGIKIDKEANDFKGEEKIISTPDSKVIAMVVPTNEELMIAKDTKEIIEKGLDELKI

SEQ ID NO: 2793 - DNA, 1257 bp, synthetic construct
  misc_feature 1..1257: note = Variant of acetate kinase
  source 1..1257: mol_type = other DNA
atgcaccatcatcatcatcatggcggtagcggcatgaaagttctggtgattaattctggtagctcctccatcaaatatcagctcctcgatatgaccaacgaaaaggtattagcgaaaggcttggtcgagcgcattggcatcgacggttcgcgtatcgtgcataaagttaacggcgaaaaacacgtgctggaacatgagattaagaatcacgaaattggacttaaattggtcctggatcttcttacggacgaaaaatacggtgtgttgaaggatctcaaagaaatcgatgcagttgggcatcgcgtagtacatggcggcgagcgttttgccagtagcgtgaagattactgacgaagtcttaaagaccatcgagacgttgtcgttcttagctccgttacacaatccagtgaacattatgggtatcaagagcagcatgaaactgttaccgggtgtgcctcaagttgccgtctttgatacagcgttccaccagaagatgccggagaaagcctatttgtacgcaatcccctatgagtactacgagaaatataaaattcgccgctatgggtttcatggaacctcacatcgttatgtgagtaaacgtgctgcggaaattctgggcaaaccgtacgatcagctcaagatcattaccgttcacgtgggtaacggcgcatcagttgcggcggtgaagaatggcgtatctgttgacacttccatgggtttcacaccacttgaaggtcttgtcatgggcacgcgcagcggcgatattgatccggccatcgtggaatttcttgagaaagaagaaggattgtcggccaaagaagtcgtcaacatcctcaacaagaaatctggtgtgtatgggctcaccaaaggctttagtagtgacatgcgtgacattgaagataatgctattgaaggtgatcctgtatgccgccttgcatttgatgtgtacgaatatcgtatcgcgaaatatattggcgcatacgctgcggccatgaacggtgttgacgcgatcgtctttaccgcaggagttggcgaaaatagcccgattatgcgcgaagaaattattgagaactacttgggctacttagggatcaagatcgataaagaagccaatgactttaaaggtgaggagaagatcatttcaacgcccgattccaaagtgattgcgatggtagttccgaccaacgaggagctcatgatcgccaaagacacgaaagaaatcgttgagaaagggttggacgagcttaagatctaatga

SEQ ID NO: 2794 - protein, 417 aa, synthetic construct
  REGION 1..417: note = Variant of acetate kinase
MHHHHHHGGSGMKVLVINSGSSSIKYQLLDMTNEKVLAKGLVERIGIDGSRIVHKVNGEKHVLEHEIKNHEIGLKLVLDLLTDEKYGVLKDLKEIDAVGHRVVHGGERFASSVKITDEVLKTIETLSFLAPLHNPVNIMGIKSSMKLLPGVPQVAVFDTAFHQKMPEKAYLYAIPYEYYEKYKIRRYGFHGTSHRYVSKRAAEILGKPYDQLKIITVHVGNGASVAAVKNGVSVDTSMGFTPLEGLVMGTRSGDIDPAIVEFLEKEEGLSAKEVVNILNKKSGVYGLTKGFSSDMRDIEDNAIEGDPVCRLAFDVYEYRIAKYIGAYAAAMNGVDAIVFTAGVGENSPIMREEIIENYLGYLGIKIDKEANDFKGEEKIISTPDSKVIAMVVPTNEELMIAKDTKEIVEKGLDELKI

SEQ ID NO: 2795 - DNA, 1257 bp, synthetic construct
  misc_feature 1..1257: note = Variant of acetate kinase
  source 1..1257: mol_type = other DNA
atgcaccatcatcatcatcatggcggtagcggcatgaaagttctggtgattaattctggtagctcctccatcaaatatcagctcctcgatatgaccaacgaaaaggtattagcgaaaggcttggtcgagcgcattggcatcgacggttcgcgtatcgtgcataaagttaacggcgaaaaacacgtgctggaacatgagattccgaatcacgaaattggacttaaattggtcctggatcttcttacggacgaaaaatacggtgtgttgaaggatctcaaagaaatcgatgcagttgggcatcgcgtagtacatggcggcgagcgttttgccagtagcgtgaagattactgacgaagtcttaaagaccatcgagacgttgtcgttcttagctccgttacacaatccagtgaacattatgggtatcaagagcagcatgaaattattaccgggtgtgcctcaagttgccgtctttgatacagcgttccaccagaagatgccggagaaagcctatttgtacgcaatcccctatgagtactacgagaaatataaaattcgccgctatgggtttcatggaacctcacatcgttatgtgagtaaacgtgctgcggaaattatgggcaaaccgtacgatcagctcaagatcattaccgttcacgtgggtaacggcgcatcagttgcggcggtgaagaatggcgtatctgttgacacttccatgggtttcacaccacttgaaggtcttgtcatgggcacgcgcagcggcgatattgatccggccatcgtggaatttcttgagaaagaagaaggattgtcggccaaagaagtcgtcaacatcctcaacaagaaatctggtgtgtatgggctcaccaaaggctttagtagtgacatgcgtgacattgaagataatgctattgaaggtgatcctgtatgccgccttgcattcgatgtgtacgaatatcgtatcgcgaaatatattggcgcatacgctgcggccatgaacggtgttgacgcgatcgtctttaccgcaggagttggcgaaaatagcccgattatgcgcgaagaaattattgagaactacttgggctacttagggatcaagatcgataaagaagccaatgactttaaaggtgaggagaagatcatttcaacgcccgattccaaagtgattgcgatggtagttccgaccaacgaggagctcatgatcgccaaagacacgaaagaaatcgttgagaaagggttggacgagcttaagatctaatga

SEQ ID NO: 2796 - protein, 417 aa, synthetic construct
  REGION 1..417: note = Variant of acetate kinase
MHHHHHHGGSGMKVLVINSGSSSIKYQLLDMTNEKVLAKGLVERIGIDGSRIVHKVNGEKHVLEHEIPNHEIGLKLVLDLLTDEKYGVLKDLKEIDAVGHRVVHGGERFASSVKITDEVLKTIETLSFLAPLHNPVNIMGIKSSMKLLPGVPQVAVFDTAFHQKMPEKAYLYAIPYEYYEKYKIRRYGFHGTSHRYVSKRAAEIMGKPYDQLKIITVHVGNGASVAAVKNGVSVDTSMGFTPLEGLVMGTRSGDIDPAIVEFLEKEEGLSAKEVVNILNKKSGVYGLTKGFSSDMRDIEDNAIEGDPVCRLAFDVYEYRIAKYIGAYAAAMNGVDAIVFTAGVGENSPIMREEIIENYLGYLGIKIDKEANDFKGEEKIISTPDSKVIAMVVPTNEELMIAKDTKEIVEKGLDELKI

SEQ ID NO: 2797 - DNA, 1257 bp, synthetic construct
  misc_feature 1..1257: note = Variant of acetate kinase
  source 1..1257: mol_type = other DNA
atgcaccatcatcatcatcatggcggtagcggcatgaaagttctggtgattaattctggtagctcctccatcaaatatcagctcctcgatatgaccaacgaaaaggtattagcgaaaggcttggtcgagcgcattggcatcgacggttcgcgtatcgtgcataaagttaacggcgaaaaacacgtgctggaacatgagattaagaatcacgaaattggacttaaattggtcctggatcttcttacggacgaaaaatacggtgtgttgaaggatctcaaagaaatcgatgcagttgggcatcgcgtagtacatggcggcgagcgttttgccagtagcgtgaagattactgacgaagtcttaaagaccatcgagacgttgtcgttcttagctccgttacacaatccagcgaacattatgggtatcaagagcagcatgaaactgttaccgggtgtgcctcaagttgccgtctttgatacagcgttccaccagaagatgccggagaaagcctatttgtacgcaatcccctatgagtactacgagaaatataaaattcgccgctatgggtttcatggaacctcacatcgttatgtgagtaaacgtgctgcggaaattatgggcaaaccgtacgatcagctcaagatcattaccgttcacgtgggtaacggcgcatcagttgcggcggtgaagaatggcgtatctgttgacacttccatgggtttcacaccacttgaaggtcttgtcatgggcacgcgcagcggcgatattgatccggccatcgtggaatttcttgagaaagaagaaggattgtcggccaaagaagtcgtcaacatcctcaacaagaaatctggtgtgtatgggctcaccaaaggctttagtagtgacatgcgtgacattgaagataatgctattgaaggtgatcctgtatgccgccttgcattagatgtgtacgaatatcgtatcgcgaaatatattggcgcatacgctgcggccatgaacggtgttgacgcgatcgtctttaccgcaggagttggcgaaaatagcccgattatgcgcgaagaaattattgagaactacttgggctacttagggatcaagatcgataaagaagccaatgacttcaaaggtgaggagaagatcatttcaacgcccgattccaaagtgattgcgatggtagttccgaccaacgaggagctcatgatcgccaaagacacgaaagaaatcgttgagaaagggttggacgagcttaagatctaatga

SEQ ID NO: 2798 - protein, 417 aa, synthetic construct
  REGION 1..417: note = Variant of acetate kinase
MHHHHHHGGSGMKVLVINSGSSSIKYQLLDMTNEKVLAKGLVERIGIDGSRIVHKVNGEKHVLEHEIKNHEIGLKLVLDLLTDEKYGVLKDLKEIDAVGHRVVHGGERFASSVKITDEVLKTIETLSFLAPLHNPANIMGIKSSMKLLPGVPQVAVFDTAFHQKMPEKAYLYAIPYEYYEKYKIRRYGFHGTSHRYVSKRAAEIMGKPYDQLKIITVHVGNGASVAAVKNGVSVDTSMGFTPLEGLVMGTRSGDIDPAIVEFLEKEEGLSAKEVVNILNKKSGVYGLTKGFSSDMRDIEDNAIEGDPVCRLALDVYEYRIAKYIGAYAAAMNGVDAIVFTAGVGENSPIMREEIIENYLGYLGIKIDKEANDFKGEEKIISTPDSKVIAMVVPTNEELMIAKDTKEIVEKGLDELKI

SEQ ID NO: 2799 - DNA, 1257 bp, synthetic construct
  misc_feature 1..1257: note = Variant of acetate kinase
  source 1..1257: mol_type = other DNA
atgcaccatcatcatcatcatggcggtagcggcatgaaagttctggtgattaattctggtagctcctccatcaaatatcagctcctcgatatgaccaacgaaaaggtattagcgaaaggcttggtcgagcgcattggcatcgacggttcgcgtattgtgcataaagttaacggcgaaaaacacgtgctggaacatgagattaaggatcacgaaattggacttaaattggtcctggatcttcttacggacgaaaaatacggtgtgttgaaggatctcaaagaaatcgatgcagttgggcatcgcgtagtacatggcggcgagcgttttgccagtagcgtgaagattactgacgaagtcttaaagaccatcgagacgttgtcgttcttagctccgttacacaatccagcgaacattatgggtatcaagagcagcatgaaattaatgccgggtgtgcctcaagttgccgtctttgatacagcgttccaccagaagatgccggagaaagcctatttgtacgcaatcccctatgagtactacgagaaatataaaattcgccgctatgggtttcatggaacctcacatcgttatgtgagtaaacgtgctgcggaaattatgggcaaaccgtacgatcagctcaagatcattaccgttcacgtgggtaacggcgcatcagttgcggcggtgaagaatggcgtatctgttgacacttccatgggtttcacaccacttgaaggtcttgtcatgggcacgcgcagcggcgatattgatccggccatcgtggaatttcttgagaaagaagaaggattgtcggccaaagaagtcgtcaacatcctcaacaagaaatctggtgtgtatgggctcaccaaaggctttagtagtgacatgcgtgacattgaagataatgctattgaaggtgatcctgtatgccgccttgcattcgatgtgtacgaatatcgtatcgcgaaatatattggcgcatacgctgcggccatgaacggtgttgacgcgatcgtctttaccgcaggagttggcgaaaatagcccgattatgcgcgaagaaattattgagaactacttgggctacttagggatcaagatcgataaagaagccaatgatttcaaaggtgaggagaagatcatttcaacgcccgattccaaagtgattgcgatggtagttccgaccaacgaggagctcatgatcgccaaagacacgaaagaaatcattgagaaagggttggacgagcttaagatctaatga

SEQ ID NO: 2800 - protein, 417 aa, synthetic construct
  REGION 1..417: note = Variant of acetate kinase
MHHHHHHGGSGMKVLVINSGSSSIKYQLLDMTNEKVLAKGLVERIGIDGSRIVHKVNGEKHVLEHEIKDHEIGLKLVLDLLTDEKYGVLKDLKEIDAVGHRVVHGGERFASSVKITDEVLKTIETLSFLAPLHNPANIMGIKSSMKLMPGVPQVAVFDTAFHQKMPEKAYLYAIPYEYYEKYKIRRYGFHGTSHRYVSKRAAEIMGKPYDQLKIITVHVGNGASVAAVKNGVSVDTSMGFTPLEGLVMGTRSGDIDPAIVEFLEKEEGLSAKEVVNILNKKSGVYGLTKGFSSDMRDIEDNAIEGDPVCRLAFDVYEYRIAKYIGAYAAAMNGVDAIVFTAGVGENSPIMREEIIENYLGYLGIKIDKEANDFKGEEKIISTPDSKVIAMVVPTNEELMIAKDTKEIIEKGLDELKI

SEQ ID NO: 2801 - DNA, 1257 bp, synthetic construct
  misc_feature 1..1257: note = Variant of acetate kinase
  source 1..1257: mol_type = other DNA
atgcaccatcatcatcatcatggcggtagcggcatgaaagttctggtgattaattctggtagctcctccatcaaatatcagctcctcgatatgaccaacgaaaaggtattagcgaaaggcttggtcgagcgcattggcatcgacggttcgcgtcttgtgcataaagttaacggcgaaaaacacgtgctggaacatgagattaagaatcacgaaattggacttaaattggtcctggatcttcttacggacgaaaaatacggtgtgttgaaggatctcaaagaaatcgatgcagttgggcatcgcgtagtacatggcggcgagcgttttgccagtagcgtgaagattactgacgaagtcttaaagaccatcgagacgttgtcgttcttagctccgttacacaatccagcgaacattatgggtatcaagagcagcatgaaattattaccgggtgtgcctcaagttgccgtctttgatacagcgttccaccagaagatgccggagaaagcctatttgtacgcaatcccctatgagtactacgagaaatataaaattcgccgctatgggtttcatggaacctcacatcgttatgtgagtaaacgtgctgcggaaattatgggcaaaccgtacgatcagctcaagatcattaccgttcacgtgggtaacggcgcatcagttgcggcggtgaagaatggcgtatctgttgacacttccatgggtttcacaccacttgaaggtcttgtcatgggcacgcgcagcggcgatattgatccggccatcgtggaatttcttgagaaagaagaaggattgtcggccaaagaagtcgtcaacatcctcaacaagaaatctggtgtgtatgggctcaccaaaggctttagtagtgacatgcgtgacattgaagataatgctattgaaggtgatcctgtatgccgccttgcattcgatgtgtacgaatatcgtatcgcgaaatatattggcgcatacgctgcggccatgaacggtgttgacgcgatcgtctttaccgcaggagttggcgaaaatagcccgattatgcgcgaagaaattattgagaactacttgggctacttagggatcaagatcgataaagaagccaatcgcttcaaaggtgaggagaagatcatttcaacgcccgattccaaagtgattgcgatggtaattccgaccaacgaggagctcatgatcgccaaagacacgaaagaaatcattgagaaagggttggacgagcttaagatctaatga

SEQ ID NO: 2802 - protein, 417 aa, synthetic construct
  REGION 1..417: note = Variant of acetate kinase
MHHHHHHGGSGMKVLVINSGSSSIKYQLLDMTNEKVLAKGLVERIGIDGSRLVHKVNGEKHVLEHEIKNHEIGLKLVLDLLTDEKYGVLKDLKEIDAVGHRVVHGGERFASSVKITDEVLKTIETLSFLAPLHNPANIMGIKSSMKLLPGVPQVAVFDTAFHQKMPEKAYLYAIPYEYYEKYKIRRYGFHGTSHRYVSKRAAEIMGKPYDQLKIITVHVGNGASVAAVKNGVSVDTSMGFTPLEGLVMGTRSGDIDPAIVEFLEKEEGLSAKEVVNILNKKSGVYGLTKGFSSDMRDIEDNAIEGDPVCRLAFDVYEYRIAKYIGAYAAAMNGVDAIVFTAGVGENSPIMREEIIENYLGYLGIKIDKEANRFKGEEKIISTPDSKVIAMVIPTNEELMIAKDTKEIIEKGLDELKI

SEQ ID NO: 2803 - DNA, 1257 bp, synthetic construct
  misc_feature 1..1257: note = Variant of acetate kinase
  source 1..1257: mol_type = other DNA
atgcaccatcatcatcatcatggcggtagcggcatgaaagttctggtgattaattctggtagctcctccatcaaatatcagctcctcgatatgaccaacgaaaaggtattagcgaaaggcttggtcgagcgcattggcatcgacggttcgcgtattgtgcataaagttaacggcgaaaaacacgtgctggaacatgagattaagaatcacgaaattggacttaaattggtcctggatcttcttacggacgaaaaatacggtgtgttgaaggatctcaaagaaatcgatgcagttgggcatcgcgtagtacatggcggcgagcgttttgccagtagcgtgaagattactgacgaagtcttaaagaccatcgagacgttgtcgttcttagctccgttacacaatccagcgaacattatgggtatcaagagcagcatgaaattaatgccgggtgtgcctcaagttgccgtctttgatacagcgttccaccagaagatgccggagaaagcctatttgtacgcaatcccctatgagtactacgagaaatataaaattcgccgctatgggtttcatggaacctcacatcgttatgtgagtaaacgtgctgcggaaattatgggcaaaccgtacgatcagctcaagatcattaccgttcacgtgggtaacggcgcatcagttgcggcggtgaagaatggcgtatctgttgacacttccatgggtttcacaccacttgaaggtcttgtcatgggcacgcgcagcggcgatattgatccggccatcgtggaatttcttgagaaagaagaaggattgtcggccaaagaagtcgtcaacatcctcaacaagaaatctggtgtgtatgggctcaccaaaggctttagtagtgacatgcgtgacattgaagataatgctattgaaggtgatcctgtatgccgccttgcattcgatgtgtacgaatatcgtatcgcgaaatatattggcgcatacgctgcggccatgaacggtgttgacgcgatcgtctttaccgcaggagttggcgaaaatagcccgattatgcgcgaagaaattattgagaactacttgggctacttagggatcaagatcgataaagaagccaatgatttcaaaggtgaggagaagatcatttcaacgcccgattccaaagtgattgcgatggtaattccgaccaacgaggagctcatgatcgccaaagacacgaaagaaatcattgagaaagggttggacgagcttaagatctaatga

SEQ ID NO: 2804 - protein, 417 aa, synthetic construct
  REGION 1..417: note = Variant of acetate kinase
MHHHHHHGGSGMKVLVINSGSSSIKYQLLDMTNEKVLAKGLVERIGIDGSRIVHKVNGEKHVLEHEIKNHEIGLKLVLDLLTDEKYGVLKDLKEIDAVGHRVVHGGERFASSVKITDEVLKTIETLSFLAPLHNPANIMGIKSSMKLMPGVPQVAVFDTAFHQKMPEKAYLYAIPYEYYEKYKIRRYGFHGTSHRYVSKRAAEIMGKPYDQLKIITVHVGNGASVAAVKNGVSVDTSMGFTPLEGLVMGTRSGDIDPAIVEFLEKEEGLSAKEVVNILNKKSGVYGLTKGFSSDMRDIEDNAIEGDPVCRLAFDVYEYRIAKYIGAYAAAMNGVDAIVFTAGVGENSPIMREEIIENYLGYLGIKIDKEANDFKGEEKIISTPDSKVIAMVIPTNEELMIAKDTKEIIEKGLDELKI

SEQ ID NO: 2805 - DNA, 1257 bp, synthetic construct
  misc_feature 1..1257: note = Variant of acetate kinase
  source 1..1257: mol_type = other DNA
atgcaccatcataatcatcatggcggtagcggcatgaaagttctggtgattaattctggtagctcctccatcaaatatcagctcctcgatatgaccaacgaaaaggtattagcgaaaggcttggtcgagcgcattggcatcgacggttcgcgtcttgtgcataaagttaacggcgaaaaacacgtgctggaacatgagattaaggatcacgaaattggacttaaattggtcctggatcttcttacggacgaaaaatacggtgtgttgaaggatctcaaagaaatcgatgcagttgggcatcgcgtagtacatggcggcgagcgttttgccagtagcgtgaagattactgacgaagtcttaaagaccatcgagacgttgtcgttcttagctccgttacacaatccagcgaacattatgggtatcaagagcagcatgaaattactgccgggtgtgcctcaagttgccgtctttgatacagcgttccaccagaagatgccggagaaagcctatttgtacgcaatcccctatgagtactacgagaaatataaaattcgccgctatgggtttcatggaacctcacatcgttatgtgagtaaacgtgctgcggaaattatgggcaaaccgtacgatcagctcaagatcattaccgttcacgtgggtaacggcgcatcagttgcggcggtgaagaatggcgtatctgttgacacttccatgggtttcacaccacttgaaggtcttgtcatgggcacgcgcagcggcgatattgatccggccatcgtggaatttcttgagaaagaagaaggattgtcggccaaagaagtcgtcaacatcctcaacaagaaatctggtgtgtatgggctcaccaaaggctttagtagtgacatgcgtgacattgaagataatgctattgaaggtgatcctgtatgccgccttgcattcgatgtgtacgaatatcgtatcgcgaaatatattggcgcatacgctgcggccatgaacggtgttgacgcgatcgtctttaccgcaggagttggcgaaaatagcccgattatgcgcgaagaaattattgagaactacttgggctacttagggatcaagatcgataaagaagccaatcgcttcaaaggtgaggagaagatcatttcaacgcccgattccaaagtgattgcgatggtaattccgaccaacgaggagctcatgatcgccaaagacacgaaagaaatcattgagaaagggttggacgagcttaagatctaatga

SEQ ID NO: 2806 - protein, 417 aa, synthetic construct
  REGION 1..417: note = Variant of acetate kinase
MHHHNHHGGSGMKVLVINSGSSSIKYQLLDMTNEKVLAKGLVERIGIDGSRLVHKVNGEKHVLEHEIKDHEIGLKLVLDLLTDEKYGVLKDLKEIDAVGHRVVHGGERFASSVKITDEVLKTIETLSFLAPLHNPANIMGIKSSMKLLPGVPQVAVFDTAFHQKMPEKAYLYAIPYEYYEKYKIRRYGFHGTSHRYVSKRAAEIMGKPYDQLKIITVHVGNGASVAAVKNGVSVDTSMGFTPLEGLVMGTRSGDIDPAIVEFLEKEEGLSAKEVVNILNKKSGVYGLTKGFSSDMRDIEDNAIEGDPVCRLAFDVYEYRIAKYIGAYAAAMNGVDAIVFTAGVGENSPIMREEIIENYLGYLGIKIDKEANRFKGEEKIISTPDSKVIAMVIPTNEELMIAKDTKEIIEKGLDELKI

SEQ ID NO: 2807 - DNA, 1257 bp, synthetic construct
  misc_feature 1..1257: note = Variant of acetate kinase
  source 1..1257: mol_type = other DNA
atgcaccatcatcatcatcatggcggtagcggcatgaaagttctggtgattaattctggtagctcctccatcaaatatcagctcctcgatatgaccaacgaaaaggtattagcgaaaggcttggtcgagcgcattggcatcgacggttcgcgtattgtgcataaagttaacggcgaaaaacacgtgctggaacatgagattaaggatcacgaaattggacttaaattggtcctggatcttcttacggacgaaaaatacggtgtgttgaaggatctcaaagaaatcgatgcagttgggcatcgcgtagtacatggcggcgagcgttttgccagtagcgtgaagattactgacgaagtcttaaagaccatcgagacgttgtcgttcttagctccgttacacaatccactgaacattatgggtatcaagagcagcatgaaattattaccgggtgtgcctcaagttgccgtctttgatacagcgttccaccagaagatgccggagaaagcctatttgtacgcaatcccctatgagtactacgagaaatataaaattcgccgctatgggtttcatggaacctcacatcgttatgtgagtaaacgtgctgcggaaattatgggcaaaccgtacgatcagctcaagatcattaccgttcacgtgggtaacggcgcatcagttgcggcggtgaagaatggcgtatctgttgacacttccatgggtttcacaccacttgaaggtcttgtcatgggcacgcgcagcggcgatattgatccggccatcgtggaatttcttgagaaagaagaaggattgtcggccaaagaagtcgtcaacatcctcaacaagaaatctggtgtgtatgggctcaccaaaggctttagtagtgacatgcgtgacattgaagataatgctattgaaggtgatcctgtatgccgccttgcattcgatgtgtacgaatatcgtatcgcgaaatatattggcgcatacgctgcggccatgaacggtgttgacgcgatcgtctttaccgcaggagttggcgaaaatagccgcattatgcgcgaagaaattattgagaactacttgggctacttagggatcaagatcgataaagaagccaatgacttcaaaggtgaggagaagatcatttcaacgcccgattccaaagtgattgcgatggtagttccgaccaacgaggagctcatgatcgccaaagacacgaaagaaatcattgagaaagggttggacgagcttaagatctaatga

SEQ ID NO: 2808 - protein, 417 aa, synthetic construct
  REGION 1..417: note = Variant of acetate kinase
MHHHHHHGGSGMKVLVINSGSSSIKYQLLDMTNEKVLAKGLVERIGIDGSRIVHKVNGEKHVLEHEIKDHEIGLKLVLDLLTDEKYGVLKDLKEIDAVGHRVVHGGERFASSVKITDEVLKTIETLSFLAPLHNPLNIMGIKSSMKLLPGVPQVAVFDTAFHQKMPEKAYLYAIPYEYYEKYKIRRYGFHGTSHRYVSKRAAEIMGKPYDQLKIITVHVGNGASVAAVKNGVSVDTSMGFTPLEGLVMGTRSGDIDPAIVEFLEKEEGLSAKEVVNILNKKSGVYGLTKGFSSDMRDIEDNAIEGDPVCRLAFDVYEYRIAKYIGAYAAAMNGVDAIVFTAGVGENSRIMREEIIENYLGYLGIKIDKEANDFKGEEKIISTPDSKVIAMVVPTNEELMIAKDTKEIIEKGLDELKI

SEQ ID NO: 2809 - DNA, 1257 bp, synthetic construct
  misc_feature 1..1257: note = Variant of acetate kinase
  source 1..1257: mol_type = other DNA
atgcaccatcatcatcatcatggcggtagcggcatgaaagttctggtgattaattctggtagctcctccatcaaatatcagctcctcgatatgaccaacgaaaaggtattagcgaaaggcttggtcgagcgcattggcatcgacggttcgcgtattgtgcataaagttaacggcgaaaaacacgtgctggaacatgagattaagaatcacgaaattggacttaaattggtcctggatcttcttacggacgaaaaatacggtgtgttgaaggatctcaaagaaatcgatgcagttgggcatcgcgtagtacatggcggcgagcgttttgccagtagcgtgaagattactgacgaagtcttaaagaccatcgagacgttgtcgttcttagctccgttacacaatccactgaacattatgggtatcaagagcagcatgaaattattaccgggtgtgcctcaagttgccgtctttgatacagcgttccaccagaagatgccggagaaagcctatttgtacgcaatcccctatgagtactacgagaaatataaaattcgccgctatgggtttcatggaacctcacatcgttatgtgagtaaacgtgctgcggaaattatgggcaaaccgtacgatcagctcaagatcattaccgttcacgtgggtaacggcgcatcagttgcggcggtgaagaatggcgtatctgttgacacttccatgggtttcacaccacttgaaggtcttgtcatgggcacgcgcagcggcgatattgatccggccatcgtggaatttcttgagaaagaagaaggattgtcggccaaagaagtcgtcaacatcctcaacaagaaatctggtgtgtatgggctcaccaaaggctttagtagtgacatgcgtgacattgaagataatgctattgaaggtgatcctgtatgccgccttgcattcgatgtgtacgaatatcgtatcgcgaaatatattggcgcatacgctgcggccatgaacggtgttgacgcgatcgtctttaccgcaggagttggcgaaaatagccgcattatgcgcgaagaaattattgagaactacttgggctacttagggatcaagatcgataaagaagccaatgacttcaaaggtgaggagaagatcatttcaacgcccgattccaaagtgattgcgatggtaattccgaccaacgaggagctcatgatcgccaaagacacgaaagaaatcattgagaaagggttggacgagcttaagatctaatga

SEQ ID NO: 2810 - protein, 417 aa, synthetic construct
  REGION 1..417: note = Variant of acetate kinase
MHHHHHHGGSGMKVLVINSGSSSIKYQLLDMTNEKVLAKGLVERIGIDGSRIVHKVNGEKHVLEHEIKNHEIGLKLVLDLLTDEKYGVLKDLKEIDAVGHRVVHGGERFASSVKITDEVLKTIETLSFLAPLHNPLNIMGIKSSMKLLPGVPQVAVFDTAFHQKMPEKAYLYAIPYEYYEKYKIRRYGFHGTSHRYVSKRAAEIMGKPYDQLKIITVHVGNGASVAAVKNGVSVDTSMGFTPLEGLVMGTRSGDIDPAIVEFLEKEEGLSAKEVVNILNKKSGVYGLTKGFSSDMRDIEDNAIEGDPVCRLAFDVYEYRIAKYIGAYAAAMNGVDAIVFTAGVGENSRIMREEIIENYLGYLGIKIDKEANDFKGEEKIISTPDSKVIAMVIPTNEELMIAKDTKEIIEKGLDELKI

SEQ ID NO: 2811 - DNA, 1257 bp, synthetic construct
  misc_feature 1..1257: note = Variant of acetate kinase
  source 1..1257: mol_type = other DNA
atgcaccatcatcatcatcatggcggtagcggcatgaaagttctggtgattaattctggtagctcctccatcaaatatcagctcctcgatatgaccaacgaaaaggtattagcgaaaggcttggtcgagcgcattggcatcgacggttcgcgtatcgtgcataaagttaacggcgaaaaacacgtgctggaacatgagattaagaatcacgaaattggacttaaattggtcctggatcttcttacggacgaaaaatacggtgtgttgaaggatctcaaagaaatcgatgcagttgggcatcgcgtagtacatggcggcgagcgttttgccagtagcgtgaagattactgacgaagtcttaaagaccatcgagacgttgtcgttcttagctccgttacacaatccagtgaacattatgggtatcaagagcagcatgaaactgttaccgggtgtgcctcaagttgccgtctttgatacagcgttccaccagaagatgccggagaaagcctatttgtacgcaatcccctatgagtactacgagaaatataaaattcgccgctatgggtttcatggaacctcacatcgttatgtgagtaaacgtgctgcggaaattatgggcaaaccgtacgatcagctcaagatcattaccgttcacgtgggtaacggcgcatcagttgcggcggtgaagaatggcgtatctgttgacacttccatgggtttcacaccacttgaaggtcttgtcatgggcacgcgcagcggcgatattgatccggccatcgtggaatttcttgagaaagaagaaggattgtcggccaaagaagtcgtcaacatcctcaacaagaaatctggtgtgtatgggctcaccaaaggctttagtagtgacatgcgtgacattgaagataatgctattgaaggtgatcctgtatgccgccttgcattagatgtgtacgaatatcgtatcgcgaaatatattggcgcatacgctgcggccatgaacggtgttgacgcgatcgtctttaccgcaggagttggcgaaaatagcccgattatgcgccatgaaattattgagaactacttgggctacttagggatcaagatcgataaagaagccaatgacttcaaaggtgaggagaagatcatttcaacgcccgattccaaagtgattgcgatggtagttccgaccaacgaggagctcatgatcgccaaagacacgaaagaaatcattgagaaagggttggacgagcttaagatctaatga

SEQ ID NO: 2812 - protein, 417 aa, synthetic construct
  REGION 1..417: note = Variant of acetate kinase
MHHHHHHGGSGMKVLVINSGSSSIKYQLLDMTNEKVLAKGLVERIGIDGSRIVHKVNGEKHVLEHEIKNHEIGLKLVLDLLTDEKYGVLKDLKEIDAVGHRVVHGGERFASSVKITDEVLKTIETLSFLAPLHNPVNIMGIKSSMKLLPGVPQVAVFDTAFHQKMPEKAYLYAIPYEYYEKYKIRRYGFHGTSHRYVSKRAAEIMGKPYDQLKIITVHVGNGASVAAVKNGVSVDTSMGFTPLEGLVMGTRSGDIDPAIVEFLEKEEGLSAKEVVNILNKKSGVYGLTKGFSSDMRDIEDNAIEGDPVCRLALDVYEYRIAKYIGAYAAAMNGVDAIVFTAGVGENSPIMRHEIIENYLGYLGIKIDKEANDFKGEEKIISTPDSKVIAMVVPTNEELMIAKDTKEIIEKGLDELKI

SEQ ID NO: 2813 - DNA, 1257 bp, synthetic construct
  misc_feature 1..1257: note = Variant of acetate kinase
  source 1..1257: mol_type = other DNA
atgcaccatcatcatcatcatggcggtagcggcatgaaagttctggtgattaattctggtagctcctccatcaaatatcagctcctcgatatgaccaacgaaaaggtattagcgaaaggcttggtcgagcgcattggcatcgacggttcgcgtcttgtgcataaagttaacggcgaaaaacacgtgctggaacatgagattaagaatcacgaaattggacttaaattggtcctggatcttcttacggacgaaaaatacggtgtgttgaaggatctcaaagaaatcgatgcagttgggcatcgcgtagtacatggcggcgagcgttttgccagtagcgtgaagattactgacgaagtcttaaagaccatcgagacgttgtcgttcttagctccgttacacaatccagcgaacattatgggtatcaagagcagcatgaaattaatgccgggtgtgcctcaagttgccgtctttgatacagcgttccaccagaagatgccggagaaagcctatttgtacgcaatcccctatgagtactacgagaaatataaaattcgccgctatgggtttcatggaacctcacatcgttatgtgagtaaacgtgctgcggaaattatgggcaaaccgtacgatcagctcaagatcattaccgttcacgtgggtaacggcgcatcagttgcggcggtgaagaatggcgtatctgttgacacttccatgggtttcacaccacttgaaggtcttgtcatgggcacgcgcagcggcgatattgatccggccatcgtggaatttcttgagaaagaagaaggattgtcggccaaagaagtcgtcaacatcctcaacaagaaatctggtgtgtatgggctcaccaaaggctttagtagtgacatgcgtgacattgaagataatgctattgaaggtgatcctgtatgccgccttgcattcgatgtgtacgaatatcgtatcgcgaaatatattggcgcatacgctgcggccatgaacggtgttgacgcgatcgtctttaccgcaggagttggcgaaaatagccgcattatgcgcgaagaaattattgagaactacttgggctacttagggatcaagatcgataaagaagccaatgacttcaaaggtgaggagaagatcatttcaacgcccgattccaaagtgattgcgatggtagttccgaccaacgaggagctcatgatcgccaaagacacgaaagaaatcattgagaaagggttggacgagcttaagatctaatga

SEQ ID NO: 2814 - protein, 417 aa, synthetic construct
  REGION 1..417: note = Variant of acetate kinase
MHHHHHHGGSGMKVLVINSGSSSIKYQLLDMTNEKVLAKGLVERIGIDGSRLVHKVNGEKHVLEHEIKNHEIGLKLVLDLLTDEKYGVLKDLKEIDAVGHRVVHGGERFASSVKITDEVLKTIETLSFLAPLHNPANIMGIKSSMKLMPGVPQVAVFDTAFHQKMPEKAYLYAIPYEYYEKYKIRRYGFHGTSHRYVSKRAAEIMGKPYDQLKIITVHVGNGASVAAVKNGVSVDTSMGFTPLEGLVMGTRSGDIDPAIVEFLEKEEGLSAKEVVNILNKKSGVYGLTKGFSSDMRDIEDNAIEGDPVCRLAFDVYEYRIAKYIGAYAAAMNGVDAIVFTAGVGENSRIMREEIIENYLGYLGIKIDKEANDFKGEEKIISTPDSKVIAMVVPTNEELMIAKDTKEIIEKGLDELKI

SEQ ID NO: 2815 - DNA, 1257 bp, synthetic construct
  misc_feature 1..1257: note = Variant of acetate kinase
  source 1..1257: mol_type = other DNA
atgcaccatcatcatcatcatggcggtagcggcatgaaagttctggtgattaattctggtagctcctccatcaaatatcagctcctcgatatgaccaacgaaaaggtattagcgaaaggcttggtcgagcgcattggcatcgacggttcgcgtatcgtgcataaagttaacggcgaaaaacacgtgctggaacatgagattaagaatcacgaaattggacttaaattggtcctggatcttcttacggacgaaaaatacggtgtgttgaaggatctcaaagaaatcgatgcagttgggcatcgcgtagtacatggcggcgagcgttttgccagtagcgtgaagattactgacgaagtcttaaagaccatcgagacgttgtcgttcttagctccgttacacaatccagtgaacattatgggtatcaagagcagcatgaaattattaccgggtgtgcctcaagttgccgtctttgatacagcgttccaccagaagatgccggagaaagcctatttgtacgcaatcccctatgagtactacgagaaatataaaattcgccgctatgggtttcatggaacctcacatcgttatgtgagtaaacgtgctgcggaaattatgggcaaaccgtacgatcagctcaagatcattaccgttcacgtgggtaacggcgcatcagttgcggcggtgaagaatggcgtatctgttgacacttccatgggtttcacaccacttgaaggtcttgtcatgggcacgcgcagcggcgatattgatccggccatcgtggaatttcttgagaaagaagaaggattgtcggccaaagaagtcgtcaacatcctcaacaagaaatctggtgtgtatgggctcaccaaaggctttagtagtgacatgcgtgacattgaagataatgctattgaaggtgatcctgtatgccgccttgcattagatgtgtacgaatatcgtatcgcgaaatatattggcgcatacgctgcggccatgaacggtgttgacgcgatcgtctttaccgcaggagttggcgaaaatagcccgattatgcgcgaagaaattattgagaactacttgggctacttagggatcaagatcgataaagaagccaatgacttcaaaggtgaggagaagatcatttcaacgcccgattccaaagtgattgcgatggtagttccgaccaacgaggagctcatgatcgccaaagacacgaaagaaatcattgagaaagggttggacgagcttaagatctaatga

SEQ ID NO: 2816 - protein, 417 aa, synthetic construct
  REGION 1..417: note = Variant of acetate kinase
MHHHHHHGGSGMKVLVINSGSSSIKYQLLDMTNEKVLAKGLVERIGIDGSRIVHKVNGEKHVLEHEIKNHEIGLKLVLDLLTDEKYGVLKDLKEIDAVGHRVVHGGERFASSVKITDEVLKTIETLSFLAPLHNPVNIMGIKSSMKLLPGVPQVAVFDTAFHQKMPEKAYLYAIPYEYYEKYKIRRYGFHGTSHRYVSKRAAEIMGKPYDQLKIITVHVGNGASVAAVKNGVSVDTSMGFTPLEGLVMGTRSGDIDPAIVEFLEKEEGLSAKEVVNILNKKSGVYGLTKGFSSDMRDIEDNAIEGDPVCRLALDVYEYRIAKYIGAYAAAMNGVDAIVFTAGVGENSPIMREEIIENYLGYLGIKIDKEANDFKGEEKIISTPDSKVIAMVVPTNEELMIAKDTKEIIEKGLDELKI

SEQ ID NO: 2817 - DNA, 1257 bp, synthetic construct
  misc_feature 1..1257: note = Variant of acetate kinase
  source 1..1257: mol_type = other DNA
atgcaccatcatcatcatcatggcggtagcggcatgaaagttctggtgattaattctggtagctcctccatcaaatatcagctcctcgatatgaccaacgaaaaggtattagcgaaaggcttggtcgagcgcattggcatcgacggttcgcgtcttgtgcataaagttaacggcgaaaaacacgtgctggaacatgagattaagaatcacgaaattggacttaaattggtcctggatcttcttacggacgaaaaatacggtgtgttgaaggatctcaaagaaatcgatgcagttgggcatcgcgtagtacatggcggcgagcgttttgccagtagcgtgaagattactgacgaagtcttaaagaccatcgagacgttgtcgttcttagctccgttacacaatccagcgaacattatgggtatcaagagcagcatgaaattaatgccgggtgtgcctcaagttgccgtctttgatacagcgttccaccagaagatgccggagaaagcctatttgtacgcaatcccctatgagtactacgagaaatataaaattcgccgctatgggtttcatggaacctcacatcgttatgtgagtaaacgtgctgcggaaattatgggcaaaccgtacgatcagctcaagatcattaccgttcacgtgggtaacggcgcatcagttgcggcggtgaagaatggcgtatctgttgacacttccatgggtttcacaccacttgaaggtcttgtcatgggcacgcgcagcggcgatattgatccggccatcgtggaatttcttgagaaagaagaaggattgtcggccaaagaagtcgtcaacatcctcaacaagaaatctggtgtgtatgggctcaccaaaggctttagtagtgacatgcgtgacattgaagataatgctattgaaggtgatcctgtatgccgccttgcattcgatgtgtacgaatatcgtatcgcgaaatatattggcgcatacgctgcggccatgaacggtgttgacgcgatcgtctttaccgcaggagttggcgaaaatagcccgattatgcgcgaagaaattattgagaactacttgggctacttagggatcaagatcgataaagaagccaatgatttcaaaggtgaggagaagatcatttcaacgcccgattccaaagtgattgcgatggtagttccgaccaacgaggagctcatgatcgccaaagacacgaaagaaatcattgagaaagggttggacgagcttaagatctaatga

SEQ ID NO: 2818 - protein, 417 aa, synthetic construct
  REGION 1..417: note = Variant of acetate kinase
MHHHHHHGGSGMKVLVINSGSSSIKYQLLDMTNEKVLAKGLVERIGIDGSRLVHKVNGEKHVLEHEIKNHEIGLKLVLDLLTDEKYGVLKDLKEIDAVGHRVVHGGERFASSVKITDEVLKTIETLSFLAPLHNPANIMGIKSSMKLMPGVPQVAVFDTAFHQKMPEKAYLYAIPYEYYEKYKIRRYGFHGTSHRYVSKRAAEIMGKPYDQLKIITVHVGNGASVAAVKNGVSVDTSMGFTPLEGLVMGTRSGDIDPAIVEFLEKEEGLSAKEVVNILNKKSGVYGLTKGFSSDMRDIEDNAIEGDPVCRLAFDVYEYRIAKYIGAYAAAMNGVDAIVFTAGVGENSPIMREEIIENYLGYLGIKIDKEANDFKGEEKIISTPDSKVIAMVVPTNEELMIAKDTKEIIEKGLDELKI

SEQ ID NO: 2819 - DNA, 1257 bp, synthetic construct
  misc_feature 1..1257: note = Variant of acetate kinase
  source 1..1257: mol_type = other DNA
atgcaccatcatcatcatcatggcggtagcggcatgaaagttctggtgattaattctggtagctcctccatcaaatatcagctcctcgatatgaccaacgaaaaggtattagcgaaaggcttggtcgagcgcattggcatcgacggttcgcgtatcgtgcataaagttaacggcgaaaaacacgtgctggaacatgagattaagaatcacgaaattggacttaaattggtcctggatcttcttacggacgaaaaatacggtgtgttgaaggatctcaaagaaatcgatgcagttgggcatcgcgtagtacatggcggcgagcgttttgccagtagcgtgaagattactgacgaagtcttaaagaccatcgagacgttgtcgttcttagctccgttacacaatccagcgaacattatgggtatcaagagcagcatgaaattattaccgggtgtgcctcaagttgccgtctttgatacagcgttccaccagaagatgccggagaaagcctatttgtacgcaatcccctatgagtactacgagaaatataaaattcgccgctatgggtttcatggaacctcacatcgttatgtgagtaaacgtgctgcggaaattatgggcaaaccgtacgatcagctcaagatcattaccgttcacgtgggtaacggcgcatcagttgcggcggtgaagaatggcgtatctgttgacacttccatgggtttcacaccacttgaaggtcttgtcatgggcacgcgcagcggcgatattgatccggccatcgtggaatttcttgagaaagaagaaggattgtcggccaaagaagtcgtcaacatcctcaacaagaaatctggtgtgtatgggctcaccaaaggctttagtagtgacatgcgtgacattgaagataatgctattgaaggtgatcctgtatgccgccttgcattcgatgtgtacgaatatcgtatcgcgaaatatattggcgcatacgctgcggccatgaacggtgttgacgcgatcgtctttaccgcaggagttggcgaaaatagcccgattatgcgcgaagaaattattgagaactacttgggctacttagggatcaagatcgataaagaagccaatcgcttcaaaggtgaggagaagatcatttcaacgcccgattccaaagtgattgcgatggtaattccgaccaacgaggagctcatgatcgccaaagacacgaaagaaatcattgagaaagggttggacgagcttaagatctaatga

SEQ ID NO: 2820 - protein, 417 aa, synthetic construct
  REGION 1..417: note = Variant of acetate kinase
MHHHHHHGGSGMKVLVINSGSSSIKYQLLDMTNEKVLAKGLVERIGIDGSRIVHKVNGEKHVLEHEIKNHEIGLKLVLDLLTDEKYGVLKDLKEIDAVGHRVVHGGERFASSVKITDEVLKTIETLSFLAPLHNPANIMGIKSSMKLLPGVPQVAVFDTAFHQKMPEKAYLYAIPYEYYEKYKIRRYGFHGTSHRYVSKRAAEIMGKPYDQLKIITVHVGNGASVAAVKNGVSVDTSMGFTPLEGLVMGTRSGDIDPAIVEFLEKEEGLSAKEVVNILNKKSGVYGLTKGFSSDMRDIEDNAIEGDPVCRLAFDVYEYRIAKYIGAYAAAMNGVDAIVFTAGVGENSPIMREEIIENYLGYLGIKIDKEANRFKGEEKIISTPDSKVIAMVIPTNEELMIAKDTKEIIEKGLDELKI

SEQ ID NO: 2821 - DNA, 1257 bp, synthetic construct
  misc_feature 1..1257: note = Variant of acetate kinase
  source 1..1257: mol_type = other DNA
atgcaccatcatcatcatcatggcggtagcggcatgaaagttctggtgattaattctggtagctcctccatcaaatatcagctcctcgatatgaccaacgaaaaggtattagcgaaaggcttggtcgagcgcattggcatcgacggttcgcgtcttgtgcataaagttaacggcgaaaaacacgtgctggaacatgagattaaggatcacgaaattggacttaaattggtcctggatcttcttacggacgaaaaatacggtgtgttgaaggatctcaaagaaatcgatgcagttgggcatcgcgtagtacatggcggcgagcgttttgccagtagcgtgaagattactgacgaagtcttaaagaccatcgagacgttgtcgttcttagctccgttacacaatccagcgaacattatgggtatcaagagcagcatgaaattattaccgggtgtgcctcaagttgccgtctttgatacagcgttccaccagaagatgccggagaaagcctatttgtacgcaatcccctatgagtactacgagaaatataaaattcgccgctatgggtttcatggaacctcacatcgttatgtgagtaaacgtgctgcggaaattatgggcaaaccgtacgatcagctcaagatcattaccgttcacgtgggtaacggcgcatcagttgcggcggtgaagaatggcgtatctgttgacacttccatgggtttcacaccacttgaaggtcttgtcatgggcacgcgcagcggcgatattgatccggccatcgtggaatttcttgagaaagaagaaggattgtcggccaaagaagtcgtcaacatcctcaacaagaaatctggtgtgtatgggctcaccaaaggctttagtagtgacatgcgtgacattgaagataatgctattgaaggtgatcctgtatgccgccttgcattcgatgtgtacgaatatcgtatcgcgaaatatattggcgcatacgctgcggccatgaacggtgttgacgcgatcgtctttaccgcaggagttggcgaaaatagcccgattatgcgcgaagaaattattgagaactacttgggctacttagggatcaagatcgataaagaagccaatcgcttcaaaggtgaggagaagatcatttcaacgcccgattccaaagtgattgcgatggtagttccgaccaacgaggagctcatgatcgccaaagacacgaaagaaatcattgagaaagggttggacgagcttaagatctaatga

SEQ ID NO: 2822 - protein, 417 aa, synthetic construct
  REGION 1..417: note = Variant of acetate kinase
MHHHHHHGGSGMKVLVINSGSSSIKYQLLDMTNEKVLAKGLVERIGIDGSRLVHKVNGEKHVLEHEIKDHEIGLKLVLDLLTDEKYGVLKDLKEIDAVGHRVVHGGERFASSVKITDEVLKTIETLSFLAPLHNPANIMGIKSSMKLLPGVPQVAVFDTAFHQKMPEKAYLYAIPYEYYEKYKIRRYGFHGTSHRYVSKRAAEIMGKPYDQLKIITVHVGNGASVAAVKNGVSVDTSMGFTPLEGLVMGTRSGDIDPAIVEFLEKEEGLSAKEVVNILNKKSGVYGLTKGFSSDMRDIEDNAIEGDPVCRLAFDVYEYRIAKYIGAYAAAMNGVDAIVFTAGVGENSPIMREEIIENYLGYLGIKIDKEANRFKGEEKIISTPDSKVIAMVVPTNEELMIAKDTKEIIEKGLDELKI

SEQ ID NO: 2823 - DNA, 1257 bp, synthetic construct
  misc_feature 1..1257: note = Variant of acetate kinase
  source 1..1257: mol_type = other DNA
atgcaccatcatcatcatcatggcggtagcggcatgaaagttctggtgattaattctggtagctcctccatcaaatatcagctcctcgatatgaccaacgaaaaggtattagcgaaaggcttggtcgagcgcattggcatcgacggttcgcgtatcgtgcataaagttaacggcgaaaaacacgtgctggaacatgagattaagaatcacgaaattggacttaaattggtcctggatcttcttacggacgaaaaatacggtgtgttgaaggatctcaaagaaatcgatgcagttgggcatcgcgtagtacatggcggcgagcgttttgccagtagcgtgaagattactgacgaagtcttaaagaccatcgagacgttgtcgttcttagctccgttacacaatccagtgaacattatgggtatcaagagcagcatgaaattattaccgggtgtgcctcaagttgccgtctttgatacagcgttccaccagaagatgccggagaaagcctatttgtacgcaatcccctatgagtactacgagaaatataaaattcgccgctatgggtttcatggaacctcacatcgttatgtgagtaaacgtgctgcggaaattctgggcaaaccgtacgatcagctcaagatcattaccgttcacgtgggtaacggcgcatcagttgcggcggtgaagaatggcgtatctgttgacacttccatgggtttcacaccacttgaaggtcttgtcatgggcacgcgcagcggcgatattgatccggccatcgtggaatttcttgagaaagaagaaggattgtcggccaaagaagtcgtcaacatcctcaacaagaaatctggtgtgtatgggctcaccaaaggctttagtagtgacatgcgtgacattgaagataatgctattgaaggtgatcctgtatgccgccttgcattagatgtgtacgaatatcgtatcgcgaaatatattggcgcatacgctgcggccatgaacggtgttgacgcgatcgtctttaccgcaggagttggcgaaaatagcccgattatgcgcgaagaaattattgagaactacttgggctacttagggatcaagatcgataaagaagccaatgacttcaaaggtgaggagaagatcatttcaacgcccgattccaaagtgattgcgatggtagttccgaccaacgaggagctcatgatcgccaaagacacgaaagaaatcattgagaaagggttggacgagcttaagatctaatga

SEQ ID NO: 2824 - protein, 417 aa, synthetic construct
  REGION 1..417: note = Variant of acetate kinase
MHHHHHHGGSGMKVLVINSGSSSIKYQLLDMTNEKVLAKGLVERIGIDGSRIVHKVNGEKHVLEHEIKNHEIGLKLVLDLLTDEKYGVLKDLKEIDAVGHRVVHGGERFASSVKITDEVLKTIETLSFLAPLHNPVNIMGIKSSMKLLPGVPQVAVFDTAFHQKMPEKAYLYAIPYEYYEKYKIRRYGFHGTSHRYVSKRAAEILGKPYDQLKIITVHVGNGASVAAVKNGVSVDTSMGFTPLEGLVMGTRSGDIDPAIVEFLEKEEGLSAKEVVNILNKKSGVYGLTKGFSSDMRDIEDNAIEGDPVCRLALDVYEYRIAKYIGAYAAAMNGVDAIVFTAGVGENSPIMREEIIENYLGYLGIKIDKEANDFKGEEKIISTPDSKVIAMVVPTNEELMIAKDTKEIIEKGLDELKI

SEQ ID NO: 2825 - DNA, 1257 bp, synthetic construct
  misc_feature 1..1257: note = Variant of acetate kinase
  source 1..1257: mol_type = other DNA
atgcaccatcatcatcatcatggcggtagcggcatgaaagttctggtgattaattctggtagctcctccatcaaatatcagctcctcgatatgaccaacgaaaaggtattagcgaaaggcttggtcgagcgcattggcatcgacggttcgcgtatcgtgcataaagttaacggcgaaaaacacgtgctggaacatgagattaagaatcacgaaattggacttaaattggtcctggatcttcttacggacgaaaaatacggtgtgttgaaggatctcaaagaaatcgatgcagttgggcatcgcgtagtacatggcggcgagcgttttgccagtagcgtgaagattactgacgaagtcttaaagaccatcgagacgttgtcgttcttagctccgttacacaatccagcgaacattatgggtatcaagagcagcatgaaattattaccgggtgtgcctcaagttgccgtctttgatacagcgttccaccagaagatgccggagaaagcctatttgtacgcaatcccctatgagtactacgagaaatataaaattcgccgctatgggtttcatggaacctcacatcgttatgtgagtaaacgtgctgcggaaattctgggcaaacagtacgatcagctcaagatcattaccgttcacgtgggtaacggcgcatcagttgcggcggtgaagaatggcgtatctgttgacacttccatgggtttcacaccacttgaaggtcttgtcatgggcacgcgcagcggcgatattgatccggccatcgtggaatttcttgagaaagaagaaggattgtcggccaaagaagtcgtcaacatcctcaacaagaaatctggtgtgtatgggctcaccaaaggctttagtagtgacatgcgtgacattgaagataatgctattgaaggtgatcctgtatgccgccttgcattagatgtgtacgaatatcgtatcgcgaaatatattggcgcatacgctgcggccatgaacggtgttgacgcgatcgtctttaccgcaggagttggcgaaaatagcccgattatgcgcgaagaaattattgagaactacttgggctacttagggatcaagatcgataaagaagccaatgactttaaaggtgaggagaagatcatttcaacgcccgattccaaagtgattgcgatggtagttccgaccaacgaggagctcatgatcgccaaagacacgaaagaaatcattgagaaagggttggacgagcttaagatctaatga

SEQ ID NO: 2826 - protein, 417 aa, synthetic construct
  REGION 1..417: note = Variant of acetate kinase
MHHHHHHGGSGMKVLVINSGSSSIKYQLLDMTNEKVLAKGLVERIGIDGSRIVHKVNGEKHVLEHEIKNHEIGLKLVLDLLTDEKYGVLKDLKEIDAVGHRVVHGGERFASSVKITDEVLKTIETLSFLAPLHNPANIMGIKSSMKLLPGVPQVAVFDTAFHQKMPEKAYLYAIPYEYYEKYKIRRYGFHGTSHRYVSKRAAEILGKQYDQLKIITVHVGNGASVAAVKNGVSVDTSMGFTPLEGLVMGTRSGDIDPAIVEFLEKEEGLSAKEVVNILNKKSGVYGLTKGFSSDMRDIEDNAIEGDPVCRLALDVYEYRIAKYIGAYAAAMNGVDAIVFTAGVGENSPIMREEIIENYLGYLGIKIDKEANDFKGEEKIISTPDSKVIAMVVPTNEELMIAKDTKEIIEKGLDELKI

SEQ ID NO: 2827 - DNA, 1257 bp, synthetic construct
  misc_feature 1..1257: note = Variant of acetate kinase
  source 1..1257: mol_type = other DNA
atgcaccatcatcatcatcatggcggtagcggcatgaaagttctggtgattaattctggtagctcctccatcaaatatcagctcctcgatatgaccaacgaaaaggtattagcgaaaggcttggtcgagcgcattggcatcgacggttcgcgtatcgtgcataaagttaacggcgaaaaacacgtgctggaacatgagattaaaaatcacgaaattggacttaaattggtcctggatcttcttacggacgaaaaatacggtgtgttgaaggatctcaaagaaatcgatgcagttgggcatcgcgtagtacatggcggcgagcgttttgccagtagcgtgaagattactgacgaagtcttaaagaccatcgagacgttgtcgttcttagctccgttacacaatccagtgaacattatgggtatcaagagcagcatgaaactgttaccgggtgtgcctcaagttgccgtctttgatacagcgttccaccagaagatgccggagaaagcctatttgtacgcaatcccctatgagtactacgagaaatataaaattcgccgctatgggtttcatggaacctcacatcgttatgtgagtaaacgtgctgcggaaattatgggcaaaccgtacgatcagctcaagatcattaccgttcacgtgggtaacggcgcatcagttgcggcggtgaagaatggcgtatctgttgacacttccatgggtttcacaccacttgaaggtcttgtcatgggcacgcgcagcggcgatattgatccggccatcgtggaatttcttgagaaagaagaaggattgtcggccaaagaagtcgtcaacatcctcaacaagaaatctggtgtgtatgggctcaccaaaggctttagtagtgacatgcgtgacattgaagataatgctattgaaggtgatcctgtatgccgccttgcattcgatgtgtacgaatatcgtatcgcgaaatatattggcgcatacgctgcggccatgaacggtgttgacgcgatcgtctttaccgcaggagttggcgaaaatagcccgattatgcgccatgaaattattgagaactacttgggctacttagggatcaagatcgataaagaagccaatgacttcaaaggtgaggagaagatcatttcaacgcccgattccaaagtgattgcgatggtagttccgaccaacgaggagctcatgatcgccaaagacacgaaagaaatcgttgagaaagggttggacgagcttaagatctaatga

SEQ ID NO: 2828 - protein, 417 aa, synthetic construct
  REGION 1..417: note = Variant of acetate kinase
MHHHHHHGGSGMKVLVINSGSSSIKYQLLDMTNEKVLAKGLVERIGIDGSRIVHKVNGEKHVLEHEIKNHEIGLKLVLDLLTDEKYGVLKDLKEIDAVGHRVVHGGERFASSVKITDEVLKTIETLSFLAPLHNPVNIMGIKSSMKLLPGVPQVAVFDTAFHQKMPEKAYLYAIPYEYYEKYKIRRYGFHGTSHRYVSKRAAEIMGKPYDQLKIITVHVGNGASVAAVKNGVSVDTSMGFTPLEGLVMGTRSGDIDPAIVEFLEKEEGLSAKEVVNILNKKSGVYGLTKGFSSDMRDIEDNAIEGDPVCRLAFDVYEYRIAKYIGAYAAAMNGVDAIVFTAGVGENSPIMRHEIIENYLGYLGIKIDKEANDFKGEEKIISTPDSKVIAMVVPTNEELMIAKDTKEIVEKGLDELKI

SEQ ID NO: 2829 - DNA, 1257 bp, synthetic construct
  misc_feature 1..1257: note = Variant of acetate kinase
  source 1..1257: mol_type = other DNA
atgcaccatcatcatcatcatggcggtagcggcatgaaagttctggtgattaattctggtagctcctccatcaaatatcagctcctcgatatgaccaacgaaaaggtattagcgaaaggcttggtcgagcgcattggcatcgacggttcgcgtatcgtgcataaagttaacggcgaaaaacacgtgctggaacatgagattaagaatcacgaaattggacttaaattggtcctggatcttcttacggacgaaaaatacggtgtgttgaaggatctcaaagaaatcgatgcagttgggcatcgcgtagtacatggcggcgagcgttttgccagtagcgtgaagattactgacgaagtcttaaagaccatcgagacgttgtcgttcttagctccgttacacaatccagcgaacattatgggtatcaagagcagcatgaaattattaccgggtgtgcctcaagttgccgtctttgatacagcgttccaccagaagatgccggagaaagcctatttgtacgcaatcccctatgagtactacgagaaatataaaattcgccgctatgggtttcatggaacctcacatcgttatgtgagtaaacgtgctgcggaaattctgggcaaaccgtacgatcagctcaagatcattaccgttcacgtgggtaacggcgcatcagttgcggcggtgaagaatggcgtatctgttgacacttccatgggtttcacaccacttgaaggtcttgtcatgggcacgcgcagcggcgatattgatccggccatcgtggaatttcttgagaaagaagaaggattgtcggccaaagaagtcgtcaacatcctcaacaagaaatctggtgtgtatgggctcaccaaaggctttagtagtgacatgcgtgacattgaagataatgctattgaaggtgatcctgtatgccgccttgcattagatgtgtacgaatatcgtatcgcgaaatatattggcgcatacgctgcggccatgaacggtgttgacgcgatcgtctttaccgcaggagttggcgaaaatagcccgattatgcgcgaagaaattattgagaactacttgggctacttagggatcaagatcgataaagaagccaatgacttcaaaggtgaggagaagatcatttcaacgcccgattccaaagtgattgcgatggtagttccgaccaacgaggagctcatgatcgccaaagacacgaaagaaatcattgagaaagggttggacgagcttaagatctaatga

SEQ ID NO: 2830 - protein, 417 aa, synthetic construct
  REGION 1..417: note = Variant of acetate kinase
MHHHHHHGGSGMKVLVINSGSSSIKYQLLDMTNEKVLAKGLVERIGIDGSRIVHKVNGEKHVLEHEIKNHEIGLKLVLDLLTDEKYGVLKDLKEIDAVGHRVVHGGERFASSVKITDEVLKTIETLSFLAPLHNPANIMGIKSSMKLLPGVPQVAVFDTAFHQKMPEKAYLYAIPYEYYEKYKIRRYGFHGTSHRYVSKRAAEILGKPYDQLKIITVHVGNGASVAAVKNGVSVDTSMGFTPLEGLVMGTRSGDIDPAIVEFLEKEEGLSAKEVVNILNKKSGVYGLTKGFSSDMRDIEDNAIEGDPVCRLALDVYEYRIAKYIGAYAAAMNGVDAIVFTAGVGENSPIMREEIIENYLGYLGIKIDKEANDFKGEEKIISTPDSKVIAMVVPTNEELMIAKDTKEIIEKGLDELKI

SEQ ID NO: 2831 - DNA, 1257 bp, synthetic construct
  misc_feature 1..1257: note = Variant of acetate kinase
  source 1..1257: mol_type = other DNA
atgcaccatcatcatcatcatggcggtagcggcatgaaagttctggtgattaattctggtagctcctccatcaaatatcagctcctcgatatgaccaacgaaaaggtattagcgaaaggcttggtcgagcgcattggcatcgacggttcgcgtcttgtgcataaagttaacggcgaaaaacacgtgctggaacatgagattaagaatcacgaaattggacttaaattggtcctggatcttcttacggacgaaaaatacggtgtgttgaaggatctcaaagaaatcgatgcagttgggcatcgcgtagtacatggcggcgagcgttttgccagtagcgtgaagattactgacgaagtcttaaagaccatcgagacgttgtcgttcttagctccgttacacaatccactgaacattatgggtatcaagagcagcatgaaattactgccgggtgtgcctcaagttgccgtctttgatacagcgttccaccagaagatgccggagaaagcctatttgtacgcaatcccctatgagtactacgagaaatataaaattcgccgctatgggtttcatggaacctcacatcgttatgtgagtaaacgtgctgcggaaattatgggcaaaccgtacgatcagctcaagatcattaccgttcacgtgggtaacggcgcatcagttgcggcggtgaagaatggcgtatctgttgacacttccatgggtttcacaccacttgaaggtcttgtcatgggcacgcgcagcggcgatattgatccggccatcgtggaatttcttgagaaagaagaaggattgtcggccaaagaagtcgtcaacatcctcaacaagaaatctggtgtgtatgggctcaccaaaggctttagtagtgacatgcgtgacattgaagataatgctattgaaggtgatcctgtatgccgccttgcattcgatgtgtacgaatatcgtatcgcgaaatatattggcgcatacgctgcggccatgaacggtgttgacgcgatcgtctttaccgcaggagttggcgaaaatagcccgattatgcgcgaagaaattattgagaactacttgggctacttagggatcaagatcgataaagaagccaatgatttcaaaggtgaggagaagatcatttcaacgcccgattccaaagtgattgcgatggtagttccgaccaacgaggagctcatgatcgccaaagacacgaaagaaatcattgagaaagggttggacgagcttaagatctaatga

SEQ ID NO: 2832 - protein, 417 aa, synthetic construct
  REGION 1..417: note = Variant of acetate kinase
MHHHHHHGGSGMKVLVINSGSSSIKYQLLDMTNEKVLAKGLVERIGIDGSRLVHKVNGEKHVLEHEIKNHEIGLKLVLDLLTDEKYGVLKDLKEIDAVGHRVVHGGERFASSVKITDEVLKTIETLSFLAPLHNPLNIMGIKSSMKLLPGVPQVAVFDTAFHQKMPEKAYLYAIPYEYYEKYKIRRYGFHGTSHRYVSKRAAEIMGKPYDQLKIITVHVGNGASVAAVKNGVSVDTSMGFTPLEGLVMGTRSGDIDPAIVEFLEKEEGLSAKEVVNILNKKSGVYGLTKGFSSDMRDIEDNAIEGDPVCRLAFDVYEYRIAKYIGAYAAAMNGVDAIVFTAGVGENSPIMREEIIENYLGYLGIKIDKEANDFKGEEKIISTPDSKVIAMVVPTNEELMIAKDTKEIIEKGLDELKI

SEQ ID NO: 2833 - DNA, 1257 bp, synthetic construct
  misc_feature 1..1257: note = Variant of acetate kinase
  source 1..1257: mol_type = other DNA
atgcaccatcatcatcatcatggcggtagcggcatgaaagttctggtgattaattctggtagctcctccatcaaatatcagctcctcgatatgaccaacgaaaaggtattagcgaaaggcttggtcgagcgcattggcatcgacggttcgcgtatcgtgcataaagttaacggcgaaaaacacgtgctggaacatgagattaaaaatcacgaaattggacttaaattggtcctggatcttcttacggacgaaaaatacggtgtgttgaaggatctcaaagaaatcgatgcagttgggcatcgcgtagtacatggcggcgagcgttttgccagtagcgtgaagattactgacgaagtcttaaagaccatcgagacgttgtcgttcttagctccgttacacaatccagcgaacattatgggtatcaagagcagcatgaaattattaccgggtgtgcctcaagttgccgtctttgatacagcgttccaccagaagatgccggagaaagcctatttgtacgcaatcccctatgagtactacgagaaatataaaattcgccgctatgggtttcatggaacctcacatcgttatgtgagtaaacgtgctgcggaaattatgggcaaaccgtacgatcagctcaagatcattaccgttcacgtgggtaacggcgcatcagttgcggcggtgaagaatggcgtatctgttgacacttccatgggtttcacaccacttgaaggtcttgtcatgggcacgcgcagcggcgatattgatccggccatcgtggaatttcttgagaaagaagaaggattgtcggccaaagaagtcgtcaacatcctcaacaagaaatctggtgtgtatgggctcaccaaaggctttagtagtgacatgcgtgacattgaagataatgctattgaaggtgatcctgtatgccgccttgcattagatgtgtacgaatatcgtatcgcgaaatatattggcgcatacgctgcggccatgaacggtgttgacgcgatcgtctttaccgcaggagttggcgaaaatagcccgattatgcgccatgaaattattgagaactacttgggctacttagggatcaagatcgataaagaagccaatgactttaaaggtgaggagaagatcatttcaacgcccgattccaaagtgattgcgatggtagttccgaccaacgaggagctcatgatcgccaaagacacgaaagaaatcattgagaaagggttggacgagcttaagatctaatga

SEQ ID NO: 2834 - protein, 417 aa, synthetic construct
  REGION 1..417: note = Variant of acetate kinase
MHHHHHHGGSGMKVLVINSGSSSIKYQLLDMTNEKVLAKGLVERIGIDGSRIVHKVNGEKHVLEHEIKNHEIGLKLVLDLLTDEKYGVLKDLKEIDAVGHRVVHGGERFASSVKITDEVLKTIETLSFLAPLHNPANIMGIKSSMKLLPGVPQVAVFDTAFHQKMPEKAYLYAIPYEYYEKYKIRRYGFHGTSHRYVSKRAAEIMGKPYDQLKIITVHVGNGASVAAVKNGVSVDTSMGFTPLEGLVMGTRSGDIDPAIVEFLEKEEGLSAKEVVNILNKKSGVYGLTKGFSSDMRDIEDNAIEGDPVCRLALDVYEYRIAKYIGAYAAAMNGVDAIVFTAGVGENSPIMRHEIIENYLGYLGIKIDKEANDFKGEEKIISTPDSKVIAMVVPTNEELMIAKDTKEIIEKGLDELKI

SEQ ID NO: 2835 - DNA, 1257 bp, synthetic construct
  misc_feature 1..1257: note = Variant of acetate kinase
  source 1..1257: mol_type = other DNA
atgcaccatcatcatcatcatggcggtagcggcatgaaagttctggtgattaattctggtagctcctccatcaaatatcagctcctcgatatgaccaacgaaaaggtattagcgaaaggcttggtcgagcgcattggcatcgacggttcgcgtattgtgcataaagttaacggcgaaaaacacgtgctggaacatgagattaagaatcacgaaattggacttaaattggtcctggatcttcttacggacgaaaaatacggtgtgttgaaggatctcaaagaaatcgatgcagttgggcatcgcgtagtacatggcggcgagcgttttgccagtagcgtgaagattactgacgaagtcttaaagaccatcgagacgttgtcgttcttagctccgttacacaatccactgaacattatgggtatcaagagcagcatgaaattaatgccgggtgtgcctcaagttgccgtctttgatacagcgttccaccagaagatgccggagaaagcctatttgtacgcaatcccctatgagtactacgagaaatataaaattcgccgctatgggtttcatggaacctcacatcgttatgtgagtaaacgtgctgcggaaattatgggcaaaccgtacgatcagctcaagatcattaccgttcacgtgggtaacggcgcatcagttgcggcggtgaagaatggcgtatctgttgacacttccatgggtttcacaccacttgaaggtcttgtcatgggcacgcgcagcggcgatattgatccggccatcgtggaatttcttgagaaagaagaaggattgtcggccaaagaagtcgtcaacatcctcaacaagaaatctggtgtgtatgggctcaccaaaggctttagtagtgacatgcgtgacattgaagataatgctattgaaggtgatcctgtatgccgccttgcattcgatgtgtacgaatatcgtatcgcgaaatatattggcgcatacgctgcggccatgaacggtgttgacgcgatcgtctttaccgcaggagttggcgaaaatagccgcattatgcgcgaagaaattattgagaactacttgggctacttagggatcaagatcgataaagaagccaatgatttcaaaggtgaggagaagatcatttcaacgcccgattccaaagtgattgcgatggtagttccgaccaacgaggagctcatgatcgccaaagacacgaaagaaatcattgagaaagggttggacgagcttaagatctaatga

SEQ ID NO: 2836 - protein, 417 aa, synthetic construct
  REGION 1..417: note = Variant of acetate kinase
MHHHHHHGGSGMKVLVINSGSSSIKYQLLDMTNEKVLAKGLVERIGIDGSRIVHKVNGEKHVLEHEIKNHEIGLKLVLDLLTDEKYGVLKDLKEIDAVGHRVVHGGERFASSVKITDEVLKTIETLSFLAPLHNPLNIMGIKSSMKLMPGVPQVAVFDTAFHQKMPEKAYLYAIPYEYYEKYKIRRYGFHGTSHRYVSKRAAEIMGKPYDQLKIITVHVGNGASVAAVKNGVSVDTSMGFTPLEGLVMGTRSGDIDPAIVEFLEKEEGLSAKEVVNILNKKSGVYGLTKGFSSDMRDIEDNAIEGDPVCRLAFDVYEYRIAKYIGAYAAAMNGVDAIVFTAGVGENSRIMREEIIENYLGYLGIKIDKEANDFKGEEKIISTPDSKVIAMVVPTNEELMIAKDTKEIIEKGLDELKI

SEQ ID NO: 2837 - DNA, 1257 bp, synthetic construct
  misc_feature 1..1257: note = Variant of acetate kinase
  source 1..1257: mol_type = other DNA
atgcaccatcatcatcatcatggcggtagcggcatgaaagttctggtgattaattctggtagctcctccatcaaatatcagctcctcgatatgaccaacgaaaaggtattagcgaaaggcttggtcgagcgcattggcatcgacggttcgcgtatcgtgcataaagttaacggcgaaaaacacgtgctggaacatgagattaagaatcacgaaattggacttaaattggtcctggatcttcttacggacgaaaaatacggtgtgttgaaggatctcaaagaaatcgatgcagttgggcatcgcgtagtacatggcggcgagcgttttgccagtagcgtgaagattactgacgaagtcttaaagaccatcgagacgttgtcgttcttagctccgttacacaatccagtgaacattatgggtatcaagagcagcatgaaattattaccgggtgtgcctcaagttgccgtctttgatacagcgttccaccagaagatgccggagaaagcctatttgtacgcaatcccctatgagtactacgagaaatataaaattcgccgctatgggtttcatggaacctcacatcgttatgtgagtaaacgtgctgcggaaattatgggcaaaccgtacgatcagctcaagatcattaccgttcacgtgggtaacggcgcatcagttgcggcggtgaagaatggcgtatctgttgacacttccatgggtttcacaccacttgaaggtcttgtcatgggcacgcgcagcggcgatattgatccggccatcgtggaatttcttgagaaagaagaaggattgtcggccaaagaagtcgtcaacatcctcaacaagaaatctggtgtgtatgggctcaccaaaggctttagtagtgacatgcgtgacattgaagataatgctattgaaggtgatcctgtatgccgccttgcatttgatgtgtacgaatatcgtatcgcgaaatatattggcgcatacgctgcggccatgaacggtgttgacgcgatcgtctttaccgcaggagttggcgaaaatagcccgattatgcgcgaagaaattattgagaactacttgggctacttagggatcaagatcgataaagaagccaatgacttcaaaggtgaggagaagatcatttcaacgcccgattccaaagtgattgcgatggtagttccgaccaacgaggagctcatgatcgccaaagacacgaaagaaatcgttgagaaagggttggacgagcttaagatctaatga

SEQ ID NO: 2838 - protein, 417 aa, synthetic construct
  REGION 1..417: note = Variant of acetate kinase
MHHHHHHGGSGMKVLVINSGSSSIKYQLLDMTNEKVLAKGLVERIGIDGSRIVHKVNGEKHVLEHEIKNHEIGLKLVLDLLTDEKYGVLKDLKEIDAVGHRVVHGGERFASSVKITDEVLKTIETLSFLAPLHNPVNIMGIKSSMKLLPGVPQVAVFDTAFHQKMPEKAYLYAIPYEYYEKYKIRRYGFHGTSHRYVSKRAAEIMGKPYDQLKIITVHVGNGASVAAVKNGVSVDTSMGFTPLEGLVMGTRSGDIDPAIVEFLEKEEGLSAKEVVNILNKKSGVYGLTKGFSSDMRDIEDNAIEGDPVCRLAFDVYEYRIAKYIGAYAAAMNGVDAIVFTAGVGENSPIMREEIIENYLGYLGIKIDKEANDFKGEEKIISTPDSKVIAMVVPTNEELMIAKDTKEIVEKGLDELKI

SEQ ID NO: 2839 - DNA, 1257 bp, synthetic construct
  misc_feature 1..1257: note = Variant of acetate kinase
  source 1..1257: mol_type = other DNA
atgcaccatcatcatcatcatggcggtagcggcatgaaagttctggtgattaattctggtagctcctccatcaaatatcagctcctcgatatgaccaacgaaaaggtattagcgaaaggcttggtcgagcgcattggcatcgacggttcgcgtattgtgcataaagttaacggcgaaaaacacgtgctggaacatgagattaagaatcacgaaattggacttaaattggtcctggatcttcttacggacgaaaaatacggtgtgttgaaggatctcaaagaaatcgatgcagttgggcatcgcgtagtacatggcggcgagcgttttgccagtagcgtgaagattactgacgaagtcttaaagaccatcgagacgttgtcgttcttagctccgttacacaatccactgaacattatgggtatcaagagcagcatgaaattattaccgggtgtgcctcaagttgccgtctttgatacagcgttccaccagaagatgccggagaaagcctatttgtacgcaatcccctatgagtactacgagaaatataaaattcgccgctatgggtttcatggaacctcacatcgttatgtgagtaaacgtgctgcggaaattatgggcaaaccgtacgatcagctcaagatcattaccgttcacgtgggtaacggcgcatcagttgcggcggtgaagaatggcgtatctgttgacacttccatgggtttcacaccacttgaaggtcttgtcatgggcacgcgcagcggcgatattgatccggccatcgtggaatttcttgagaaagaagaaggattgtcggccaaagaagtcgtcaacatcctcaacaagaaatctggtgtgtatgggctcaccaaaggctttagtagtgacatgcgtgacattgaagataatgctattgaaggtgatcctgtatgccgccttgcattcgatgtgtacgaatatcgtatcgcgaaatatattggcgcatacgctgcggccatgaacggtgttgacgcgatcgtctttaccgcaggagttggcgaaaatagcccgattatgcgcgaagaaattattgagaactacttgggctacttagggatcaagatcgataaagaagccaatgacttcaaaggtgaggagaagatcatttcaacgcccgattccaaagtgattgcgatggtaattccgaccaacgaggagctcatgatcgccaaagacacgaaagaaatcattgagaaagggttggacgagcttaagatctaatga

SEQ ID NO: 2840 - protein, 417 aa, synthetic construct
  REGION 1..417: note = Variant of acetate kinase
MHHHHHHGGSGMKVLVINSGSSSIKYQLLDMTNEKVLAKGLVERIGIDGSRIVHKVNGEKHVLEHEIKNHEIGLKLVLDLLTDEKYGVLKDLKEIDAVGHRVVHGGERFASSVKITDEVLKTIETLSFLAPLHNPLNIMGIKSSMKLLPGVPQVAVFDTAFHQKMPEKAYLYAIPYEYYEKYKIRRYGFHGTSHRYVSKRAAEIMGKPYDQLKIITVHVGNGASVAAVKNGVSVDTSMGFTPLEGLVMGTRSGDIDPAIVEFLEKEEGLSAKEVVNILNKKSGVYGLTKGFSSDMRDIEDNAIEGDPVCRLAFDVYEYRIAKYIGAYAAAMNGVDAIVFTAGVGENSPIMREEIIENYLGYLGIKIDKEANDFKGEEKIISTPDSKVIAMVIPTNEELMIAKDTKEIIEKGLDELKI

SEQ ID NO: 2841 - DNA, 1257 bp, synthetic construct
  misc_feature 1..1257: note = Variant of acetate kinase
  source 1..1257: mol_type = other DNA
atgcaccatcatcatcatcatggcggtagcggcatgaaagttctggtgattaattctggtagctcctccatcaaatatcagctcctcgatatgaccaacgaaaaggtattagcgaaaggcttggtcgagcgcattggcatcgacggttcgcgtatcgtgcataaagttaacggcgaaaaacacgtgctggaacatgagattccgaatcacgaaattggacttaaattggtcctggatcttcttacggacgaaaaatacggtgtgttgaaggatctcaaagaaatcgatgcagttgggcatcgcgtagtacatggcggcgagcgttttgccagtagcgtgaagattactgacgaagtcttaaagaccatcgagacgttgtcgttcttagctccgttacacaatccagtgaacattatgggtatcaagagcagcatgaaattattaccgggtgtgcctcaagttgccgtctttgatacagcgttccaccagaagatgccggagaaagcctatttgtacgcaatcccctatgagtactacgagaaatataaaattcgccgctatgggtttcatggaacctcacatcgttatgtgagtaaacgtgctgcggaaattatgggcaaaccgtacgatcagctcaagatcattaccgttcacgtgggtaacggcgcatcagttgcggcggtgaagaatggcgtatctgttgacacttccatgggtttcacaccacttgaaggtcttgtcatgggcacgcgcagcggcgatattgatccggccatcgtggaatttcttgagaaagaagaaggattgtcggccaaagaagtcgtcaacatcctcaacaagaaatctggtgtgtatgggctcaccaaaggctttagtagtgacatgcgtgacattgaagataatgctattgaaggtgatcctgtatgccgccttgcatttgatgtgtacgaatatcgtatcgcgaaatatattggcgcatacgctgcggccatgaacggtgttgacgcgatcgtctttaccgcaggagttggcgaaaatagcccgattatgcgcgaagaaattattgagaactacttgggctacttagggatcaagatcgataaagaagccaatgacttcaaaggtgaggagaagatcatttcaacgcccgattccaaagtgattgcgatggtagttccgaccaacgaggagctcatgatcgccaaagacacgaaagaaatcattgagaaagggttggacgagcttaagatctaatga

SEQ ID NO: 2842 - protein, 417 aa, synthetic construct
  REGION 1..417: note = Variant of acetate kinase
MHHHHHHGGSGMKVLVINSGSSSIKYQLLDMTNEKVLAKGLVERIGIDGSRIVHKVNGEKHVLEHEIPNHEIGLKLVLDLLTDEKYGVLKDLKEIDAVGHRVVHGGERFASSVKITDEVLKTIETLSFLAPLHNPVNIMGIKSSMKLLPGVPQVAVFDTAFHQKMPEKAYLYAIPYEYYEKYKIRRYGFHGTSHRYVSKRAAEIMGKPYDQLKIITVHVGNGASVAAVKNGVSVDTSMGFTPLEGLVMGTRSGDIDPAIVEFLEKEEGLSAKEVVNILNKKSGVYGLTKGFSSDMRDIEDNAIEGDPVCRLAFDVYEYRIAKYIGAYAAAMNGVDAIVFTAGVGENSPIMREEIIENYLGYLGIKIDKEANDFKGEEKIISTPDSKVIAMVVPTNEELMIAKDTKEIIEKGLDELKI

SEQ ID NO: 2843 - DNA, 1257 bp, synthetic construct
  misc_feature 1..1257: note = Variant of acetate kinase
  source 1..1257: mol_type = other DNA
atgcaccatcatcatcatcatggcggtagcggcatgaaagttctggtgattaattctggtagctcctccatcaaatatcagctcctcgatatgaccaacgaaaaggtattagcgaaaggcttggtcgagcgcattggcatcgacggttcgcgtatcgtgcataaagttaacggcgaaaaacacgtgctggaacatgagattaagaatcacgaaattggacttaaattggtcctggatcttcttacggacgaaaaatacggtgtgttgaaggatctcaaagaaatcgatgcagttgggcatcgcgtagtacatggcggcgagcgttttgccagtagcgtgaagattactgacgaagtcttaaagaccatcgagacgttgtcgttcttagctccgttacacaatccagtgaacattatgggtatcaagagcagcatgaaattattaccgggtgtgcctcaagttgccgtctttgatacagcgttccaccagaagatgccggagaaagcctatttgtacgcaatcccctatgagtactacgagaaatataaaattcgccgctatgggtttcatggaacctcacatcgttatgtgagtaaacgtgctgcggaaattctgggcaaaccgtacgatcagctcaagatcattaccgttcacgtgggtaacggcgcatcagttgcggcggtgaagaatggcgtatctgttgacacttccatgggtttcacaccacttgaaggtcttgtcatgggcacgcgcagcggcgatattgatccggccatcgtggaatttcttgagaaagaagaaggattgtcggccaaagaagtcgtcaacatcctcaacaagaaatctggtgtgtatgggctcaccaaaggctttagtagtgacatgcgtgacattgaagataatgctattgaaggtgatcctgtatgccgccttgcatttgatgtgtacgaatatcgtatcgcgaaatatattggcgcatacgctgcggccatgaacggtgttgacgcgatcgtctttaccgcaggagttggcgaaaatagcccgattatgcgcgaagaaattattgagaactacttgggctacttagggatcaagatcgataaagaagccaatgacttcaaaggtgaggagaagatcatttcaacgcccgattccaaagtgattgcgatggtagttccgaccaacgaggagctcatgatcgccaaagacacgaaagaaatcattgagaaagggttggacgagcttaagatctaatga

SEQ ID NO: 2844 - protein, 417 aa, synthetic construct
  REGION 1..417: note = Variant of acetate kinase
MHHHHHHGGSGMKVLVINSGSSSIKYQLLDMTNEKVLAKGLVERIGIDGSRIVHKVNGEKHVLEHEIKNHEIGLKLVLDLLTDEKYGVLKDLKEIDAVGHRVVHGGERFASSVKITDEVLKTIETLSFLAPLHNPVNIMGIKSSMKLLPGVPQVAVFDTAFHQKMPEKAYLYAIPYEYYEKYKIRRYGFHGTSHRYVSKRAAEILGKPYDQLKIITVHVGNGASVAAVKNGVSVDTSMGFTPLEGLVMGTRSGDIDPAIVEFLEKEEGLSAKEVVNILNKKSGVYGLTKGFSSDMRDIEDNAIEGDPVCRLAFDVYEYRIAKYIGAYAAAMNGVDAIVFTAGVGENSPIMREEIIENYLGYLGIKIDKEANDFKGEEKIISTPDSKVIAMVVPTNEELMIAKDTKEIIEKGLDELKI

SEQ ID NO: 2845 - DNA, 1257 bp, synthetic construct
  misc_feature 1..1257: note = Variant of acetate kinase
  source 1..1257: mol_type = other DNA
atgcaccatcatcatcatcatggcggtagcggcatgaaagttctggtgattaattctggtagctcctccatcaaatatcagctcctcgatatgaccaacgaaaaggtattagcgaaaggcttggtcgagcgcattggcatcgacggttcgcgtattgtgcataaagttaacggcgaaaaacacgtgctggaacatgagattaaggatcacgaaattggacttaaattggtcctggatcttcttacggacgaaaaatacggtgtgttgaaggatctcaaagaaatcgatgcagttgggcatcgcgtagtacatggcggcgagcgttttgccagtagcgtgaagattactgacgaagtcttaaagaccatcgagacgttgtcgttcttagctccgttacacaatccactgaacattatgggtatcaagagcagcatgaaattactgccgggtgtgcctcaagttgccgtctttgatacagcgttccaccagaagatgccggagaaagcctatttgtacgcaatcccctatgagtactacgagaaatataaaattcgccgctatgggtttcatggaacctcacatcgttatgtgagtaaacgtgctgcggaaattatgggcaaaccgtacgatcagctcaagatcattaccgttcacgtgggtaacggcgcatcagttgcggcggtgaagaatggcgtatctgttgacacttccatgggtttcacaccacttgaaggtcttgtcatgggcacgcgcagcggcgatattgatccggccatcgtggaatttcttgagaaagaagaaggattgtcggccaaagaagtcgtcaacatcctcaacaagaaatctggtgtgtatgggctcaccaaaggctttagtagtgacatgcgtgacattgaagataatgctattgaaggtgatcctgtatgccgccttgcattcgatgtgtacgaatatcgtatcgcgaaatatattggcgcatacgctgcggccatgaacggtgttgacgcgatcgtctttaccgcaggagttggcgaaaatagcccgattatgcgcgaagaaattattgagaactacttgggctacttagggatcaagatcgataaagaagccaatgacttcaaaggtgaggagaagatcatttcaacgcccgattccaaagtgattgcgatggtagttccgaccaacgaggagctcatgatcgccaaagacacgaaagaaatcattgagaaagggttggacgagcttaagatctaatga

SEQ ID NO: 2846 - protein, 417 aa, synthetic construct
  REGION 1..417: note = Variant of acetate kinase
MHHHHHHGGSGMKVLVINSGSSSIKYQLLDMTNEKVLAKGLVERIGIDGSRIVHKVNGEKHVLEHEIKDHEIGLKLVLDLLTDEKYGVLKDLKEIDAVGHRVVHGGERFASSVKITDEVLKTIETLSFLAPLHNPLNIMGIKSSMKLLPGVPQVAVFDTAFHQKMPEKAYLYAIPYEYYEKYKIRRYGFHGTSHRYVSKRAAEIMGKPYDQLKIITVHVGNGASVAAVKNGVSVDTSMGFTPLEGLVMGTRSGDIDPAIVEFLEKEEGLSAKEVVNILNKKSGVYGLTKGFSSDMRDIEDNAIEGDPVCRLAFDVYEYRIAKYIGAYAAAMNGVDAIVFTAGVGENSPIMREEIIENYLGYLGIKIDKEANDFKGEEKIISTPDSKVIAMVVPTNEELMIAKDTKEIIEKGLDELKI

SEQ ID NO: 2847 - DNA, 1257 bp, synthetic construct
  misc_feature 1..1257: note = Variant of acetate kinase
  source 1..1257: mol_type = other DNA
atgcaccatcatcatcatcatggcggtagcggcatgaaagttctggtgattaattctggtagctcctccatcaaatatcagctcctcgatatgaccaacgaaaaggtattagcgaaaggcttggtcgagcgcattggcatcgacggttcgcgtcttgtgcataaagttaacggcgaaaaacacgtgctggaacatgagattaagaatcacgaaattggacttaaattggtcctggatcttcttacggacgaaaaatacggtgtgttgaaggatctcaaagaaatcgatgcagttgggcatcgcgtagtacatggcggcgagcgttttgccagtagcgtgaagattactgacgaagtcttaaagaccatcgagacgttgtcgttcttagctccgttacacaatccagcgaacattatgggtatcaagagcagcatgaaattattaccgggtgtgcctcaagttgccgtctttgatacagcgttccaccagaagatgccggagaaagcctatttgtacgcaatcccctatgagtactacgagaaatataaaattcgccgctatgggtttcatggaacctcacatcgttatgtgagtaaacgtgctgcggaaattatgggcaaaccgtacgatcagctcaagatcattaccgttcacgtgggtaacggcgcatcagttgcggcggtgaagaatggcgtatctgttgacacttccatgggtttcacaccacttgaaggtcttgtcatgggcacgcgcagcggcgatattgatccggccatcgtggaatttcttgagaaagaagaaggattgtcggccaaagaagtcgtcaacatcctcaacaagaaatctggtgtgtatgggctcaccaaaggctttagtagtgacatgcgtgacattgaagataatgctattgaaggtgatcctgtatgccgccttgcattcgatgtgtacgaatatcgtatcgcgaaatatattggcgcatacgctgcggccatgaacggtgttgacgcgatcgtctttaccgcaggagttggcgaaaatagccgcattatgcgcgaagaaattattgagaactacttgggctacttagggatcaagatcgataaagaagccaatcgcttcaaaggtgaggagaagatcatttcaacgcccgattccaaagtgattgcgatggtagttccgaccaacgaggagctcatgatcgccaaagacacgaaagaaatcattgagaaagggttggacgagcttaagatctaatga

SEQ ID NO: 2848 - protein, 417 aa, synthetic construct
  REGION 1..417: note = Variant of acetate kinase
MHHHHHHGGSGMKVLVINSGSSSIKYQLLDMTNEKVLAKGLVERIGIDGSRLVHKVNGEKHVLEHEIKNHEIGLKLVLDLLTDEKYGVLKDLKEIDAVGHRVVHGGERFASSVKITDEVLKTIETLSFLAPLHNPANIMGIKSSMKLLPGVPQVAVFDTAFHQKMPEKAYLYAIPYEYYEKYKIRRYGFHGTSHRYVSKRAAEIMGKPYDQLKIITVHVGNGASVAAVKNGVSVDTSMGFTPLEGLVMGTRSGDIDPAIVEFLEKEEGLSAKEVVNILNKKSGVYGLTKGFSSDMRDIEDNAIEGDPVCRLAFDVYEYRIAKYIGAYAAAMNGVDAIVFTAGVGENSRIMREEIIENYLGYLGIKIDKEANRFKGEEKIISTPDSKVIAMVVPTNEELMIAKDTKEIIEKGLDELKI

SEQ ID NO: 2849 - DNA, 1257 bp, synthetic construct
  misc_feature 1..1257: note = Variant of acetate kinase
  source 1..1257: mol_type = other DNA
atgcaccatcatcatcatcatggcggtagcggcatgaaagttctggtgattaattctggtagctcctccatcaaatatcagctcctcgatatgaccaacgaaaaggtattagcgaaaggcttggtcgagcgcattggcatcgacggttcgcgtcttgtgcataaagttaacggcgaaaaacacgtgctggaacatgagattaagaatcacgaaattggacttaaattggtcctggatcttcttacggacgaaaaatacggtgtgttgaaggatctcaaagaaatcgatgcagttgggcatcgcgtagtacatggcggcgagcgttttgccagtagcgtgaagattactgacgaagtcttaaagaccatcgagacgttgtcgttcttagctccgttacacaatccactgaacattatgggtatcaagagcagcatgaaattactgccgggtgtgcctcaagttgccgtctttgatacagcgttccaccagaagatgccggagaaagcctatttgtacgcaatcccctatgagtactacgagaaatataaaattcgccgctatgggtttcatggaacctcacatcgttatgtgagtaaacgtgctgcggaaattatgggcaaaccgtacgatcagctcaagatcattaccgttcacgtgggtaacggcgcatcagttgcggcggtgaagaatggcgtatctgttgacacttccatgggtttcacaccacttgaaggtcttgtcatgggcacgcgcagcggcgatattgatccggccatcgtggaatttcttgagaaagaagaaggattgtcggccaaagaagtcgtcaacatcctcaacaagaaatctggtgtgtatgggctcaccaaaggctttagtagtgacatgcgtgacattgaagataatgctattgaaggtgatcctgtatgccgccttgcattcgatgtgtacgaatatcgtatcgcgaaatatattggcgcatacgctgcggccatgaacggtgttgacgcgatcgtctttaccgcaggagttggcgaaaatagcccgattatgcgcgaagaaattattgagaactacttgggctacttagggatcaagatcgataaagaagccaatcgcttcaaaggtgaggagaagatcatttcaacgcccgattccaaagtgattgcgatggtaattccgaccaacgaggagctcatgatcgccaaagacacgaaagaaatcattgagaaagggttggacgagcttaagatctaatga

SEQ ID NO: 2850 - protein, 417 aa, synthetic construct
  REGION 1..417: note = Variant of acetate kinase
MHHHHHHGGSGMKVLVINSGSSSIKYQLLDMTNEKVLAKGLVERIGIDGSRLVHKVNGEKHVLEHEIKNHEIGLKLVLDLLTDEKYGVLKDLKEIDAVGHRVVHGGERFASSVKITDEVLKTIETLSFLAPLHNPLNIMGIKSSMKLLPGVPQVAVFDTAFHQKMPEKAYLYAIPYEYYEKYKIRRYGFHGTSHRYVSKRAAEIMGKPYDQLKIITVHVGNGASVAAVKNGVSVDTSMGFTPLEGLVMGTRSGDIDPAIVEFLEKEEGLSAKEVVNILNKKSGVYGLTKGFSSDMRDIEDNAIEGDPVCRLAFDVYEYRIAKYIGAYAAAMNGVDAIVFTAGVGENSPIMREEIIENYLGYLGIKIDKEANRFKGEEKIISTPDSKVIAMVIPTNEELMIAKDTKEIIEKGLDELKI

SEQ ID NO: 2851 - DNA, 1257 bp, synthetic construct
  misc_feature 1..1257: note = Variant of acetate kinase
  source 1..1257: mol_type = other DNA
atgcaccatcatcatcatcatggcggtagcggcatgaaagttctggtgattaattctggtagctcctccatcaaatatcagctcctcgatatgaccaacgaaaaggtattagcgaaaggcttggtcgagcgcattggcatcgacggttcgcgtcttgtgcataaagttaacggcgaaaaacacgtgctggaacatgagattaagaatcacgaaattggacttaaattggtcctggatcttcttacggacgaaaaatacggtgtgttgaaggatctcaaagaaatcgatgcagttgggcatcgcgtagtacatggcggcgagcgttttgccagtagcgtgaagattactgacgaagtcttaaagaccatcgagacgttgtcgttcttagctccgttacacaatccagcgaacattatgggtatcaagagcagcatgaaattaatgccgggtgtgcctcaagttgccgtctttgatacagcgttccaccagaagatgccggagaaagcctatttgtacgcaatcccctatgagtactacgagaaatataaaattcgccgctatgggtttcatggaacctcacatcgttatgtgagtaaacgtgctgcggaaattatgggcaaaccgtacgatcagctcaagatcattaccgttcacgtgggtaacggcgcatcagttgcggcggtgaagaatggcgtatctgttgacacttccatgggtttcacaccacttgaaggtcttgtcatgggcacgcgcagcggcgatattgatccggccatcgtggaatttcttgagaaagaagaaggattgtcggccaaagaagtcgtcaacatcctcaacaagaaatctggtgtgtatgggctcaccaaaggctttagtagtgacatgcgtgacattgaagataatgctattgaaggtgatcctgtatgccgccttgcattcgatgtgtacgaatatcgtatcgcgaaatatattggcgcatacgctgcggccatgaacggtgttgacgcgatcgtctttaccgcaggagttggcgaaaatagcccgattatgcgcgaagaaattattgagaactacttgggctacttagggatcaagatcgataaagaagccaatgatttcaaaggtgaggagaagatcatttcaacgcccgattccaaagtgattgcgatggtaattccgaccaacgaggagctcatgatcgccaaagacacgaaagaaatcattgagaaagggttggacgagcttaagatctaatga

SEQ ID NO: 2852 - protein, 417 aa, synthetic construct
  REGION 1..417: note = Variant of acetate kinase
MHHHHHHGGSGMKVLVINSGSSSIKYQLLDMTNEKVLAKGLVERIGIDGSRLVHKVNGEKHVLEHEIKNHEIGLKLVLDLLTDEKYGVLKDLKEIDAVGHRVVHGGERFASSVKITDEVLKTIETLSFLAPLHNPANIMGIKSSMKLMPGVPQVAVFDTAFHQKMPEKAYLYAIPYEYYEKYKIRRYGFHGTSHRYVSKRAAEIMGKPYDQLKIITVHVGNGASVAAVKNGVSVDTSMGFTPLEGLVMGTRSGDIDPAIVEFLEKEEGLSAKEVVNILNKKSGVYGLTKGFSSDMRDIEDNAIEGDPVCRLAFDVYEYRIAKYIGAYAAAMNGVDAIVFTAGVGENSPIMREEIIENYLGYLGIKIDKEANDFKGEEKIISTPDSKVIAMVIPTNEELMIAKDTKEIIEKGLDELKI

SEQ ID NO: 2853 - DNA, 1257 bp, synthetic construct
  misc_feature 1..1257: note = Variant of acetate kinase
  source 1..1257: mol_type = other DNA
atgcaccatcatcatcatcatggcggtagcggcatgaaagttctggtgattaattctggtagctcctccatcaaatatcagctcctcgatatgaccaacgaaaaggtattagcgaaaggcttggtcgagcgcattggcatcgacggttcgcgtatcgtgcataaagttaacggcgaaaaacacgtgctggaacatgagattccgaatcacgaaattggacttaaattggtcctggatcttcttacggacgaaaaatacggtgtgttgaaggatctcaaagaaatcgatgcagttgggcatcgcgtagtacatggcggcgagcgttttgccagtagcgtgaagattactgacgaagtcttaaagaccatcgagacgttgtcgttcttagctccgttacacaatccagtgaacattatgggtatcaagagcagcatgaaattattaccgggtgtgcctcaagttgccgtctttgatacagcgttccaccagaagatgccggagaaagcctatttgtacgcaatcccctatgagtactacgagaaatataaaattcgccgctatgggtttcatggaacctcacatcgttatgtgagtaaacgtgctgcggaaattctgggcaaaccgtacgatcagctcaagatcattaccgttcacgtgggtaacggcgcatcagttgcggcggtgaagaatggcgtatctgttgacacttccatgggtttcacaccacttgaaggtcttgtcatgggcacgcgcagcggcgatattgatccggccatcgtggaatttcttgagaaagaagaaggattgtcggccaaagaagtcgtcaacatcctcaacaagaaatctggtgtgtatgggctcaccaaaggctttagtagtgacatgcgtgacattgaagataatgctattgaaggtgatcctgtatgccgccttgcattcgatgtgtacgaatatcgtatcgcgaaatatattggcgcatacgctgcggccatgaacggtgttgacgcgatcgtctttaccgcaggagttggcgaaaatagcccgattatgcgccatgaaattattgagaactacttgggctacttagggatcaagatcgataaagaagccaatgacttcaaaggtgaggagaagatcatttcaacgcccgattccaaagtgattgcgatggtagttccgaccaacgaggagctcatgatcgccaaagacacgaaagaaatcattgagaaagggttggacgagcttaagatctaatga

SEQ ID NO: 2854 - protein, 417 aa, synthetic construct
  REGION 1..417: note = Variant of acetate kinase
MHHHHHHGGSGMKVLVINSGSSSIKYQLLDMTNEKVLAKGLVERIGIDGSRIVHKVNGEKHVLEHEIPNHEIGLKLVLDLLTDEKYGVLKDLKEIDAVGHRVVHGGERFASSVKITDEVLKTIETLSFLAPLHNPVNIMGIKSSMKLLPGVPQVAVFDTAFHQKMPEKAYLYAIPYEYYEKYKIRRYGFHGTSHRYVSKRAAEILGKPYDQLKIITVHVGNGASVAAVKNGVSVDTSMGFTPLEGLVMGTRSGDIDPAIVEFLEKEEGLSAKEVVNILNKKSGVYGLTKGFSSDMRDIEDNAIEGDPVCRLAFDVYEYRIAKYIGAYAAAMNGVDAIVFTAGVGENSPIMRHEIIENYLGYLGIKIDKEANDFKGEEKIISTPDSKVIAMVVPTNEELMIAKDTKEIIEKGLDELKI

SEQ ID NO: 2855 - DNA, 1257 bp, synthetic construct
  misc_feature 1..1257: note = Variant of acetate kinase
  source 1..1257: mol_type = other DNA
atgcaccatcatcatcatcatggcggtagcggcatgaaagttctggtgattaattctggtagctcctccatcaaatatcagctcctcgatatgaccaacgaaaaggtattagcgaaaggcttggtcgagcgcattggcatcgacggttcgcgtatcgtgcataaagttaacggcgaaaaacacgtgctggaacatgagattaagaatcacgaaattggacttaaattggtcctggatcttcttacggacgaaaaatacggtgtgttgaaggatctcaaagaaatcgatgcagttgggcatcgcgtagtacatggcggcgagcgttttgccagtagcgtgaagattactgacgaagtcttaaagaccatcgagacgttgtcgttcttagctccgttacacaatccagcgaacattatgggtatcaagagcagcatgaaattattaccgggtgtgcctcaagttgccgtctttgatacagcgttccaccagaagatgccggagaaagcctatttgtacgcaatcccctatgagtactacgagaaatataaaattcgccgctatgggtttcatggaacctcacatcgttatgtgagtaaacgtgctgcggaaattctgggcaaaccgtacgatcagctcaagatcattaccgttcacgtgggtaacggcgcatcagttgcggcggtgaagaatggcgtatctgttgacacttccatgggtttcacaccacttgaaggtcttgtcatgggcacgcgcagcggcgatattgatccggccatcgtggaatttcttgagaaagaagaaggattgtcggccaaagaagtcgtcaacatcctcaacaagaaatctggtgtgtatgggctcaccaaaggctttagtagtgacatgcgtgacattgaagataatgctattgaaggtgatcctgtatgccgccttgcatttgatgtgtacgaatatcgtatcgcgaaatatattggcgcatacgctgcggccatgaacggtgttgacgcgatcgtctttaccgcaggagttggcgaaaatagcccgattatgcgccatgaaattattgagaactacttgggctacttagggatcaagatcgataaagaagccaatgacgttaaaggtgaggagaagatcatttcaacgcccgattccaaagtgattgcgatggtagttccgaccaacgaggagctcatgatcgccaaagacacgaaagaaatcgttgagaaagggttggacgagcttaagatctaatga

SEQ ID NO: 2856 - protein, 417 aa, synthetic construct
  REGION 1..417: note = Variant of acetate kinase
MHHHHHHGGSGMKVLVINSGSSSIKYQLLDMTNEKVLAKGLVERIGIDGSRIVHKVNGEKHVLEHEIKNHEIGLKLVLDLLTDEKYGVLKDLKEIDAVGHRVVHGGERFASSVKITDEVLKTIETLSFLAPLHNPANIMGIKSSMKLLPGVPQVAVFDTAFHQKMPEKAYLYAIPYEYYEKYKIRRYGFHGTSHRYVSKRAAEILGKPYDQLKIITVHVGNGASVAAVKNGVSVDTSMGFTPLEGLVMGTRSGDIDPAIVEFLEKEEGLSAKEVVNILNKKSGVYGLTKGFSSDMRDIEDNAIEGDPVCRLAFDVYEYRIAKYIGAYAAAMNGVDAIVFTAGVGENSPIMRHEIIENYLGYLGIKIDKEANDVKGEEKIISTPDSKVIAMVVPTNEELMIAKDTKEIVEKGLDELKI

SEQ ID NO: 2857 - DNA, 1257 bp, synthetic construct
  misc_feature 1..1257: note = Variant of acetate kinase
  source 1..1257: mol_type = other DNA
atgcaccatcatcatcatcatggcggtagcggcatgaaagttctggtgattaattctggtagctcctccatcaaatatcagctcctcgatatgaccaacgaaaaggtattagcgaaaggcttggtcgagcgcattggcatcgacggttcgcgtattgtgcataaagttaacggcgaaaaacacgtgctggaacatgagattaaggatcacgaaattggacttaaattggtcctggatcttcttacggacgaaaaatacggtgtgttgaaggatctcaaagaaatcgatgcagttgggcatcgcgtagtacatggcggcgagcgttttgccagtagcgtgaagattactgacgaagtcttaaagaccatcgagacgttgtcgttcttagctccgttacacaatccagcgaacattatgggtatcaagagcagcatgaaattactgccgggtgtgcctcaagttgccgtctttgatacagcgttccaccagaagatgccggagaaagcctatttgtacgcaatcccctatgagtactacgagaaatataaaattcgccgctatgggtttcatggaacctcacatcgttatgtgagtaaacgtgctgcggaaattatgggcaaaccgtacgatcagctcaagatcattaccgttcacgtgggtaacggcgcatcagttgcggcggtgaagaatggcgtatctgttgacacttccatgggtttcacaccacttgaaggtcttgtcatgggcacgcgcagcggcgatattgatccggccatcgtggaatttcttgagaaagaagaaggattgtcggccaaagaagtcgtcaacatcctcaacaagaaatctggtgtgtatgggctcaccaaaggctttagtagtgacatgcgtgacattgaagataatgctattgaaggtgatcctgtatgccgccttgcattcgatgtgtacgaatatcgtatcgcgaaatatattggcgcatacgctgcggccatgaacggtgttgacgcgatcgtctttaccgcaggagttggcgaaaatagcccgattatgcgcgaagaaattattgagaactacttgggctacttagggatcaagatcgataaagaagccaatgatttcaaaggtgaggagaagatcatttcaacgcccgattccaaagtgattgcgatggtaattccgaccaacgaggagctcatgatcgccaaagacacgaaagaaatcattgagaaagggttggacgagcttaagatctaatga

SEQ ID NO: 2858 - protein, 417 aa, synthetic construct
  REGION 1..417: note = Variant of acetate kinase
MHHHHHHGGSGMKVLVINSGSSSIKYQLLDMTNEKVLAKGLVERIGIDGSRIVHKVNGEKHVLEHEIKDHEIGLKLVLDLLTDEKYGVLKDLKEIDAVGHRVVHGGERFASSVKITDEVLKTIETLSFLAPLHNPANIMGIKSSMKLLPGVPQVAVFDTAFHQKMPEKAYLYAIPYEYYEKYKIRRYGFHGTSHRYVSKRAAEIMGKPYDQLKIITVHVGNGASVAAVKNGVSVDTSMGFTPLEGLVMGTRSGDIDPAIVEFLEKEEGLSAKEVVNILNKKSGVYGLTKGFSSDMRDIEDNAIEGDPVCRLAFDVYEYRIAKYIGAYAAAMNGVDAIVFTAGVGENSPIMREEIIENYLGYLGIKIDKEANDFKGEEKIISTPDSKVIAMVIPTNEELMIAKDTKEIIEKGLDELKI

SEQ ID NO: 2859 - DNA, 1257 bp, synthetic construct
  misc_feature 1..1257: note = Variant of acetate kinase
  source 1..1257: mol_type = other DNA
atgcaccatcatcatcatcatggcggtagcggcatgaaagttctggtgattaattctggtagctcctccatcaaatatcagctcctcgatatgaccaacgaaaaggtattagcgaaaggcttggtcgagcgcattggcatcgacggttcgcgtatcgtgcataaagttaacggcgaaaaacacgtgctggaacatgagattaaaaatcacgaaattggacttaaattggtcctggatcttcttacggacgaaaaatacggtgtgttgaaggatctcaaagaaatcgatgcagttgggcatcgcgtagtacatggcggcgagcgttttgccagtagcgtgaagattactgacgaagtcttaaagaccatcgagacgttgtcgttcttagctccgttacacaatccagtgaacattatgggtatcaagagcagcatgaaactattaccgggtgtgcctcaagttgccgtctttgatacagcgttccaccagaagatgccggagaaagcctatttgtacgcaatcccctatgagtactacgagaaatataaaattcgccgctatgggtttcatggaacctcacatcgttatgtgagtaaacgtgctgcggaaattctgggcaaaccgtacgatcagctcaagatcattaccgttcacgtgggtaacggcgcatcagttgcggcggtgaagaatggcgtatctgttgacacttccatgggtttcacaccacttgaaggtcttgtcatgggcacgcgcagcggcgatattgatccggccatcgtggaatttcttgagaaagaagaaggattgtcggccaaagaagtcgtcaacatcctcaacaagaaatctggtgtgtatgggctcaccaaaggctttagtagtgacatgcgtgacattgaagataatgctattgaaggtgatcctgtatgccgccttgcatttgatgtgtacgaatatcgtatcgcgaaatatattggcgcatacgctgcggccatgaacggtgttgacgcgatcgtctttaccgcaggagttggcgaaaatagcccgattatgcgccatgaaattattgagaactacttgggctacttagggatcaagatcgataaagaagccaatgacttcaaaggtgaggagaagatcatttcaacgcccgattccaaagtgattgcgatggtagttccgaccaacgaggagctcatgatcgccaaagacacgaaagaaatcattgagaaagggttggacgagcttaagatctaatga

SEQ ID NO: 2860 - protein, 417 aa, synthetic construct
  REGION 1..417: note = Variant of acetate kinase
MHHHHHHGGSGMKVLVINSGSSSIKYQLLDMTNEKVLAKGLVERIGIDGSRIVHKVNGEKHVLEHEIKNHEIGLKLVLDLLTDEKYGVLKDLKEIDAVGHRVVHGGERFASSVKITDEVLKTIETLSFLAPLHNPVNIMGIKSSMKLLPGVPQVAVFDTAFHQKMPEKAYLYAIPYEYYEKYKIRRYGFHGTSHRYVSKRAAEILGKPYDQLKIITVHVGNGASVAAVKNGVSVDTSMGFTPLEGLVMGTRSGDIDPAIVEFLEKEEGLSAKEVVNILNKKSGVYGLTKGFSSDMRDIEDNAIEGDPVCRLAFDVYEYRIAKYIGAYAAAMNGVDAIVFTAGVGENSPIMRHEIIENYLGYLGIKIDKEANDFKGEEKIISTPDSKVIAMVVPTNEELMIAKDTKEIIEKGLDELKI

SEQ ID NO: 2861 - DNA, 1257 bp, synthetic construct
  misc_feature 1..1257: note = Variant of acetate kinase
  source 1..1257: mol_type = other DNA
atgcaccatcatcatcatcatggcggtagcggcatgaaagttctggtgattaattctggtagctcctccatcaaatatcagctcctcgatatgaccaacgaaaaggtattagcgaaaggcttggtcgagcgcattggcatcgacggttcgcgtatcgtgcataaagttaacggcgaaaaacacgtgctggaacatgagattaagaatcacgaaattggacttaaattggtcctggatcttcttacggacgaaaaatacggtgtgttgaaggatctcaaagaaatcgatgcagttgggcatcgcgtagtacatggcggcgagcgttttgccagtagcgtgaagattactgacgaagtcttaaagaccatcgagacgttgtcgttcttagctccgttacacaatccagcgaacattatgggtatcaagagcagcatgaaattattaccgggtgtgcctcaagttgccgtctttgatacagcgttccaccagaagatgccggagaaagcctatttgtacgcaatcccctatgagtactacgagaaatataaaattcgccgctatgggtttcatggaacctcacatcgttatgtgagtaaacgtgctgcggaaattctgggcaaaccgtacgatcagctcaagatcattaccgttcacgtgggtaacggcgcatcagttgcggcggtgaagaatggcgtatctgttgacacttccatgggtttcacaccacttgaaggtcttgtcatgggcacgcgcagcggcgatattgatccggccatcgtggaatttcttgagaaagaagaaggattgtcggccaaagaagtcgtcaacatcctcaacaagaaatctggtgtgtatgggctcaccaaaggctttagtagtgacatgcgtgacattgaagataatgctattgaaggtgatcctgtatgccgccttgcatttgatgtgtacgaatatcgtatcgcgaaatatattggcgcatacgctgcggccatgaacggtgttgacgcgatcgtctttaccgcaggagttggcgaaaatagcccgattatgcgcgaagaaattattgagaactacttgggctacttagggatcaagatcgataaagaagccaatgactttaaaggtgaggagaagatcatttcaacgcccgattccaaagtgattgcgatggtagttccgaccaacgaggagctcatgatcgccaaagacacgaaagaaatcgttgagaaagggttggacgagcttaagatctaatga

SEQ ID NO: 2862 - protein, 417 aa, synthetic construct
  REGION 1..417: note = Variant of acetate kinase
MHHHHHHGGSGMKVLVINSGSSSIKYQLLDMTNEKVLAKGLVERIGIDGSRIVHKVNGEKHVLEHEIKNHEIGLKLVLDLLTDEKYGVLKDLKEIDAVGHRVVHGGERFASSVKITDEVLKTIETLSFLAPLHNPANIMGIKSSMKLLPGVPQVAVFDTAFHQKMPEKAYLYAIPYEYYEKYKIRRYGFHGTSHRYVSKRAAEILGKPYDQLKIITVHVGNGASVAAVKNGVSVDTSMGFTPLEGLVMGTRSGDIDPAIVEFLEKEEGLSAKEVVNILNKKSGVYGLTKGFSSDMRDIEDNAIEGDPVCRLAFDVYEYRIAKYIGAYAAAMNGVDAIVFTAGVGENSPIMREEIIENYLGYLGIKIDKEANDFKGEEKIISTPDSKVIAMVVPTNEELMIAKDTKEIVEKGLDELKI

SEQ ID NO: 2863 - DNA, 1257 bp, synthetic construct
  misc_feature 1..1257: note = Variant of acetate kinase
  source 1..1257: mol_type = other DNA
atgcaccatcatcatcatcatggcggtagcggcatgaaagttctggtgattaattctggtagctcctccatcaaatatcagctcctcgatatgaccaacgaaaaggtattagcgaaaggcttggtcgagcgcattggcatcgacggttcgcgtatcgtgcataaagttaacggcgaaaaacacgtgctggaacatgagattaaaaatcacgaaattggacttaaattggtcctggatcttcttacggacgaaaaatacggtgtgttgaaggatctcaaagaaatcgatgcagttgggcatcgcgtagtacatggcggcgagcgttttgccagtagcgtgaagattactgacgaagtcttaaagaccatcgagacgttgtcgttcttagctccgttacacaatccagcgaacattatgggtatcaagagcagcatgaaattattaccgggtgtgcctcaagttgccgtctttgatacagcgttccaccagaagatgccggagaaagcctatttgtacgcaatcccctatgagtactacgagaaatataaaattcgccgctatgggtttcatggaacctcacatcgttatgtgagtaaacgtgctgcggaaattctgggcaaaccgtacgatcagctcaagatcattaccgttcacgtgggtaacggcgcatcagttgcggcggtgaagaatggcgtatctgttgacacttccatgggtttcacaccacttgaaggtcttgtcatgggcacgcgcagcggcgatattgatccggccatcgtggaatttcttgagaaagaagaaggattgtcggccaaagaagtcgtcaacatcctcaacaagaaatctggtgtgtatgggctcaccaaaggctttagtagtgacatgcgtgacattgaagataatgctattgaaggtgatcctgtatgccgccttgcatttgatgtgtacgaatatcgtatcgcgaaatatattggcgcatacgctgcggccatgaacggtgttgacgcgatcgtctttaccgcaggagttggcgaaaatagcccgattatgcgccatgaaattattgagaactacttgggctacttagggatcaagatcgataaagaagccaatgacttcaaaggtgaggagaagatcatttcaacgcccgattccaaagtgattgcgatggtagttccgaccaacgaggagctcatgatcgccaaagacacgaaagaaatcgttgagaaagggttggacgagcttaagatctaatga

SEQ ID NO: 2864 - protein, 417 aa, synthetic construct
  REGION 1..417: note = Variant of acetate kinase
MHHHHHHGGSGMKVLVINSGSSSIKYQLLDMTNEKVLAKGLVERIGIDGSRIVHKVNGEKHVLEHEIKNHEIGLKLVLDLLTDEKYGVLKDLKEIDAVGHRVVHGGERFASSVKITDEVLKTIETLSFLAPLHNPANIMGIKSSMKLLPGVPQVAVFDTAFHQKMPEKAYLYAIPYEYYEKYKIRRYGFHGTSHRYVSKRAAEILGKPYDQLKIITVHVGNGASVAAVKNGVSVDTSMGFTPLEGLVMGTRSGDIDPAIVEFLEKEEGLSAKEVVNILNKKSGVYGLTKGFSSDMRDIEDNAIEGDPVCRLAFDVYEYRIAKYIGAYAAAMNGVDAIVFTAGVGENSPIMRHEIIENYLGYLGIKIDKEANDFKGEEKIISTPDSKVIAMVVPTNEELMIAKDTKEIVEKGLDELKI

SEQ ID NO: 2865 - DNA, 1257 bp, synthetic construct
  misc_feature 1..1257: note = Variant of acetate kinase
  source 1..1257: mol_type = other DNA
atgcaccatcatcatcatcatggcggtagcggcatgaaagttctggtgattaattctggtagctcctccatcaaatatcagctcctcgatatgaccaacgaaaaggtattagcgaaaggcttggtcgagcgcattggcatcgacggttcgcgtatcgtgcataaagttaacggcgaaaaacacgtgctggaacatgagattaagaatcacgaaattggacttaaattggtcctggatcttcttacggacgaaaaatacggtgtgttgaaggatctcaaagaaatcgatgcagttgggcatcgcgtagtacatggcggcgagcgttttgccagtagcgtgaagattactgacgaagtcttaaagaccatcgagacgttgtcgttcttagctccgttacacaatccagcgaacattatgggtatcaagagcagcatgaaactgttaccgggtgtgcctcaagttgccgtctttgatacagcgttccaccagaagatgccggagaaagcctatttgtacgcaatcccctatgagtactacgagaaatataaaattcgccgctatgggtttcatggaacctcacatcgttatgtgagtaaacgtgctgcggaaattatgggcaaaccgtacgatcagctcaagatcattaccgttcacgtgggtaacggcgcatcagttgcggcggtgaagaatggcgtatctgttgacacttccatgggtttcacaccacttgaaggtcttgtcatgggcacgcgcagcggcgatattgatccggccatcgtggaatttcttgagaaagaagaaggattgtcggccaaagaagtcgtcaacatcctcaacaagaaatctggtgtgtatgggctcaccaaaggctttagtagtgacatgcgtgacattgaagataatgctattgaaggtgatcctgtatgccgccttgcattcgatgtgtacgaatatcgtatcgcgaaatatattggcgcatacgctgcggccatgaacggtgttgacgcgatcgtctttaccgcaggagttggcgaaaatagcccgattatgcgcgaagaaattattgagaactacttgggctacttagggatcaagatcgataaagaagccaatgacttcaaaggtgaggagaagatcatttcaacgcccgattccaaagtgattgcgatggtagttccgaccaacgaggagctcatgatcgccaaagacacgaaagaaatcgttgagaaagggttggacgagcttaagatctaatga

SEQ ID NO: 2866 - protein, 417 aa, synthetic construct
  REGION 1..417: note = Variant of acetate kinase
MHHHHHHGGSGMKVLVINSGSSSIKYQLLDMTNEKVLAKGLVERIGIDGSRIVHKVNGEKHVLEHEIKNHEIGLKLVLDLLTDEKYGVLKDLKEIDAVGHRVVHGGERFASSVKITDEVLKTIETLSFLAPLHNPANIMGIKSSMKLLPGVPQVAVFDTAFHQKMPEKAYLYAIPYEYYEKYKIRRYGFHGTSHRYVSKRAAEIMGKPYDQLKIITVHVGNGASVAAVKNGVSVDTSMGFTPLEGLVMGTRSGDIDPAIVEFLEKEEGLSAKEVVNILNKKSGVYGLTKGFSSDMRDIEDNAIEGDPVCRLAFDVYEYRIAKYIGAYAAAMNGVDAIVFTAGVGENSPIMREEIIENYLGYLGIKIDKEANDFKGEEKIISTPDSKVIAMVVPTNEELMIAKDTKEIVEKGLDELKI

SEQ ID NO: 2867 - DNA, 1257 bp, synthetic construct
  misc_feature 1..1257: note = Variant of acetate kinase
  source 1..1257: mol_type = other DNA
atgcaccatcatcatcatcatggcggtagcggcatgaaagttctggtgattaattctggtagctcctccatcaaatatcagctcctcgatatgaccaacgaaaaggtattagcgaaaggcttggtcgagcgcattggcatcgacggttcgcgtcttgtgcataaagttaacggcgaaaaacacgtgctggaacatgagattaagaatcacgaaattggacttaaattggtcctggatcttcttacggacgaaaaatacggtgtgttgaaggatctcaaagaaatcgatgcagttgggcatcgcgtagtacatggcggcgagcgttttgccagtagcgtgaagattactgacgaagtcttaaagaccatcgagacgttgtcgttcttagctccgttacacaatccactgaacattatgggtatcaagagcagcatgaaattattaccgggtgtgcctcaagttgccgtctttgatacagcgttccaccagaagatgccggagaaagcctatttgtacgcaatcccctatgagtactacgagaaatataaaattcgccgctatgggtttcatggaacctcacatcgttatgtgagtaaacgtgctgcggaaattatgggcaaaccgtacgatcagctcaagatcattaccgttcacgtgggtaacggcgcatcagttgcggcggtgaagaatggcgtatctgttgacacttccatgggtttcacaccacttgaaggtcttgtcatgggcacgcgcagcggcgatattgatccggccatcgtggaatttcttgagaaagaagaaggattgtcggccaaagaagtcgtcaacatcctcaacaagaaatctggtgtgtatgggctcaccaaaggctttagtagtgacatgcgtgacattgaagataatgctattgaaggtgatcctgtatgccgccttgcattcgatgtgtacgaatatcgtatcgcgaaatatattggcgcatacgctgcggccatgaacggtgttgacgcgatcgtctttaccgcaggagttggcgaaaatagccgcattatgcgcgaagaaattattgagaactacttgggctacttagggatcaagatcgataaagaagccaatgacttcaaaggtgaggagaagatcatttcaacgcccgattccaaagtgattgcgatggtagttccgaccaacgaggagctcatgatcgccaaagacacgaaagaaatcattgagaaagggttggacgagcttaagatctaatga

SEQ ID NO: 2868 - protein, 417 aa, synthetic construct
  REGION 1..417: note = Variant of acetate kinase
MHHHHHHGGSGMKVLVINSGSSSIKYQLLDMTNEKVLAKGLVERIGIDGSRLVHKVNGEKHVLEHEIKNHEIGLKLVLDLLTDEKYGVLKDLKEIDAVGHRVVHGGERFASSVKITDEVLKTIETLSFLAPLHNPLNIMGIKSSMKLLPGVPQVAVFDTAFHQKMPEKAYLYAIPYEYYEKYKIRRYGFHGTSHRYVSKRAAEIMGKPYDQLKIITVHVGNGASVAAVKNGVSVDTSMGFTPLEGLVMGTRSGDIDPAIVEFLEKEEGLSAKEVVNILNKKSGVYGLTKGFSSDMRDIEDNAIEGDPVCRLAFDVYEYRIAKYIGAYAAAMNGVDAIVFTAGVGENSRIMREEIIENYLGYLGIKIDKEANDFKGEEKIISTPDSKVIAMVVPTNEELMIAKDTKEIIEKGLDELKI

SEQ ID NO: 2869 - DNA, 1257 bp, synthetic construct
  misc_feature 1..1257: note = Variant of acetate kinase
  source 1..1257: mol_type = other DNA
atgcaccatcatcatcatcatggcggtagcggcatgaaagttctggtgattaattctggtagctcctccatcaaatatcagctcctcgatatgaccaacgaaaaggtattagcgaaaggcttggtcgagcgcattggcatcgacggttcgcgtcttgtgcataaagttaacggcgaaaaacacgtgctggaacatgagattaaggatcacgaaattggacttaaattggtcctggatcttcttacggacgaaaaatacggtgtgttgaaggatctcaaagaaatcgatgcagttgggcatcgcgtagtacatggcggcgagcgttttgccagtagcgtgaagattactgacgaagtcttaaagaccatcgagacgttgtcgttcttagctccgttacacaatccagcgaacattatgggtatcaagagcagcatgaaattactgccgggtgtgcctcaagttgccgtctttgatacagcgttccaccagaagatgccggagaaagcctatttgtacgcaatcccctatgagtactacgagaaatataaaattcgccgctatgggtttcatggaacctcacatcgttatgtgagtaaacgtgctgcggaaattatgggcaaaccgtacgatcagctcaagatcattaccgttcacgtgggtaacggcgcatcagttgcggcggtgaagaatggcgtatctgttgacacttccatgggtttcacaccacttgaaggtcttgtcatgggcacgcgcagcggcgatattgatccggccatcgtggaatttcttgagaaagaagaaggattgtcggccaaagaagtcgtcaacatcctcaacaagaaatctggtgtgtatgggctcaccaaaggctttagtagtgacatgcgtgacattgaagataatgctattgaaggtgatcctgtatgccgccttgcattcgatgtgtacgaatatcgtatcgcgaaatatattggcgcatacgctgcggccatgaacggtgttgacgcgatcgtctttaccgcaggagttggcgaaaatagcccgattatgcgcgaagaaattattgagaactacttgggctacttagggatcaagatcgataaagaagccaatgatttcaaaggtgaggagaagatcatttcaacgcccgattccaaagtgattgcgatggtagttccgaccaacgaggagctcatgatcgccaaagacacgaaagaaatcattgagaaagggttggacgagcttaagatctaatga

SEQ ID NO: 2870 - protein, 417 aa, synthetic construct
  REGION 1..417: note = Variant of acetate kinase
MHHHHHHGGSGMKVLVINSGSSSIKYQLLDMTNEKVLAKGLVERIGIDGSRLVHKVNGEKHVLEHEIKDHEIGLKLVLDLLTDEKYGVLKDLKEIDAVGHRVVHGGERFASSVKITDEVLKTIETLSFLAPLHNPANIMGIKSSMKLLPGVPQVAVFDTAFHQKMPEKAYLYAIPYEYYEKYKIRRYGFHGTSHRYVSKRAAEIMGKPYDQLKIITVHVGNGASVAAVKNGVSVDTSMGFTPLEGLVMGTRSGDIDPAIVEFLEKEEGLSAKEVVNILNKKSGVYGLTKGFSSDMRDIEDNAIEGDPVCRLAFDVYEYRIAKYIGAYAAAMNGVDAIVFTAGVGENSPIMREEIIENYLGYLGIKIDKEANDFKGEEKIISTPDSKVIAMVVPTNEELMIAKDTKEIIEKGLDELKI

SEQ ID NO: 2871 - DNA, 1257 bp, synthetic construct
  misc_feature 1..1257: note = Variant of acetate kinase
  source 1..1257: mol_type = other DNA
atgcaccatcatcatcatcatggcggtagcggcatgaaagttctggtgattaattctggtagctcctccatcaaatatcagctcctcgatatgaccaacgaaaaggtattagcgaaaggcttggtcgagcgcattggcatcgacggttcgcgtcttgtgcataaagttaacggcgaaaaacacgtgctggaacatgagattaaggatcacgaaattggacttaaattggtcctggatcttcttacggacgaaaaatacggtgtgttgaaggatctcaaagaaatcgatgcagttgggcatcgcgtagtacatggcggcgagcgttttgccagtagcgtgaagattactgacgaagtcttaaagaccatcgagacgttgtcgttcttagctccgttacacaatccagcgaacattatgggtatcaagagcagcatgaaattattaccgggtgtgcctcaagttgccgtctttgatacagcgttccaccagaagatgccggagaaagcctatttgtacgcaatcccctatgagtactacgagaaatataaaattcgccgctatgggtttcatggaacctcacatcgttatgtgagtaaacgtgctgcggaaattatgggcaaaccgtacgatcagctcaagatcattaccgttcacgtgggtaacggcgcatcagttgcggcggtgaagaatggcgtatctgttgacacttccatgggtttcacaccacttgaaggtcttgtcatgggcacgcgcagcggcgatattgatccggccatcgtggaatttcttgagaaagaagaaggattgtcggccaaagaagtcgtcaacatcctcaacaagaaatctggtgtgtatgggctcaccaaaggctttagtagtgacatgcgtgacattgaagataatgctattgaaggtgatcctgtatgccgccttgcattcgatgtgtacgaatatcgtatcgcgaaatatattggcgcatacgctgcggccatgaacggtgttgacgcgatcgtctttaccgcaggagttggcgaaaatagcccgattatgcgcgaagaaattattgagaactacttgggctacttagggatcaagatcgataaagaagccaatgatttcaaaggtgaggagaagatcatttcaacgcccgattccaaagtgattgcgatggtaattccgaccaacgaggagctcatgatcgccaaagacacgaaagaaatcattgagaaagggttggacgagcttaagatctaatga

SEQ ID NO: 2872 - protein, 417 aa, synthetic construct
  REGION 1..417: note = Variant of acetate kinase
MHHHHHHGGSGMKVLVINSGSSSIKYQLLDMTNEKVLAKGLVERIGIDGSRLVHKVNGEKHVLEHEIKDHEIGLKLVLDLLTDEKYGVLKDLKEIDAVGHRVVHGGERFASSVKITDEVLKTIETLSFLAPLHNPANIMGIKSSMKLLPGVPQVAVFDTAFHQKMPEKAYLYAIPYEYYEKYKIRRYGFHGTSHRYVSKRAAEIMGKPYDQLKIITVHVGNGASVAAVKNGVSVDTSMGFTPLEGLVMGTRSGDIDPAIVEFLEKEEGLSAKEVVNILNKKSGVYGLTKGFSSDMRDIEDNAIEGDPVCRLAFDVYEYRIAKYIGAYAAAMNGVDAIVFTAGVGENSPIMREEIIENYLGYLGIKIDKEANDFKGEEKIISTPDSKVIAMVIPTNEELMIAKDTKEIIEKGLDELKI

SEQ ID NO: 2873 - DNA, 1257 bp, synthetic construct
  misc_feature 1..1257: note = Variant of acetate kinase
  source 1..1257: mol_type = other DNA
atgcaccatcatcatcatcatggcggtagcggcatgaaagttctggtgattaattctggtagctcctccatcaaatatcagctcctcgatatgaccaacgaaaaggtattagcgaaaggcttggtcgagcgcattggcatcgacggttcgcgtattgtgcataaagttaacggcgaaaaacacgtgctggaacatgagattaaggatcacgaaattggacttaaattggtcctggatcttcttacggacgaaaaatacggtgtgttgaaggatctcaaagaaatcgatgcagttgggcatcgcgtagtacatggcggcgagcgttttgccagtagcgtgaagattactgacgaagtcttaaagaccatcgagacgttgtcgttcttagctccgttacacaatccactgaacattatgggtatcaagagcagcatgaaattactgccgggtgtgcctcaagttgccgtctttgatacagcgttccaccagaagatgccggagaaagcctatttgtacgcaatcccctatgagtactacgagaaatataaaattcgccgctatgggtttcatggaacctcacatcgttatgtgagtaaacgtgctgcggaaattatgggcaaaccgtacgatcagctcaagatcattaccgttcacgtgggtaacggcgcatcagttgcggcggtgaagaatggcgtatctgttgacacttccatgggtttcacaccacttgaaggtcttgtcatgggcacgcgcagcggcgatattgatccggccatcgtggaatttcttgagaaagaagaaggattgtcggccaaagaagtcgtcaacatcctcaacaagaaatctggtgtgtatgggctcaccaaaggctttagtagtgacatgcgtgacattgaagataatgctattgaaggtgatcctgtatgccgccttgcattcgatgtgtacgaatatcgtatcgcgaaatatattggcgcatacgctgcggccatgaacggtgttgacgcgatcgtctttaccgcaggagttggcgaaaatagccgcattatgcgcgaagaaattattgagaactacttgggctacttagggatcaagatcgataaagaagccaatcgcttcaaaggtgaggagaagatcatttcaacgcccgattccaaagtgattgcgatggtagttccgaccaacgaggagctcatgatcgccaaagacacgaaagaaatcattgagaaagggttggacgagcttaagatctaatga

SEQ ID NO: 2874 - protein, 417 aa, synthetic construct
  REGION 1..417: note = Variant of acetate kinase
MHHHHHHGGSGMKVLVINSGSSSIKYQLLDMTNEKVLAKGLVERIGIDGSRIVHKVNGEKHVLEHEIKDHEIGLKLVLDLLTDEKYGVLKDLKEIDAVGHRVVHGGERFASSVKITDEVLKTIETLSFLAPLHNPLNIMGIKSSMKLLPGVPQVAVFDTAFHQKMPEKAYLYAIPYEYYEKYKIRRYGFHGTSHRYVSKRAAEIMGKPYDQLKIITVHVGNGASVAAVKNGVSVDTSMGFTPLEGLVMGTRSGDIDPAIVEFLEKEEGLSAKEVVNILNKKSGVYGLTKGFSSDMRDIEDNAIEGDPVCRLAFDVYEYRIAKYIGAYAAAMNGVDAIVFTAGVGENSRIMREEIIENYLGYLGIKIDKEANRFKGEEKIISTPDSKVIAMVVPTNEELMIAKDTKEIIEKGLDELKI

SEQ ID NO: 2875 - DNA, 1257 bp, synthetic construct
  misc_feature 1..1257: note = Variant of acetate kinase
  source 1..1257: mol_type = other DNA
atgcaccatcatcatcatcatggcggtagcggcatgaaagttctggtgattaattctggtagctcctccatcaaatatcagctcctcgatatgaccaacgaaaaggtattagcgaaaggcttggtcgagcgcattggcatcgacggttcgcgtattgtgcataaagttaacggcgaaaaacacgtgctggaacatgagattaaggatcacgaaattggacttaaattggtcctggatcttcttacggacgaaaaatacggtgtgttgaaggatctcaaagaaatcgatgcagttgggcatcgcgtagtacatggcggcgagcgttttgccagtagcgtgaagattactgacgaagtcttaaagaccatcgagacgttgtcgttcttagctccgttacacaatccactgaacattatgggtatcaagagcagcatgaaattaatgccgggtgtgcctcaagttgccgtctttgatacagcgttccaccagaagatgccggagaaagcctatttgtacgcaatcccctatgagtactacgagaaatataaaattcgccgctatgggtttcatggaacctcacatcgttatgtgagtaaacgtgctgcggaaattatgggcaaaccgtacgatcagctcaagatcattaccgttcacgtgggtaacggcgcatcagttgcggcggtgaagaatggcgtatctgttgacacttccatgggtttcacaccacttgaaggtcttgtcatgggcacgcgcagcggcgatattgatccggccatcgtggaatttcttgagaaagaagaaggattgtcggccaaagaagtcgtcaacatcctcaacaagaaatctggtgtgtatgggctcaccaaaggctttagtagtgacatgcgtgacattgaagataatgctattgaaggtgatcctgtatgccgccttgcattcgatgtgtacgaatatcgtatcgcgaaatatattggcgcatacgctgcggccatgaacggtgttgacgcgatcgtctttaccgcaggagttggcgaaaatagcccgattatgcgcgaagaaattattgagaactacttgggctacttagggatcaagatcgataaagaagccaatgatttcaaaggtgaggagaagatcatttcaacgcccgattccaaagtgattgcgatggtaattccgaccaacgaggagctcatgatcgccaaagacacgaaagaaatcattgagaaagggttggacgagcttaagatctaatga

SEQ ID NO: 2876 - protein, 417 aa, synthetic construct
  REGION 1..417: note = Variant of acetate kinase
MHHHHHHGGSGMKVLVINSGSSSIKYQLLDMTNEKVLAKGLVERIGIDGSRIVHKVNGEKHVLEHEIKDHEIGLKLVLDLLTDEKYGVLKDLKEIDAVGHRVVHGGERFASSVKITDEVLKTIETLSFLAPLHNPLNIMGIKSSMKLMPGVPQVAVFDTAFHQKMPEKAYLYAIPYEYYEKYKIRRYGFHGTSHRYVSKRAAEIMGKPYDQLKIITVHVGNGASVAAVKNGVSVDTSMGFTPLEGLVMGTRSGDIDPAIVEFLEKEEGLSAKEVVNILNKKSGVYGLTKGFSSDMRDIEDNAIEGDPVCRLAFDVYEYRIAKYIGAYAAAMNGVDAIVFTAGVGENSPIMREEIIENYLGYLGIKIDKEANDFKGEEKIISTPDSKVIAMVIPTNEELMIAKDTKEIIEKGLDELKI

SEQ ID NO: 2877 - DNA, 1257 bp, synthetic construct
  misc_feature 1..1257: note = Variant of acetate kinase
  source 1..1257: mol_type = other DNA
atgcaccatcatcatcatcatggcggtagcggcatgaaagttctggtgattaattctggtagctcctccatcaaatatcagctcctcgatatgaccaacgaaaaggtattagcgaaaggcttggtcgagcgcattggcatcgacggttcgcgtatcgtgcataaagttaacggcgaaaaacacgtgctggaacatgagattccgaatcacgaaattggacttaaattggtcctggatcttcttacggacgaaaaatacggtgtgttgaaggatctcaaagaaatcgatgcagttgggcatcgcgtagtacatggcggcgagcgttttgccagtagcgtgaagattactgacgaagtcttaaagaccatcgagacgttgtcgttcttagctccgttacacaatccagcgaacattatgggtatcaagagcagcatgaaattattaccgggtgtgcctcaagttgccgtctttgatacagcgttccaccagaagatgccggagaaagcctatttgtacgcaatcccctatgagtactacgagaaatataaaattcgccgctatgggtttcatggaacctcacatcgttatgtgagtaaacgtgctgcggaaattatgggcaaaccgtacgatcagctcaagatcattaccgttcacgtgggtaacggcgcatcagttgcggcggtgaagaatggcgtatctgttgacacttccatgggtttcacaccacttgaaggtcttgtcatgggcacgcgcagcggcgatattgatccggccatcgtggaatttcttgagaaagaagaaggattgtcggccaaagaagtcgtcaacatcctcaacaagaaatctggtgtgtatgggctcaccaaaggctttagtagtgacatgcgtgacattgaagataatgctattgaaggtgatcctgtatgccgccttgcatttgatgtgtacgaatatcgtatcgcgaaatatattggcgcatacgctgcggccatgaacggtgttgacgcgatcgtctttaccgcaggagttggcgaaaatagcccgattatgcgccatgaaattattgagaactacttgggctacttagggatcaagatcgataaagaagccaatgacgttaaaggtgaggagaagatcatttcaacgcccgattccaaagtgattgcgatggtagttccgaccaacgaggagctcatgatcgccaaagacacgaaagaaatcgttgagaaagggttggacgagcttaagatctaatga

SEQ ID NO: 2878 - protein, 417 aa, synthetic construct
  REGION 1..417: note = Variant of acetate kinase
MHHHHHHGGSGMKVLVINSGSSSIKYQLLDMTNEKVLAKGLVERIGIDGSRIVHKVNGEKHVLEHEIPNHEIGLKLVLDLLTDEKYGVLKDLKEIDAVGHRVVHGGERFASSVKITDEVLKTIETLSFLAPLHNPANIMGIKSSMKLLPGVPQVAVFDTAFHQKMPEKAYLYAIPYEYYEKYKIRRYGFHGTSHRYVSKRAAEIMGKPYDQLKIITVHVGNGASVAAVKNGVSVDTSMGFTPLEGLVMGTRSGDIDPAIVEFLEKEEGLSAKEVVNILNKKSGVYGLTKGFSSDMRDIEDNAIEGDPVCRLAFDVYEYRIAKYIGAYAAAMNGVDAIVFTAGVGENSPIMRHEIIENYLGYLGIKIDKEANDVKGEEKIISTPDSKVIAMVVPTNEELMIAKDTKEIVEKGLDELKI

SEQ ID NO: 2879 - DNA, 1257 bp, synthetic construct
  misc_feature 1..1257: note = Variant of acetate kinase
  source 1..1257: mol_type = other DNA
atgcaccatcatcatcatcatggcggtagcggcatgaaagttctggtgattaattctggtagctcctccatcaaatatcagctcctcgatatgaccaacgaaaaggtattagcgaaaggcttggtcgagcgcattggcatcgacggttcgcgtatcgtgcataaagttaacggcgaaaaacacgtgctggaacatgagattccgaatcacgaaattggacttaaattggtcctggatcttcttacggacgaaaaatacggtgtgttgaaggatctcaaagaaatcgatgcagttgggcatcgcgtagtacatggcggcgagcgttttgccagtagcgtgaagattactgacgaagtcttaaagaccatcgagacgttgtcgttcttagctccgttacacaatccagcgaacattatgggtatcaagagcagcatgaaattattaccgggtgtgcctcaagttgccgtctttgatacagcgttccaccagaagatgccggagaaagcctatttgtacgcaatcccctatgagtactacgagaaatataaaattcgccgctatgggtttcatggaacctcacatcgttatgtgagtaaacgtgctgcggaaattatgggcaaaccgtacgatcagctcaagatcattaccgttcacgtgggtaacggcgcatcagttgcggcggtgaagaatggcgtatctgttgacacttccatgggtttcacaccacttgaaggtcttgtcatgggcacgcgcagcggcgatattgatccggccatcgtggaatttcttgagaaagaagaaggattgtcggccaaagaagtcgtcaacatcctcaacaagaaatctggtgtgtatgggctcaccaaaggctttagtagtgacatgcgtgacattgaagataatgctattgaaggtgatcctgtatgccgccttgcatttgatgtgtacgaatatcgtatcgcgaaatatattggcgcatacgctgcggccatgaacggtgttgacgcgatcgtctttaccgcaggagttggcgaaaatagcccgattatgcgccatgaaattattgagaactacttgggctacttagggatcaagatcgataaagaagccaatgacttcaaaggtgaggagaagatcatttcaacgcccgattccaaagtgattgcgatggtagttccgaccaacgaggagctcatgatcgccaaagacacgaaagaaatcattgagaaagggttggacgagcttaagatctaatga

SEQ ID NO: 2880 - protein, 417 aa, synthetic construct
  REGION 1..417: note = Variant of acetate kinase
MHHHHHHGGSGMKVLVINSGSSSIKYQLLDMTNEKVLAKGLVERIGIDGSRIVHKVNGEKHVLEHEIPNHEIGLKLVLDLLTDEKYGVLKDLKEIDAVGHRVVHGGERFASSVKITDEVLKTIETLSFLAPLHNPANIMGIKSSMKLLPGVPQVAVFDTAFHQKMPEKAYLYAIPYEYYEKYKIRRYGFHGTSHRYVSKRAAEIMGKPYDQLKIITVHVGNGASVAAVKNGVSVDTSMGFTPLEGLVMGTRSGDIDPAIVEFLEKEEGLSAKEVVNILNKKSGVYGLTKGFSSDMRDIEDNAIEGDPVCRLAFDVYEYRIAKYIGAYAAAMNGVDAIVFTAGVGENSPIMRHEIIENYLGYLGIKIDKEANDFKGEEKIISTPDSKVIAMVVPTNEELMIAKDTKEIIEKGLDELKI

SEQ ID NO: 2881 - DNA, 1257 bp, synthetic construct
  misc_feature 1..1257: note = Variant of acetate kinase
  source 1..1257: mol_type = other DNA
atgcaccatcatcatcatcatggcggtagcggcatgaaagttctggtgattaattctggtagctcctccatcaaatatcagctcctcgatatgaccaacgaaaaggtattagcgaaaggcttggtcgagcgcattggcatcgacggttcgcgtcttgtgcataaagttaacggcgaaaaacacgtgctggaacatgagattaagaatcacgaaattggacttaaattggtcctggatcttcttacggacgaaaaatacggtgtgttgaaggatctcaaagaaatcgatgcagttgggcatcgcgtagtacatggcggcgagcgttttgccagtagcgtgaagattactgacgaagtcttaaagaccatcgagacgttgtcgttcttagctccgttacacaatccagcgaacattatgggtatcaagagcagcatgaaattattaccgggtgtgcctcaagttgccgtctttgatacagcgttccaccagaagatgccggagaaagcctatttgtacgcaatcccctatgagtactacgagaaatataaaattcgccgctatgggtttcatggaacctcacatcgttatgtgagtaaacgtgctgcggaaattatgggcaaaccgtacgatcagctcaagatcattaccgttcacgtgggtaacggcgcatcagttgcggcggtgaagaatggcgtatctgttgacacttccatgggtttcacaccacttgaaggtcttgtcatgggcacgcgcagcggcgatattgatccggccatcgtggaatttcttgagaaagaagaaggattgtcggccaaagaagtcgtcaacatcctcaacaagaaatctggtgtgtatgggctcaccaaaggctttagtagtgacatgcgtgacattgaagataatgctattgaaggtgatcctgtatgccgccttgcattcgatgtgtacgaatatcgtatcgcgaaatatattggcgcatacgctgcggccatgaacggtgttgacgcgatcgtctttaccgcaggagttggcgaaaatagcccgattatgcgcgaagaaattattgagaactacttgggctacttagggatcaagatcgataaagaagccaatgatttcaaaggtgaggagaagatcatttcaacgcccgattccaaagtgattgcgatggtaattccgaccaacgaggagctcatgatcgccaaagacacgaaagaaatcattgagaaagggttggacgagcttaagatctaatga

SEQ ID NO: 2882 - protein, 417 aa, synthetic construct
  REGION 1..417: note = Variant of acetate kinase
MHHHHHHGGSGMKVLVINSGSSSIKYQLLDMTNEKVLAKGLVERIGIDGSRLVHKVNGEKHVLEHEIKNHEIGLKLVLDLLTDEKYGVLKDLKEIDAVGHRVVHGGERFASSVKITDEVLKTIETLSFLAPLHNPANIMGIKSSMKLLPGVPQVAVFDTAFHQKMPEKAYLYAIPYEYYEKYKIRRYGFHGTSHRYVSKRAAEIMGKPYDQLKIITVHVGNGASVAAVKNGVSVDTSMGFTPLEGLVMGTRSGDIDPAIVEFLEKEEGLSAKEVVNILNKKSGVYGLTKGFSSDMRDIEDNAIEGDPVCRLAFDVYEYRIAKYIGAYAAAMNGVDAIVFTAGVGENSPIMREEIIENYLGYLGIKIDKEANDFKGEEKIISTPDSKVIAMVIPTNEELMIAKDTKEIIEKGLDELKI

SEQ ID NO: 2883 - DNA, 1257 bp, synthetic construct
  misc_feature 1..1257: note = Variant of acetate kinase
  source 1..1257: mol_type = other DNA
atgcaccatcatcatcatcatggcggtagcggcatgaaagttctggtgattaattctggtagctcctccatcaaatatcagctcctcgatatgaccaacgaaaaggtattagcgaaaggcttggtcgagcgcattggcatcgacggttcgcgtatcgtgcataaagttaacggcgaaaaacacgtgctggaacatgagattaaaaatcacgaaattggacttaaattggtcctggatcttcttacggacgaaaaatacggtgtgttgaaggatctcaaagaaatcgatgcagttgggcatcgcgtagtacatggcggcgagcgttttgccagtagcgtgaagattactgacgaagtcttaaagaccatcgagacgttgtcgttcttagctccgttacacaatccagtgaacattatgggtatcaagagcagcatgaaagtgttaccgggtgtgcctcaagttgccgtctttgatacagcgttccaccagaagatgccggagaaagcctatttgtacgcaatcccctatgagtactacgagaaatataaaattcgccgctatgggtttcatggaacctcacatcgttatgtgagtaaacgtgctgcggaaattctgggcaaaccgtacgatcagctcaagatcattaccgttcacgtgggtaacggcgcatcagttgcggcggtgaagaatggcgtatctgttgacacttccatgggtttcacaccacttgaaggtcttgtcatgggcacgcgcagcggcgatattgatccggccatcgtggaatttcttgagaaagaagaaggattgtcggccaaagaagtcgtcaacatcctcaacaagaaatctggtgtgtatgggctcaccaaaggctttagtagtgacatgcgtgacattgaagataatgctattgaaggtgatcctgtatgccgccttgcatttgatgtgtacgaatatcgtatcgcgaaatatattggcgcatacgctgcggccatgaacggtgttgacgcgatcgtctttaccgcaggagttggcgaaaatagcccgattatgcgcgaagaaattattgagaactacttgggctacttagggatcaagatcgataaagaagccaatgacgttaaaggtgaggagaagatcatttcaacgcccgattccaaagtgattgcgatggtagttccgaccaacgaggagctcatgatcgccaaagacacgaaagaaatcgttgagaaagggttggacgagcttaagatctaatga

SEQ ID NO: 2884 - protein, 417 aa, synthetic construct
  REGION 1..417: note = Variant of acetate kinase
MHHHHHHGGSGMKVLVINSGSSSIKYQLLDMTNEKVLAKGLVERIGIDGSRIVHKVNGEKHVLEHEIKNHEIGLKLVLDLLTDEKYGVLKDLKEIDAVGHRVVHGGERFASSVKITDEVLKTIETLSFLAPLHNPVNIMGIKSSMKVLPGVPQVAVFDTAFHQKMPEKAYLYAIPYEYYEKYKIRRYGFHGTSHRYVSKRAAEILGKPYDQLKIITVHVGNGASVAAVKNGVSVDTSMGFTPLEGLVMGTRSGDIDPAIVEFLEKEEGLSAKEVVNILNKKSGVYGLTKGFSSDMRDIEDNAIEGDPVCRLAFDVYEYRIAKYIGAYAAAMNGVDAIVFTAGVGENSPIMREEIIENYLGYLGIKIDKEANDVKGEEKIISTPDSKVIAMVVPTNEELMIAKDTKEIVEKGLDELKI

SEQ ID NO: 2885 - DNA, 1257 bp, synthetic construct
  misc_feature 1..1257: note = Variant of acetate kinase
  source 1..1257: mol_type = other DNA
atgcaccatcatcatcatcatggcggtagcggcatgaaagttctggtgattaattctggtagctcctccatcaaatatcagctcctcgatatgaccaacgaaaaggtattagcgaaaggcttggtcgagcgcattggcatcgacggttcgcgtatcgtgcataaagttaacggcgaaaaacacgtgctggaacatgagattaagaatcacgaaattggacttaaattggtcctggatcttcttacggacgaaaaatacggtgtgttgaaggatctcaaagaaatcgatgcagttgggcatcgcgtagtacatggcggcgagcgttttgccagtagcgtgaagattactgacgaagtcttaaagaccatcgagacgttgtcgttcttagctccgttacacaatccagcgaacattatgggtatcaagagcagcatgaaattattaccgggtgtgcctcaagttgccgtctttgatacagcgttccaccagaagatgccggagaaagcctatttgtacgcaatcccctatgagtactacgagaaatataaaattcgccgctatgggtttcatggaacctcacatcgttatgtgagtaaacgtgctgcggaaattctgggcaaaccgtacgatcagctcaagatcattaccgttcacgtgggtaacggcgcatcagttgcggcggtgaagaatggcgtatctgttgacacttccatgggtttcacaccacttgaaggtcttgtcatgggcacgcgcagcggcgatattgatccggccatcgtggaatttcttgagaaagaagaaggattgtcggccaaagaagtcgtcaacatcctcaacaagaaatctggtgtgtatgggctcaccaaaggctttagtagtgacatgcgtgacattgaagataatgctattgaaggtgatcctgtatgccgccttgcatttgatgtgtacgaatatcgtatcgcgaaatatattggcgcatacgctgcggccatgaacggtgttgacgcgatcgtctttaccgcaggagttggcgaaaatagcccgattatgcgccatgaaattattgagaactacttgggctacttagggatcaagatcgataaagaagccaatgacttcaaaggtgaggagaagatcatttcaacgcccgattccaaagtgattgcgatggtagttccgaccaacgaggagctcatgatcgccaaagacacgaaagaaatcattgagaaagggttggacgagcttaagatctaatga

SEQ ID NO: 2886 - protein, 417 aa, synthetic construct
  REGION 1..417: note = Variant of acetate kinase
MHHHHHHGGSGMKVLVINSGSSSIKYQLLDMTNEKVLAKGLVERIGIDGSRIVHKVNGEKHVLEHEIKNHEIGLKLVLDLLTDEKYGVLKDLKEIDAVGHRVVHGGERFASSVKITDEVLKTIETLSFLAPLHNPANIMGIKSSMKLLPGVPQVAVFDTAFHQKMPEKAYLYAIPYEYYEKYKIRRYGFHGTSHRYVSKRAAEILGKPYDQLKIITVHVGNGASVAAVKNGVSVDTSMGFTPLEGLVMGTRSGDIDPAIVEFLEKEEGLSAKEVVNILNKKSGVYGLTKGFSSDMRDIEDNAIEGDPVCRLAFDVYEYRIAKYIGAYAAAMNGVDAIVFTAGVGENSPIMRHEIIENYLGYLGIKIDKEANDFKGEEKIISTPDSKVIAMVVPTNEELMIAKDTKEIIEKGLDELKI

SEQ ID NO: 2887 - DNA, 1257 bp, synthetic construct
  misc_feature 1..1257: note = Variant of acetate kinase
  source 1..1257: mol_type = other DNA
atgcaccatcatcatcatcatggcggtagcggcatgaaagttctggtgattaattctggtagctcctccatcaaatatcagctcctcgatatgaccaacgaaaaggtattagcgaaaggcttggtcgagcgcattggcatcgacggttcgcgtatcgtgcataaagttaacggcgaaaaacacgtgctggaacatgagattaagaatcacgaaattggacttaaattggtcctggatcttcttacggacgaaaaatacggtgtgttgaaggatctcaaagaaatcgatgcagttgggcatcgcgtagtacatggcggcgagcgttttgccagtagcgtgaagattactgacgaagtcttaaagaccatcgagacgttgtcgttcttagctccgttacacaatccagcgaacattatgggtatcaagagcagcatgaaagtgttaccgggtgtgcctcaagttgccgtctttgatacagcgttccaccagaagatgccggagaaagcctatttgtacgcaatcccctatgagtactacgagaaatataaaattcgccgctatgggtttcatggaacctcacatcgttatgtgagtaaacgtgctgcggaaattatgggcaaaccgtacgatcagctcaagatcattaccgttcacgtgggtaacggcgcatcagttgcggcggtgaagaatggcgtatctgttgacacttccatgggtttcacaccacttgaaggtcttgtcatgggcacgcgcagcggcgatattgatccggccatcgtggaatttcttgagaaagaagaaggattgtcggccaaagaagtcgtcaacatcctcaacaagaaatctggtgtgtatgggctcaccaaaggctttagtagtgacatgcgtgacattgtggataatgctattgaaggtgatcctgtatgccgccttgcattagatgtgtacgaatatcgtatcgcgaaatatattggcgcatacgctgcggccatgaacggtgttgacgcgatcgtctttaccgcaggagttggcgaaaatagcccgattatgcgcgaagaaattattgagaactacttgggctacttagggatcaagatcgataaagaagccaatgacttcaaaggtgaggagaagatcatttcaacgcccgattccaaagtgattgcgatggtagttccgaccaacgaggagctcatgatcgccaaagacacgaaagaaatcattgagaaagggttggacgagcttaagatctaatga

SEQ ID NO: 2888 - protein, 417 aa, synthetic construct
  REGION 1..417: note = Variant of acetate kinase
MHHHHHHGGSGMKVLVINSGSSSIKYQLLDMTNEKVLAKGLVERIGIDGSRIVHKVNGEKHVLEHEIKNHEIGLKLVLDLLTDEKYGVLKDLKEIDAVGHRVVHGGERFASSVKITDEVLKTIETLSFLAPLHNPANIMGIKSSMKVLPGVPQVAVFDTAFHQKMPEKAYLYAIPYEYYEKYKIRRYGFHGTSHRYVSKRAAEIMGKPYDQLKIITVHVGNGASVAAVKNGVSVDTSMGFTPLEGLVMGTRSGDIDPAIVEFLEKEEGLSAKEVVNILNKKSGVYGLTKGFSSDMRDIVDNAIEGDPVCRLALDVYEYRIAKYIGAYAAAMNGVDAIVFTAGVGENSPIMREEIIENYLGYLGIKIDKEANDFKGEEKIISTPDSKVIAMVVPTNEELMIAKDTKEIIEKGLDELKI

SEQ ID NO: 2889 - DNA, 1257 bp, synthetic construct
  misc_feature 1..1257: note = Variant of acetate kinase
  source 1..1257: mol_type = other DNA
atgcaccatcatcatcatcatggcggtagcggcatgaaagttctggtgattaattctggtagctcctccatcaaatatcagctcctcgatatgaccaacgaaaaggtattagcgaaaggcttggtcgagcgcattggcatcgacggttcgcgtatcgtgcataaagttaacggcgaaaaacacgtgctggaacatgagattaagaatcacgaaattggacttaaattggtcctggatcttcttacggacgaaaaatacggtgtgttgaaggatctcaaagaaatcgatgcagttgggcatcgcgtagtacatggcggcgagcgttttgccagtagcgtgaagattactgacgaagtcttaaagaccatcgagacgttgtcgttcttagctccgttacacaatccagcgaacattatgggtatcaagagcagcatgaaagtgttaccgggtgtgcctcaagttgccgtctttgatacagcgttccaccagaagatgccggagaaagcctatttgtacgcaatcccctatgagtactacgagaaatataaaattcgccgctatgggtttcatggaacctcacatcgttatgtgagtaaacgtgctgcggaaattatgggcaaaccgtacgatcagctcaagatcattaccgttcacgtgggtaacggcgcatcagttgcggcggtgaagaatggcgtatctgttgacacttccatgggtttcacaccacttgaaggtcttgtcatgggcacgcgcagcggcgatattgatccggccatcgtggaatttcttgagaaagaagaaggattgtcggccaaagaagtcgtcaacatcctcaacaagaaatctggtgtgtatgggctcaccaaaggctttagtagtgacatgcgtgacatttttgataatgctattgaaggtgatcctgtatgccgccttgcattagatgtgtacgaatatcgtatcgcgaaatatattggcgcatacgctgcggccatgaacggtgttgacgcgatcgtctttaccgcaggagttggcgaaaatagcccgattatgcgcgaagaaattattgagaactacttgggctacttagggatcaagatcgataaagaagccaatgacttcaaaggtgaggagaagatcatttcaacgcccgattccaaagtgattgcgatggtagttccgaccaacgaggagctcatgatcgccaaagacacgaaagaaatcattgagaaagggttggacgagcttaagatctaatga

SEQ ID NO: 2890 - protein, 417 aa, synthetic construct
  REGION 1..417: note = Variant of acetate kinase
MHHHHHHGGSGMKVLVINSGSSSIKYQLLDMTNEKVLAKGLVERIGIDGSRIVHKVNGEKHVLEHEIKNHEIGLKLVLDLLTDEKYGVLKDLKEIDAVGHRVVHGGERFASSVKITDEVLKTIETLSFLAPLHNPANIMGIKSSMKVLPGVPQVAVFDTAFHQKMPEKAYLYAIPYEYYEKYKIRRYGFHGTSHRYVSKRAAEIMGKPYDQLKIITVHVGNGASVAAVKNGVSVDTSMGFTPLEGLVMGTRSGDIDPAIVEFLEKEEGLSAKEVVNILNKKSGVYGLTKGFSSDMRDIFDNAIEGDPVCRLALDVYEYRIAKYIGAYAAAMNGVDAIVFTAGVGENSPIMREEIIENYLGYLGIKIDKEANDFKGEEKIISTPDSKVIAMVVPTNEELMIAKDTKEIIEKGLDELKI

SEQ ID NO: 2891 - DNA, 1257 bp, synthetic construct
  misc_feature 1..1257: note = Variant of acetate kinase
  source 1..1257: mol_type = other DNA
atgcaccatcatcatcatcatggcggtagcggcatgaaagttctggtgattaattctggtagctcctccatcaaatatcagctcctcgatatgaccaacgaaaaggtattagcgaaaggcttggtcgagcgcattggcatcgacggttcgcgtatcgtgcataaagttaacggcgaaaaacacgtgctggaacatgagattaagaatcacgaaattggacttaaattggtcctggatcttcttacggacgaaaaatacggtgtgttgaaggatctcaaagaaatcgatgcagttgggcatcgcgtagtacatggcggcgagcgttttgccagtagcgtgaagattactgacgaagtcttaaagaccatcgagacgttgtcgttcttagctccgttacacaatccagcgaacattatgggtatcaagagcagcatgaaagtgttaccgggtgtgcctcaagttgccgtctttgatacagcgttccaccagaagatgccggagaaagcctatttgtacgcaatcccctatgagtactacgagaaatataaaattcgccgctatgggtttcatggaacctcacatcgttatgtgagtaaacgtgctgcggaaattatgggcaaaccgtacgatcagctcaagatcattaccgttcacgtgggtaacggcgcatcagttgcggcggtgaagaatggcgtatctgttgacacttccatgggtttcacaccacttgaaggtcttgtcatgggcacgcgcagcggcgatattgatccggccatcgtggaatttcttgagaaagaagaaggattgtcggccaaagaagtcgtcaacatcctcaacaagaaatctggtgtgtatgggctcaccaaaggctttagtagtgacatgcgtgacattcttgataatgctattgaaggtgatcctgtatgccgccttgcattagatgtgtacgaatatcgtatcgcgaaatatattggcgcatacgctgcggccatgaacggtgttgacgcgatcgtctttaccgcaggagttggcgaaaatagcccgattatgcgcgaagaaattattgagaactacttgggctacttagggatcaagatcgataaagaagccaatgacttcaaaggtgaggagaagatcatttcaacgcccgattccaaagtgattgcgatggtagttccgaccaacgaggagctcatgatcgccaaagacacgaaagaaatcattgagaaagggttggacgagcttaagatctaatga

SEQ ID NO: 2892 - protein, 417 aa, synthetic construct
  REGION 1..417: note = Variant of acetate kinase
MHHHHHHGGSGMKVLVINSGSSSIKYQLLDMTNEKVLAKGLVERIGIDGSRIVHKVNGEKHVLEHEIKNHEIGLKLVLDLLTDEKYGVLKDLKEIDAVGHRVVHGGERFASSVKITDEVLKTIETLSFLAPLHNPANIMGIKSSMKVLPGVPQVAVFDTAFHQKMPEKAYLYAIPYEYYEKYKIRRYGFHGTSHRYVSKRAAEIMGKPYDQLKIITVHVGNGASVAAVKNGVSVDTSMGFTPLEGLVMGTRSGDIDPAIVEFLEKEEGLSAKEVVNILNKKSGVYGLTKGFSSDMRDILDNAIEGDPVCRLALDVYEYRIAKYIGAYAAAMNGVDAIVFTAGVGENSPIMREEIIENYLGYLGIKIDKEANDFKGEEKIISTPDSKVIAMVVPTNEELMIAKDTKEIIEKGLDELKI

SEQ ID NO: 2893 - DNA, 1257 bp, synthetic construct
  misc_feature 1..1257: note = Variant of acetate kinase
  source 1..1257: mol_type = other DNA
atgcaccatcatcatcatcatggcggtagcggcatgaaagttctggtgattaattctggtagctcctccatcaaatatcagctcctcgatatgaccaacgaaaaggtattagcgaaaggcttggtcgagcgcattggcatcgacggttcgcgtatcgtgcataaagttaacggcgaaaaacacgtgctggaacatgagattaagaatcacgaaattggacttaaattggtcctggatcttcttacggacgaaaaatacggtgtgttgaaggatctcaaagaaatcgatgcagttgggcatcgcgtagtacatggcggcgagcgttttgccagtagcgtgaagattactgacgaagtcttaaagaccatcgagacgttgtcgttcttagctccgttacacaatccagcgaacattatgggtatcaagagcagcatgaaagtgttaccgggtgtgcctcaagttgccgtctttgatacagcgttccaccagaagatgccggagaaagcctatttgtacgcaatcccctatgagtactacgagaaatataaaattcgccgctatgggtttcatggaacctcacatcgttatgtgagtaaacgtgctgcggaaattatgggcaaaccgtacgatcagctcaagatcattaccgttcacgtgggtaacggcgcatcagttgcggcggtgaagaatggcgtatctgttgacacttccatgggtttcacaccacttgaaggtcttgtcatgggcacgcgcagcggcgatattgatccggccatcgtggaatttcttgagaaagaagaaggattgtcggccaaagaagtcgtcaacatcctcaacaagaaatctggtgtgtatgggctcaccaaaggctttagtagtgacatgcgtgacattacggataatgctattgaaggtgatcctgtatgccgccttgcattagatgtgtacgaatatcgtatcgcgaaatatattggcgcatacgctgcggccatgaacggtgttgacgcgatcgtctttaccgcaggagttggcgaaaatagcccgattatgcgcgaagaaattattgagaactacttgggctacttagggatcaagatcgataaagaagccaatgacttcaaaggtgaggagaagatcatttcaacgcccgattccaaagtgattgcgatggtagttccgaccaacgaggagctcatgatcgccaaagacacgaaagaaatcattgagaaagggttggacgagcttaagatctaatga

SEQ ID NO: 2894 - protein, 417 aa, synthetic construct
  REGION 1..417: note = Variant of acetate kinase
MHHHHHHGGSGMKVLVINSGSSSIKYQLLDMTNEKVLAKGLVERIGIDGSRIVHKVNGEKHVLEHEIKNHEIGLKLVLDLLTDEKYGVLKDLKEIDAVGHRVVHGGERFASSVKITDEVLKTIETLSFLAPLHNPANIMGIKSSMKVLPGVPQVAVFDTAFHQKMPEKAYLYAIPYEYYEKYKIRRYGFHGTSHRYVSKRAAEIMGKPYDQLKIITVHVGNGASVAAVKNGVSVDTSMGFTPLEGLVMGTRSGDIDPAIVEFLEKEEGLSAKEVVNILNKKSGVYGLTKGFSSDMRDITDNAIEGDPVCRLALDVYEYRIAKYIGAYAAAMNGVDAIVFTAGVGENSPIMREEIIENYLGYLGIKIDKEANDFKGEEKIISTPDSKVIAMVVPTNEELMIAKDTKEIIEKGLDELKI

SEQ ID NO: 2895 - DNA, 1257 bp, synthetic construct
  misc_feature 1..1257: note = Variant of acetate kinase
  source 1..1257: mol_type = other DNA
atgcaccatcatcatcatcatggcggtagcggcatgaaagttctggtgattaattctggtagctcctccatcaaatatcagctcctcgatatgaccaacgaaaaggtattagcgaaaggcttggtcgagcgcattggcatcgacggttcgcgtatcgtgcataaagttaacggcgaaaaacacgtgctggaacatgagattaagaatcacgaaattggacttaaattggtcctggatcttcttacggacgaaaaatacggtgtgttgaaggatctcaaagaaatcgatgcagttgggcatcgcgtagtacatggcggcgagcgttttgccagtagcgtgaagattactgacgaagtcttaaagaccatcgagacgttgtcgttcttagctccgttacacaatccagcgaacattatgggtatcaagagcagcatgaaagtgttaccgggtgtgcctcaagttgccgtctttgatacagcgttccaccagaagatgccggagaaagcctatttgtacgcaatcccctatgagtactacgagaaatataaaattcgccgctatgggtttcatggaacctcacatcgttatgtgagtaaacgtgctgcggaaattatgggcaaaccgtacgatcagctcaagatcattaccgttcacgtgggtaacggcgcatcagttgcggcggtgaagaatggcgtatctgttgacacttccatgggtttcacaccacttgaaggtcttgtcatgggcacgcgcagcggcgatattgatccggccatcgtggaatttcttgagaaagaagaaggattgtcggccaaagaagtcgtcaacatcctcaacaagaaatctggtgtgtatgggctcaccaaaggctttagtagtgacatgcgtgacattatggataatgctattgaaggtgatcctgtatgccgccttgcattagatgtgtacgaatatcgtatcgcgaaatatattggcgcatacgctgcggccatgaacggtgttgacgcgatcgtctttaccgcaggagttggcgaaaatagcccgattatgcgcgaagaaattattgagaactacttgggctacttagggatcaagatcgataaagaagccaatgacttcaaaggtgaggagaagatcatttcaacgcccgattccaaagtgattgcgatggtagttccgaccaacgaggagctcatgatcgccaaagacacgaaagaaatcattgagaaagggttggacgagcttaagatctaatga

SEQ ID NO: 2896 - protein, 417 aa, synthetic construct
  REGION 1..417: note = Variant of acetate kinase
MHHHHHHGGSGMKVLVINSGSSSIKYQLLDMTNEKVLAKGLVERIGIDGSRIVHKVNGEKHVLEHEIKNHEIGLKLVLDLLTDEKYGVLKDLKEIDAVGHRVVHGGERFASSVKITDEVLKTIETLSFLAPLHNPANIMGIKSSMKVLPGVPQVAVFDTAFHQKMPEKAYLYAIPYEYYEKYKIRRYGFHGTSHRYVSKRAAEIMGKPYDQLKIITVHVGNGASVAAVKNGVSVDTSMGFTPLEGLVMGTRSGDIDPAIVEFLEKEEGLSAKEVVNILNKKSGVYGLTKGFSSDMRDIMDNAIEGDPVCRLALDVYEYRIAKYIGAYAAAMNGVDAIVFTAGVGENSPIMREEIIENYLGYLGIKIDKEANDFKGEEKIISTPDSKVIAMVVPTNEELMIAKDTKEIIEKGLDELKI

SEQ ID NO: 2897 - DNA, 1257 bp, synthetic construct
  misc_feature 1..1257: note = Variant of acetate kinase
  source 1..1257: mol_type = other DNA
atgcaccatcatcatcatcatggcggtagcggcatgaaagttctggtgattaattctggtagctcctccatcaaatatcagctcctcgatatgaccaacgaaaaggtattagcgaaaggcttggtcgagcgcattggcatcgacggttcgcgtatcgtgcataaagttaacggcgaaaaacacgtgctggaacatgagattaagaatcacgaaattggacttaaattggtcctggatcttcttacggacgaaaaatacggtgtgttgaaggatctcaaagaaatcgatgcagttgggcatcgcgtagtacatggcggcgagcgttttgccagtagcgtgaagattactgacgaagtcttaaagaccatcgagacgttgtcgttcttagctccgttacacaatccagcgaacattatgggtatcaagagcagcatgaaagtgttaccgggtgtgcctcaagttgccgtctttgatacagcgttccaccagaagatgccggagaaagcctatttgtacgcaatcccctatgagtactacgagaaatataaaattcgccgctatgggtttcatggaacctcacatcgttatgtgagtaaacgtgctgcggaaattatgggcaaaccgtacgatcagctcaagatcattaccgttcacgtgggtaacggcgcatcagttgcggcggtgaagaatggcgtatctgttgacacttccatgggtttcacaccacttgaaggtcttgtcatgggcacgcgcagcggcgatattgatccggccatcgtggaatttcttgagaaagaagaaggattgtcggccaaagaagtcgtcaacatcctcaacaagaaatctggtgtgtatgggctcaccaaaggctttagtagtgacatgcgtgacatttctgataatgctattgaaggtgatcctgtatgccgccttgcattagatgtgtacgaatatcgtatcgcgaaatatattggcgcatacgctgcggccatgaacggtgttgacgcgatcgtctttaccgcaggagttggcgaaaatagcccgattatgcgcgaagaaattattgagaactacttgggctacttagggatcaagatcgataaagaagccaatgacttcaaaggtgaggagaagatcatttcaacgcccgattccaaagtgattgcgatggtagttccgaccaacgaggagctcatgatcgccaaagacacgaaagaaatcattgagaaagggttggacgagcttaagatctaatga

SEQ ID NO: 2898 - protein, 417 aa, synthetic construct
  REGION 1..417: note = Variant of acetate kinase
MHHHHHHGGSGMKVLVINSGSSSIKYQLLDMTNEKVLAKGLVERIGIDGSRIVHKVNGEKHVLEHEIKNHEIGLKLVLDLLTDEKYGVLKDLKEIDAVGHRVVHGGERFASSVKITDEVLKTIETLSFLAPLHNPANIMGIKSSMKVLPGVPQVAVFDTAFHQKMPEKAYLYAIPYEYYEKYKIRRYGFHGTSHRYVSKRAAEIMGKPYDQLKIITVHVGNGASVAAVKNGVSVDTSMGFTPLEGLVMGTRSGDIDPAIVEFLEKEEGLSAKEVVNILNKKSGVYGLTKGFSSDMRDISDNAIEGDPVCRLALDVYEYRIAKYIGAYAAAMNGVDAIVFTAGVGENSPIMREEIIENYLGYLGIKIDKEANDFKGEEKIISTPDSKVIAMVVPTNEELMIAKDTKEIIEKGLDELKI

SEQ ID NO: 2899 - DNA, 1257 bp, synthetic construct
  misc_feature 1..1257: note = Variant of acetate kinase
  source 1..1257: mol_type = other DNA
atgcaccatcatcatcatcatggcggtagcggcatgaaagttctggtgattaattctggtagctcctccatcaaatatcagctcctcgatatgaccaacgaaaaggtattagcgaaaggcttggtcgagcgcattggcatcgacggttcgcgtatcgtgcataaagttaacggcgaaaaacacgtgctggaacatgagattaagaatcacgaaattggacttaaattggtcctggatcttcttacggacgaaaaatacggtgtgttgaaggatctcaaagaaatcgatgcagttgggcatcgcgtagtacatggcggcgagcgttttgccagtagcgtgaagattactgacgaagtcttaaagaccatcgagacgttgtcgttcttagctccgttacacaatccagcgaacattatgggtatcaagagcagcatgaaagtgttaccgggtgtgcctcaagttgccgtctttgatacagcgttccaccagaagatgccggagaaagcctatttgtacgcaatcccctatgagtactacgagaaatataaaattcgccgctatgggtttcatggaacctcacatcgttatgtgagtaaacgtgctgcggaaattatgggcaaaccgtacgatcagctcaagatcattaccgttcacgtgggtaacggcgcatcagttgcggcggtgaagaatggcgtatctgttgacacttccatgggtttcacaccacttgaaggtcttgtcatgggcacgcgcagcggcgatattgatccggccatcgtggaatttcttgagaaagaagaaggattgtcggccaaagaagtcgtcaacatcctcaacaagaaatctggtgtgtatgggctcaccaaaggctttagtagtgacatgcgtgacattgaaaggaatgctattgaaggtgatcctgtatgccgccttgcattagatgtgtacgaatatcgtatcgcgaaatatattggcgcatacgctgcggccatgaacggtgttgacgcgatcgtctttaccgcaggagttggcgaaaatagcccgattatgcgcgaagaaattattgagaactacttgggctacttagggatcaagatcgataaagaagccaatgacttcaaaggtgaggagaagatcatttcaacgcccgattccaaagtgattgcgatggtagttccgaccaacgaggagctcatgatcgccaaagacacgaaagaaatcattgagaaagggttggacgagcttaagatctaatga

SEQ ID NO: 2900 - protein, 417 aa, synthetic construct
  REGION 1..417: note = Variant of acetate kinase
MHHHHHHGGSGMKVLVINSGSSSIKYQLLDMTNEKVLAKGLVERIGIDGSRIVHKVNGEKHVLEHEIKNHEIGLKLVLDLLTDEKYGVLKDLKEIDAVGHRVVHGGERFASSVKITDEVLKTIETLSFLAPLHNPANIMGIKSSMKVLPGVPQVAVFDTAFHQKMPEKAYLYAIPYEYYEKYKIRRYGFHGTSHRYVSKRAAEIMGKPYDQLKIITVHVGNGASVAAVKNGVSVDTSMGFTPLEGLVMGTRSGDIDPAIVEFLEKEEGLSAKEVVNILNKKSGVYGLTKGFSSDMRDIERNAIEGDPVCRLALDVYEYRIAKYIGAYAAAMNGVDAIVFTAGVGENSPIMREEIIENYLGYLGIKIDKEANDFKGEEKIISTPDSKVIAMVVPTNEELMIAKDTKEIIEKGLDELKI

SEQ ID NO: 2901 - DNA, 1257 bp, synthetic construct
  misc_feature 1..1257: note = Variant of acetate kinase
  source 1..1257: mol_type = other DNA
atgcaccatcatcatcatcatggcggtagcggcatgaaagttctggtgattaattctggtagctcctccatcaaatatcagctcctcgatatgaccaacgaaaaggtattagcgaaaggcttggtcgagcgcattggcatcgacggttcgcgtatcgtgcataaagttaacggcgaaaaacacgtgctggaacatgagattaagaatcacgaaattggacttaaattggtcctggatcttcttacggacgaaaaatacggtgtgttgaaggatctcaaagaaatcgatgcagttgggcatcgcgtagtacatggcggcgagcgttttgccagtagcgtgaagattactgacgaagtcttaaagaccatcgagacgttgtcgttcttagctccgttacacaatccagcgaacattatgggtatcaagagcagcatgaaagtgttaccgggtgtgcctcaagttgccgtctttgatacagcgttccaccagaagatgccggagaaagcctatttgtacgcaatcccctatgagtactacgagaaatataaaattcgccgctatgggtttcatggaacctcacatcgttatgtgagtaaacgtgctgcggaaattatgggcaaaccgtacgatcagctcaagatcattaccgttcacgtgggtaacggcgcatcagttgcggcggtgaagaatggcgtatctgttgacacttccatgggtttcacaccacttgaaggtcttgtcatgggcacgcgcagcggcgatattgatccggccatcgtggaatttcttgagaaagaagaaggattgtcggccaaagaagtcgtcaacatcctcaacaagaaatctggtgtgtatgggctcaccaaaggctttagtagtgacatgcgtgacattgaattgaatgctattgaaggtgatcctgtatgccgccttgcattagatgtgtacgaatatcgtatcgcgaaatatattggcgcatacgctgcggccatgaacggtgttgacgcgatcgtctttaccgcaggagttggcgaaaatagcccgattatgcgcgaagaaattattgagaactacttgggctacttagggatcaagatcgataaagaagccaatgacttcaaaggtgaggagaagatcatttcaacgcccgattccaaagtgattgcgatggtagttccgaccaacgaggagctcatgatcgccaaagacacgaaagaaatcattgagaaagggttggacgagcttaagatctaatga

SEQ ID NO: 2902 - protein, 417 aa, synthetic construct
  REGION 1..417: note = Variant of acetate kinase
MHHHHHHGGSGMKVLVINSGSSSIKYQLLDMTNEKVLAKGLVERIGIDGSRIVHKVNGEKHVLEHEIKNHEIGLKLVLDLLTDEKYGVLKDLKEIDAVGHRVVHGGERFASSVKITDEVLKTIETLSFLAPLHNPANIMGIKSSMKVLPGVPQVAVFDTAFHQKMPEKAYLYAIPYEYYEKYKIRRYGFHGTSHRYVSKRAAEIMGKPYDQLKIITVHVGNGASVAAVKNGVSVDTSMGFTPLEGLVMGTRSGDIDPAIVEFLEKEEGLSAKEVVNILNKKSGVYGLTKGFSSDMRDIELNAIEGDPVCRLALDVYEYRIAKYIGAYAAAMNGVDAIVFTAGVGENSPIMREEIIENYLGYLGIKIDKEANDFKGEEKIISTPDSKVIAMVVPTNEELMIAKDTKEIIEKGLDELKI

SEQ ID NO: 2903 - DNA, 1257 bp, synthetic construct
  misc_feature 1..1257: note = Variant of acetate kinase
  source 1..1257: mol_type = other DNA
atgcaccatcatcatcatcatggcggtagcggcatgaaagttctggtgattaattctggtagctcctccatcaaatatcagctcctcgatatgaccaacgaaaaggtattagcgaaaggcttggtcgagcgcattggcatcgacggttcgcgtatcgtgcataaagttaacggcgaaaaacacgtgctggaacatgagattaagaatcacgaaattggacttaaattggtcctggatcttcttacggacgaaaaatacggtgtgttgaaggatctcaaagaaatcgatgcagttgggcatcgcgtagtacatggcggcgagcgttttgccagtagcgtgaagattactgacgaagtcttaaagaccatcgagacgttgtcgttcttagctccgttacacaatccagcgaacattatgggtatcaagagcagcatgaaagtgttaccgggtgtgcctcaagttgccgtctttgatacagcgttccaccagaagatgccggagaaagcctatttgtacgcaatcccctatgagtactacgagaaatataaaattcgccgctatgggtttcatggaacctcacatcgttatgtgagtaaacgtgctgcggaaattatgggcaaaccgtacgatcagctcaagatcattaccgttcacgtgggtaacggcgcatcagttgcggcggtgaagaatggcgtatctgttgacacttccatgggtttcacaccacttgaaggtcttgtcatgggcacgcgcagcggcgatattgatccggccatcgtggaatttcttgagaaagaagaaggattgtcggccaaagaagtcgtcaacatcctcaacaagaaatctggtgtgtatgggctcaccaaaggctttagtagtgacatgcgtgacattgaagataatgctaaggaaggtgatcctgtatgccgccttgcattagatgtgtacgaatatcgtatcgcgaaatatattggcgcatacgctgcggccatgaacggtgttgacgcgatcgtctttaccgcaggagttggcgaaaatagcccgattatgcgcgaagaaattattgagaactacttgggctacttagggatcaagatcgataaagaagccaatgacttcaaaggtgaggagaagatcatttcaacgcccgattccaaagtgattgcgatggtagttccgaccaacgaggagctcatgatcgccaaagacacgaaagaaatcattgagaaagggttggacgagcttaagatctaatga

SEQ ID NO: 2904 - protein, 417 aa, synthetic construct
  REGION 1..417: note = Variant of acetate kinase
MHHHHHHGGSGMKVLVINSGSSSIKYQLLDMTNEKVLAKGLVERIGIDGSRIVHKVNGEKHVLEHEIKNHEIGLKLVLDLLTDEKYGVLKDLKEIDAVGHRVVHGGERFASSVKITDEVLKTIETLSFLAPLHNPANIMGIKSSMKVLPGVPQVAVFDTAFHQKMPEKAYLYAIPYEYYEKYKIRRYGFHGTSHRYVSKRAAEIMGKPYDQLKIITVHVGNGASVAAVKNGVSVDTSMGFTPLEGLVMGTRSGDIDPAIVEFLEKEEGLSAKEVVNILNKKSGVYGLTKGFSSDMRDIEDNAKEGDPVCRLALDVYEYRIAKYIGAYAAAMNGVDAIVFTAGVGENSPIMREEIIENYLGYLGIKIDKEANDFKGEEKIISTPDSKVIAMVVPTNEELMIAKDTKEIIEKGLDELKI

SEQ ID NO: 2905 - DNA, 1257 bp, synthetic construct
  misc_feature 1..1257: note = Variant of acetate kinase
  source 1..1257: mol_type = other DNA
atgcaccatcatcatcatcatggcggtagcggcatgaaagttctggtgattaattctggtagctcctccatcaaatatcagctcctcgatatgaccaacgaaaaggtattagcgaaaggcttggtcgagcgcattggcatcgacggttcgcgtatcgtgcataaagttaacggcgaaaaacacgtgctggaacatgagattaagaatcacgaaattggacttaaattggtcctggatcttcttacggacgaaaaatacggtgtgttgaaggatctcaaagaaatcgatgcagttgggcatcgcgtagtacatggcggcgagcgttttgccagtagcgtgaagattactgacgaagtcttaaagaccatcgagacgttgtcgttcttagctccgttacacaatccagcgaacattatgggtatcaagagcagcatgaaagtgttaccgggtgtgcctcaagttgccgtctttgatacagcgttccaccagaagatgccggagaaagcctatttgtacgcaatcccctatgagtactacgagaaatataaaattcgccgctatgggtttcatggaacctcacatcgttatgtgagtaaacgtgctgcggaaattatgggcaaaccgtacgatcagctcaagatcattaccgttcacgtgggtaacggcgcatcagttgcggcggtgaagaatggcgtatctgttgacacttccatgggtttcacaccacttgaaggtcttgtcatgggcacgcgcagcggcgatattgatccggccatcgtggaatttcttgagaaagaagaaggattgtcggccaaagaagtcgtcaacatcctcaacaagaaatctggtgtgtatgggctcaccaaaggctttagtagtgacatgcgtgacattgaagcgaatgctattgaaggtgatcctgtatgccgccttgcattagatgtgtacgaatatcgtatcgcgaaatatattggcgcatacgctgcggccatgaacggtgttgacgcgatcgtctttaccgcaggagttggcgaaaatagcccgattatgcgcgaagaaattattgagaactacttgggctacttagggatcaagatcgataaagaagccaatgacttcaaaggtgaggagaagatcatttcaacgcccgattccaaagtgattgcgatggtagttccgaccaacgaggagctcatgatcgccaaagacacgaaagaaatcattgagaaagggttggacgagcttaagatctaatga

SEQ ID NO: 2906 - protein, 417 aa, synthetic construct
  REGION 1..417: note = Variant of acetate kinase
MHHHHHHGGSGMKVLVINSGSSSIKYQLLDMTNEKVLAKGLVERIGIDGSRIVHKVNGEKHVLEHEIKNHEIGLKLVLDLLTDEKYGVLKDLKEIDAVGHRVVHGGERFASSVKITDEVLKTIETLSFLAPLHNPANIMGIKSSMKVLPGVPQVAVFDTAFHQKMPEKAYLYAIPYEYYEKYKIRRYGFHGTSHRYVSKRAAEIMGKPYDQLKIITVHVGNGASVAAVKNGVSVDTSMGFTPLEGLVMGTRSGDIDPAIVEFLEKEEGLSAKEVVNILNKKSGVYGLTKGFSSDMRDIEANAIEGDPVCRLALDVYEYRIAKYIGAYAAAMNGVDAIVFTAGVGENSPIMREEIIENYLGYLGIKIDKEANDFKGEEKIISTPDSKVIAMVVPTNEELMIAKDTKEIIEKGLDELKI

SEQ ID NO: 2907 - DNA, 1257 bp, synthetic construct
  misc_feature 1..1257: note = Variant of acetate kinase
  source 1..1257: mol_type = other DNA
atgcaccatcatcatcatcatggcggtagcggcatgaaagttctggtgattaattctggtagctcctccatcaaatatcagctcctcgatatgaccaacgaaaaggtattagcgaaaggcttggtcgagcgcattggcatcgacggttcgcgtatcgtgcataaagttaacggcgaaaaacacgtgctggaacatgagattaagaatcacgaaattggacttaaattggtcctggatcttcttacggacgaaaaatacggtgtgttgaaggatctcaaagaaatcgatgcagttgggcatcgcgtagtacatggcggcgagcgttttgccagtagcgtgaagattactgacgaagtcttaaagaccatcgagacgttgtcgttcttagctccgttacacaatccagcgaacattatgggtatcaagagcagcatgaaagtgttaccgggtgtgcctcaagttgccgtctttgatacagcgttccaccagaagatgccggagaaagcctatttgtacgcaatcccctatgagtactacgagaaatataaaattcgccgctatgggtttcatggaacctcacatcgttatgtgagtaaacgtgctgcggaaattatgggcaaaccgtacgatcagctcaagatcattaccgttcacgtgggtaacggcgcatcagttgcggcggtgaagaatggcgtatctgttgacacttccatgggtttcacaccacttgaaggtcttgtcatgggcacgcgcagcggcgatattgatccggccatcgtggaatttcttgagaaagaagaaggattgtcggccaaagaagtcgtcaacatcctcaacaagaaatctggtgtgtatgggctcaccaaaggctttagtagtgacatgcgtgacattgaagataatgctcgggaaggtgatcctgtatgccgccttgcattagatgtgtacgaatatcgtatcgcgaaatatattggcgcatacgctgcggccatgaacggtgttgacgcgatcgtctttaccgcaggagttggcgaaaatagcccgattatgcgcgaagaaattattgagaactacttgggctacttagggatcaagatcgataaagaagccaatgacttcaaaggtgaggagaagatcatttcaacgcccgattccaaagtgattgcgatggtagttccgaccaacgaggagctcatgatcgccaaagacacgaaagaaatcattgagaaagggttggacgagcttaagatctaatga

SEQ ID NO: 2908 - protein, 417 aa, synthetic construct
  REGION 1..417: note = Variant of acetate kinase
MHHHHHHGGSGMKVLVINSGSSSIKYQLLDMTNEKVLAKGLVERIGIDGSRIVHKVNGEKHVLEHEIKNHEIGLKLVLDLLTDEKYGVLKDLKEIDAVGHRVVHGGERFASSVKITDEVLKTIETLSFLAPLHNPANIMGIKSSMKVLPGVPQVAVFDTAFHQKMPEKAYLYAIPYEYYEKYKIRRYGFHGTSHRYVSKRAAEIMGKPYDQLKIITVHVGNGASVAAVKNGVSVDTSMGFTPLEGLVMGTRSGDIDPAIVEFLEKEEGLSAKEVVNILNKKSGVYGLTKGFSSDMRDIEDNAREGDPVCRLALDVYEYRIAKYIGAYAAAMNGVDAIVFTAGVGENSPIMREEIIENYLGYLGIKIDKEANDFKGEEKIISTPDSKVIAMVVPTNEELMIAKDTKEIIEKGLDELKI

SEQ ID NO: 2909 - DNA, 1257 bp, synthetic construct
  misc_feature 1..1257: note = Variant of acetate kinase
  source 1..1257: mol_type = other DNA
atgcaccatcatcatcatcatggcggtagcggcatgaaagttctggtgattaattctggtagctcctccatcaaatatcagctcctcgatatgaccaacgaaaaggtattagcgaaaggcttggtcgagcgcattggcatcgacggttcgcgtatcgtgcataaagttaacggcgaaaaacacgtgctggaacatgagattaagaatcacgaaattggacttaaattggtcctggatcttcttacggacgaaaaatacggtgtgttgaaggatctcaaagaaatcgatgcagttgggcatcgcgtagtacatggcggcgagcgttttgccagtagcgtgaagattactgacgaagtcttaaagaccatcgagacgttgtcgttcttagctccgttacacaatccagcgaacattatgggtatcaagagcagcatgaaagtgttaccgggtgtgcctcaagttgccgtctttgatacagcgttccaccagaagatgccggagaaagcctatttgtacgcaatcccctatgagtactacgagaaatataaaattcgccgctatgggtttcatggaacctcacatcgttatgtgagtaaacgtgctgcggaaattatgggcaaaccgtacgatcagctcaagatcattaccgttcacgtgggtaacggcgcatcagttgcggcggtgaagaatggcgtatctgttgacacttccatgggtttcacaccacttgaaggtcttgtcatgggcacgcgcagcggcgatattgatccggccatcgtggaatttcttgagaaagaagaaggattgtcggccaaagaagtcgtcaacatcctcaacaagaaatctggtgtgtatgggctcaccaaaggctttagtagtgacatgcgtgacattgaatcgaatgctattgaaggtgatcctgtatgccgccttgcattagatgtgtacgaatatcgtatcgcgaaatatattggcgcatacgctgcggccatgaacggtgttgacgcgatcgtctttaccgcaggagttggcgaaaatagcccgattatgcgcgaagaaattattgagaactacttgggctacttagggatcaagatcgataaagaagccaatgacttcaaaggtgaggagaagatcatttcaacgcccgattccaaagtgattgcgatggtagttccgaccaacgaggagctcatgatcgccaaagacacgaaagaaatcattgagaaagggttggacgagcttaagatctaatga

SEQ ID NO: 2910 - protein, 417 aa, synthetic construct
  REGION 1..417: note = Variant of acetate kinase
MHHHHHHGGSGMKVLVINSGSSSIKYQLLDMTNEKVLAKGLVERIGIDGSRIVHKVNGEKHVLEHEIKNHEIGLKLVLDLLTDEKYGVLKDLKEIDAVGHRVVHGGERFASSVKITDEVLKTIETLSFLAPLHNPANIMGIKSSMKVLPGVPQVAVFDTAFHQKMPEKAYLYAIPYEYYEKYKIRRYGFHGTSHRYVSKRAAEIMGKPYDQLKIITVHVGNGASVAAVKNGVSVDTSMGFTPLEGLVMGTRSGDIDPAIVEFLEKEEGLSAKEVVNILNKKSGVYGLTKGFSSDMRDIESNAIEGDPVCRLALDVYEYRIAKYIGAYAAAMNGVDAIVFTAGVGENSPIMREEIIENYLGYLGIKIDKEANDFKGEEKIISTPDSKVIAMVVPTNEELMIAKDTKEIIEKGLDELKI

SEQ ID NO: 2911 - DNA, 1257 bp, synthetic construct
  misc_feature 1..1257: note = Variant of acetate kinase
  source 1..1257: mol_type = other DNA
atgcaccatcatcatcatcatggcggtagcggcatgaaagttctggtgattaattctggtagctcctccatcaaatatcagctcctcgatatgaccaacgaaaaggtattagcgaaaggcttggtcgagcgcattggcatcgacggttcgcgtatcgtgcataaagttaacggcgaaaaacacgtgctggaacatgagattaagaatcacgaaattggacttaaattggtcctggatcttcttacggacgaaaaatacggtgtgttgaaggatctcaaagaaatcgatgcagttgggcatcgcgtagtacatggcggcgagcgttttgccagtagcgtgaagattactgacgaagtcttaaagaccatcgagacgttgtcgttcttagctccgttacacaatccagcgaacattatgggtatcaagagcagcatgaaagtgttaccgggtgtgcctcaagttgccgtctttgatacagcgttccaccagaagatgccggagaaagcctatttgtacgcaatcccctatgagtactacgagaaatataaaattcgccgctatgggtttcatggaacctcacatcgttatgtgagtaaacgtgctgcggaaattatgggcaaaccgtacgatcagctcaagatcattaccgttcacgtgggtaacggcgcatcagttgcggcggtgaagaatggcgtatctgttgacacttccatgggtttcacaccacttgaaggtcttgtcatgggcacgcgcagcggcgatattgatccggccatcgtggaatttcttgagaaagaagaaggattgtcggccaaagaagtcgtcaacatcctcaacaagaaatctggtgtgtatgggctcaccaaaggctttagtagtgacatgcgtgacattgaatttaatgctattgaaggtgatcctgtatgccgccttgcattagatgtgtacgaatatcgtatcgcgaaatatattggcgcatacgctgcggccatgaacggtgttgacgcgatcgtctttaccgcaggagttggcgaaaatagcccgattatgcgcgaagaaattattgagaactacttgggctacttagggatcaagatcgataaagaagccaatgacttcaaaggtgaggagaagatcatttcaacgcccgattccaaagtgattgcgatggtagttccgaccaacgaggagctcatgatcgccaaagacacgaaagaaatcattgagaaagggttggacgagcttaagatctaatga

SEQ ID NO: 2912 - protein, 417 aa, synthetic construct
  REGION 1..417: note = Variant of acetate kinase
MHHHHHHGGSGMKVLVINSGSSSIKYQLLDMTNEKVLAKGLVERIGIDGSRIVHKVNGEKHVLEHEIKNHEIGLKLVLDLLTDEKYGVLKDLKEIDAVGHRVVHGGERFASSVKITDEVLKTIETLSFLAPLHNPANIMGIKSSMKVLPGVPQVAVFDTAFHQKMPEKAYLYAIPYEYYEKYKIRRYGFHGTSHRYVSKRAAEIMGKPYDQLKIITVHVGNGASVAAVKNGVSVDTSMGFTPLEGLVMGTRSGDIDPAIVEFLEKEEGLSAKEVVNILNKKSGVYGLTKGFSSDMRDIEFNAIEGDPVCRLALDVYEYRIAKYIGAYAAAMNGVDAIVFTAGVGENSPIMREEIIENYLGYLGIKIDKEANDFKGEEKIISTPDSKVIAMVVPTNEELMIAKDTKEIIEKGLDELKI

SEQ ID NO: 2913 - DNA, 1257 bp, synthetic construct
  misc_feature 1..1257: note = Variant of acetate kinase
  source 1..1257: mol_type = other DNA
atgcaccatcatcatcatcatggcggtagcggcatgaaagttctggtgattaattctggtagctcctccatcaaatatcagctcctcgatatgaccaacgaaaaggtattagcgaaaggcttggtcgagcgcattggcatcgacggttcgcgtatcgtgcataaagttaacggcgaaaaacacgtgctggaacatgagattaagaatcacgaaattggacttaaattggtcctggatcttcttacggacgaaaaatacggtgtgttgaaggatctcaaagaaatcgatgcagttgggcatcgcgtagtacatggcggcgagcgttttgccagtagcgtgaagattactgacgaagtcttaaagaccatcgagacgttgtcgttcttagctccgttacacaatccagcgaacattatgggtatcaagagcagcatgaaagtgttaccgggtgtgcctcaagttgccgtctttgatacagcgttccaccagaagatgccggagaaagcctatttgtacgcaatcccctatgagtactacgagaaatataaaattcgccgctatgggtttcatggaacctcacatcgttatgtgagtaaacgtgctgcggaaattatgggcaaaccgtacgatcagctcaagatcattaccgttcacgtgggtaacggcgcatcagttgcggcggtgaagaatggcgtatctgttgacacttccatgggtttcacaccacttgaaggtcttgtcatgggcacgcgcagcggcgatattgatccggccatcgtggaatttcttgagaaagaagaaggattgtcggccaaagaagtcgtcaacatcctcaacaagaaatctggtgtgtatgggctcaccaaaggctttagtagtgacatgcgtgacattgaaattaatgctattgaaggtgatcctgtatgccgccttgcattagatgtgtacgaatatcgtatcgcgaaatatattggcgcatacgctgcggccatgaacggtgttgacgcgatcgtctttaccgcaggagttggcgaaaatagcccgattatgcgcgaagaaattattgagaactacttgggctacttagggatcaagatcgataaagaagccaatgacttcaaaggtgaggagaagatcatttcaacgcccgattccaaagtgattgcgatggtagttccgaccaacgaggagctcatgatcgccaaagacacgaaagaaatcattgagaaagggttggacgagcttaagatctaatga

SEQ ID NO: 2914 - protein, 417 aa, synthetic construct
  REGION 1..417: note = Variant of acetate kinase
MHHHHHHGGSGMKVLVINSGSSSIKYQLLDMTNEKVLAKGLVERIGIDGSRIVHKVNGEKHVLEHEIKNHEIGLKLVLDLLTDEKYGVLKDLKEIDAVGHRVVHGGERFASSVKITDEVLKTIETLSFLAPLHNPANIMGIKSSMKVLPGVPQVAVFDTAFHQKMPEKAYLYAIPYEYYEKYKIRRYGFHGTSHRYVSKRAAEIMGKPYDQLKIITVHVGNGASVAAVKNGVSVDTSMGFTPLEGLVMGTRSGDIDPAIVEFLEKEEGLSAKEVVNILNKKSGVYGLTKGFSSDMRDIEINAIEGDPVCRLALDVYEYRIAKYIGAYAAAMNGVDAIVFTAGVGENSPIMREEIIENYLGYLGIKIDKEANDFKGEEKIISTPDSKVIAMVVPTNEELMIAKDTKEIIEKGLDELKI

SEQ ID NO: 2915 - DNA, 1257 bp, synthetic construct
  misc_feature 1..1257: note = Variant of acetate kinase
  source 1..1257: mol_type = other DNA
atgcaccatcatcatcatcatggcggtagcggcatgaaagttctggtgattaattctggtagctcctccatcaaatatcagctcctcgatatgaccaacgaaaaggtattagcgaaaggcttggtcgagcgcattggcatcgacggttcgcgtatcgtgcataaagttaacggcgaaaaacacgtgctggaacatgagattaagaatcacgaaattggacttaaattggtcctggatcttcttacggacgaaaaatacggtgtgttgaaggatctcaaagaaatcgatgcagttgggcatcgcgtagtacatggcggcgagcgttttgccagtagcgtgaagattactgacgaagtcttaaagaccatcgagacgttgtcgttcttagctccgttacacaatccagcgaacattatgggtatcaagagcagcatgaaagtgttaccgggtgtgcctcaagttgccgtctttgatacagcgttccaccagaagatgccggagaaagcctatttgtacgcaatcccctatgagtactacgagaaatataaaattcgccgctatgggtttcatggaacctcacatcgttatgtgagtaaacgtgctgcggaaattatgggcaaaccgtacgatcagctcaagatcattaccgttcacgtgggtaacggcgcatcagttgcggcggtgaagaatggcgtatctgttgacacttccatgggtttcacaccacttgaaggtcttgtcatgggcacgcgcagcggcgatattgatccggccatcgtggaatttcttgagaaagaagaaggattgtcggccaaagaagtcgtcaacatcctcaacaagaaatctggtgtgtatgggctcaccaaaggctttagtagtgacatgcgtgacattgaacagaatgctattgaaggtgatcctgtatgccgccttgcattagatgtgtacgaatatcgtatcgcgaaatatattggcgcatacgctgcggccatgaacggtgttgacgcgatcgtctttaccgcaggagttggcgaaaatagcccgattatgcgcgaagaaattattgagaactacttgggctacttagggatcaagatcgataaagaagccaatgacttcaaaggtgaggagaagatcatttcaacgcccgattccaaagtgattgcgatggtagttccgaccaacgaggagctcatgatcgccaaagacacgaaagaaatcattgagaaagggttggacgagcttaagatctaatga

SEQ ID NO: 2916 - protein, 417 aa, synthetic construct
  REGION 1..417: note = Variant of acetate kinase
MHHHHHHGGSGMKVLVINSGSSSIKYQLLDMTNEKVLAKGLVERIGIDGSRIVHKVNGEKHVLEHEIKNHEIGLKLVLDLLTDEKYGVLKDLKEIDAVGHRVVHGGERFASSVKITDEVLKTIETLSFLAPLHNPANIMGIKSSMKVLPGVPQVAVFDTAFHQKMPEKAYLYAIPYEYYEKYKIRRYGFHGTSHRYVSKRAAEIMGKPYDQLKIITVHVGNGASVAAVKNGVSVDTSMGFTPLEGLVMGTRSGDIDPAIVEFLEKEEGLSAKEVVNILNKKSGVYGLTKGFSSDMRDIEQNAIEGDPVCRLALDVYEYRIAKYIGAYAAAMNGVDAIVFTAGVGENSPIMREEIIENYLGYLGIKIDKEANDFKGEEKIISTPDSKVIAMVVPTNEELMIAKDTKEIIEKGLDELKI

SEQ ID NO: 2917 - DNA, 1257 bp, synthetic construct
  misc_feature 1..1257: note = Variant of acetate kinase
  source 1..1257: mol_type = other DNA
atgcaccatcatcatcatcatggcggtagcggcatgaaagttctggtgattaattctggtagctcctccatcaaatatcagctcctcgatatgaccaacgaaaaggtattagcgaaaggcttggtcgagcgcattggcatcgacggttcgcgtatcgtgcataaagttaacggcgaaaaacacgtgctggaacatgagattaagaatcacgaaattggacttaaattggtcctggatcttcttacggacgaaaaatacggtgtgttgaaggatctcaaagaaatcgatgcagttgggcatcgcgtagtacatggcggcgagcgttttgccagtagcgtgaagattactgacgaagtcttaaagaccatcgagacgttgtcgttcttagctccgttacacaatccagcgaacattatgggtatcaagagcagcatgaaagtgttaccgggtgtgcctcaagttgccgtctttgatacagcgttccaccagaagatgccggagaaagcctatttgtacgcaatcccctatgagtactacgagaaatataaaattcgccgctatgggtttcatggaacctcacatcgttatgtgagtaaacgtgctgcggaaattatgggcaaaccgtacgatcagctcaagatcattaccgttcacgtgggtaacggcgcatcagttgcggcggtgaagaatggcgtatctgttgacacttccatgggtttcacaccacttgaaggtcttgtcatgggcacgcgcagcggcgatattgatccggccatcgtggaatttcttgagaaagaagaaggattgtcggccaaagaagtcgtcaacatcctcaacaagaaatctggtgtgtatgggctcaccaaaggctttagtagtgacatgcgtgacattgaatataatgctattgaaggtgatcctgtatgccgccttgcattagatgtgtacgaatatcgtatcgcgaaatatattggcgcatacgctgcggccatgaacggtgttgacgcgatcgtctttaccgcaggagttggcgaaaatagcccgattatgcgcgaagaaattattgagaactacttgggctacttagggatcaagatcgataaagaagccaatgacttcaaaggtgaggagaagatcatttcaacgcccgattccaaagtgattgcgatggtagttccgaccaacgaggagctcatgatcgccaaagacacgaaagaaatcattgagaaagggttggacgagcttaagatctaatga

SEQ ID NO: 2918 - protein, 417 aa, synthetic construct
  REGION 1..417: note = Variant of acetate kinase
MHHHHHHGGSGMKVLVINSGSSSIKYQLLDMTNEKVLAKGLVERIGIDGSRIVHKVNGEKHVLEHEIKNHEIGLKLVLDLLTDEKYGVLKDLKEIDAVGHRVVHGGERFASSVKITDEVLKTIETLSFLAPLHNPANIMGIKSSMKVLPGVPQVAVFDTAFHQKMPEKAYLYAIPYEYYEKYKIRRYGFHGTSHRYVSKRAAEIMGKPYDQLKIITVHVGNGASVAAVKNGVSVDTSMGFTPLEGLVMGTRSGDIDPAIVEFLEKEEGLSAKEVVNILNKKSGVYGLTKGFSSDMRDIEYNAIEGDPVCRLALDVYEYRIAKYIGAYAAAMNGVDAIVFTAGVGENSPIMREEIIENYLGYLGIKIDKEANDFKGEEKIISTPDSKVIAMVVPTNEELMIAKDTKEIIEKGLDELKI

SEQ ID NO: 2919 - DNA, 1257 bp, synthetic construct
  misc_feature 1..1257: note = Variant of acetate kinase
  source 1..1257: mol_type = other DNA
atgcaccatcatcatcatcatggcggtagcggcatgaaagttctggtgattaattctggtagctcctccatcaaatatcagctcctcgatatgaccaacgaaaaggtattagcgaaaggcttggtcgagcgcattggcatcgacggttcgcgtatcgtgcataaagttaacggcgaaaaacacgtgctggaacatgagattaagaatcacgaaattggacttaaattggtcctggatcttcttacggacgaaaaatacggtgtgttgaaggatctcaaagaaatcgatgcagttgggcatcgcgtagtacatggcggcgagcgttttgccagtagcgtgaagattactgacgaagtcttaaagaccatcgagacgttgtcgttcttagctccgttacacaatccagcgaacattatgggtatcaagagcagcatgaaagtgttaccgggtgtgcctcaagttgccgtctttgatacagcgttccaccagaagatgccggagaaagcctatttgtacgcaatcccctatgagtactacgagaaatataaaattcgccgctatgggtttcatggaacctcacatcgttatgtgagtaaacgtgctgcggaaattatgggcaaaccgtacgatcagctcaagatcattaccgttcacgtgggtaacggcgcatcagttgcggcggtgaagaatggcgtatctgttgacacttccatgggtttcacaccacttgaaggtcttgtcatgggcacgcgcagcggcgatattgatccggccatcgtggaatttcttgagaaagaagaaggattgtcggccaaagaagtcgtcaacatcctcaacaagaaatctggtgtgtatgggctcaccaaaggctttagtagtgacatgcgtgacattgaaaataatgctattgaaggtgatcctgtatgccgccttgcattagatgtgtacgaatatcgtatcgcgaaatatattggcgcatacgctgcggccatgaacggtgttgacgcgatcgtctttaccgcaggagttggcgaaaatagcccgattatgcgcgaagaaattattgagaactacttgggctacttagggatcaagatcgataaagaagccaatgacttcaaaggtgaggagaagatcatttcaacgcccgattccaaagtgattgcgatggtagttccgaccaacgaggagctcatgatcgccaaagacacgaaagaaatcattgagaaagggttggacgagcttaagatctaatga

SEQ ID NO: 2920 - protein, 417 aa, synthetic construct
  REGION 1..417: note = Variant of acetate kinase
MHHHHHHGGSGMKVLVINSGSSSIKYQLLDMTNEKVLAKGLVERIGIDGSRIVHKVNGEKHVLEHEIKNHEIGLKLVLDLLTDEKYGVLKDLKEIDAVGHRVVHGGERFASSVKITDEVLKTIETLSFLAPLHNPANIMGIKSSMKVLPGVPQVAVFDTAFHQKMPEKAYLYAIPYEYYEKYKIRRYGFHGTSHRYVSKRAAEIMGKPYDQLKIITVHVGNGASVAAVKNGVSVDTSMGFTPLEGLVMGTRSGDIDPAIVEFLEKEEGLSAKEVVNILNKKSGVYGLTKGFSSDMRDIENNAIEGDPVCRLALDVYEYRIAKYIGAYAAAMNGVDAIVFTAGVGENSPIMREEIIENYLGYLGIKIDKEANDFKGEEKIISTPDSKVIAMVVPTNEELMIAKDTKEIIEKGLDELKI

SEQ ID NO: 2921 - DNA, 1257 bp, synthetic construct
  misc_feature 1..1257: note = Variant of acetate kinase
  source 1..1257: mol_type = other DNA
atgcaccatcatcatcatcatggcggtagcggcatgaaagttctggtgattaattctggtagctcctccatcaaatatcagctcctcgatatgaccaacgaaaaggtattagcgaaaggcttggtcgagcgcattggcatcgacggttcgcgtatcgtgcataaagttaacggcgaaaaacacgtgctggaacatgagattaagaatcacgaaattggacttaaattggtcctggatcttcttacggacgaaaaatacggtgtgttgaaggatctcaaagaaatcgatgcagttgggcatcgcgtagtacatggcggcgagcgttttgccagtagcgtgaagattactgacgaagtcttaaagaccatcgagacgttgtcgttcttagctccgttacacaatccagcgaacattatgggtatcaagagcagcatgaaagtgttaccgggtgtgcctcaagttgccgtctttgatacagcgttccaccagaagatgccggagaaagcctatttgtacgcaatcccctatgagtactacgagaaatataaaattcgccgctatgggtttcatggaacctcacatcgttatgtgagtaaacgtgctgcggaaattatgggcaaaccgtacgatcagctcaagatcattaccgttcacgtgggtaacggcgcatcagttgcggcggtgaagaatggcgtatctgttgacacttccatgggtttcacaccacttgaaggtcttgtcatgggcacgcgcagcggcgatattgatccggccatcgtggaatttcttgagaaagaagaaggattgtcggccaaagaagtcgtcaacatcctcaacaagaaatctggtgtgtatgggctcaccaaaggctttagtagtgacatgcgtgacattgaagataatgctattgaaggtgatcctgtatgccgccttgcattagatgtgtacctgtatcgtatcgcgaaatatattggcgcatacgctgcggccatgaacggtgttgacgcgatcgtctttaccgcaggagttggcgaaaatagcccgattatgcgcgaagaaattattgagaactacttgggctacttagggatcaagatcgataaagaagccaatgacttcaaaggtgaggagaagatcatttcaacgcccgattccaaagtgattgcgatggtagttccgaccaacgaggagctcatgatcgccaaagacacgaaagaaatcattgagaaagggttggacgagcttaagatctaatga

SEQ ID NO: 2922 - protein, 417 aa, synthetic construct
  REGION 1..417: note = Variant of acetate kinase
MHHHHHHGGSGMKVLVINSGSSSIKYQLLDMTNEKVLAKGLVERIGIDGSRIVHKVNGEKHVLEHEIKNHEIGLKLVLDLLTDEKYGVLKDLKEIDAVGHRVVHGGERFASSVKITDEVLKTIETLSFLAPLHNPANIMGIKSSMKVLPGVPQVAVFDTAFHQKMPEKAYLYAIPYEYYEKYKIRRYGFHGTSHRYVSKRAAEIMGKPYDQLKIITVHVGNGASVAAVKNGVSVDTSMGFTPLEGLVMGTRSGDIDPAIVEFLEKEEGLSAKEVVNILNKKSGVYGLTKGFSSDMRDIEDNAIEGDPVCRLALDVYLYRIAKYIGAYAAAMNGVDAIVFTAGVGENSPIMREEIIENYLGYLGIKIDKEANDFKGEEKIISTPDSKVIAMVVPTNEELMIAKDTKEIIEKGLDELKI

SEQ ID NO: 2923 - DNA, 1257 bp, synthetic construct
  misc_feature 1..1257: note = Variant of acetate kinase
  source 1..1257: mol_type = other DNA
atgcaccatcatcatcatcatggcggtagcggcatgaaagttctggtgattaattctggtagctcctccatcaaatatcagctcctcgatatgaccaacgaaaaggtattagcgaaaggcttggtcgagcgcattggcatcgacggttcgcgtatcgtgcataaagttaacggcgaaaaacacgtgctggaacatgagattaagaatcacgaaattggacttaaattggtcctggatcttcttacggacgaaaaatacggtgtgttgaaggatctcaaagaaatcgatgcagttgggcatcgcgtagtacatggcggcgagcgttttgccagtagcgtgaagattactgacgaagtcttaaagaccatcgagacgttgtcgttcttagctccgttacacaatccagcgaacattatgggtatcaagagcgcgatgaaagtgttaccgggtgtgcctcaagttgccgtctttgatacagcgttccaccagaagatgccggagaaagcctatttgtacgcaatcccctatgagtactacgagaaatataaaattcgccgctatgggtttcatggaacctcacatcgttatgtgagtaaacgtgctgcggaaattatgggcaaaccgtacgatcagctcaagatcattaccgttcacgtgggtaacggcgcatcagttgcggcggtgaagaatggcgtatctgttgacacttccatgggtttcacaccacttgaaggtcttgtcatgggcacgcgcagcggcgatattgatccggccatcgtggaatttcttgagaaagaagaaggattgtcggccaaagaagtcgtcaacatcctcaacaagaaatctggtgtgtatgggctcaccaaaggctttagtagtgacatgcgtgacattgaagataatgctattgaaggtgatcctgtatgccgccttgcattagatgtgtacgaatatcgtatcgcgaaatatattggcgcatacgctgcggccatgaacggtgttgacgcgatcgtctttaccgcaggagttggcgaaaatagcccgattatgcgcgaagaaattattgagaactacttgggctacttagggatcaagatcgataaagaagccaatgacttcaaaggtgaggagaagatcatttcaacgcccgattccaaagtgattgcgatggtagttccgaccaacgaggagctcatgatcgccaaagacacgaaagaaatcattgagaaagggttggacgagcttaagatctaatga

SEQ ID NO: 2924 - protein, 417 aa, synthetic construct
  REGION 1..417: note = Variant of acetate kinase
MHHHHHHGGSGMKVLVINSGSSSIKYQLLDMTNEKVLAKGLVERIGIDGSRIVHKVNGEKHVLEHEIKNHEIGLKLVLDLLTDEKYGVLKDLKEIDAVGHRVVHGGERFASSVKITDEVLKTIETLSFLAPLHNPANIMGIKSAMKVLPGVPQVAVFDTAFHQKMPEKAYLYAIPYEYYEKYKIRRYGFHGTSHRYVSKRAAEIMGKPYDQLKIITVHVGNGASVAAVKNGVSVDTSMGFTPLEGLVMGTRSGDIDPAIVEFLEKEEGLSAKEVVNILNKKSGVYGLTKGFSSDMRDIEDNAIEGDPVCRLALDVYEYRIAKYIGAYAAAMNGVDAIVFTAGVGENSPIMREEIIENYLGYLGIKIDKEANDFKGEEKIISTPDSKVIAMVVPTNEELMIAKDTKEIIEKGLDELKI

SEQ ID NO: 2925 - DNA, 1257 bp, synthetic construct
  misc_feature 1..1257: note = Variant of acetate kinase
  source 1..1257: mol_type = other DNA
atgcaccatcatcatcatcatggcggtagcggcatgaaagttctggtgattaattctggtagctcctccatcaaatatcagctcctcgatatgaccaacgaaaaggtattagcgaaaggcttggtcgagcgcattggcatcgacggttcgcgtatcgtgcataaagttaacggcgaaaaacacgtgctggaacatgagattaagaatcacgaaattggacttaaattggtcctggatcttcttacggacgaaaaatacggtgtgttgaaggatctcaaagaaatcgatgcagttgggcatcgcgtagtacatggcggcgagcgttttgccagtagcgtgaagattactgacgaagtcttaaagaccatcgagacgttgtcgttcttagctccgttacacaatccagcgaacattatgggtatcaagagcagcatgaaagtgttaccgggtgtgcctcaagttgccgtctttgatacagcgttccaccagaagatgccggagaaagcctatttgtacgcaatcccctatgagtactacgagaaatataaaattcgccgctatgggtttcatggaacctcacatcgttatgtgagtaaacgtgctgcggaaattatgggcaaaccgtacgatcagctcaagatcattaccgttcacgtgggtaacggcgcatcagttgcggcggtgaagaatggcgtatctgttgacacttccatgggtttcacaccacttgaaggtcttgtcatgggcacgcgcagcggcgatattgatccggccatcgtggaatttcttgagaaagaagaaggattgtcggccaaagaagtcgtcaacatcctcaacaagaaatctggtgtgtatgggctcaccaaaggctttagtagtgacatgcgtgacattgaagataatgctattgaaggtgatcctgtatgccgccttgcattagatgtgtactattatcgtatcgcgaaatatattggcgcatacgctgcggccatgaacggtgttgacgcgatcgtctttaccgcaggagttggcgaaaatagcccgattatgcgcgaagaaattattgagaactacttgggctacttagggatcaagatcgataaagaagccaatgacttcaaaggtgaggagaagatcatttcaacgcccgattccaaagtgattgcgatggtagttccgaccaacgaggagctcatgatcgccaaagacacgaaagaaatcattgagaaagggttggacgagcttaagatctaatga

SEQ ID NO: 2926 - protein, 417 aa, synthetic construct
  REGION 1..417: note = Variant of acetate kinase
MHHHHHHGGSGMKVLVINSGSSSIKYQLLDMTNEKVLAKGLVERIGIDGSRIVHKVNGEKHVLEHEIKNHEIGLKLVLDLLTDEKYGVLKDLKEIDAVGHRVVHGGERFASSVKITDEVLKTIETLSFLAPLHNPANIMGIKSSMKVLPGVPQVAVFDTAFHQKMPEKAYLYAIPYEYYEKYKIRRYGFHGTSHRYVSKRAAEIMGKPYDQLKIITVHVGNGASVAAVKNGVSVDTSMGFTPLEGLVMGTRSGDIDPAIVEFLEKEEGLSAKEVVNILNKKSGVYGLTKGFSSDMRDIEDNAIEGDPVCRLALDVYYYRIAKYIGAYAAAMNGVDAIVFTAGVGENSPIMREEIIENYLGYLGIKIDKEANDFKGEEKIISTPDSKVIAMVVPTNEELMIAKDTKEIIEKGLDELKI

SEQ ID NO: 2927 - DNA, 1257 bp, synthetic construct
  misc_feature 1..1257: note = Variant of acetate kinase
  source 1..1257: mol_type = other DNA
atgcaccatcatcatcatcatggcggtagcggcatgaaagttctggtgattaattctggtagctcctccatcaaatatcagctcctcgatatgaccaacgaaaaggtattagcgaaaggcttggtcgagcgcattggcatcgacggttcgcgtatcgtgcataaagttaacggcgaaaaacacgtgctggaacatgagattaagaatcacgaaattggacttaaattggtcctggatcttcttacggacgaaaaatacggtgtgttgaaggatctcaaagaaatcgatgcagttgggcatcgcgtagtacatggcggcgagcgttttgccagtagcgtgaagattactgacgaagtcttaaagaccatcgagacgttgtcgttcttagctccgttacacaatccagcgaacattatgggtatcaagagcagcatgaaagtgttaccgggtgtgcctcaagttgccgtctttgatacagcgttccaccagaagatgccggagaaagcctatttgtacgcaatcccctatgagtactacgagaaatataaaattcgccgctatgggtttcatggaacctcacatcgttatgtgagtaaacgtgctgcggaaattatgggcaaaccgtacgatcagctcaagatcattaccgttcacgtgggtaacggcgcatcagttgcggcggtgaagaatggcgtatctgttgacacttccatgggtttcacaccacttgaaggtcttgtcatgggcacgcgcagcggcgatattgatccggccatcgtggaatttcttgagaaagaagaaggattgtcggccaaagaagtcgtcaacatcctcaacaagaaatctggtgtgtatgggctcaccaaaggctttagtagtgacatgcgtgacattgaagataatgctatggaaggtgatcctgtatgccgccttgcattagatgtgtacgaatatcgtatcgcgaaatatattggcgcatacgctgcggccatgaacggtgttgacgcgatcgtctttaccgcaggagttggcgaaaatagcccgattatgcgcgaagaaattattgagaactacttgggctacttagggatcaagatcgataaagaagccaatgacttcaaaggtgaggagaagatcatttcaacgcccgattccaaagtgattgcgatggtagttccgaccaacgaggagctcatgatcgccaaagacacgaaagaaatcattgagaaagggttggacgagcttaagatctaatga

SEQ ID NO: 2928 - protein, 417 aa, synthetic construct
  REGION 1..417: note = Variant of acetate kinase
MHHHHHHGGSGMKVLVINSGSSSIKYQLLDMTNEKVLAKGLVERIGIDGSRIVHKVNGEKHVLEHEIKNHEIGLKLVLDLLTDEKYGVLKDLKEIDAVGHRVVHGGERFASSVKITDEVLKTIETLSFLAPLHNPANIMGIKSSMKVLPGVPQVAVFDTAFHQKMPEKAYLYAIPYEYYEKYKIRRYGFHGTSHRYVSKRAAEIMGKPYDQLKIITVHVGNGASVAAVKNGVSVDTSMGFTPLEGLVMGTRSGDIDPAIVEFLEKEEGLSAKEVVNILNKKSGVYGLTKGFSSDMRDIEDNAMEGDPVCRLALDVYEYRIAKYIGAYAAAMNGVDAIVFTAGVGENSPIMREEIIENYLGYLGIKIDKEANDFKGEEKIISTPDSKVIAMVVPTNEELMIAKDTKEIIEKGLDELKI

SEQ ID NO: 2929 - DNA, 1257 bp, synthetic construct
  misc_feature 1..1257: note = Variant of acetate kinase
  source 1..1257: mol_type = other DNA
atgcaccatcatcatcatcatggcggtagcggcatgaaagttctggtgattaattctggtagctcctccatcaaatatcagctcctcgatatgaccaacgaaaaggtattagcgaaaggcttggtcgagcgcattggcatcgacggttcgcgtatcgtgcataaagttaacggcgaaaaacacgtgctggaacatgagattaagaatcacgaaattggacttaaattggtcctggatcttcttacggacgaaaaatacggtgtgttgaaggatctcaaagaaatcgatgcagttgggcatcgcgtagtacatggcggcgagcgttttgccagtagcgtgaagattactgacgaagtcttaaagaccatcgagacgttgtcgttcttagctccgttacacaatccagcgaacattatgggtatcaagagcagcatgaaagtgttaccgggtgtgcctcaagttgccgtctttgatacagcgttccaccagaagatgccggagaaagcctatttgtacgcaatcccctatgagtactacgagaaatataaaattcgccgctatgggtttcatggaacctcacatcgttatgtgagtaaacgtgctgcggaaattatgggcaaaccgtacgatcagctcaagatcattaccgttcacgtgggtaacggcgcatcagttgcggcggtgaagaatggcgtatctgttgacacttccatgggtttcacaccacttgaaggtcttgtcatgggcacgcgcagcggcgatattgatccggccatcgtggaatttcttgagaaagaagaaggattgtcggccaaagaagtcgtcaacatcctcaacaagaaatctggtgtgtatgggctcaccaaaggctttagtagtgacatgcgtgacattgaagataatgctattgaaggtgatcctgtatgccgccttgcattagatgtgtacgaatatcgtatcgcgaaatatattggcgcatacgctgcggccatgaacggtgttgacgcgatcgtctttaccgcaggagttggcgaaaatagcccgattatgcgcgaagaaattattgagaactacttgggctacttagggatcaagatcgataaagaagccaatgacttccggggtgaggagaagatcatttcaacgcccgattccaaagtgattgcgatggtagttccgaccaacgaggagctcatgatcgccaaagacacgaaagaaatcattgagaaagggttggacgagcttaagatctaatga

SEQ ID NO: 2930 - protein, 417 aa, synthetic construct
  REGION 1..417: note = Variant of acetate kinase
MHHHHHHGGSGMKVLVINSGSSSIKYQLLDMTNEKVLAKGLVERIGIDGSRIVHKVNGEKHVLEHEIKNHEIGLKLVLDLLTDEKYGVLKDLKEIDAVGHRVVHGGERFASSVKITDEVLKTIETLSFLAPLHNPANIMGIKSSMKVLPGVPQVAVFDTAFHQKMPEKAYLYAIPYEYYEKYKIRRYGFHGTSHRYVSKRAAEIMGKPYDQLKIITVHVGNGASVAAVKNGVSVDTSMGFTPLEGLVMGTRSGDIDPAIVEFLEKEEGLSAKEVVNILNKKSGVYGLTKGFSSDMRDIEDNAIEGDPVCRLALDVYEYRIAKYIGAYAAAMNGVDAIVFTAGVGENSPIMREEIIENYLGYLGIKIDKEANDFRGEEKIISTPDSKVIAMVVPTNEELMIAKDTKEIIEKGLDELKI

SEQ ID NO: 2931 - DNA, 1257 bp, synthetic construct
  misc_feature 1..1257: note = Variant of acetate kinase
  source 1..1257: mol_type = other DNA
atgcaccatcatcatcatcatggcggtagcggcatgaaagttctggtgattaattctggtagctcctccatcaaatatcagctcctcgatatgaccaacgaaaaggtattagcgaaaggcttggtcgagcgcattggcatcgacggttcgcgtatcgtgcataaagttaacggcgaaaaacacgtgatggaacatgagattaagaatcacgaaattggacttaaattggtcctggatcttcttacggacgaaaaatacggtgtgttgaaggatctcaaagaaatcgatgcagttgggcatcgcgtagtacatggcggcgagcgttttgccagtagcgtgaagattactgacgaagtcttaaagaccatcgagacgttgtcgttcttagctccgttacacaatccagcgaacattatgggtatcaagagcagcatgaaagtgttaccgggtgtgcctcaagttgccgtctttgatacagcgttccaccagaagatgccggagaaagcctatttgtacgcaatcccctatgagtactacgagaaatataaaattcgccgctatgggtttcatggaacctcacatcgttatgtgagtaaacgtgctgcggaaattatgggcaaaccgtacgatcagctcaagatcattaccgttcacgtgggtaacggcgcatcagttgcggcggtgaagaatggcgtatctgttgacacttccatgggtttcacaccacttgaaggtcttgtcatgggcacgcgcagcggcgatattgatccggccatcgtggaatttcttgagaaagaagaaggattgtcggccaaagaagtcgtcaacatcctcaacaagaaatctggtgtgtatgggctcaccaaaggctttagtagtgacatgcgtgacattgaagataatgctattgaaggtgatcctgtatgccgccttgcattagatgtgtacgaatatcgtatcgcgaaatatattggcgcatacgctgcggccatgaacggtgttgacgcgatcgtctttaccgcaggagttggcgaaaatagcccgattatgcgcgaagaaattattgagaactacttgggctacttagggatcaagatcgataaagaagccaatgacttcaaaggtgaggagaagatcatttcaacgcccgattccaaagtgattgcgatggtagttccgaccaacgaggagctcatgatcgccaaagacacgaaagaaatcattgagaaagggttggacgagcttaagatctaatga

SEQ ID NO: 2932 - protein, 417 aa, synthetic construct
  REGION 1..417: note = Variant of acetate kinase
MHHHHHHGGSGMKVLVINSGSSSIKYQLLDMTNEKVLAKGLVERIGIDGSRIVHKVNGEKHVMEHEIKNHEIGLKLVLDLLTDEKYGVLKDLKEIDAVGHRVVHGGERFASSVKITDEVLKTIETLSFLAPLHNPANIMGIKSSMKVLPGVPQVAVFDTAFHQKMPEKAYLYAIPYEYYEKYKIRRYGFHGTSHRYVSKRAAEIMGKPYDQLKIITVHVGNGASVAAVKNGVSVDTSMGFTPLEGLVMGTRSGDIDPAIVEFLEKEEGLSAKEVVNILNKKSGVYGLTKGFSSDMRDIEDNAIEGDPVCRLALDVYEYRIAKYIGAYAAAMNGVDAIVFTAGVGENSPIMREEIIENYLGYLGIKIDKEANDFKGEEKIISTPDSKVIAMVVPTNEELMIAKDTKEIIEKGLDELKI

SEQ ID NO: 2933 - DNA, 1257 bp, synthetic construct
  misc_feature 1..1257: note = Variant of acetate kinase
  source 1..1257: mol_type = other DNA
atgcaccatcatcatcatcatggcggtagcggcatgaaagttctggtgattaattctggtagctcctccatcaaatatcagctcctcgatatgaccaacgaaaaggtattagcgaaaggcttggtcgagcgcattggcatcgacggttcgcgtatcgtgcataaagttaacggcgaaaaacacgtgctggaacatgagattaagaatcacgaaattggacttaaattggtcctggatcttcttacggacgaaaaatacggtgtgttgaaggatctcaaagaaatcgatgcagttgggcatcgcgtagtacatggcggcgagcgttttgccagtagcgtgaagattactgacgaagtcttaaagaccatcgagacgttgtcgttcttagctccgttacacaatccagcgaacattatgggtatcaagagcagcatgaaagtgttaccgggtgtgcctcaagttgccgtctttgatacagcgttccaccagaagatgccggagaaagcctatttgtacgcaatcccctatgagtactacgagaaatataaaattcgccgctatgggtttcatggaacctcacatcgttatgtgagtaaacgtgctgcggaaattatgggcaaaccgtacgatcagctcaagatcattaccgttcacgtgggtaacggcgcatcagttgcggcggtgaagaatggcgtatctgttgacacttccatgggtttcacaccacttgaaggtcttgtcatgggcacgcgcagcggcgatattgatccggccatcgtggaatttcttgagaaagaagaaggattgtcggccaaagaagtcgtcaacatcctcaacaagaaatctggtgtgtatgggctcaccaaaggctttagtagtgacatgcgtgacattgaagataaggctattgaaggtgatcctgtatgccgccttgcattagatgtgtacgaatatcgtatcgcgaaatatattggcgcatacgctgcggccatgaacggtgttgacgcgatcgtctttaccgcaggagttggcgaaaatagcccgattatgcgcgaagaaattattgagaactacttgggctacttagggatcaagatcgataaagaagccaatgacttcaaaggtgaggagaagatcatttcaacgcccgattccaaagtgattgcgatggtagttccgaccaacgaggagctcatgatcgccaaagacacgaaagaaatcattgagaaagggttggacgagcttaagatctaatga

SEQ ID NO: 2934 - protein, 417 aa, synthetic construct
  REGION 1..417: note = Variant of acetate kinase
MHHHHHHGGSGMKVLVINSGSSSIKYQLLDMTNEKVLAKGLVERIGIDGSRIVHKVNGEKHVLEHEIKNHEIGLKLVLDLLTDEKYGVLKDLKEIDAVGHRVVHGGERFASSVKITDEVLKTIETLSFLAPLHNPANIMGIKSSMKVLPGVPQVAVFDTAFHQKMPEKAYLYAIPYEYYEKYKIRRYGFHGTSHRYVSKRAAEIMGKPYDQLKIITVHVGNGASVAAVKNGVSVDTSMGFTPLEGLVMGTRSGDIDPAIVEFLEKEEGLSAKEVVNILNKKSGVYGLTKGFSSDMRDIEDKAIEGDPVCRLALDVYEYRIAKYIGAYAAAMNGVDAIVFTAGVGENSPIMREEIIENYLGYLGIKIDKEANDFKGEEKIISTPDSKVIAMVVPTNEELMIAKDTKEIIEKGLDELKI

SEQ ID NO: 2935 - DNA, 1257 bp, synthetic construct
  misc_feature 1..1257: note = Variant of acetate kinase
  source 1..1257: mol_type = other DNA
atgcaccatcatcatcatcatggcggtagcggcatgaaagttctggtgattaattctggtagctcctccatcaaatatcagctcctcgatatgaccaacgaaaaggtattagcgaaaggcttggtcgagcgcattggcatcgacggttcgcgtatcgtgcataaagttaacggcgaaaaacacgtgctggaacatgagattaagaatcacgaaattggacttaaattggtcctggatcttcttacggacgaaaaatacggtgtgttgaaggatctcaaagaaatcgatgcagttgggcatcgcgtagtacatggcggcgagcgttttgccagtagcgtgaagattactgacgaagtcttaaagaccatcgagacgttgtcgttcttagctccgttacacttgccagcgaacattatgggtatcaagagcagcatgaaagtgttaccgggtgtgcctcaagttgccgtctttgatacagcgttccaccagaagatgccggagaaagcctatttgtacgcaatcccctatgagtactacgagaaatataaaattcgccgctatgggtttcatggaacctcacatcgttatgtgagtaaacgtgctgcggaaattatgggcaaaccgtacgatcagctcaagatcattaccgttcacgtgggtaacggcgcatcagttgcggcggtgaagaatggcgtatctgttgacacttccatgggtttcacaccacttgaaggtcttgtcatgggcacgcgcagcggcgatattgatccggccatcgtggaatttcttgagaaagaagaaggattgtcggccaaagaagtcgtcaacatcctcaacaagaaatctggtgtgtatgggctcaccaaaggctttagtagtgacatgcgtgacattgaagataatgctattgaaggtgatcctgtatgccgccttgcattagatgtgtacgaatatcgtatcgcgaaatatattggcgcatacgctgcggccatgaacggtgttgacgcgatcgtctttaccgcaggagttggcgaaaatagcccgattatgcgcgaagaaattattgagaactacttgggctacttagggatcaagatcgataaagaagccaatgacttcaaaggtgaggagaagatcatttcaacgcccgattccaaagtgattgcgatggtagttccgaccaacgaggagctcatgatcgccaaagacacgaaagaaatcattgagaaagggttggacgagcttaagatctaatga

SEQ ID NO: 2936 - protein, 417 aa, synthetic construct
  REGION 1..417: note = Variant of acetate kinase
MHHHHHHGGSGMKVLVINSGSSSIKYQLLDMTNEKVLAKGLVERIGIDGSRIVHKVNGEKHVLEHEIKNHEIGLKLVLDLLTDEKYGVLKDLKEIDAVGHRVVHGGERFASSVKITDEVLKTIETLSFLAPLHLPANIMGIKSSMKVLPGVPQVAVFDTAFHQKMPEKAYLYAIPYEYYEKYKIRRYGFHGTSHRYVSKRAAEIMGKPYDQLKIITVHVGNGASVAAVKNGVSVDTSMGFTPLEGLVMGTRSGDIDPAIVEFLEKEEGLSAKEVVNILNKKSGVYGLTKGFSSDMRDIEDNAIEGDPVCRLALDVYEYRIAKYIGAYAAAMNGVDAIVFTAGVGENSPIMREEIIENYLGYLGIKIDKEANDFKGEEKIISTPDSKVIAMVVPTNEELMIAKDTKEIIEKGLDELKI

SEQ ID NO: 2937 - DNA, 1257 bp, synthetic construct
  misc_feature 1..1257: note = Variant of acetate kinase
  source 1..1257: mol_type = other DNA
atgcaccatcatcatcatcatggcggtagcggcatgaaagttctggtgattaattctggtagctcctccatcaaatatcagctcctcgatatgaccaacgaaaaggtattagcgaaaggcttggtcgagcgcattggcatcgacggttcgcgtatcgtgcataaagttaacggcgaaaaacacgtgctggaacatgagattaagaatcacgaaattggacttaaattggtcctggatcttcttacggacgaaaaatacggtgtgttgaaggatctcaaagaaatcgatgcagttgggcatcgcgtagtacatggcggcgagcgttttgccagtagcgtgaagattactgacgaagtcttaaagaccatcgagacgttgtcgttcttagctccgttacacaatccagcgaacattatgggtatcaagagcagcatgaaagtgttaccgggtgtgcctcaagttgccgtctttgatacagcgttccaccagaagatgccggagaaagcctatttgtacgcaatcccctatgagtactacgagaaatataaaattcgccgctatgggtttcatggaacctcacatcgttatgtgagtaaacgtgctgcggaaattatgggcaaaccgtacgatcagctcaagatcattaccgttcacgtgggtaacggcgcatcagttgcggcggtgaagaatggcgtatctgttgacacttccatgggtttcacaccacttgaaggtcttgtcatgggcacgcgcagcggcgatattgatccggccatcgtggaatttcttgagaaagaagaaggattgtcggccaaagaagtcgtcaacatcctcaacaagaaatctggtgtgtatgggctcaccaaaggctttagtagtgacatgcgtgacattgaagattctgctattgaaggtgatcctgtatgccgccttgcattagatgtgtacgaatatcgtatcgcgaaatatattggcgcatacgctgcggccatgaacggtgttgacgcgatcgtctttaccgcaggagttggcgaaaatagcccgattatgcgcgaagaaattattgagaactacttgggctacttagggatcaagatcgataaagaagccaatgacttcaaaggtgaggagaagatcatttcaacgcccgattccaaagtgattgcgatggtagttccgaccaacgaggagctcatgatcgccaaagacacgaaagaaatcattgagaaagggttggacgagcttaagatctaatga

SEQ ID NO: 2938 - protein, 417 aa, synthetic construct
  REGION 1..417: note = Variant of acetate kinase
MHHHHHHGGSGMKVLVINSGSSSIKYQLLDMTNEKVLAKGLVERIGIDGSRIVHKVNGEKHVLEHEIKNHEIGLKLVLDLLTDEKYGVLKDLKEIDAVGHRVVHGGERFASSVKITDEVLKTIETLSFLAPLHNPANIMGIKSSMKVLPGVPQVAVFDTAFHQKMPEKAYLYAIPYEYYEKYKIRRYGFHGTSHRYVSKRAAEIMGKPYDQLKIITVHVGNGASVAAVKNGVSVDTSMGFTPLEGLVMGTRSGDIDPAIVEFLEKEEGLSAKEVVNILNKKSGVYGLTKGFSSDMRDIEDSAIEGDPVCRLALDVYEYRIAKYIGAYAAAMNGVDAIVFTAGVGENSPIMREEIIENYLGYLGIKIDKEANDFKGEEKIISTPDSKVIAMVVPTNEELMIAKDTKEIIEKGLDELKI

SEQ ID NO: 2939 - DNA, 1257 bp, synthetic construct
  misc_feature 1..1257: note = Variant of acetate kinase
  source 1..1257: mol_type = other DNA
atgcaccatcatcatcatcatggcggtagcggcatgaaagttctggtgattaattctggtagctcctccatcaaatatcagctcctcgatatgaccaacgaaaaggtattagcgaaaggcttggtcgagcgcattggcatcgacggttcgcgtatcgtgcataaagttaacggcgaagcgcacgtgctggaacatgagattaagaatcacgaaattggacttaaattggtcctggatcttcttacggacgaaaaatacggtgtgttgaaggatctcaaagaaatcgatgcagttgggcatcgcgtagtacatggcggcgagcgttttgccagtagcgtgaagattactgacgaagtcttaaagaccatcgagacgttgtcgttcttagctccgttacacaatccagcgaacattatgggtatcaagagcagcatgaaagtgttaccgggtgtgcctcaagttgccgtctttgatacagcgttccaccagaagatgccggagaaagcctatttgtacgcaatcccctatgagtactacgagaaatataaaattcgccgctatgggtttcatggaacctcacatcgttatgtgagtaaacgtgctgcggaaattatgggcaaaccgtacgatcagctcaagatcattaccgttcacgtgggtaacggcgcatcagttgcggcggtgaagaatggcgtatctgttgacacttccatgggtttcacaccacttgaaggtcttgtcatgggcacgcgcagcggcgatattgatccggccatcgtggaatttcttgagaaagaagaaggattgtcggccaaagaagtcgtcaacatcctcaacaagaaatctggtgtgtatgggctcaccaaaggctttagtagtgacatgcgtgacattgaagataatgctattgaaggtgatcctgtatgccgccttgcattagatgtgtacgaatatcgtatcgcgaaatatattggcgcatacgctgcggccatgaacggtgttgacgcgatcgtctttaccgcaggagttggcgaaaatagcccgattatgcgcgaagaaattattgagaactacttgggctacttagggatcaagatcgataaagaagccaatgacttcaaaggtgaggagaagatcatttcaacgcccgattccaaagtgattgcgatggtagttccgaccaacgaggagctcatgatcgccaaagacacgaaagaaatcattgagaaagggttggacgagcttaagatctaatga

SEQ ID NO: 2940 - protein, 417 aa, synthetic construct
  REGION 1..417: note = Variant of acetate kinase
MHHHHHHGGSGMKVLVINSGSSSIKYQLLDMTNEKVLAKGLVERIGIDGSRIVHKVNGEAHVLEHEIKNHEIGLKLVLDLLTDEKYGVLKDLKEIDAVGHRVVHGGERFASSVKITDEVLKTIETLSFLAPLHNPANIMGIKSSMKVLPGVPQVAVFDTAFHQKMPEKAYLYAIPYEYYEKYKIRRYGFHGTSHRYVSKRAAEIMGKPYDQLKIITVHVGNGASVAAVKNGVSVDTSMGFTPLEGLVMGTRSGDIDPAIVEFLEKEEGLSAKEVVNILNKKSGVYGLTKGFSSDMRDIEDNAIEGDPVCRLALDVYEYRIAKYIGAYAAAMNGVDAIVFTAGVGENSPIMREEIIENYLGYLGIKIDKEANDFKGEEKIISTPDSKVIAMVVPTNEELMIAKDTKEIIEKGLDELKI

SEQ ID NO: 2941 - DNA, 1257 bp, synthetic construct
  misc_feature 1..1257: note = Variant of acetate kinase
  source 1..1257: mol_type = other DNA
atgcaccatcatcatcatcatggcggtagcggcatgaaagttctggtgattaattctggtagctcctccatcaaatatcagctcctcgatatgaccaacgaaaaggtattagcgaaaggcttggtcgagcgcattggcatcgacggttcgcgtatcgtgcataaagttaacggcgaaaaacacgtgctggaacatgagattaagaatcacgaaattggacttaaattggtcctggatcttcttacggacgaaaaatacggtgtgttgaaggatctcaaagaaatcgatgcagttgggcatcgcgtagtacatggcggcgagcgttttgccagtagcgtgaagattactgacgaagtcttaaagaccatcgagacgttgtcgttcttagctccgttacacaatccagcgaacattatgggtatcaagagcagcatgaaagtgttaccgggtgtgcctcaagttgccgtctttgatacagcgttccaccagaagatgccggagaaagcctatttgtacgcaatcccctatgagtactacgagaaatataaaattcgccgctatgggtttcatggaacctcacatcgttatgtgagtaaacgtgctgcggaaattatgggcaaaccgtacgatcagctcaagatcattaccgttcacgtgggtaacggcgcatcagttgcggcggtgaagaatggcgtatctgttgacacttccatgggtttcacaccacttgaaggtcttgtcatgggcacgcgcagcggcgatattgatccggccatcgtggaatttcttgagaaagaagaaggattgtcggccaaagaagtcgtcaacatcctcaacaagaaatctggtgtgtatgggctcaccaaaggctttagtagtgacatgcgtgacattgaatggaatgctattgaaggtgatcctgtatgccgccttgcattagatgtgtacgaatatcgtatcgcgaaatatattggcgcatacgctgcggccatgaacggtgttgacgcgatcgtctttaccgcaggagttggcgaaaatagcccgattatgcgcgaagaaattattgagaactacttgggctacttagggatcaagatcgataaagaagccaatgacttcaaaggtgaggagaagatcatttcaacgcccgattccaaagtgattgcgatggtagttccgaccaacgaggagctcatgatcgccaaagacacgaaagaaatcattgagaaagggttggacgagcttaagatctaatga

SEQ ID NO: 2942 - protein, 417 aa, synthetic construct
  REGION 1..417: note = Variant of acetate kinase
MHHHHHHGGSGMKVLVINSGSSSIKYQLLDMTNEKVLAKGLVERIGIDGSRIVHKVNGEKHVLEHEIKNHEIGLKLVLDLLTDEKYGVLKDLKEIDAVGHRVVHGGERFASSVKITDEVLKTIETLSFLAPLHNPANIMGIKSSMKVLPGVPQVAVFDTAFHQKMPEKAYLYAIPYEYYEKYKIRRYGFHGTSHRYVSKRAAEIMGKPYDQLKIITVHVGNGASVAAVKNGVSVDTSMGFTPLEGLVMGTRSGDIDPAIVEFLEKEEGLSAKEVVNILNKKSGVYGLTKGFSSDMRDIEWNAIEGDPVCRLALDVYEYRIAKYIGAYAAAMNGVDAIVFTAGVGENSPIMREEIIENYLGYLGIKIDKEANDFKGEEKIISTPDSKVIAMVVPTNEELMIAKDTKEIIEKGLDELKI

SEQ ID NO: 2943 - DNA, 1257 bp, synthetic construct
  misc_feature 1..1257: note = Variant of acetate kinase
  source 1..1257: mol_type = other DNA
atgcaccatcatcatcatcatggcggtagcggcatgaaagttctggtgattaattctggtagctcctccatcaaatatcagctcctcgatatgaccaacgaaaaggtattagcgaaaggcttggtcgagcgcattggcatcgacggttcgcgtatcgtgcataaagttaacggcgaaaaacacgtgctggaaagtgagattaagaatcacgaaattggacttaaattggtcctggatcttcttacggacgaaaaatacggtgtgttgaaggatctcaaagaaatcgatgcagttgggcatcgcgtagtacatggcggcgagcgttttgccagtagcgtgaagattactgacgaagtcttaaagaccatcgagacgttgtcgttcttagctccgttacacaatccagcgaacattatgggtatcaagagcagcatgaaagtgttaccgggtgtgcctcaagttgccgtctttgatacagcgttccaccagaagatgccggagaaagcctatttgtacgcaatcccctatgagtactacgagaaatataaaattcgccgctatgggtttcatggaacctcacatcgttatgtgagtaaacgtgctgcggaaattatgggcaaaccgtacgatcagctcaagatcattaccgttcacgtgggtaacggcgcatcagttgcggcggtgaagaatggcgtatctgttgacacttccatgggtttcacaccacttgaaggtcttgtcatgggcacgcgcagcggcgatattgatccggccatcgtggaatttcttgagaaagaagaaggattgtcggccaaagaagtcgtcaacatcctcaacaagaaatctggtgtgtatgggctcaccaaaggctttagtagtgacatgcgtgacattgaagataatgctattgaaggtgatcctgtatgccgccttgcattagatgtgtacgaatatcgtatcgcgaaatatattggcgcatacgctgcggccatgaacggtgttgacgcgatcgtctttaccgcaggagttggcgaaaatagcccgattatgcgcgaagaaattattgagaactacttgggctacttagggatcaagatcgataaagaagccaatgacttcaaaggtgaggagaagatcatttcaacgcccgattccaaagtgattgcgatggtagttccgaccaacgaggagctcatgatcgccaaagacacgaaagaaatcattgagaaagggttggacgagcttaagatctaatga

SEQ ID NO: 2944 - protein, 417 aa, synthetic construct
  REGION 1..417: note = Variant of acetate kinase
MHHHHHHGGSGMKVLVINSGSSSIKYQLLDMTNEKVLAKGLVERIGIDGSRIVHKVNGEKHVLESEIKNHEIGLKLVLDLLTDEKYGVLKDLKEIDAVGHRVVHGGERFASSVKITDEVLKTIETLSFLAPLHNPANIMGIKSSMKVLPGVPQVAVFDTAFHQKMPEKAYLYAIPYEYYEKYKIRRYGFHGTSHRYVSKRAAEIMGKPYDQLKIITVHVGNGASVAAVKNGVSVDTSMGFTPLEGLVMGTRSGDIDPAIVEFLEKEEGLSAKEVVNILNKKSGVYGLTKGFSSDMRDIEDNAIEGDPVCRLALDVYEYRIAKYIGAYAAAMNGVDAIVFTAGVGENSPIMREEIIENYLGYLGIKIDKEANDFKGEEKIISTPDSKVIAMVVPTNEELMIAKDTKEIIEKGLDELKI

SEQ ID NO: 2945 - DNA, 1257 bp, synthetic construct
  misc_feature 1..1257: note = Variant of acetate kinase
  source 1..1257: mol_type = other DNA
atgcaccatcatcatcatcatggcggtagcggcatgaaagttctggtgattaattctggtagctcctccatcaaatatcagctcctcgatatgaccaacgaaaaggtattagcgaaaggcttggtcgagcgcattggcatcgacggttcgcgtatcgtgcataaagttaacggcgaaaaacacgtgctggaacatgagattgcgaatcacgaaattggacttaaattggtcctggatcttcttacggacgaaaaatacggtgtgttgaaggatctcaaagaaatcgatgcagttgggcatcgcgtagtacatggcggcgagcgttttgccagtagcgtgaagattactgacgaagtcttaaagaccatcgagacgttgtcgttcttagctccgttacacaatccagcgaacattatgggtatcaagagcagcatgaaagtgttaccgggtgtgcctcaagttgccgtctttgatacagcgttccaccagaagatgccggagaaagcctatttgtacgcaatcccctatgagtactacgagaaatataaaattcgccgctatgggtttcatggaacctcacatcgttatgtgagtaaacgtgctgcggaaattatgggcaaaccgtacgatcagctcaagatcattaccgttcacgtgggtaacggcgcatcagttgcggcggtgaagaatggcgtatctgttgacacttccatgggtttcacaccacttgaaggtcttgtcatgggcacgcgcagcggcgatattgatccggccatcgtggaatttcttgagaaagaagaaggattgtcggccaaagaagtcgtcaacatcctcaacaagaaatctggtgtgtatgggctcaccaaaggctttagtagtgacatgcgtgacattgaagataatgctattgaaggtgatcctgtatgccgccttgcattagatgtgtacgaatatcgtatcgcgaaatatattggcgcatacgctgcggccatgaacggtgttgacgcgatcgtctttaccgcaggagttggcgaaaatagcccgattatgcgcgaagaaattattgagaactacttgggctacttagggatcaagatcgataaagaagccaatgacttcaaaggtgaggagaagatcatttcaacgcccgattccaaagtgattgcgatggtagttccgaccaacgaggagctcatgatcgccaaagacacgaaagaaatcattgagaaagggttggacgagcttaagatctaatga

SEQ ID NO: 2946 - protein, 417 aa, synthetic construct
  REGION 1..417: note = Variant of acetate kinase
MHHHHHHGGSGMKVLVINSGSSSIKYQLLDMTNEKVLAKGLVERIGIDGSRIVHKVNGEKHVLEHEIANHEIGLKLVLDLLTDEKYGVLKDLKEIDAVGHRVVHGGERFASSVKITDEVLKTIETLSFLAPLHNPANIMGIKSSMKVLPGVPQVAVFDTAFHQKMPEKAYLYAIPYEYYEKYKIRRYGFHGTSHRYVSKRAAEIMGKPYDQLKIITVHVGNGASVAAVKNGVSVDTSMGFTPLEGLVMGTRSGDIDPAIVEFLEKEEGLSAKEVVNILNKKSGVYGLTKGFSSDMRDIEDNAIEGDPVCRLALDVYEYRIAKYIGAYAAAMNGVDAIVFTAGVGENSPIMREEIIENYLGYLGIKIDKEANDFKGEEKIISTPDSKVIAMVVPTNEELMIAKDTKEIIEKGLDELKI

SEQ ID NO: 2947 - DNA, 1257 bp, synthetic construct
  misc_feature 1..1257: note = Variant of acetate kinase
  source 1..1257: mol_type = other DNA
atgcaccatcatcatcatcatggcggtagcggcatgaaagttctggtgattaattctggtagctcctccatcaaatatcagctcctcgatatgaccaacgaaaaggtattagcgaaaggcttggtcgagcgcattggcatcgacggttcgcgtatcgtgcataaagttaacggcgaaacgcacgtgctggaacatgagattaagaatcacgaaattggacttaaattggtcctggatcttcttacggacgaaaaatacggtgtgttgaaggatctcaaagaaatcgatgcagttgggcatcgcgtagtacatggcggcgagcgttttgccagtagcgtgaagattactgacgaagtcttaaagaccatcgagacgttgtcgttcttagctccgttacacaatccagcgaacattatgggtatcaagagcagcatgaaagtgttaccgggtgtgcctcaagttgccgtctttgatacagcgttccaccagaagatgccggagaaagcctatttgtacgcaatcccctatgagtactacgagaaatataaaattcgccgctatgggtttcatggaacctcacatcgttatgtgagtaaacgtgctgcggaaattatgggcaaaccgtacgatcagctcaagatcattaccgttcacgtgggtaacggcgcatcagttgcggcggtgaagaatggcgtatctgttgacacttccatgggtttcacaccacttgaaggtcttgtcatgggcacgcgcagcggcgatattgatccggccatcgtggaatttcttgagaaagaagaaggattgtcggccaaagaagtcgtcaacatcctcaacaagaaatctggtgtgtatgggctcaccaaaggctttagtagtgacatgcgtgacattgaagataatgctattgaaggtgatcctgtatgccgccttgcattagatgtgtacgaatatcgtatcgcgaaatatattggcgcatacgctgcggccatgaacggtgttgacgcgatcgtctttaccgcaggagttggcgaaaatagcccgattatgcgcgaagaaattattgagaactacttgggctacttagggatcaagatcgataaagaagccaatgacttcaaaggtgaggagaagatcatttcaacgcccgattccaaagtgattgcgatggtagttccgaccaacgaggagctcatgatcgccaaagacacgaaagaaatcattgagaaagggttggacgagcttaagatctaatga

SEQ ID NO: 2948 - protein, 417 aa, synthetic construct
  REGION 1..417: note = Variant of acetate kinase
MHHHHHHGGSGMKVLVINSGSSSIKYQLLDMTNEKVLAKGLVERIGIDGSRIVHKVNGETHVLEHEIKNHEIGLKLVLDLLTDEKYGVLKDLKEIDAVGHRVVHGGERFASSVKITDEVLKTIETLSFLAPLHNPANIMGIKSSMKVLPGVPQVAVFDTAFHQKMPEKAYLYAIPYEYYEKYKIRRYGFHGTSHRYVSKRAAEIMGKPYDQLKIITVHVGNGASVAAVKNGVSVDTSMGFTPLEGLVMGTRSGDIDPAIVEFLEKEEGLSAKEVVNILNKKSGVYGLTKGFSSDMRDIEDNAIEGDPVCRLALDVYEYRIAKYIGAYAAAMNGVDAIVFTAGVGENSPIMREEIIENYLGYLGIKIDKEANDFKGEEKIISTPDSKVIAMVVPTNEELMIAKDTKEIIEKGLDELKI

SEQ ID NO: 2949 - DNA, 1257 bp, synthetic construct
  misc_feature 1..1257: note = Variant of acetate kinase
  source 1..1257: mol_type = other DNA
atgcaccatcatcatcatcatggcggtagcggcatgaaagttctggtgattaattctggtagctcctccatcaaatatcagctcctcgatatgaccaacgaaaaggtattagcgaaaggcttggtcgagcgcattggcatcgacggttcgcgtatcgtgcataaagttaacggcgaaaaacacgtgctggaacatgagattaagaatcacgaaattggacttaaattggtcctggatcttcttacggacgaaaaatacggtgtgttgaaggatctcaaagaaatcgatgcagttgggcatcgcgtagtacatggcggcgagcgttttgccagtagcgtgaagattactgacgaagtcttaaagaccatcgagacgttgtcgttcttagctccgttacacaatccagcgaacattatgggtatcaagagcagcatgaaagtgttaccgggtgtgcctcaagttgccgtctttgatacagcgttccaccagaagatgccggagaaagcctatttgtacgcaatcccctatgagtactacgagaaatataaaattcgccgctatgggtttcatggaacctcacatcgttatgtgagtaaacgtgctgcggaaattatgggcaaaccgtacgatcagctcaagatcattaccgttcacgtgggtaacggcgcatcagttgcggcggtgaagaatggcgtatctgttgacacttccatgggtttcacaccacttgaaggtcttgtcatgggcacgcgcagcggcgatattgatccggccatcgtggaatttcttgagaaagaagaaggattgtcggccaaagaagtcgtcaacatcctcaacaagaaatctggtgtgtatgggctcaccaaaggctttagtagtgacatgcgtgacattgaagatcatgctattgaaggtgatcctgtatgccgccttgcattagatgtgtacgaatatcgtatcgcgaaatatattggcgcatacgctgcggccatgaacggtgttgacgcgatcgtctttaccgcaggagttggcgaaaatagcccgattatgcgcgaagaaattattgagaactacttgggctacttagggatcaagatcgataaagaagccaatgacttcaaaggtgaggagaagatcatttcaacgcccgattccaaagtgattgcgatggtagttccgaccaacgaggagctcatgatcgccaaagacacgaaagaaatcattgagaaagggttggacgagcttaagatctaatga

SEQ ID NO: 2950 - protein, 417 aa, synthetic construct
  REGION 1..417: note = Variant of acetate kinase
MHHHHHHGGSGMKVLVINSGSSSIKYQLLDMTNEKVLAKGLVERIGIDGSRIVHKVNGEKHVLEHEIKNHEIGLKLVLDLLTDEKYGVLKDLKEIDAVGHRVVHGGERFASSVKITDEVLKTIETLSFLAPLHNPANIMGIKSSMKVLPGVPQVAVFDTAFHQKMPEKAYLYAIPYEYYEKYKIRRYGFHGTSHRYVSKRAAEIMGKPYDQLKIITVHVGNGASVAAVKNGVSVDTSMGFTPLEGLVMGTRSGDIDPAIVEFLEKEEGLSAKEVVNILNKKSGVYGLTKGFSSDMRDIEDHAIEGDPVCRLALDVYEYRIAKYIGAYAAAMNGVDAIVFTAGVGENSPIMREEIIENYLGYLGIKIDKEANDFKGEEKIISTPDSKVIAMVVPTNEELMIAKDTKEIIEKGLDELKI

SEQ ID NO: 2951 - DNA, 1257 bp, synthetic construct
  misc_feature 1..1257: note = Variant of acetate kinase
  source 1..1257: mol_type = other DNA
atgcaccatcatcatcatcatggcggtagcggcatgaaagttctggtgattaattctggtagctcctccatcaaatatcagctcctcgatatgaccaacgaaaaggtattagcgaaaggcttggtcgagcgcattggcatcgacggttcgcgtatcgtgcataaagttaacggcgaaagtcacgtgctggaacatgagattaagaatcacgaaattggacttaaattggtcctggatcttcttacggacgaaaaatacggtgtgttgaaggatctcaaagaaatcgatgcagttgggcatcgcgtagtacatggcggcgagcgttttgccagtagcgtgaagattactgacgaagtcttaaagaccatcgagacgttgtcgttcttagctccgttacacaatccagcgaacattatgggtatcaagagcagcatgaaagtgttaccgggtgtgcctcaagttgccgtctttgatacagcgttccaccagaagatgccggagaaagcctatttgtacgcaatcccctatgagtactacgagaaatataaaattcgccgctatgggtttcatggaacctcacatcgttatgtgagtaaacgtgctgcggaaattatgggcaaaccgtacgatcagctcaagatcattaccgttcacgtgggtaacggcgcatcagttgcggcggtgaagaatggcgtatctgttgacacttccatgggtttcacaccacttgaaggtcttgtcatgggcacgcgcagcggcgatattgatccggccatcgtggaatttcttgagaaagaagaaggattgtcggccaaagaagtcgtcaacatcctcaacaagaaatctggtgtgtatgggctcaccaaaggctttagtagtgacatgcgtgacattgaagataatgctattgaaggtgatcctgtatgccgccttgcattagatgtgtacgaatatcgtatcgcgaaatatattggcgcatacgctgcggccatgaacggtgttgacgcgatcgtctttaccgcaggagttggcgaaaatagcccgattatgcgcgaagaaattattgagaactacttgggctacttagggatcaagatcgataaagaagccaatgacttcaaaggtgaggagaagatcatttcaacgcccgattccaaagtgattgcgatggtagttccgaccaacgaggagctcatgatcgccaaagacacgaaagaaatcattgagaaagggttggacgagcttaagatctaatga

SEQ ID NO: 2952 - protein, 417 aa, synthetic construct
  REGION 1..417: note = Variant of acetate kinase
MHHHHHHGGSGMKVLVINSGSSSIKYQLLDMTNEKVLAKGLVERIGIDGSRIVHKVNGESHVLEHEIKNHEIGLKLVLDLLTDEKYGVLKDLKEIDAVGHRVVHGGERFASSVKITDEVLKTIETLSFLAPLHNPANIMGIKSSMKVLPGVPQVAVFDTAFHQKMPEKAYLYAIPYEYYEKYKIRRYGFHGTSHRYVSKRAAEIMGKPYDQLKIITVHVGNGASVAAVKNGVSVDTSMGFTPLEGLVMGTRSGDIDPAIVEFLEKEEGLSAKEVVNILNKKSGVYGLTKGFSSDMRDIEDNAIEGDPVCRLALDVYEYRIAKYIGAYAAAMNGVDAIVFTAGVGENSPIMREEIIENYLGYLGIKIDKEANDFKGEEKIISTPDSKVIAMVVPTNEELMIAKDTKEIIEKGLDELKI

SEQ ID NO: 2953 - DNA, 1257 bp, synthetic construct
  misc_feature 1..1257: note = Variant of acetate kinase
  source 1..1257: mol_type = other DNA
atgcaccatcatcatcatcatggcggtagcggcatgaaagttctggtgattaattctggtagctcctccatcaaatatcagctcctcgatatgaccaacgaaaaggtattagcgaaaggcttggtcgagcgcattggcatcgacggttcgcgtatcgtgcataaagttaacggcgaaaaacacgtgctggaagcggagattaagaatcacgaaattggacttaaattggtcctggatcttcttacggacgaaaaatacggtgtgttgaaggatctcaaagaaatcgatgcagttgggcatcgcgtagtacatggcggcgagcgttttgccagtagcgtgaagattactgacgaagtcttaaagaccatcgagacgttgtcgttcttagctccgttacacaatccagcgaacattatgggtatcaagagcagcatgaaagtgttaccgggtgtgcctcaagttgccgtctttgatacagcgttccaccagaagatgccggagaaagcctatttgtacgcaatcccctatgagtactacgagaaatataaaattcgccgctatgggtttcatggaacctcacatcgttatgtgagtaaacgtgctgcggaaattatgggcaaaccgtacgatcagctcaagatcattaccgttcacgtgggtaacggcgcatcagttgcggcggtgaagaatggcgtatctgttgacacttccatgggtttcacaccacttgaaggtcttgtcatgggcacgcgcagcggcgatattgatccggccatcgtggaatttcttgagaaagaagaaggattgtcggccaaagaagtcgtcaacatcctcaacaagaaatctggtgtgtatgggctcaccaaaggctttagtagtgacatgcgtgacattgaagataatgctattgaaggtgatcctgtatgccgccttgcattagatgtgtacgaatatcgtatcgcgaaatatattggcgcatacgctgcggccatgaacggtgttgacgcgatcgtctttaccgcaggagttggcgaaaatagcccgattatgcgcgaagaaattattgagaactacttgggctacttagggatcaagatcgataaagaagccaatgacttcaaaggtgaggagaagatcatttcaacgcccgattccaaagtgattgcgatggtagttccgaccaacgaggagctcatgatcgccaaagacacgaaagaaatcattgagaaagggttggacgagcttaagatctaatga

SEQ ID NO: 2954 - protein, 417 aa, synthetic construct
  REGION 1..417: note = Variant of acetate kinase
MHHHHHHGGSGMKVLVINSGSSSIKYQLLDMTNEKVLAKGLVERIGIDGSRIVHKVNGEKHVLEAEIKNHEIGLKLVLDLLTDEKYGVLKDLKEIDAVGHRVVHGGERFASSVKITDEVLKTIETLSFLAPLHNPANIMGIKSSMKVLPGVPQVAVFDTAFHQKMPEKAYLYAIPYEYYEKYKIRRYGFHGTSHRYVSKRAAEIMGKPYDQLKIITVHVGNGASVAAVKNGVSVDTSMGFTPLEGLVMGTRSGDIDPAIVEFLEKEEGLSAKEVVNILNKKSGVYGLTKGFSSDMRDIEDNAIEGDPVCRLALDVYEYRIAKYIGAYAAAMNGVDAIVFTAGVGENSPIMREEIIENYLGYLGIKIDKEANDFKGEEKIISTPDSKVIAMVVPTNEELMIAKDTKEIIEKGLDELKI

SEQ ID NO: 2955 - DNA, 1257 bp, synthetic construct
  misc_feature 1..1257: note = Variant of acetate kinase
  source 1..1257: mol_type = other DNA
atgcaccatcatcatcatcatggcggtagcggcatgaaagttctggtgattaattctggtagctcctccatcaaatatcagctcctcgatatgaccaacgaaaaggtattagcgaaaggcttggtcgagcgcattggcatcgacggttcgcgtatcgtgcatagtgttaacggcgaaaaacacgtgctggaacatgagattaagaatcacgaaattggacttaaattggtcctggatcttcttacggacgaaaaatacggtgtgttgaaggatctcaaagaaatcgatgcagttgggcatcgcgtagtacatggcggcgagcgttttgccagtagcgtgaagattactgacgaagtcttaaagaccatcgagacgttgtcgttcttagctccgttacacaatccagcgaacattatgggtatcaagagcagcatgaaagtgttaccgggtgtgcctcaagttgccgtctttgatacagcgttccaccagaagatgccggagaaagcctatttgtacgcaatcccctatgagtactacgagaaatataaaattcgccgctatgggtttcatggaacctcacatcgttatgtgagtaaacgtgctgcggaaattatgggcaaaccgtacgatcagctcaagatcattaccgttcacgtgggtaacggcgcatcagttgcggcggtgaagaatggcgtatctgttgacacttccatgggtttcacaccacttgaaggtcttgtcatgggcacgcgcagcggcgatattgatccggccatcgtggaatttcttgagaaagaagaaggattgtcggccaaagaagtcgtcaacatcctcaacaagaaatctggtgtgtatgggctcaccaaaggctttagtagtgacatgcgtgacattgaagataatgctattgaaggtgatcctgtatgccgccttgcattagatgtgtacgaatatcgtatcgcgaaatatattggcgcatacgctgcggccatgaacggtgttgacgcgatcgtctttaccgcaggagttggcgaaaatagcccgattatgcgcgaagaaattattgagaactacttgggctacttagggatcaagatcgataaagaagccaatgacttcaaaggtgaggagaagatcatttcaacgcccgattccaaagtgattgcgatggtagttccgaccaacgaggagctcatgatcgccaaagacacgaaagaaatcattgagaaagggttggacgagcttaagatctaatga

SEQ ID NO: 2956 - protein, 417 aa, synthetic construct
  REGION 1..417: note = Variant of acetate kinase
MHHHHHHGGSGMKVLVINSGSSSIKYQLLDMTNEKVLAKGLVERIGIDGSRIVHSVNGEKHVLEHEIKNHEIGLKLVLDLLTDEKYGVLKDLKEIDAVGHRVVHGGERFASSVKITDEVLKTIETLSFLAPLHNPANIMGIKSSMKVLPGVPQVAVFDTAFHQKMPEKAYLYAIPYEYYEKYKIRRYGFHGTSHRYVSKRAAEIMGKPYDQLKIITVHVGNGASVAAVKNGVSVDTSMGFTPLEGLVMGTRSGDIDPAIVEFLEKEEGLSAKEVVNILNKKSGVYGLTKGFSSDMRDIEDNAIEGDPVCRLALDVYEYRIAKYIGAYAAAMNGVDAIVFTAGVGENSPIMREEIIENYLGYLGIKIDKEANDFKGEEKIISTPDSKVIAMVVPTNEELMIAKDTKEIIEKGLDELKI

SEQ ID NO: 2957 - DNA, 1257 bp, synthetic construct
  misc_feature 1..1257: note = Variant of acetate kinase
  source 1..1257: mol_type = other DNA
atgcaccatcatcatcatcatggcggtagcggcatgaaagttctggtgattaattctggtagctcctccatcaaatatcagctcctcgatatgaccaacgaaaaggtattagcgaaaggcttggtcgagcgcattggcatcgacggttcgcgtatcgtgcataaagttaacggcgaaaaacacgtgctggaacatgagattaagaatcacgaaattggacttaaattggtcctggatcttcttacggacgaaaaatacggtgtgttgaaggatctcaaagaaatcgatgcagttgggcatcgcgtagtacatggcggcgagcgttttgccagtagcgtgaagattactgacgaagtcttaaagaccatcgagacgttgtcgttcttagctccgttacacaatccagcgaacattatgggtatcaagagcagcatgaaagtgttaccgggtgtgcctcaagttgccgtctttgatacagcgttccaccagaagatgccggagaaagcctatttgtacgcaatcccctatgagtactacgagaaatataaaattcgccgctatgggtttcatggaacctcacatcgttatgtgagtaaacgtgctgcggaaattatgggcaaaccgtacgatcagctcaagatcattaccgttcacgtgggtaacggcgcatcagttgcggcggtgaagaatggcgtatctgttgacacttccatgggtttcacaccacttgaaggtcttgtcatgggcacgcgcagcggcgatattgatccggccatcgtggaatttcttgagaaagaagaaggattgtcggccaaagaagtcgtcaacatcctcaacaagaaatctggtgtgtatgggctcaccaaaggctttagtagtgacatgcgtgacattgaagatcgggctattgaaggtgatcctttatgccgccttgcattagatgtgtacgaatatcgtatcgcgaaatatattggcgcatacgctgcggccatgaacggtgttgacgcgatcgtctttaccgcaggagttggcgaaaatagcccgattatgcgcgaagaaattattgagaactacttgggctacttagggatcaagatcgataaagaagccaatgacttcaaaggtgaggagaagatcatttcaacgcccgattccaaagtgattgcgatggtagttccgaccaacgaggagctcatgatcgccaaagacacgaaagaaatcattgagaaagggttggacgagcttaagatctaatga

SEQ ID NO: 2958 - protein, 417 aa, synthetic construct
  REGION 1..417: note = Variant of acetate kinase
MHHHHHHGGSGMKVLVINSGSSSIKYQLLDMTNEKVLAKGLVERIGIDGSRIVHKVNGEKHVLEHEIKNHEIGLKLVLDLLTDEKYGVLKDLKEIDAVGHRVVHGGERFASSVKITDEVLKTIETLSFLAPLHNPANIMGIKSSMKVLPGVPQVAVFDTAFHQKMPEKAYLYAIPYEYYEKYKIRRYGFHGTSHRYVSKRAAEIMGKPYDQLKIITVHVGNGASVAAVKNGVSVDTSMGFTPLEGLVMGTRSGDIDPAIVEFLEKEEGLSAKEVVNILNKKSGVYGLTKGFSSDMRDIEDRAIEGDPLCRLALDVYEYRIAKYIGAYAAAMNGVDAIVFTAGVGENSPIMREEIIENYLGYLGIKIDKEANDFKGEEKIISTPDSKVIAMVVPTNEELMIAKDTKEIIEKGLDELKI

SEQ ID NO: 2959 - DNA, 1257 bp, synthetic construct
  misc_feature 1..1257: note = Variant of acetate kinase
  source 1..1257: mol_type = other DNA
atgcaccatcatcatcatcatggcggtagcggcatgaaagttctggtgattaattctggtagctcctccatcaaatatcagctcctcgatatgaccaacgaaaaggtattagcgaaaggcttggtcgagcgcattggcatcgacggttcgcgtatcgtgcataaagttaacggcgaaaaacacgtgctggaacatgagattaagaatcacgaaattggacttaaattggtcctggatcttcttacggacgaaaaatacggtgtgttgaaggatctcaaagaaatcgatgcagttgggcatcgcgtagtacatggcggcgagcgttttaagagtagcgtgaagattactgacgaagtcttaaagaccatcgagacgttgtcgttcttagctccgttacacaatccagcgaacattatgggtatcaagagcagcatgaaagtgttaccgggtgtgcctcaagttgccgtctttgatacagcgttccaccagaagatgccggagaaagcctatttgtacgcaatcccctatgagtactacgagaaatataaaattcgccgctatgggtttcatggaacctcacatcgttatgtgagtaaacgtgctgcggaaattatgggcaaaccgtacgatcagctcaagatcattaccgttcacgtgggtaacggcgcatcagttgcggcggtgaagaatggcgtatctgttgacacttccatgggtttcacaccacttgaaggtcttgtcatgggcacgcgcagcggcgatattgatccggccatcgtggaatttcttgagaaagaagaaggattgtcggccaaagaagtcgtcaacatcctcaacaagaaatctggtgtgtatgggctcaccaaaggctttagtagtgacatgcgtgacattgaagataatgctattgaaggtgatcctgtatgccgccttgcattagatgtgtacgaatatcgtatcgcgaaatatattggcgcatacgctgcggccatgaacggtgttgacgcgatcgtctttaccgcaggagttggcgaaaatagcccgattatgcgcgaagaaattattgagaactacttgggctacttagggatcaagatcgataaagaagccaatgacttcaaaggtgaggagaagatcatttcaacgcccgattccaaagtcattgcgatggtagttccgaccaacgaggagctcatgatcgccaaagacacgaaagaaatcattgagaaagggttggacgagcttaagatctaatga

SEQ ID NO: 2960 - protein, 417 aa, synthetic construct
  REGION 1..417: note = Variant of acetate kinase
MHHHHHHGGSGMKVLVINSGSSSIKYQLLDMTNEKVLAKGLVERIGIDGSRIVHKVNGEKHVLEHEIKNHEIGLKLVLDLLTDEKYGVLKDLKEIDAVGHRVVHGGERFKSSVKITDEVLKTIETLSFLAPLHNPANIMGIKSSMKVLPGVPQVAVFDTAFHQKMPEKAYLYAIPYEYYEKYKIRRYGFHGTSHRYVSKRAAEIMGKPYDQLKIITVHVGNGASVAAVKNGVSVDTSMGFTPLEGLVMGTRSGDIDPAIVEFLEKEEGLSAKEVVNILNKKSGVYGLTKGFSSDMRDIEDNAIEGDPVCRLALDVYEYRIAKYIGAYAAAMNGVDAIVFTAGVGENSPIMREEIIENYLGYLGIKIDKEANDFKGEEKIISTPDSKVIAMVVPTNEELMIAKDTKEIIEKGLDELKI

SEQ ID NO: 2961 - DNA, 1257 bp, synthetic construct
  misc_feature 1..1257: note = Variant of acetate kinase
  source 1..1257: mol_type = other DNA
atgcaccatcatcatcatcatggcggtagcggcatgaaagttctggtgattaattctggtagctcctccatcaaatatcagctcctcgatatgaccaacgaaaaggtattagcgaaaggcttggtcgagcgcattggcatcgacggttcgcgtatcgtgcataaagttaacggcgaaaaacacgtgctggaacatgagattaagaatcacgaaattggacttaaattggtcctggatcttcttacggacgaaaaatacggtgtgttgaaggatctcaaagaaatcgatgcagttgggcatcgcgtagtacatggcggcgagcgttttgccagtagcgtgaagattactgacgaagtcttaaagaccatcgagacgttgtcgttcttagctccgttacacaatccagcgaacattgagggtatcaagagcagcatgaaagtgttaccgggtgtgcctcaagttgccgtctttgatacagcgttccaccagaagatgccggagaaagcctatttgtacgcaatcccctatgagtactacgagaaatataaaattcgccgctatgggtttcatggaacctcacatcgttatgtgagtaaacgtgctgcggaaattatgggcaaaccgtacgatcagctcaagatcattaccgttcacgtgggtaacggcgcatcagttgcggcggtgaagaatggcgtatctgttgacacttccatgggtttcacaccacttgaaggtcttgtcatgggcacgcgcagcggcgatattgatccggccatcgtggaatttcttgagaaagaagaaggattgtcggccaaagaagtcgtcaacatcctcaacaagaaatctggtgtgtatgggctcaccaaaggctttagtagtgacatgcgtgacattgaagataatgctattgaaggtgatcctgtatgccgccttgcattagatgtgtacgaatatcgtatcgcgaaatatattggcgcatacgctgcggccatgaacggtgttgacgcgatcgtctttaccgcaggagttggcgaaaatagcccgattatgcgcgaagaaattattgagaactacttgggctacttagggatcaagatcgataaagaagccaatgacttcaaaggtgaggagaagatcatttcaacgcccgattccaaagtgattgcgatggtagttccgaccaacgaggagctcatgatcgccaaagacacgaaagaaatcattgagaaagggttggacgagcttaagatctaatga

SEQ ID NO: 2962 - protein, 417 aa, synthetic construct
  REGION 1..417: note = Variant of acetate kinase
MHHHHHHGGSGMKVLVINSGSSSIKYQLLDMTNEKVLAKGLVERIGIDGSRIVHKVNGEKHVLEHEIKNHEIGLKLVLDLLTDEKYGVLKDLKEIDAVGHRVVHGGERFASSVKITDEVLKTIETLSFLAPLHNPANIEGIKSSMKVLPGVPQVAVFDTAFHQKMPEKAYLYAIPYEYYEKYKIRRYGFHGTSHRYVSKRAAEIMGKPYDQLKIITVHVGNGASVAAVKNGVSVDTSMGFTPLEGLVMGTRSGDIDPAIVEFLEKEEGLSAKEVVNILNKKSGVYGLTKGFSSDMRDIEDNAIEGDPVCRLALDVYEYRIAKYIGAYAAAMNGVDAIVFTAGVGENSPIMREEIIENYLGYLGIKIDKEANDFKGEEKIISTPDSKVIAMVVPTNEELMIAKDTKEIIEKGLDELKI

SEQ ID NO: 2963 - DNA, 1257 bp, synthetic construct
  misc_feature 1..1257: note = Variant of acetate kinase
  source 1..1257: mol_type = other DNA
atgcaccatcatcatcatcatggcggtagcggcatgaaagttctggtgattaattctggtagctcctccatcaaatatcagctcctcgatatgaccaacgaaaaggtattagcgaaaggcttggtcgagcgcattggcatcgacggttcgcgtatcgtgcataaagttaacggcgaaaaacacgtgctggaacatgagattccgaatcacgaaattggacttaaattggtcctggatcttcttacggacgaaaaatacggtgtgttgaaggatctcaaagaaatcgatgcagttgggcatcgcgtagtacatggcggcgagcgttttgccagtagcgtgaagattactgacgaagtcttaaagaccatcgagacgttgtcgttcttagctccgttacacaatccagcgaacattatgggtatcaagagcagcatgaaagtgttaccgggtgtgcctcaagttgccgtctttgatacagcgttccaccagaagatgccggagaaagcctatttgtacgcaatcccctatgagtactacgagaaatataaaattcgccgctatgggtttcatggaacctcacatcgttatgtgagtaaacgtgctgcggaaattatgggcaaaccgtacgatcagctcaagatcattaccgttcacgtgggtaacggcgcatcagttgcggcggtgaagaatggcgtatctgttgacacttccatgggtttcacaccacttgaaggtcttgtcatgggcacgcgcagcggcgatattgatccggccatcgtggaatttcttgagaaagaagaaggattgtcggccaaagaagtcgtcaacatcctcaacaagaaatctggtgtgtatgggctcaccaaaggctttagtagtgacatgcgtgacattgaagataatgctattgaaggtgatcctgtatgccgccttgcattagatgtgtacgaatatcgtatcgcgaaatatattggcgcatacgctgcggccatgaacggtgttgacgcgatcgtctttaccgcaggagttggcgaaaatagcccgattatgcgcgaagaaattattgagaactacttgggctacttagggatcaagatcgataaagaagccaatgacttcaaaggtgaggagaagatcatttcaacgcccgattccaaagtgattgcgatggtagttccgaccaacgaggagctcatgatcgccaaagacacgaaagaaatcattgagaaagggttggacgagcttaagatctaatga

SEQ ID NO: 2964 - protein, 417 aa, synthetic construct
  REGION 1..417: note = Variant of acetate kinase
MHHHHHHGGSGMKVLVINSGSSSIKYQLLDMTNEKVLAKGLVERIGIDGSRIVHKVNGEKHVLEHEIPNHEIGLKLVLDLLTDEKYGVLKDLKEIDAVGHRVVHGGERFASSVKITDEVLKTIETLSFLAPLHNPANIMGIKSSMKVLPGVPQVAVFDTAFHQKMPEKAYLYAIPYEYYEKYKIRRYGFHGTSHRYVSKRAAEIMGKPYDQLKIITVHVGNGASVAAVKNGVSVDTSMGFTPLEGLVMGTRSGDIDPAIVEFLEKEEGLSAKEVVNILNKKSGVYGLTKGFSSDMRDIEDNAIEGDPVCRLALDVYEYRIAKYIGAYAAAMNGVDAIVFTAGVGENSPIMREEIIENYLGYLGIKIDKEANDFKGEEKIISTPDSKVIAMVVPTNEELMIAKDTKEIIEKGLDELKI

SEQ ID NO: 2965 - DNA, 1257 bp, synthetic construct
  misc_feature 1..1257: note = Variant of acetate kinase
  source 1..1257: mol_type = other DNA
atgcaccatcatcatcatcatggcggtagcggcatgaaagttctggtgattaattctggtagctcctccatcaaatatcagctcctcgatatgaccaacgaaaaggtattagcgaaaggcttggtcgagcgcattggcatcgacggttcgcgtatcgtgcatgaggttaacggcgaaaaacacgtgctggaacatgagattaagaatcacgaaattggacttaaattggtcctggatcttcttacggacgaaaaatacggtgtgttgaaggatctcaaagaaatcgatgcagttgggcatcgcgtagtacatggcggcgagcgttttgccagtagcgtgaagattactgacgaagtcttaaagaccatcgagacgttgtcgttcttagctccgttacacaatccagcgaacattatgggtatcaagagcagcatgaaagtgttaccgggtgtgcctcaagttgccgtctttgatacagcgttccaccagaagatgccggagaaagcctatttgtacgcaatcccctatgagtactacgagaaatataaaattcgccgctatgggtttcatggaacctcacatcgttatgtgagtaaacgtgctgcggaaattatgggcaaaccgtacgatcagctcaagatcattaccgttcacgtgggtaacggcgcatcagttgcggcggtgaagaatggcgtatctgttgacacttccatgggtttcacaccacttgaaggtcttgtcatgggcacgcgcagcggcgatattgatccggccatcgtggaatttcttgagaaagaagaaggattgtcggccaaagaagtcgtcaacatcctcaacaagaaatctggtgtgtatgggctcaccaaaggctttagtagtgacatgcgtgacattgaagataatgctattgaaggtgatcctgtatgccgccttgcattagatgtgtacgaatatcgtatcgcgaaatatattggcgcatacgctgcggccatgaacggtgttgacgcgatcgtctttaccgcaggagttggcgaaaatagcccgattatgcgcgaagaaattattgagaactacttgggctacttagggatcaagatcgataaagaagccaatgacttcaaaggtgaggagaagatcatttcaacgcccgattccaaagtgattgcgatggtagttccgaccaacgaggagctcatgatcgccaaagacacgaaagaaatcattgagaaagggttggacgagcttaagatctaatga

SEQ ID NO: 2966 - protein, 417 aa, synthetic construct
  REGION 1..417: note = Variant of acetate kinase
MHHHHHHGGSGMKVLVINSGSSSIKYQLLDMTNEKVLAKGLVERIGIDGSRIVHEVNGEKHVLEHEIKNHEIGLKLVLDLLTDEKYGVLKDLKEIDAVGHRVVHGGERFASSVKITDEVLKTIETLSFLAPLHNPANIMGIKSSMKVLPGVPQVAVFDTAFHQKMPEKAYLYAIPYEYYEKYKIRRYGFHGTSHRYVSKRAAEIMGKPYDQLKIITVHVGNGASVAAVKNGVSVDTSMGFTPLEGLVMGTRSGDIDPAIVEFLEKEEGLSAKEVVNILNKKSGVYGLTKGFSSDMRDIEDNAIEGDPVCRLALDVYEYRIAKYIGAYAAAMNGVDAIVFTAGVGENSPIMREEIIENYLGYLGIKIDKEANDFKGEEKIISTPDSKVIAMVVPTNEELMIAKDTKEIIEKGLDELKI

SEQ ID NO: 2967 - DNA, 1257 bp, synthetic construct
  misc_feature 1..1257: note = Variant of acetate kinase
  source 1..1257: mol_type = other DNA
atgcaccatcatcatcatcatggcggtagcggcatgaaagttctggtgattaattctggtagctcctccatcaaatatcagctcctcgatatgaccaacgaaaaggtattagcgaaaggcttggtcgagcgcattggcatcgacggttcgcgtatcgtgcatacggttaacggcgaaaaacacgtgctggaacatgagattaagaatcacgaaattggacttaaattggtcctggatcttcttacggacgaaaaatacggtgtgttgaaggatctcaaagaaatcgatgcagttgggcatcgcgtagtacatggcggcgagcgttttgccagtagcgtgaagattactgacgaagtcttaaagaccatcgagacgttgtcgttcttagctccgttacacaatccagcgaacattatgggtatcaagagcagcatgaaagtgttaccgggtgtgcctcaagttgccgtctttgatacagcgttccaccagaagatgccggagaaagcctatttgtacgcaatcccctatgagtactacgagaaatataaaattcgccgctatgggtttcatggaacctcacatcgttatgtgagtaaacgtgctgcggaaattatgggcaaaccgtacgatcagctcaagatcattaccgttcacgtgggtaacggcgcatcagttgcggcggtgaagaatggcgtatctgttgacacttccatgggtttcacaccacttgaaggtcttgtcatgggcacgcgcagcggcgatattgatccggccatcgtggaatttcttgagaaagaagaaggattgtcggccaaagaagtcgtcaacatcctcaacaagaaatctggtgtgtatgggctcaccaaaggctttagtagtgacatgcgtgacattgaagataatgctattgaaggtgatcctgtatgccgccttgcattagatgtgtacgaatatcgtatcgcgaaatatattggcgcatacgctgcggccatgaacggtgttgacgcgatcgtctttaccgcaggagttggcgaaaatagcccgattatgcgcgaagaaattattgagaactacttgggctacttagggatcaagatcgataaagaagccaatgacttcaaaggtgaggagaagatcatttcaacgcccgattccaaagtgattgcgatggtagttccgaccaacgaggagctcatgatcgccaaagacacgaaagaaatcattgagaaagggttggacgagcttaagatctaatga

SEQ ID NO: 2968 - protein, 417 aa, synthetic construct
  REGION 1..417: note = Variant of acetate kinase
MHHHHHHGGSGMKVLVINSGSSSIKYQLLDMTNEKVLAKGLVERIGIDGSRIVHTVNGEKHVLEHEIKNHEIGLKLVLDLLTDEKYGVLKDLKEIDAVGHRVVHGGERFASSVKITDEVLKTIETLSFLAPLHNPANIMGIKSSMKVLPGVPQVAVFDTAFHQKMPEKAYLYAIPYEYYEKYKIRRYGFHGTSHRYVSKRAAEIMGKPYDQLKIITVHVGNGASVAAVKNGVSVDTSMGFTPLEGLVMGTRSGDIDPAIVEFLEKEEGLSAKEVVNILNKKSGVYGLTKGFSSDMRDIEDNAIEGDPVCRLALDVYEYRIAKYIGAYAAAMNGVDAIVFTAGVGENSPIMREEIIENYLGYLGIKIDKEANDFKGEEKIISTPDSKVIAMVVPTNEELMIAKDTKEIIEKGLDELKI

SEQ ID NO: 2969 - DNA, 1257 bp, synthetic construct
  misc_feature 1..1257: note = Variant of acetate kinase
  source 1..1257: mol_type = other DNA
atgcaccatcatcatcatcatggcggtagcggcatgaaagttctggtgattaattctggtagctcctccatcaaatatcagctcctcgatatgaccaacgaaaaggtattagcgaaaggcttggtcgagcgcattggcatcgacggttcgcgtatcgtgcataaagttaacggcgaaaaacacgtgctggaaagggagattaagaatcacgaaattggacttaaattggtcctggatcttcttacggacgaaaaatacggtgtgttgaaggatctcaaagaaatcgatgcagttgggcatcgcgtagtacatggcggcgagcgttttgccagtagcgtgaagattactgacgaagtcttaaagaccatcgagacgttgtcgttcttagctccgttacacaatccagcgaacattatgggtatcaagagcagcatgaaagtgttaccgggtgtgcctcaagttgccgtctttgatacagcgttccaccagaagatgccggagaaagcctatttgtacgcaatcccctatgagtactacgagaaatataaaattcgccgctatgggtttcatggaacctcacatcgttatgtgagtaaacgtgctgcggaaattatgggcaaaccgtacgatcagctcaagatcattaccgttcacgtgggtaacggcgcatcagttgcggcggtgaagaatggcgtatctgttgacacttccatgggtttcacaccacttgaaggtcttgtcatgggcacgcgcagcggcgatattgatccggccatcgtggaatttcttgagaaagaagaaggattgtcggccaaagaagtcgtcaacatcctcaacaagaaatctggtgtgtatgggctcaccaaaggctttagtagtgacatgcgtgacattgaagataatgctattgaaggtgatcctgtatgccgccttgcattagatgtgtacgaatatcgtatcgcgaaatatattggcgcatacgctgcggccatgaacggtgttgacgcgatcgtctttaccgcaggagttggcgaaaatagcccgattatgcgcgaagaaattattgagaactacttgggctacttagggatcaagatcgataaagaagccaatgacttcaaaggtgaggagaagatcatttcaacgcccgattccaaagtgattgcgatggtagttccgaccaacgaggagctcatgatcgccaaagacacgaaagaaatcattgagaaagggttggacgagcttaagatctaatga

SEQ ID NO: 2970 - protein, 417 aa, synthetic construct
  REGION 1..417: note = Variant of acetate kinase
MHHHHHHGGSGMKVLVINSGSSSIKYQLLDMTNEKVLAKGLVERIGIDGSRIVHKVNGEKHVLEREIKNHEIGLKLVLDLLTDEKYGVLKDLKEIDAVGHRVVHGGERFASSVKITDEVLKTIETLSFLAPLHNPANIMGIKSSMKVLPGVPQVAVFDTAFHQKMPEKAYLYAIPYEYYEKYKIRRYGFHGTSHRYVSKRAAEIMGKPYDQLKIITVHVGNGASVAAVKNGVSVDTSMGFTPLEGLVMGTRSGDIDPAIVEFLEKEEGLSAKEVVNILNKKSGVYGLTKGFSSDMRDIEDNAIEGDPVCRLALDVYEYRIAKYIGAYAAAMNGVDAIVFTAGVGENSPIMREEIIENYLGYLGIKIDKEANDFKGEEKIISTPDSKVIAMVVPTNEELMIAKDTKEIIEKGLDELKI

SEQ ID NO: 2971 - DNA, 1257 bp, synthetic construct
  misc_feature 1..1257: note = Variant of acetate kinase
  source 1..1257: mol_type = other DNA
atgcaccatcatcatcatcatggcggtagcggcatgaaagttctggtgattaattctggtagctcctccatcaaatatcagctcctcgatatgaccaacgaaaaggtattagcgaaaggcttggtcgagcgcattggcatcgacggttcgcgtatcgtgcatgtggttaacggcgaaaaacacgtgctggaacatgagattaagaatcacgaaattggacttaaattggtcctggatcttcttacggacgaaaaatacggtgtgttgaaggatctcaaagaaatcgatgcagttgggcatcgcgtagtacatggcggcgagcgttttgccagtagcgtgaagattactgacgaagtcttaaagaccatcgagacgttgtcgttcttagctccgttacacaatccagcgaacattatgggtatcaagagcagcatgaaagtgttaccgggtgtgcctcaagttgccgtctttgatacagcgttccaccagaagatgccggagaaagcctatttgtacgcaatcccctatgagtactacgagaaatataaaattcgccgctatgggtttcatggaacctcacatcgttatgtgagtaaacgtgctgcggaaattatgggcaaaccgtacgatcagctcaagatcattaccgttcacgtgggtaacggcgcatcagttgcggcggtgaagaatggcgtatctgttgacacttccatgggtttcacaccacttgaaggtcttgtcatgggcacgcgcagcggcgatattgatccggccatcgtggaatttcttgagaaagaagaaggattgtcggccaaagaagtcgtcaacatcctcaacaagaaatctggtgtgtatgggctcaccaaaggctttagtagtgacatgcgtgacattgaagataatgctattgaaggtgatcctgtatgccgccttgcattagatgtgtacgaatatcgtatcgcgaaatatattggcgcatacgctgcggccatgaacggtgttgacgcgatcgtctttaccgcaggagttggcgaaaatagcccgattatgcgcgaagaaattattgagaactacttgggctacttagggatcaagatcgataaagaagccaatgacttcaaaggtgaggagaagatcatttcaacgcccgattccaaagtgattgcgatggtagttccgaccaacgaggagctcatgatcgccaaagacacgaaagaaatcattgagaaagggttggacgagcttaagatctaatga

SEQ ID NO: 2972 - protein, 417 aa, synthetic construct
  REGION 1..417: note = Variant of acetate kinase
MHHHHHHGGSGMKVLVINSGSSSIKYQLLDMTNEKVLAKGLVERIGIDGSRIVHVVNGEKHVLEHEIKNHEIGLKLVLDLLTDEKYGVLKDLKEIDAVGHRVVHGGERFASSVKITDEVLKTIETLSFLAPLHNPANIMGIKSSMKVLPGVPQVAVFDTAFHQKMPEKAYLYAIPYEYYEKYKIRRYGFHGTSHRYVSKRAAEIMGKPYDQLKIITVHVGNGASVAAVKNGVSVDTSMGFTPLEGLVMGTRSGDIDPAIVEFLEKEEGLSAKEVVNILNKKSGVYGLTKGFSSDMRDIEDNAIEGDPVCRLALDVYEYRIAKYIGAYAAAMNGVDAIVFTAGVGENSPIMREEIIENYLGYLGIKIDKEANDFKGEEKIISTPDSKVIAMVVPTNEELMIAKDTKEIIEKGLDELKI

SEQ ID NO: 2973 - DNA, 1257 bp, synthetic construct
  misc_feature 1..1257: note = Variant of acetate kinase
  source 1..1257: mol_type = other DNA
atgcaccatcatcatcatcatggcggtagcggcatgaaagttctggtgattaattctggtagctcctccatcaaatatcagctcctcgatatgaccaacgaaaaggtattagcgaaaggcttggtcgagcgcattggcatcgacggttcgcgtatcgtgcataaagttaacggcgaaaaacacgtgctgcagcatgagattaagaatcacgaaattggacttaaattggtcctggatcttcttacggacgaaaaatacggtgtgttgaaggatctcaaagaaatcgatgcagttgggcatcgcgtagtacatggcggcgagcgttttgccagtagcgtgaagattactgacgaagtcttaaagaccatcgagacgttgtcgttcttagctccgttacacaatccagcgaacattatgggtatcaagagcagcatgaaagtgttaccgggtgtgcctcaagttgccgtctttgatacagcgttccaccagaagatgccggagaaagcctatttgtacgcaatcccctatgagtactacgagaaatataaaattcgccgctatgggtttcatggaacctcacatcgttatgtgagtaaacgtgctgcggaaattatgggcaaaccgtacgatcagctcaagatcattaccgttcacgtgggtaacggcgcatcagttgcggcggtgaagaatggcgtatctgttgacacttccatgggtttcacaccacttgaaggtcttgtcatgggcacgcgcagcggcgatattgatccggccatcgtggaatttcttgagaaagaagaaggattgtcggccaaagaagtcgtcaacatcctcaacaagaaatctggtgtgtatgggctcaccaaaggctttagtagtgacatgcgtgacattgaagataatgctattgaaggtgatcctgtatgccgccttgcattagatgtgtacgaatatcgtatcgcgaaatatattggcgcatacgctgcggccatgaacggtgttgacgcgatcgtctttaccgcaggagttggcgaaaatagcccgattatgcgcgaagaaattattgagaactacttgggctacttagggatcaagatcgataaagaagccaatgacttcaaaggtgaggagaagatcatttcaacgcccgattccaaagtgattgcgatggtagttccgaccaacgaggagctcatgatcgccaaagacacgaaagaaatcattgagaaagggttggacgagcttaagatctaatga

SEQ ID NO: 2974 - protein, 417 aa, synthetic construct
  REGION 1..417: note = Variant of acetate kinase
MHHHHHHGGSGMKVLVINSGSSSIKYQLLDMTNEKVLAKGLVERIGIDGSRIVHKVNGEKHVLQHEIKNHEIGLKLVLDLLTDEKYGVLKDLKEIDAVGHRVVHGGERFASSVKITDEVLKTIETLSFLAPLHNPANIMGIKSSMKVLPGVPQVAVFDTAFHQKMPEKAYLYAIPYEYYEKYKIRRYGFHGTSHRYVSKRAAEIMGKPYDQLKIITVHVGNGASVAAVKNGVSVDTSMGFTPLEGLVMGTRSGDIDPAIVEFLEKEEGLSAKEVVNILNKKSGVYGLTKGFSSDMRDIEDNAIEGDPVCRLALDVYEYRIAKYIGAYAAAMNGVDAIVFTAGVGENSPIMREEIIENYLGYLGIKIDKEANDFKGEEKIISTPDSKVIAMVVPTNEELMIAKDTKEIIEKGLDELKI

SEQ ID NO: 2975 - DNA, 1257 bp, synthetic construct
  misc_feature 1..1257: note = Variant of acetate kinase
  source 1..1257: mol_type = other DNA
atgcaccatcatcatcatcatggcggtagcggcatgaaagttctggtgattaattctggtagctcctccatcaaatatcagctcctcgatatgaccaacgaaaaggtattagcgaaaggcttggtcgagcgcattggcatcgacggttcgcgtatcgtgcataaagttaacggcgaaaaacacgtgctggaacatgagattaagaatcacgaaattggacttaaattggtcctggatcttcttacggacgaaaaatacggtgtgttgaaggatctcaaagaaatcgatgcagttgggcatcgcgtagtacatggcggcgagcgttttgccagtagcgtgaagattactgacgaagtcttaaagaccatcgagacgttgtcgttcttagctccgttacacaatccagcgaacattatgggtatcaagagcagcatgaaagtgttaccgggtgtgcctcaagttgccgtctttgatacagcgttccaccagaagatgccggagaaagcctatttgtacgcaatcccctatgagtactacgagaaatataaaattcgccgctatgggtttcatggagtgtcacatcgttatgtgagtaaacgtgctgcggaaattatgggcaaaccgtacgatcagctcaagatcattaccgttcacgtgggtaacggcgcatcagttgcggcggtgaagaatggcgtatctgttgacacttccatgggtttcacaccacttgaaggtcttgtcatgggcacgcgcagcggcgatattgatccggccatcgtggaatttcttgagaaagaagaaggattgtcggccaaagaagtcgtcaacatcctcaacaagaaatctggtgtgtatgggctcaccaaaggctttagtagtgacatgcgtgacattgaagataatgctattgaaggtgatcctgtatgccgccttgcattagatgtgtacgaatatcgtatcgcgaaatatattggcgcatacgctgcggccatgaacggtgttgacgcgatcgtctttaccgcaggagttggcgaaaatagcccgattatgcgcgaagaaattattgagaactacttgggctacttagggatcaagatcgataaagaagccaatgacttcaaaggtgaggagaagatcatttcaacgcccgattccaaagtgattgcgatggtagttccgaccaacgaggagctcatgatcgccaaagacacgaaagaaatcattgagaaagggttggacgagcttaagatctaatga

SEQ ID NO: 2976 - protein, 417 aa, synthetic construct
  REGION 1..417: note = Variant of acetate kinase
MHHHHHHGGSGMKVLVINSGSSSIKYQLLDMTNEKVLAKGLVERIGIDGSRIVHKVNGEKHVLEHEIKNHEIGLKLVLDLLTDEKYGVLKDLKEIDAVGHRVVHGGERFASSVKITDEVLKTIETLSFLAPLHNPANIMGIKSSMKVLPGVPQVAVFDTAFHQKMPEKAYLYAIPYEYYEKYKIRRYGFHGVSHRYVSKRAAEIMGKPYDQLKIITVHVGNGASVAAVKNGVSVDTSMGFTPLEGLVMGTRSGDIDPAIVEFLEKEEGLSAKEVVNILNKKSGVYGLTKGFSSDMRDIEDNAIEGDPVCRLALDVYEYRIAKYIGAYAAAMNGVDAIVFTAGVGENSPIMREEIIENYLGYLGIKIDKEANDFKGEEKIISTPDSKVIAMVVPTNEELMIAKDTKEIIEKGLDELKI

SEQ ID NO: 2977 - DNA, 1257 bp, synthetic construct
  misc_feature 1..1257: note = Variant of acetate kinase
  source 1..1257: mol_type = other DNA
atgcaccatcatcatcatcatggcggtagcggcatgaaagttctggtgattaattctggtagctcctccatcaaatatcagctcctcgatatgaccaacgaaaaggtattagcgaaaggcttggtcgagcgcattggcatcgacggttcgcgtatcgtgcataaagttaacggcgaaaaacacgtgctggaacatgagattaagaatcacgaaattggacttaaattggtcctggatatgcttacggacgaaaaatacggtgtgttgaaggatctcaaagaaatcgatgcagttgggcatcgcgtagtacatggcggcgagcgttttgccagtagcgtgaagattactgacgaagtcttaaagaccatcgagacgttgtcgttcttagctccgttacacaatccagcgaacattatgggtatcaagagcagcatgaaagtgttaccgggtgtgcctcaagttgccgtctttgatacagcgttccaccagaagatgccggagaaagcctatttgtacgcaatcccctatgagtactacgagaaatataaaattcgccgctatgggtttcatggaacctcacatcgttatgtgagtaaacgtgctgcggaaattatgggcaaaccgtacgatcagctcaagatcattaccgttcacgtgggtaacggcgcatcagttgcggcggtgaagaatggcgtatctgttgacacttccatgggtttcacaccacttgaaggtcttgtcatgggcacgcgcagcggcgatattgatccggccatcgtggaatttcttgagaaagaagaaggattgtcggccaaagaagtcgtcaacatcctcaacaagaaatctggtgtgtatgggctcaccaaaggctttagtagtgacatgcgtgacattgaagataatgctattgaaggtgatcctgtatgccgccttgcattagatgtgtacgaatatcgtatcgcgaaatatattggcgcatacgctgcggccatgaacggtgttgacgcgatcgtctttaccgcaggagttggcgaaaatagcccgattatgcgcgaagaaattattgagaactacttgggctacttagggatcaagatcgataaagaagccaatgacttcaaaggtgaggagaagatcatttcaacgcccgattccaaagtgattgcgatggtagttccgaccaacgaggagctcatgatcgccaaagacacgaaagaaatcattgagaaagggttggacgagcttaagatctaatga

SEQ ID NO: 2978 - protein, 417 aa, synthetic construct
  REGION 1..417: note = Variant of acetate kinase
MHHHHHHGGSGMKVLVINSGSSSIKYQLLDMTNEKVLAKGLVERIGIDGSRIVHKVNGEKHVLEHEIKNHEIGLKLVLDMLTDEKYGVLKDLKEIDAVGHRVVHGGERFASSVKITDEVLKTIETLSFLAPLHNPANIMGIKSSMKVLPGVPQVAVFDTAFHQKMPEKAYLYAIPYEYYEKYKIRRYGFHGTSHRYVSKRAAEIMGKPYDQLKIITVHVGNGASVAAVKNGVSVDTSMGFTPLEGLVMGTRSGDIDPAIVEFLEKEEGLSAKEVVNILNKKSGVYGLTKGFSSDMRDIEDNAIEGDPVCRLALDVYEYRIAKYIGAYAAAMNGVDAIVFTAGVGENSPIMREEIIENYLGYLGIKIDKEANDFKGEEKIISTPDSKVIAMVVPTNEELMIAKDTKEIIEKGLDELKI

SEQ ID NO: 2979 - DNA, 1257 bp, synthetic construct
  misc_feature 1..1257: note = Variant of acetate kinase
  source 1..1257: mol_type = other DNA
atgcaccatcatcatcatcatggcggtagcggcatgaaagttctggtgattaattctggtagctcctccatcaaatatcagctcctcgatatgaccaacgaaaaggtattagcgaaaggcttggtcgagcgcattggcatcgacggttcgcgtatcgtgcataaagttaacggcgaacctcacgtgctggaacatgagattaagaatcacgaaattggacttaaattggtcctggatcttcttacggacgaaaaatacggtgtgttgaaggatctcaaagaaatcgatgcagttgggcatcgcgtagtacatggcggcgagcgttttgccagtagcgtgaagattactgacgaagtcttaaagaccatcgagacgttgtcgttcttagctccgttacacaatccagcgaacattatgggtatcaagagcagcatgaaagtgttaccgggtgtgcctcaagttgccgtctttgatacagcgttccaccagaagatgccggagaaagcctatttgtacgcaatcccctatgagtactacgagaaatataaaattcgccgctatgggtttcatggaacctcacatcgttatgtgagtaaacgtgctgcggaaattatgggcaaaccgtacgatcagctcaagatcattaccgttcacgtgggtaacggcgcatcagttgcggcggtgaagaatggcgtatctgttgacacttccatgggtttcacaccacttgaaggtcttgtcatgggcacgcgcagcggcgatattgatccggccatcgtggaatttcttgagaaagaagaaggattgtcggccaaagaagtcgtcaacatcctcaacaagaaatctggtgtgtatgggctcaccaaaggctttagtagtgacatgcgtgacattgaagataatgctattgaaggtgatcctgtatgccgccttgcattagatgtgtacgaatatcgtatcgcgaaatatattggcgcatacgctgcggccatgaacggtgttgacgcgatcgtctttaccgcaggagttggcgaaaatagcccgattatgcgcgaagaaattattgagaactacttgggctacttagggatcaagatcgataaagaagccaatgacttcaaaggtgaggagaagatcatttcaacgcccgattccaaagtgattgcgatggtagttccgaccaacgaggagctcatgatcgccaaagacacgaaagaaatcattgagaaagggttggacgagcttaagatctaatga

SEQ ID NO: 2980 - protein, 417 aa, synthetic construct
  REGION 1..417: note = Variant of acetate kinase
MHHHHHHGGSGMKVLVINSGSSSIKYQLLDMTNEKVLAKGLVERIGIDGSRIVHKVNGEPHVLEHEIKNHEIGLKLVLDLLTDEKYGVLKDLKEIDAVGHRVVHGGERFASSVKITDEVLKTIETLSFLAPLHNPANIMGIKSSMKVLPGVPQVAVFDTAFHQKMPEKAYLYAIPYEYYEKYKIRRYGFHGTSHRYVSKRAAEIMGKPYDQLKIITVHVGNGASVAAVKNGVSVDTSMGFTPLEGLVMGTRSGDIDPAIVEFLEKEEGLSAKEVVNILNKKSGVYGLTKGFSSDMRDIEDNAIEGDPVCRLALDVYEYRIAKYIGAYAAAMNGVDAIVFTAGVGENSPIMREEIIENYLGYLGIKIDKEANDFKGEEKIISTPDSKVIAMVVPTNEELMIAKDTKEIIEKGLDELKI

SEQ ID NO: 2981 - DNA, 1257 bp, synthetic construct
  misc_feature 1..1257: note = Variant of acetate kinase
  source 1..1257: mol_type = other DNA
atgcaccatcatcatcatcatggcggtagcggcatgaaagttctggtgattaattctggtagctcctccatcaaatatcagctcctcgatatgaccaacgaaaaggtattagcgaaaggcttggtcgagcgcattggcatcgacggttcgcgtatcgtgcataaagttaacggcgaaaaaaaggtgctggaacatgagattaagaatcacgaaattggacttaaattggtcctggatcttcttacggacgaaaaatacggtgtgttgaaggatctcaaagaaatcgatgcagttgggcatcgcgtagtacatggcggcgagcgttttgccagtagcgtgaagattactgacgaagtcttaaagaccatcgagacgttgtcgttcttagctccgttacacaatccagcgaacattatgggtatcaagagcagcatgaaagtgttaccgggtgtgcctcaagttgccgtctttgatacagcgttccaccagaagatgccggagaaagcctatttgtacgcaatcccctatgagtactacgagaaatataaaattcgccgctatgggtttcatggaacctcacatcgttatgtgagtaaacgtgctgcggaaattatgggcaaaccgtacgatcagctcaagatcattaccgttcacgtgggtaacggcgcatcagttgcggcggtgaagaatggcgtatctgttgacacttccatgggtttcacaccacttgaaggtcttgtcatgggcacgcgcagcggcgatattgatccggccatcgtggaatttcttgagaaagaagaaggattgtcggccaaagaagtcgtcaacatcctcaacaagaaatctggtgtgtatgggctcaccaaaggctttagtagtgacatgcgtgacattgaagataatgctattgaaggtgatcctgtatgccgccttgcattagatgtgtacgaatatcgtatcgcgaaatatattggcgcatacgctgcggccatgaacggtgttgacgcgatcgtctttaccgcaggagttggcgaaaatagcccgattatgcgcgaagaaattattgagaactacttgggctacttagggatcaagatcgataaagaagccaatgacttcaaaggtgaggagaagatcatttcaacgcccgattccaaagtgattgcgatggtagttccgaccaacgaggagctcatgatcgccaaagacacgaaagaaatcattgagaaagggttggacgagcttaagatctaatga

SEQ ID NO: 2982 - protein, 417 aa, synthetic construct
  REGION 1..417: note = Variant of acetate kinase
MHHHHHHGGSGMKVLVINSGSSSIKYQLLDMTNEKVLAKGLVERIGIDGSRIVHKVNGEKKVLEHEIKNHEIGLKLVLDLLTDEKYGVLKDLKEIDAVGHRVVHGGERFASSVKITDEVLKTIETLSFLAPLHNPANIMGIKSSMKVLPGVPQVAVFDTAFHQKMPEKAYLYAIPYEYYEKYKIRRYGFHGTSHRYVSKRAAEIMGKPYDQLKIITVHVGNGASVAAVKNGVSVDTSMGFTPLEGLVMGTRSGDIDPAIVEFLEKEEGLSAKEVVNILNKKSGVYGLTKGFSSDMRDIEDNAIEGDPVCRLALDVYEYRIAKYIGAYAAAMNGVDAIVFTAGVGENSPIMREEIIENYLGYLGIKIDKEANDFKGEEKIISTPDSKVIAMVVPTNEELMIAKDTKEIIEKGLDELKI

SEQ ID NO: 2983 - DNA, 1257 bp, synthetic construct
  misc_feature 1..1257: note = Variant of acetate kinase
  source 1..1257: mol_type = other DNA
atgcaccatcatcatcatcatggcggtagcggcatgaaagttctggtgattaattctggtagctcctccatcaaatatcagctcctcgatatgaccaacgaaaaggtattagcgaaaggcttggtcgagcgcattggcatcgacggttcgcgtatcgtgcataaagttaacggcgaaaaacacgtgctggaacatgagattaagaatcacgaaattggacttaaattggtcctggatcttcttacggacgaaaaatacggtgtgttgaaggatctcaaagaaatcgatgcagttgggcatcgcgtagtacatggcggcgagcgttttgccagtagcgtgaagattactgacgaagtcttaaagaccatcgagacgttgtcgttcttagctccgttacaccagccagcgaacattatgggtatcaagagcagcatgaaagtgttaccgggtgtgcctcaagttgccgtctttgatacagcgttccaccagaagatgccggagaaagcctatttgtacgcaatcccctatgagtactacgagaaatataaaattcgccgctatgggtttcatggaacctcacatcgttatgtgagtaaacgtgctgcggaaattatgggcaaaccgtacgatcagctcaagatcattaccgttcacgtgggtaacggcgcatcagttgcggcggtgaagaatggcgtatctgttgacacttccatgggtttcacaccacttgaaggtcttgtcatgggcacgcgcagcggcgatattgatccggccatcgtggaatttcttgagaaagaagaaggattgtcggccaaagaagtcgtcaacatcctcaacaagaaatctggtgtgtatgggctcaccaaaggctttagtagtgacatgcgtgacattgaagataatgctattgaaggtgatcctgtatgccgccttgcattagatgtgtacgaatatcgtatcgcgaaatatattggcgcatacgctgcggccatgaacggtgttgacgcgatcgtctttaccgcaggagttggcgaaaatagcccgattatgcgcgaagaaattattgagaactacttgggctacttagggatcaagatcgataaagaagccaatgacttcaaaggtgaggagaagatcatttcaacgcccgattccaaagtgattgcgatggtagttccgaccaacgaggagctcatgatcgccaaagacacgaaagaaatcattgagaaagggttggacgagcttaagatctaatga

SEQ ID NO: 2984 - protein, 417 aa, synthetic construct
  REGION 1..417: note = Variant of acetate kinase
MHHHHHHGGSGMKVLVINSGSSSIKYQLLDMTNEKVLAKGLVERIGIDGSRIVHKVNGEKHVLEHEIKNHEIGLKLVLDLLTDEKYGVLKDLKEIDAVGHRVVHGGERFASSVKITDEVLKTIETLSFLAPLHQPANIMGIKSSMKVLPGVPQVAVFDTAFHQKMPEKAYLYAIPYEYYEKYKIRRYGFHGTSHRYVSKRAAEIMGKPYDQLKIITVHVGNGASVAAVKNGVSVDTSMGFTPLEGLVMGTRSGDIDPAIVEFLEKEEGLSAKEVVNILNKKSGVYGLTKGFSSDMRDIEDNAIEGDPVCRLALDVYEYRIAKYIGAYAAAMNGVDAIVFTAGVGENSPIMREEIIENYLGYLGIKIDKEANDFKGEEKIISTPDSKVIAMVVPTNEELMIAKDTKEIIEKGLDELKI

SEQ ID NO: 2985 - DNA, 1257 bp, synthetic construct
  misc_feature 1..1257: note = Variant of acetate kinase
  source 1..1257: mol_type = other DNA
atgcaccatcatcatcatcatggcggtagcggcatgaaagttctggtgattaattctggtagctcctccatcaaatatcagctcctcgatatgaccaacgaaaaggtattagcgaaaggcttggtcgagcgcattggcatcgacggttcgcgtatcgtgcatatggttaacggcgaaaaacacgtgctggaacatgagattaagaatcacgaaattggacttaaattggtcctggatcttcttacggacgaaaaatacggtgtgttgaaggatctcaaagaaatcgatgcagttgggcatcgcgtagtacatggcggcgagcgttttgccagtagcgtgaagattactgacgaagtcttaaagaccatcgagacgttgtcgttcttagctccgttacacaatccagcgaacattatgggtatcaagagcagcatgaaagtgttaccgggtgtgcctcaagttgccgtctttgatacagcgttccaccagaagatgccggagaaagcctatttgtacgcaatcccctatgagtactacgagaaatataaaattcgccgctatgggtttcatggaacctcacatcgttatgtgagtaaacgtgctgcggaaattatgggcaaaccgtacgatcagctcaagatcattaccgttcacgtgggtaacggcgcatcagttgcggcggtgaagaatggcgtatctgttgacacttccatgggtttcacaccacttgaaggtcttgtcatgggcacgcgcagcggcgatattgatccggccatcgtggaatttcttgagaaagaagaaggattgtcggccaaagaagtcgtcaacatcctcaacaagaaatctggtgtgtatgggctcaccaaaggctttagtagtgacatgcgtgacattgaagataatgctattgaaggtgatcctgtatgccgccttgcattagatgtgtacgaatatcgtatcgcgaaatatattggcgcatacgctgcggccatgaacggtgttgacgcgatcgtctttaccgcaggagttggcgaaaatagcccgattatgcgcgaagaaattattgagaactacttgggctacttagggatcaagatcgataaagaagccaatgacttcaaaggtgaggagaagatcatttcaacgcccgattccaaagtgattgcgatggtagttccgaccaacgaggagctcatgatcgccaaagacacgaaagaaatcattgagaaagggttggacgagcttaagatctaatga

SEQ ID NO: 2986 - protein, 417 aa, synthetic construct
  REGION 1..417: note = Variant of acetate kinase
MHHHHHHGGSGMKVLVINSGSSSIKYQLLDMTNEKVLAKGLVERIGIDGSRIVHMVNGEKHVLEHEIKNHEIGLKLVLDLLTDEKYGVLKDLKEIDAVGHRVVHGGERFASSVKITDEVLKTIETLSFLAPLHNPANIMGIKSSMKVLPGVPQVAVFDTAFHQKMPEKAYLYAIPYEYYEKYKIRRYGFHGTSHRYVSKRAAEIMGKPYDQLKIITVHVGNGASVAAVKNGVSVDTSMGFTPLEGLVMGTRSGDIDPAIVEFLEKEEGLSAKEVVNILNKKSGVYGLTKGFSSDMRDIEDNAIEGDPVCRLALDVYEYRIAKYIGAYAAAMNGVDAIVFTAGVGENSPIMREEIIENYLGYLGIKIDKEANDFKGEEKIISTPDSKVIAMVVPTNEELMIAKDTKEIIEKGLDELKI

SEQ ID NO: 2987 - DNA, 1257 bp, synthetic construct
  misc_feature 1..1257: note = Variant of acetate kinase
  source 1..1257: mol_type = other DNA
atgcaccatcatcatcatcatggcggtagcggcatgaaagttctggtgattaattctggtagctcctccatcaaatatcagctcctcgatatgaccaacgaaaaggtattagcgaaaggcttggtcgagcgcattggcatcgacggttcgcgtatcgtgcataaagttaacggcgaaaaacacgtgctggaacatgagattggtaatcacgaaattggacttaaattggtcctggatcttcttacggacgaaaaatacggtgtgttgaaggatctcaaagaaatcgatgcagttgggcatcgcgtagtacatggcggcgagcgttttgccagtagcgtgaagattactgacgaagtcttaaagaccatcgagacgttgtcgttcttagctccgttacacaatccagcgaacattatgggtatcaagagcagcatgaaagtgttaccgggtgtgcctcaagttgccgtctttgatacagcgttccaccagaagatgccggagaaagcctatttgtacgcaatcccctatgagtactacgagaaatataaaattcgccgctatgggtttcatggaacctcacatcgttatgtgagtaaacgtgctgcggaaattatgggcaaaccgtacgatcagctcaagatcattaccgttcacgtgggtaacggcgcatcagttgcggcggtgaagaatggcgtatctgttgacacttccatgggtttcacaccacttgaaggtcttgtcatgggcacgcgcagcggcgatattgatccggccatcgtggaatttcttgagaaagaagaaggattgtcggccaaagaagtcgtcaacatcctcaacaagaaatctggtgtgtatgggctcaccaaaggctttagtagtgacatgcgtgacattgaagataatgctattgaaggtgatcctgtatgccgccttgcattagatgtgtacgaatatcgtatcgcgaaatatattggcgcatacgctgcggccatgaacggtgttgacgcgatcgtctttaccgcaggagttggcgaaaatagcccgattatgcgcgaagaaattattgagaactacttgggctacttagggatcaagatcgataaagaagccaatgacttcaaaggtgaggagaagatcatttcaacgcccgattccaaagtgattgcgatggtagttccgaccaacgaggagctcatgatcgccaaagacacgaaagaaatcattgagaaagggttggacgagcttaagatctaatga

SEQ ID NO: 2988 - protein, 417 aa, synthetic construct
  REGION 1..417: note = Variant of acetate kinase
MHHHHHHGGSGMKVLVINSGSSSIKYQLLDMTNEKVLAKGLVERIGIDGSRIVHKVNGEKHVLEHEIGNHEIGLKLVLDLLTDEKYGVLKDLKEIDAVGHRVVHGGERFASSVKITDEVLKTIETLSFLAPLHNPANIMGIKSSMKVLPGVPQVAVFDTAFHQKMPEKAYLYAIPYEYYEKYKIRRYGFHGTSHRYVSKRAAEIMGKPYDQLKIITVHVGNGASVAAVKNGVSVDTSMGFTPLEGLVMGTRSGDIDPAIVEFLEKEEGLSAKEVVNILNKKSGVYGLTKGFSSDMRDIEDNAIEGDPVCRLALDVYEYRIAKYIGAYAAAMNGVDAIVFTAGVGENSPIMREEIIENYLGYLGIKIDKEANDFKGEEKIISTPDSKVIAMVVPTNEELMIAKDTKEIIEKGLDELKI

SEQ ID NO: 2989 - DNA, 1257 bp, synthetic construct
  misc_feature 1..1257: note = Variant of acetate kinase
  source 1..1257: mol_type = other DNA
atgcaccatcatcatcatcatggcggtagcggcatgaaagttctggtgattaattctggtagctcctccatcaaatatcagctcctcgatatgaccaacgaaaaggtattagcgaaaggcttggtcgagcgcattggcatcgacggttcgcgtatcgtgcattttgttaacggcgaaaaacacgtgctggaacatgagattaagaatcacgaaattggacttaaattggtcctggatcttcttacggacgaaaaatacggtgtgttgaaggatctcaaagaaatcgatgcagttgggcatcgcgtagtacatggcggcgagcgttttgccagtagcgtgaagattactgacgaagtcttaaagaccatcgagacgttgtcgttcttagctccgttacacaatccagcgaacattatgggtatcaagagcagcatgaaagtgttaccgggtgtgcctcaagttgccgtctttgatacagcgttccaccagaagatgccggagaaagcctatttgtacgcaatcccctatgagtactacgagaaatataaaattcgccgctatgggtttcatggaacctcacatcgttatgtgagtaaacgtgctgcggaaattatgggcaaaccgtacgatcagctcaagatcattaccgttcacgtgggtaacggcgcatcagttgcggcggtgaagaatggcgtatctgttgacacttccatgggtttcacaccacttgaaggtcttgtcatgggcacgcgcagcggcgatattgatccggccatcgtggaatttcttgagaaagaagaaggattgtcggccaaagaagtcgtcaacatcctcaacaagaaatctggtgtgtatgggctcaccaaaggctttagtagtgacatgcgtgacattgaagataatgctattgaaggtgatcctgtatgccgccttgcattagatgtgtacgaatatcgtatcgcgaaatatattggcgcatacgctgcggccatgaacggtgttgacgcgatcgtctttaccgcaggagttggcgaaaatagcccgattatgcgcgaagaaattattgagaactacttgggctacttagggatcaagatcgataaagaagccaatgacttcaaaggtgaggagaagatcatttcaacgcccgattccaaagtgattgcgatggtagttccgaccaacgaggagctcatgatcgccaaagacacgaaagaaatcattgagaaagggttggacgagcttaagatctaatga

SEQ ID NO: 2990 - protein, 417 aa, synthetic construct
  REGION 1..417: note = Variant of acetate kinase
MHHHHHHGGSGMKVLVINSGSSSIKYQLLDMTNEKVLAKGLVERIGIDGSRIVHFVNGEKHVLEHEIKNHEIGLKLVLDLLTDEKYGVLKDLKEIDAVGHRVVHGGERFASSVKITDEVLKTIETLSFLAPLHNPANIMGIKSSMKVLPGVPQVAVFDTAFHQKMPEKAYLYAIPYEYYEKYKIRRYGFHGTSHRYVSKRAAEIMGKPYDQLKIITVHVGNGASVAAVKNGVSVDTSMGFTPLEGLVMGTRSGDIDPAIVEFLEKEEGLSAKEVVNILNKKSGVYGLTKGFSSDMRDIEDNAIEGDPVCRLALDVYEYRIAKYIGAYAAAMNGVDAIVFTAGVGENSPIMREEIIENYLGYLGIKIDKEANDFKGEEKIISTPDSKVIAMVVPTNEELMIAKDTKEIIEKGLDELKI

SEQ ID NO: 2991 - DNA, 1257 bp, synthetic construct
  misc_feature 1..1257: note = Variant of acetate kinase
  source 1..1257: mol_type = other DNA
atgcaccatcatcatcatcatggcggtagcggcatgaaagttctggtgattaattctggtagctcctccatcaaatatcagctcctcgatatgaccaacgaaaaggtattagcgaaaggcttggtcgagcgcattggcatcgacggttcgcgtatcgtgcatcttgttaacggcgaaaaacacgtgctggaacatgagattaagaatcacgaaattggacttaaattggtcctggatcttcttacggacgaaaaatacggtgtgttgaaggatctcaaagaaatcgatgcagttgggcatcgcgtagtacatggcggcgagcgttttgccagtagcgtgaagattactgacgaagtcttaaagaccatcgagacgttgtcgttcttagctccgttacacaatccagcgaacattatgggtatcaagagcagcatgaaagtgttaccgggtgtgcctcaagttgccgtctttgatacagcgttccaccagaagatgccggagaaagcctatttgtacgcaatcccctatgagtactacgagaaatataaaattcgccgctatgggtttcatggaacctcacatcgttatgtgagtaaacgtgctgcggaaattatgggcaaaccgtacgatcagctcaagatcattaccgttcacgtgggtaacggcgcatcagttgcggcggtgaagaatggcgtatctgttgacacttccatgggtttcacaccacttgaaggtcttgtcatgggcacgcgcagcggcgatattgatccggccatcgtggaatttcttgagaaagaagaaggattgtcggccaaagaagtcgtcaacatcctcaacaagaaatctggtgtgtatgggctcaccaaaggctttagtagtgacatgcgtgacattgaagataatgctattgaaggtgatcctgtatgccgccttgcattagatgtgtacgaatatcgtatcgcgaaatatattggcgcatacgctgcggccatgaacggtgttgacgcgatcgtctttaccgcaggagttggcgaaaatagcccgattatgcgcgaagaaattattgagaactacttgggctacttagggatcaagatcgataaagaagccaatgacttcaaaggtgaggagaagatcatttcaacgcccgattccaaagtgattgcgatggtagttccgaccaacgaggagctcatgatcgccaaagacacgaaagaaatcattgagaaagggttggacgagcttaagatctaatga

SEQ ID NO: 2992 - protein, 417 aa, synthetic construct
  REGION 1..417: note = Variant of acetate kinase
MHHHHHHGGSGMKVLVINSGSSSIKYQLLDMTNEKVLAKGLVERIGIDGSRIVHLVNGEKHVLEHEIKNHEIGLKLVLDLLTDEKYGVLKDLKEIDAVGHRVVHGGERFASSVKITDEVLKTIETLSFLAPLHNPANIMGIKSSMKVLPGVPQVAVFDTAFHQKMPEKAYLYAIPYEYYEKYKIRRYGFHGTSHRYVSKRAAEIMGKPYDQLKIITVHVGNGASVAAVKNGVSVDTSMGFTPLEGLVMGTRSGDIDPAIVEFLEKEEGLSAKEVVNILNKKSGVYGLTKGFSSDMRDIEDNAIEGDPVCRLALDVYEYRIAKYIGAYAAAMNGVDAIVFTAGVGENSPIMREEIIENYLGYLGIKIDKEANDFKGEEKIISTPDSKVIAMVVPTNEELMIAKDTKEIIEKGLDELKI

SEQ ID NO: 2993 - DNA, 1257 bp, synthetic construct
  misc_feature 1..1257: note = Variant of acetate kinase
  source 1..1257: mol_type = other DNA
atgcaccatcatcatcatcatggcggtagcggcatgaaagttctggtgattaattctggtagctcctccatcaaatatcagctcctcgatatgaccaacgaaaaggtattagcgaaaggcttggtcgagcgcattggcatcgacggttcgcgtatcgtgcataaagttaacggcgaaaaacacgtgctggaacatgagattaagaatcacgaaattggacttaaattggtcctggatcttcttacggacgaaaaatacggtgtgttgaaggatctcaaagaaatcgatgcagttgggcatcgcgtagtacatggcggcgagcgttttgccagtagcgtgaagattactgacgaagtcttaaagaccatcgagacgttgtcgttcttagctccgttacacaatccagcgaacattatgggtatcaagagcagcatgaaagtgttaccgggtgtgcctcaagttgccgtctttgatacagcgttccaccagaagatgccggagaaagcctatttgtacgcaatcccctatgagtactacgagaaatataaaattcgccgctatgggtttcatggaacctcacatcgttatgtgagtaaacgtgctgcggaaattatgggcaaaccgtacgatcagctcaagatcattaccgttcacgtgggtaacggcgcatcagttgcggcggtgaagaatggcgtatctgttgacacttccatgggtttcacaccacttgaaggtcttgtcatggctacgcgcagcggcgatattgatccggccatcgtggaatttcttgagaaagaagaaggattgtcggccaaagaagtcgtcaacatcctcaacaagaaatctggtgtgtatgggctcaccaaaggctttagtagtgacatgcgtgacattgaagataatgctattgaaggtgatcctgtatgccgccttgcattagatgtgtacgaatatcgtatcgcgaaatatattggcgcatacgctgcggccatgaacggtgttgacgcgatcgtctttaccgcaggagttggcgaaaatagcccgattatgcgcgaagaaattattgagaactacttgggctacttagggatcaagatcgataaagaagccaatgacttcaaaggtgaggagaagatcatttcaacgcccgattccaaagtgattgcgatggtagttccgaccaacgaggagctcatgatcgccaaagacacgaaagaaatcattgagaaagggttggacgagcttaagatctaatga

SEQ ID NO: 2994 - protein, 417 aa, synthetic construct
  REGION 1..417: note = Variant of acetate kinase
MHHHHHHGGSGMKVLVINSGSSSIKYQLLDMTNEKVLAKGLVERIGIDGSRIVHKVNGEKHVLEHEIKNHEIGLKLVLDLLTDEKYGVLKDLKEIDAVGHRVVHGGERFASSVKITDEVLKTIETLSFLAPLHNPANIMGIKSSMKVLPGVPQVAVFDTAFHQKMPEKAYLYAIPYEYYEKYKIRRYGFHGTSHRYVSKRAAEIMGKPYDQLKIITVHVGNGASVAAVKNGVSVDTSMGFTPLEGLVMATRSGDIDPAIVEFLEKEEGLSAKEVVNILNKKSGVYGLTKGFSSDMRDIEDNAIEGDPVCRLALDVYEYRIAKYIGAYAAAMNGVDAIVFTAGVGENSPIMREEIIENYLGYLGIKIDKEANDFKGEEKIISTPDSKVIAMVVPTNEELMIAKDTKEIIEKGLDELKI

SEQ ID NO: 2995 - DNA, 1257 bp, synthetic construct
  misc_feature 1..1257: note = Variant of acetate kinase
  source 1..1257: mol_type = other DNA
atgcaccatcatcatcatcatggcggtagcggcatgaaagttctggtgattaattctggtagctcctccatcaaatatcagctcctcgatatgaccaacgaaaaggtattagcgaaaggcttggtcgagcgcattggcatcgacggttcgcgtatcgtgcataaagttaacggcgaaaaacacgtgctggaacatgagattcagaatcacgaaattggacttaaattggtcctggatcttcttacggacgaaaaatacggtgtgttgaaggatctcaaagaaatcgatgcagttgggcatcgcgtagtacatggcggcgagcgttttgccagtagcgtgaagattactgacgaagtcttaaagaccatcgagacgttgtcgttcttagctccgttacacaatccagcgaacattatgggtatcaagagcagcatgaaagtgttaccgggtgtgcctcaagttgccgtctttgatacagcgttccaccagaagatgccggagaaagcctatttgtacgcaatcccctatgagtactacgagaaatataaaattcgccgctatgggtttcatggaacctcacatcgttatgtgagtaaacgtgctgcggaaattatgggcaaaccgtacgatcagctcaagatcattaccgttcacgtgggtaacggcgcatcagttgcggcggtgaagaatggcgtatctgttgacacttccatgggtttcacaccacttgaaggtcttgtcatgggcacgcgcagcggcgatattgatccggccatcgtggaatttcttgagaaagaagaaggattgtcggccaaagaagtcgtcaacatcctcaacaagaaatctggtgtgtatgggctcaccaaaggctttagtagtgacatgcgtgacattgaagataatgctattgaaggtgatcctgtatgccgccttgcattagatgtgtacgaatatcgtatcgcgaaatatattggcgcatacgctgcggccatgaacggtgttgacgcgatcgtctttaccgcaggagttggcgaaaatagcccgattatgcgcgaagaaattattgagaactacttgggctacttagggatcaagatcgataaagaagccaatgacttcaaaggtgaggagaagatcatttcaacgcccgattccaaagtgattgcgatggtagttccgaccaacgaggagctcatgatcgccaaagacacgaaagaaatcattgagaaagggttggacgagcttaagatctaatga

SEQ ID NO: 2996 - protein, 417 aa, synthetic construct
  REGION 1..417: note = Variant of acetate kinase
MHHHHHHGGSGMKVLVINSGSSSIKYQLLDMTNEKVLAKGLVERIGIDGSRIVHKVNGEKHVLEHEIQNHEIGLKLVLDLLTDEKYGVLKDLKEIDAVGHRVVHGGERFASSVKITDEVLKTIETLSFLAPLHNPANIMGIKSSMKVLPGVPQVAVFDTAFHQKMPEKAYLYAIPYEYYEKYKIRRYGFHGTSHRYVSKRAAEIMGKPYDQLKIITVHVGNGASVAAVKNGVSVDTSMGFTPLEGLVMGTRSGDIDPAIVEFLEKEEGLSAKEVVNILNKKSGVYGLTKGFSSDMRDIEDNAIEGDPVCRLALDVYEYRIAKYIGAYAAAMNGVDAIVFTAGVGENSPIMREEIIENYLGYLGIKIDKEANDFKGEEKIISTPDSKVIAMVVPTNEELMIAKDTKEIIEKGLDELKI

SEQ ID NO: 2997 - DNA, 1257 bp, synthetic construct
  misc_feature 1..1257: note = Variant of acetate kinase
  source 1..1257: mol_type = other DNA
atgcaccatcatcatcatcatggcggtagcggcatgaaagttctggtgattaattctggtagctcctccatcaaatatcagctcctcgatatgaccaacgaaaaggtattagcgaaaggcttggtcgagcgcattggcatcgacggttcgcgtatcgtgcataaagttaacggcgaaaaacacgtgctggaacatgagattaagaatcacgaaattggacttaaattggtcctggatcttcttacggacgaaaaatacggtgtgttgaaggatctcaaagaaatcgatgcagttgggcatcgcgtagtacatggcggcgagcgttttgccagtagcgtgaagattactgacgaagtcttaaagaccatcgagacgttgtcgttcttagctccgttacacaatccagcgaacattatgggtatcaagagcagcatgaaagtgttaccgggtgtgcctcaagttgccgtctttgatacagcgttccaccagaagatgccggagaaagcctatttgtacgcaatcccctatgagtactacgagaaatataaaattcgccgctatgggtttcatggaacctcacatcgttatgtgagtaaacgtgctgcggaaattatgggcaaaccgtacgatcagctcaagatcattaccgttcacgtgggtaacggcgcatcagttgcggcggtgaagaatggcgtatctgttgacacttccatgggtttcacaccacttgaaggtcttgtcatgggcacgcgcagcggcgatattgatccggccatcgtggaatttcttgagaaagaagaaggattgtcggccaaagaagtcgtcaacatcctcaacaagaaatctggtgtgtatgggctcaccaaaggctttagtagtgacatgcgtgacattgaagatatggctattgaaggtgatcctgtatgccgccttgcattagatgtgtacgaatatcgtatcgcgaaatatattggcgcatacgctgcggccatgaacggtgttgacgcgatcgtctttaccgcaggagttggcgaaaatagcccgattatgcgcgaagaaattattgagaactacttgggctacttagggatcaagatcgataaagaagccaatgacttcaaaggtgaggagaagatcatttcaacgcccgattccaaagtgattgcgatggtagttccgaccaacgaggagctcatgatcgccaaagacacgaaagaaatcattgagaaagggttggacgagcttaagatctaatga

SEQ ID NO: 2998 - protein, 417 aa, synthetic construct
  REGION 1..417: note = Variant of acetate kinase
MHHHHHHGGSGMKVLVINSGSSSIKYQLLDMTNEKVLAKGLVERIGIDGSRIVHKVNGEKHVLEHEIKNHEIGLKLVLDLLTDEKYGVLKDLKEIDAVGHRVVHGGERFASSVKITDEVLKTIETLSFLAPLHNPANIMGIKSSMKVLPGVPQVAVFDTAFHQKMPEKAYLYAIPYEYYEKYKIRRYGFHGTSHRYVSKRAAEIMGKPYDQLKIITVHVGNGASVAAVKNGVSVDTSMGFTPLEGLVMGTRSGDIDPAIVEFLEKEEGLSAKEVVNILNKKSGVYGLTKGFSSDMRDIEDMAIEGDPVCRLALDVYEYRIAKYIGAYAAAMNGVDAIVFTAGVGENSPIMREEIIENYLGYLGIKIDKEANDFKGEEKIISTPDSKVIAMVVPTNEELMIAKDTKEIIEKGLDELKI

SEQ ID NO: 2999 - DNA, 1257 bp, synthetic construct
  misc_feature 1..1257: note = Variant of acetate kinase
  source 1..1257: mol_type = other DNA
atgcaccatcatcatcatcatggcggtagcggcatgaaagttctggtgattaattctggtagctcctccatcaaatatcagctcctcgatatgaccaacgaaaaggtattagcgaaaggcttggtcgagcgcattggcatcgacggttcgcgtatcgtgcataaagttaacggcgaaaaacacgtgctggaacatgagattaagaatcacgaaattggacttaaattggtcctggatcttcttacggacgaaaaatacggtgtgttgaaggatctcaaagaaatcgatgcagttgggcatcgcgtagtacatggcggcgagcgttttgccagtagcgtgaagattactgacgaagtcttaaagaccatcgagacgttgtcgttcttagctccgttacacaatccagcgaacattatgggtatcaagagcagcatgaaagtgttaccgggtgtgcctcaagttgccgtctttgatacagcgttccaccagaagatgccggagaaagcctatttgtacgcaatcccctatgagtactacgagaaatataaaattcgccgctatgggtttcatggaacctcacatcgttatgtgagtaaacgtgctgcggaaattatgggcaaaccgtacgatcagctcaagatcattaccgttcacgtgggtaacggcgcatcagttgcggcggtgaagaatggcgtatctgttgacacttccatgggtttcacaccacttgaaggtcttgtcatgggcacgcgcagcggcgatattgatccggccatcgtggaatttcttgagaaagaagaaggattgtcggccaaagaagtcgtcaacatcctcaacaagaaatctggtgtgtatgggctcaccaaaggctttagtagtgacatgcgtgacattgaagataatgctattgaaggtgatcctgtatgccgccttgcattagatgtgtacgaatatcgtatcgcgaaatatattggcgcatacgctgcggccatgaacggtgttgacgcgatcgtctttaccgcaggagttggcgaaaatagcccgattatgcgcgaagaaattattgagaactacttgggctacttagggatcaagatcgataaagaagccaatgacttcaaaggtcgggagaagatcatttcaacgcccgattccaaagtgattgcgatggtagttccgaccaacgaggagctcatgatcgccaaagacacgaaagaaatcattgagaaagggttggacgagcttaagatctaatga

SEQ ID NO: 3000 - protein, 417 aa, synthetic construct
  REGION 1..417: note = Variant of acetate kinase
MHHHHHHGGSGMKVLVINSGSSSIKYQLLDMTNEKVLAKGLVERIGIDGSRIVHKVNGEKHVLEHEIKNHEIGLKLVLDLLTDEKYGVLKDLKEIDAVGHRVVHGGERFASSVKITDEVLKTIETLSFLAPLHNPANIMGIKSSMKVLPGVPQVAVFDTAFHQKMPEKAYLYAIPYEYYEKYKIRRYGFHGTSHRYVSKRAAEIMGKPYDQLKIITVHVGNGASVAAVKNGVSVDTSMGFTPLEGLVMGTRSGDIDPAIVEFLEKEEGLSAKEVVNILNKKSGVYGLTKGFSSDMRDIEDNAIEGDPVCRLALDVYEYRIAKYIGAYAAAMNGVDAIVFTAGVGENSPIMREEIIENYLGYLGIKIDKEANDFKGREKIISTPDSKVIAMVVPTNEELMIAKDTKEIIEKGLDELKI

SEQ ID NO: 3001 - DNA, 1257 bp, synthetic construct
  misc_feature 1..1257: note = Variant of acetate kinase
  source 1..1257: mol_type = other DNA
atgcaccatcatcatcatcatggcggtagcggcatgaaagttctggtgattaattctggtagctcctccatcaaatatcagctcctcgatatgaccaacgaaaaggtattagcgaaaggcttggtcgagcgcattggcatcgacggttcgcgtatcgtgcataaagttaacggcgaaaaacacgtgctggaacatgagattaagaatcacgaaattggacttaaattggtcctggatcttcttacggacgaaaaatacggtgtgttgaaggatctcaaagaaatcgatgcagttgggcatcgcgtagtacatggcggcgagcgttttgccagtagcgtgaagattactgacgaagtcttaaagaccatcgagacgttgtcgttcttagctccgttacacaatccagcgaacattttgggtatcaagagcagcatgaaagtgttaccgggtgtgcctcaagttgccgtctttgatacagcgttccaccagaagatgccggagaaagcctatttgtacgcaatcccctatgagtactacgagaaatataaaattcgccgctatgggtttcatggaacctcacatcgttatgtgagtaaacgtgctgcggaaattatgggcaaaccgtacgatcagctcaagatcattaccgttcacgtgggtaacggcgcatcagttgcggcggtgaagaatggcgtatctgttgacacttccatgggtttcacaccacttgaaggtcttgtcatgggcacgcgcagcggcgatattgatccggccatcgtggaatttcttgagaaagaagaaggattgtcggccaaagaagtcgtcaacatcctcaacaagaaatctggtgtgtatgggctcaccaaaggctttagtagtgacatgcgtgacattgaagataatgctattgaaggtgatcctgtatgccgccttgcattagatgtgtacgaatatcgtatcgcgaaatatattggcgcatacgctgcggccatgaacggtgttgacgcgatcgtctttaccgcaggagttggcgaaaatagcccgattatgcgcgaagaaattattgagaactacttgggctacttagggatcaagatcgataaagaagccaatgacttcaaaggtgaggagaagatcatttcaacgcccgattccaaagtgattgcgatggtagttccgaccaacgaggagctcatgatcgccaaagacacgaaagaaatcattgagaaagggttggacgagcttaagatctaatga

SEQ ID NO: 3002 - protein, 417 aa, synthetic construct
  REGION 1..417: note = Variant of acetate kinase
MHHHHHHGGSGMKVLVINSGSSSIKYQLLDMTNEKVLAKGLVERIGIDGSRIVHKVNGEKHVLEHEIKNHEIGLKLVLDLLTDEKYGVLKDLKEIDAVGHRVVHGGERFASSVKITDEVLKTIETLSFLAPLHNPANILGIKSSMKVLPGVPQVAVFDTAFHQKMPEKAYLYAIPYEYYEKYKIRRYGFHGTSHRYVSKRAAEIMGKPYDQLKIITVHVGNGASVAAVKNGVSVDTSMGFTPLEGLVMGTRSGDIDPAIVEFLEKEEGLSAKEVVNILNKKSGVYGLTKGFSSDMRDIEDNAIEGDPVCRLALDVYEYRIAKYIGAYAAAMNGVDAIVFTAGVGENSPIMREEIIENYLGYLGIKIDKEANDFKGEEKIISTPDSKVIAMVVPTNEELMIAKDTKEIIEKGLDELKI

SEQ ID NO: 3003 - DNA, 1257 bp, synthetic construct
  misc_feature 1..1257: note = Variant of acetate kinase
  source 1..1257: mol_type = other DNA
atgcaccatcatcatcatcatggcggtagcggcatgaaagttctggtgattaattctggtagctcctccatcaaatatcagctcctcgatatgaccaacgaaaaggtattagcgaaaggcttggtcgagcgcattggcatcgacggttcgcgtatcgtgcataaagttaacggcgaaaaacacgtgctggaacatgagattaagaatcacgaaattggacttaaattggtcctggatcttcttacggacgaaaaatacggtgtgttgaaggatctcaaagaaatcgatgcagttgggcatcgcgtagtacatggcggcgagcgttttgccagtagcgtgaagattactgacgaagtcttaaagaccatcgagacgttgtcgttcttagctccgttacacaatccagcgaacattatgggtatcaagagcagcatgaaagtgttaccgggtgtgcctcaagttgccgtctttgatacagcgttccaccagaagatgccggagaaagcctatttgtacgcaatcccctatgagtactacgagaaatataaaattcgccgctatgggtttcatggaacctcacatcgttatgtgagtaaacgtgctgcggaaattatgggcaaaccgtacgatcagctcaagatcattaccgttcacgtgggtaacggcgcatcagttgcggcggtgaagaatggcgtatctgttgacacttccatgggtttcacaccacttgaaggtcttgtcatgggcacgcgcagcggcgatattgatccggccatcgtggaatttcttgagaaagaagaaggattgtcggccaaagaagtcgtcaacatcctcaacaagaaatctggtgtgtatgggctcaccaaaggctttagtagtgacatgcgtgacattgaagataatgctattgaaggtgatcctgtatgccgccttgcattagatgtgtacacttatcgtatcgcgaaatatattggcgcatacgctgcggccatgaacggtgttgacgcgatcgtctttaccgcaggagttggcgaaaatagcccgattatgcgcgaagaaattattgagaactacttgggctacttagggatcaagatcgataaagaagccaatgacttcaaaggtgaggagaagatcatttcaacgcccgattccaaagtgattgcgatggtagttccgaccaacgaggagctcatgatcgccaaagacacgaaagaaatcattgagaaagggttggacgagcttaagatctaatga

SEQ ID NO: 3004 - protein, 417 aa, synthetic construct
  REGION 1..417: note = Variant of acetate kinase
MHHHHHHGGSGMKVLVINSGSSSIKYQLLDMTNEKVLAKGLVERIGIDGSRIVHKVNGEKHVLEHEIKNHEIGLKLVLDLLTDEKYGVLKDLKEIDAVGHRVVHGGERFASSVKITDEVLKTIETLSFLAPLHNPANIMGIKSSMKVLPGVPQVAVFDTAFHQKMPEKAYLYAIPYEYYEKYKIRRYGFHGTSHRYVSKRAAEIMGKPYDQLKIITVHVGNGASVAAVKNGVSVDTSMGFTPLEGLVMGTRSGDIDPAIVEFLEKEEGLSAKEVVNILNKKSGVYGLTKGFSSDMRDIEDNAIEGDPVCRLALDVYTYRIAKYIGAYAAAMNGVDAIVFTAGVGENSPIMREEIIENYLGYLGIKIDKEANDFKGEEKIISTPDSKVIAMVVPTNEELMIAKDTKEIIEKGLDELKI

SEQ ID NO: 3005 - DNA, 1257 bp, synthetic construct
  misc_feature 1..1257: note = Variant of acetate kinase
  source 1..1257: mol_type = other DNA
atgcaccatcatcatcatcatggcggtagcggcatgaaagttctggtgattaattctggtagctcctccatcaaatatcagctcctcgatatgaccaacgaaaaggtattagcgaaaggcttggtcgagcgcattggcatcgacggttcgcgtatcgtgcataaagttaacggcgaaaaacacgtgctggaacatgagattaagaatcacgaaattggacttaaattggtcctggatcttcttacggacgaaaaatacggtgtgttgaaggatctcaaagaaatcgatgcagttgggcatcgcgtagtacatggcggcgagcgttttgccagtagcgtgaagattactgacgaagtcttaaagaccatcgagacgttgtcgttcttagctccgttacacaatccagcgaacattatgggtatcaagagcagcatgaaagtgttaccgggtgtgcctcaagttgccgtctttgatacagcgttccaccagaagatgccggagaaagcctatttgtacgcaatcccctatgagtactacgagaaatataaaattcgccgctatgggtttcatggaacctcacatcgttatgtgagtaaacgtgctgcggaaattatgggcaaaccgtacgatcagctcaagatcattaccgttcacgtgggtaacggcgcatcagttgcggcggtgaagaatggcgtatctgttgacacttccatgggtttcacaccacttgaaggtcttgtcatgggcacgcgcagcggcgatattgatccggccatcgtggaatttcttgagaaagaagaaggattgtcggccaaagaagtcgtcaacatcctcaacaagaaatctggtgtgtatgggctcaccaaaggctttagtagtgacatgcgtgacattgaagatcgggctattgaaggtgatcctgtatgccgccttgcattagatgtgtacgaatatcgtatcgcgaaatatattggcgcatacgctgcggccatgaacggtgttgacgcgatcgtctttaccgcaggagttggcgaaaatagcccgattatgcgcgaagaaattattgagaactacttgggctacttagggatcaagatcgataaagaagccaatgacttcaaaggtgaggagaagatcatttcaacgcccgattccaaagtgattgcgatggtagttccgaccaacgaggagctcatgatcgccaaagacacgaaagaaatcattgagaaagggttggacgagcttaagatctaatga

SEQ ID NO: 3006 - protein, 417 aa, synthetic construct
  REGION 1..417: note = Variant of acetate kinase
MHHHHHHGGSGMKVLVINSGSSSIKYQLLDMTNEKVLAKGLVERIGIDGSRIVHKVNGEKHVLEHEIKNHEIGLKLVLDLLTDEKYGVLKDLKEIDAVGHRVVHGGERFASSVKITDEVLKTIETLSFLAPLHNPANIMGIKSSMKVLPGVPQVAVFDTAFHQKMPEKAYLYAIPYEYYEKYKIRRYGFHGTSHRYVSKRAAEIMGKPYDQLKIITVHVGNGASVAAVKNGVSVDTSMGFTPLEGLVMGTRSGDIDPAIVEFLEKEEGLSAKEVVNILNKKSGVYGLTKGFSSDMRDIEDRAIEGDPVCRLALDVYEYRIAKYIGAYAAAMNGVDAIVFTAGVGENSPIMREEIIENYLGYLGIKIDKEANDFKGEEKIISTPDSKVIAMVVPTNEELMIAKDTKEIIEKGLDELKI

SEQ ID NO: 3007 - DNA, 1257 bp, synthetic construct
  misc_feature 1..1257: note = Variant of acetate kinase
  source 1..1257: mol_type = other DNA
atgcaccatcatcatcatcatggcggtagcggcatgaaagttctggtgattaattctggtagctcctccatcaaatatcagctcctcgatatgaccaacgaaaaggtattagcgaaaggcttggtcgagcgcattggcatcgacggttcgcgtatcgtgcataaagttaacggcgaaaaacacgtgctggaacatgagattaagaatcacgaaattggacttaaattggtcctggatcttcttacggacgaaaaatacggtgtgttgaaggatctcaaagaaatcgatgcagttgggcatcgcgtagtacatggcggcgagcgttttgccagtagcgtgaagattactgacgaagtcttaaagaccatcgagacgttgtcgttcttagctccgttacacaatccagcgaacattatgggtatcaaggggagcatgaaagtgttaccgggtgtgcctcaagttgccgtctttgatacagcgttccaccagaagatgccggagaaagcctatttgtacgcaatcccctatgagtactacgagaaatataaaattcgccgctatgggtttcatggaacctcacatcgttatgtgagtaaacgtgctgcggaaattatgggcaaaccgtacgatcagctcaagatcattaccgttcacgtgggtaacggcgcatcagttgcggcggtgaagaatggcgtatctgttgacacttccatgggtttcacaccacttgaaggtcttgtcatgggcacgcgcagcggcgatattgatccggccatcgtggaatttcttgagaaagaagaaggattgtcggccaaagaagtcgtcaacatcctcaacaagaaatctggtgtgtatgggctcaccaaaggctttagtagtgacatgcgtgacattgaagataatgctattgaaggtgatcctgtatgccgccttgcattagatgtgtacgaatatcgtatcgcgaaatatattggcgcatacgctgcggccatgaacggtgttgacgcgatcgtctttaccgcaggagttggcgaaaatagcccgattatgcgcgaagaaattattgagaactacttgggctacttagggatcaagatcgataaagaagccaatgacttcaaaggtgaggagaagatcatttcaacgcccgattccaaagtgattgcgatggtagttccgaccaacgaggagctcatgatcgccaaagacacgaaagaaatcattgagaaagggttggacgagcttaagatctaatga

SEQ ID NO: 3008 - protein, 417 aa, synthetic construct
  REGION 1..417: note = Variant of acetate kinase
MHHHHHHGGSGMKVLVINSGSSSIKYQLLDMTNEKVLAKGLVERIGIDGSRIVHKVNGEKHVLEHEIKNHEIGLKLVLDLLTDEKYGVLKDLKEIDAVGHRVVHGGERFASSVKITDEVLKTIETLSFLAPLHNPANIMGIKGSMKVLPGVPQVAVFDTAFHQKMPEKAYLYAIPYEYYEKYKIRRYGFHGTSHRYVSKRAAEIMGKPYDQLKIITVHVGNGASVAAVKNGVSVDTSMGFTPLEGLVMGTRSGDIDPAIVEFLEKEEGLSAKEVVNILNKKSGVYGLTKGFSSDMRDIEDNAIEGDPVCRLALDVYEYRIAKYIGAYAAAMNGVDAIVFTAGVGENSPIMREEIIENYLGYLGIKIDKEANDFKGEEKIISTPDSKVIAMVVPTNEELMIAKDTKEIIEKGLDELKI

SEQ ID NO: 3009 - DNA, 1257 bp, synthetic construct
  misc_feature 1..1257: note = Variant of acetate kinase
  source 1..1257: mol_type = other DNA
atgcaccatcatcatcatcatggcggtagcggcatgaaagttctggtgattaattctggtagctcctccatcaaatatcagctcctcgatatgaccaacgaaaaggtattagcgaaaggcttggtcgagcgcattggcatcgacggttcgcgtatcgtgcataaagttaacggcgaaaaacacgtgctggaacatgagattaagaatcacgaaattggacttaaattggtcctggatcttcttacggacgaaaaatacggtgtgttgaaggatctcaaagaaatcgatgcagttgggcatcgcgtagtacatggcggcgagcgttttgccagtagcgtgaagattactgacgaagtcttaaagaccatcgagacgttgtcgttcttagctccgttacacaatccagcgaacattatgggtatcaagagcagcatgaaagtgttaccgggtgtgcctcaagttgccgtctttgatacagcgttccaccagaagatgccggagaaagcctatttgtacgcaatcccctatgagtactacgagaaatataaaattcgccgctatgggtttcatggaacctcacatcgttatgtgagtaaacgtgctgcggaaattatgggcaaaccgtacgatcagctcaagatcattaccgttcacgtgggtaacggcgcatcagttgcggcggtgaagaatggcgtatctgttgacacttccatgggtttcacaccacttgaaggtcttgtcatgggcacgcgcagcggcgatattgatccggccatcgtggaatttcttgagaaagaagaaggattgtcggccaaagaagtcgtcaacatcctcaacaagaaatctggtgtgtatgggctcaccaaaggctttagtagtgacatgcgtgacattgaagataatgctattgaaggtgatcctgtatgccgccttgcattagatgtgtacgaatatcgtatcgcgaaatatattggcgcatacgctgcggccatgaacggtgttgacgcgatcgtctttaccgcaggagttggcgaaaatagcccgattatgcgcgaagaaattattgagaactacttgggctacttagggatcaagatcgataaagaagccaatgacttcaaaggtgaggagaagatcatttcaacgcccgattccaaagtgattgcgatggtagttccgaccgcggaggagctcatgatcgccaaagacacgaaagaaatcattgagaaagggttggacgagcttaagatctaatga

SEQ ID NO: 3010 - protein, 417 aa, synthetic construct
  REGION 1..417: note = Variant of acetate kinase
MHHHHHHGGSGMKVLVINSGSSSIKYQLLDMTNEKVLAKGLVERIGIDGSRIVHKVNGEKHVLEHEIKNHEIGLKLVLDLLTDEKYGVLKDLKEIDAVGHRVVHGGERFASSVKITDEVLKTIETLSFLAPLHNPANIMGIKSSMKVLPGVPQVAVFDTAFHQKMPEKAYLYAIPYEYYEKYKIRRYGFHGTSHRYVSKRAAEIMGKPYDQLKIITVHVGNGASVAAVKNGVSVDTSMGFTPLEGLVMGTRSGDIDPAIVEFLEKEEGLSAKEVVNILNKKSGVYGLTKGFSSDMRDIEDNAIEGDPVCRLALDVYEYRIAKYIGAYAAAMNGVDAIVFTAGVGENSPIMREEIIENYLGYLGIKIDKEANDFKGEEKIISTPDSKVIAMVVPTAEELMIAKDTKEIIEKGLDELKI

SEQ ID NO: 3011 - DNA, 1257 bp, synthetic construct
  misc_feature 1..1257: note = Variant of acetate kinase
  source 1..1257: mol_type = other DNA
atgcaccatcatcatcatcatggcggtagcggcatgaaagttctggtgattaattctggtagctcctccatcaaatatcagctcctcgatatgaccaacgaaaaggtattagcgaaaggcttggtcgagcgcattggcatcgacggttcgcgtatcgtgcataaagttaacggcgaaaaacacgtgctggaacatgagattaagaatcacgaaattggacttaaattggtcctggatcttcttacggacgaaaaatacggtgtgttgaaggatctcaaagaaatcgatgcagttgggcatcgcgtagtacatggcggcgagcgttttgccagtagcgtgaagattactgacgaagtcttaaagaccatcgagacgttgtcgttcttagctccgttacacaatccagcgaacattatgggtatcaagagcagcatgaaagtgttaccgggtgtgcctcaagttgccgtctttgatacagcgttccaccagaagatgccggagaaagcctatttgtacgcaatcccctatgagtactacgagaaatataaaattcgccgctatgggtttcatggaacctcacatcgttatgtgagtaaacgtgctgcggaaattatgggcaaaccgtacgatcagctcaagatcattaccatgcacgtgggtaacggcgcatcagttgcggcggtgaagaatggcgtatctgttgacacttccatgggtttcacaccacttgaaggtcttgtcatgggcacgcgcagcggcgatattgatccggccatcgtggaatttcttgagaaagaagaaggattgtcggccaaagaagtcgtcaacatcctcaacaagaaatctggtgtgtatgggctcaccaaaggctttagtagtgacatgcgtgacattgaagataatgctattgaaggtgatcctgtatgccgccttgcattagatgtgtacgaatatcgtatcgcgaaatatattggcgcatacgctgcggccatgaacggtgttgacgcgatcgtctttaccgcaggagttggcgaaaatagcccgattatgcgcgaagaaattattgagaactacttgggctacttagggatcaagatcgataaagaagccaatgacttcaaaggtgaggagaagatcatttcaacgcccgattccaaagtgattgcgatggtagttccgaccaacgaggagctcatgatcgccaaagacacgaaagaaatcattgagaaagggttggacgagcttaagatctaatga

SEQ ID NO: 3012 - protein, 417 aa, synthetic construct
  REGION 1..417: note = Variant of acetate kinase
MHHHHHHGGSGMKVLVINSGSSSIKYQLLDMTNEKVLAKGLVERIGIDGSRIVHKVNGEKHVLEHEIKNHEIGLKLVLDLLTDEKYGVLKDLKEIDAVGHRVVHGGERFASSVKITDEVLKTIETLSFLAPLHNPANIMGIKSSMKVLPGVPQVAVFDTAFHQKMPEKAYLYAIPYEYYEKYKIRRYGFHGTSHRYVSKRAAEIMGKPYDQLKIITMHVGNGASVAAVKNGVSVDTSMGFTPLEGLVMGTRSGDIDPAIVEFLEKEEGLSAKEVVNILNKKSGVYGLTKGFSSDMRDIEDNAIEGDPVCRLALDVYEYRIAKYIGAYAAAMNGVDAIVFTAGVGENSPIMREEIIENYLGYLGIKIDKEANDFKGEEKIISTPDSKVIAMVVPTNEELMIAKDTKEIIEKGLDELKI

SEQ ID NO: 3013 - DNA, 1257 bp, synthetic construct
  misc_feature 1..1257: note = Variant of acetate kinase
  source 1..1257: mol_type = other DNA
atgcaccatcatcatcatcatggcggtagcggcatgaaagttctggtgattaattctggtagctcctccatcaaatatcagctcctcgatatgaccaacgaaaaggtattagcgaaaggcttggtcgagcgcattggcatcgacggttcgcgtatcgtgcataaagttaacggcgaaaaacacgtgctggaacatgagattaagaatcacgaaattggacttaaattggtcctggatcttcttacggacgaaaaatacggtgtgttgaaggatctcaaagaaatcgatgcagttgggcatcgcgtagtacatggcggcgagcgttttgccagtagcgtgaagattactgacgaagtcttaaagaccatcgagacgttgtcgttcttagctccgttacacaatccagcgaacattatgggtatcaagagcagcatgaaagtgttaccgggtgtgcctcaagttgccgtctttgatacagcgttccaccagaagatgccggagaaagcctatttgtacgcaatcccctatgagtactacgagaaatataaaattcgccgctatgggtttcatggaacctcacatcgttatgtgagtaaacgtgctgcggaaattatgggcaaaccgtacgatcagctcaagatcattaccgttcacgtgggtaacggcgcatcagttgcggcggtgaagaatggcgtatctgttgacacttccatgggtttcacaccacttgaaggtcttgtcatgggcacgcgcagcggcgatattgatccggccatcgtggaatttcttgagaaagaagaaggattgtcggccaaagaagtcgtcaacatcctcaacaagaaatctggtgtgtatgggctcaccaaaggctttagtagtgacatgcgtgacattgaagataatgctattgaaggtgatcctgtatgccgccttgcattagatgtgtacgaatatcgtatcgcgaaatatattggcgcatacgctgcggccatgaacggtgttgacgcgatcgtctttaccgcaggagttggcgaaaatagcccgattatgcgcgaagaaattattgagaactacttgggctacttagggatcaagatcgataaagaagccaatgacttcaaaggttctgagaagatcatttcaacgcccgattccaaagtgattgcgatggtagttccgaccaacgaggagctcatgatcgccaaagacacgaaagaaatcattgagaaagggttggacgagcttaagatctaatga

SEQ ID NO: 3014 - protein, 417 aa, synthetic construct
  REGION 1..417: note = Variant of acetate kinase
MHHHHHHGGSGMKVLVINSGSSSIKYQLLDMTNEKVLAKGLVERIGIDGSRIVHKVNGEKHVLEHEIKNHEIGLKLVLDLLTDEKYGVLKDLKEIDAVGHRVVHGGERFASSVKITDEVLKTIETLSFLAPLHNPANIMGIKSSMKVLPGVPQVAVFDTAFHQKMPEKAYLYAIPYEYYEKYKIRRYGFHGTSHRYVSKRAAEIMGKPYDQLKIITVHVGNGASVAAVKNGVSVDTSMGFTPLEGLVMGTRSGDIDPAIVEFLEKEEGLSAKEVVNILNKKSGVYGLTKGFSSDMRDIEDNAIEGDPVCRLALDVYEYRIAKYIGAYAAAMNGVDAIVFTAGVGENSPIMREEIIENYLGYLGIKIDKEANDFKGSEKIISTPDSKVIAMVVPTNEELMIAKDTKEIIEKGLDELKI

SEQ ID NO: 3015 - DNA, 1257 bp, synthetic construct
  misc_feature 1..1257: note = Variant of acetate kinase
  source 1..1257: mol_type = other DNA
atgcaccatcatcatcatcatggcggtagcggcatgaaagttctggtgattaattctggtagctcctccatcaaatatcagctcctcgatatgaccaacgaaaaggtattagcgaaaggcttggtcgagcgcattggcatcgacggttcgcgtatcgtgcataaagttaacggcgaaaaacacgtgctggaacatgagattaagaatcacgaaattggacttaaattggtcctggatagtcttacggacgaaaaatacggtgtgttgaaggatctcaaagaaatcgatgcagttgggcatcgcgtagtacatggcggcgagcgttttgccagtagcgtgaagattactgacgaagtcttaaagaccatcgagacgttgtcgttcttagctccgttacacaatccagcgaacattatgggtatcaagagcagcatgaaagtgttaccgggtgtgcctcaagttgccgtctttgatacagcgttccaccagaagatgccggagaaagcctatttgtacgcaatcccctatgagtactacgagaaatataaaattcgccgctatgggtttcatggaacctcacatcgttatgtgagtaaacgtgctgcggaaattatgggcaaaccgtacgatcagctcaagatcattaccgttcacgtgggtaacggcgcatcagttgcggcggtgaagaatggcgtatctgttgacacttccatgggtttcacaccacttgaaggtcttgtcatgggcacgcgcagcggcgatattgatccggccatcgtggaatttcttgagaaagaagaaggattgtcggccaaagaagtcgtcaacatcctcaacaagaaatctggtgtgtatgggctcaccaaaggctttagtagtgacatgcgtgacattgaagataatgctattgaaggtgatcctgtatgccgccttgcattagatgtgtacgaatatcgtatcgcgaaatatattggcgcatacgctgcggccatgaacggtgttgacgcgatcgtctttaccgcaggagttggcgaaaatagcccgattatgcgcgaagaaattattgagaactacttgggctacttagggatcaagatcgataaagaagccaatgacttcaaaggtgaggagaagatcatttcaacgcccgattccaaagtgattgcgatggtagttccgaccaacgaggagctcatgatcgccaaagacacgaaagaaatcattgagaaagggttggacgagcttaagatctaatga

SEQ ID NO: 3016 - protein, 417 aa, synthetic construct
  REGION 1..417: note = Variant of acetate kinase
MHHHHHHGGSGMKVLVINSGSSSIKYQLLDMTNEKVLAKGLVERIGIDGSRIVHKVNGEKHVLEHEIKNHEIGLKLVLDSLTDEKYGVLKDLKEIDAVGHRVVHGGERFASSVKITDEVLKTIETLSFLAPLHNPANIMGIKSSMKVLPGVPQVAVFDTAFHQKMPEKAYLYAIPYEYYEKYKIRRYGFHGTSHRYVSKRAAEIMGKPYDQLKIITVHVGNGASVAAVKNGVSVDTSMGFTPLEGLVMGTRSGDIDPAIVEFLEKEEGLSAKEVVNILNKKSGVYGLTKGFSSDMRDIEDNAIEGDPVCRLALDVYEYRIAKYIGAYAAAMNGVDAIVFTAGVGENSPIMREEIIENYLGYLGIKIDKEANDFKGEEKIISTPDSKVIAMVVPTNEELMIAKDTKEIIEKGLDELKI

SEQ ID NO: 3017 - DNA, 1257 bp, synthetic construct
  misc_feature 1..1257: note = Variant of acetate kinase
  source 1..1257: mol_type = other DNA
atgcaccatcatcatcatcatggcggtagcggcatgaaagttctggtgattaattctggtagctcctccatcaaatatcagctcctcgatatgaccaacgaaaaggtattagcgaaaggcttggtcgagcgcattggcatcgacggttcgcgtatcgtgcataaagttaacggcgaaaaacacgtgctggaacatgagattaagaatcacgaaattggacttaaattggtcctggatcttcttacggacgaaaaatacggtgtgttgaaggatctcaaagaaatcgatgcagttgggcatcgcgtagtacatggcggcgagcgttttgccagtagcgtgaagattactgacgaagtcttaaagaccatcgagacgttgtcgttcttagctccgttacacaatccagcgaacattcggggtatcaagagcagcatgaaagtgttaccgggtgtgcctcaagttgccgtctttgatacagcgttccaccagaagatgccggagaaagcctatttgtacgcaatcccctatgagtactacgagaaatataaaattcgccgctatgggtttcatggaacctcacatcgttatgtgagtaaacgtgctgcggaaattatgggcaaaccgtacgatcagctcaagatcattaccgttcacgtgggtaacggcgcatcagttgcggcggtgaagaatggcgtatctgttgacacttccatgggtttcacaccacttgaaggtcttgtcatgggcacgcgcagcggcgatattgatccggccatcgtggaatttcttgagaaagaagaaggattgtcggccaaagaagtcgtcaacatcctcaacaagaaatctggtgtgtatgggctcaccaaaggctttagtagtgacatgcgtgacattgaagataatgctattgaaggtgatcctgtatgccgccttgcattagatgtgtacgaatatcgtatcgcgaaatatattggcgcatacgctgcggccatgaacggtgttgacgcgatcgtctttaccgcaggagttggcgaaaatagcccgattatgcgcgaagaaattattgagaactacttgggctacttagggatcaagatcgataaagaagccaatgacttcaaaggtgaggagaagatcatttcaacgcccgattccaaagtgattgcgatggtagttccgaccaacgaggagctcatgatcgccaaagacacgaaagaaatcattgagaaagggttggacgagcttaagatctaatga

SEQ ID NO: 3018 - protein, 417 aa, synthetic construct
  REGION 1..417: note = Variant of acetate kinase
MHHHHHHGGSGMKVLVINSGSSSIKYQLLDMTNEKVLAKGLVERIGIDGSRIVHKVNGEKHVLEHEIKNHEIGLKLVLDLLTDEKYGVLKDLKEIDAVGHRVVHGGERFASSVKITDEVLKTIETLSFLAPLHNPANIRGIKSSMKVLPGVPQVAVFDTAFHQKMPEKAYLYAIPYEYYEKYKIRRYGFHGTSHRYVSKRAAEIMGKPYDQLKIITVHVGNGASVAAVKNGVSVDTSMGFTPLEGLVMGTRSGDIDPAIVEFLEKEEGLSAKEVVNILNKKSGVYGLTKGFSSDMRDIEDNAIEGDPVCRLALDVYEYRIAKYIGAYAAAMNGVDAIVFTAGVGENSPIMREEIIENYLGYLGIKIDKEANDFKGEEKIISTPDSKVIAMVVPTNEELMIAKDTKEIIEKGLDELKI

SEQ ID NO: 3019 - DNA, 1257 bp, synthetic construct
  misc_feature 1..1257: note = Variant of acetate kinase
  source 1..1257: mol_type = other DNA
atgcaccatcatcatcatcatggcggtagcggcatgaaagttctggtgattaattctggtagctcctccatcaaatatcagctcctcgatatgaccaacgaaaaggtattagcgaaaggcttggtcgagcgcattggcatcgacggttcgcgtatcgtgcataaagttaacggcgaaaaacacgtgctggaacatgagattaagaatcacgaaattggacttaaattggtcctggatcttcttacggacgaaaaatacggtgtgttgaaggatctcaaagaaatcgatgcagttgggcatcgcgtagtacatggcggcgagcgttttgccagtagcgtgaagattactgacgaagtcttaaagaccatcgagacgttgtcgttcttagctccgttacacaatccagcgaacattatgggtatcaagagcagcatgaaagtgttaccgggtgtgcctcaagttgccgtctttgatacagcgttccaccagaagatgccggagaaagcctatttgtacgcaatcccctatgagtactacgagaaatataaaattcgccgctatgggtttcatggaacctcacatcgttatgtgagtaaacgtgctgcggaaattatgggcaaaccgtacgatcagctcaagatcattacccttcacgtgggtaacggcgcatcagttgcggcggtgaagaatggcgtatctgttgacacttccatgggtttcacaccacttgaaggtcttgtcatgggcacgcgcagcggcgatattgatccggccatcgtggaatttcttgagaaagaagaaggattgtcggccaaagaagtcgtcaacatcctcaacaagaaatctggtgtgtatgggctcaccaaaggctttagtagtgacatgcgtgacattgaagataatgctattgaaggtgatcctgtatgccgccttgcattagatgtgtacgaatatcgtatcgcgaaatatattggcgcatacgctgcggccatgaacggtgttgacgcgatcgtctttaccgcaggagttggcgaaaatagcccgattatgcgcgaagaaattattgagaactacttgggctacttagggatcaagatcgataaagaagccaatgacttcaaaggtgaggagaagatcatttcaacgcccgattccaaagtgattgcgatggtagttccgaccaacgaggagctcatgatcgccaaagacacgaaagaaatcattgagaaagggttggacgagcttaagatctaatga

SEQ ID NO: 3020 - protein, 417 aa, synthetic construct
  REGION 1..417: note = Variant of acetate kinase
MHHHHHHGGSGMKVLVINSGSSSIKYQLLDMTNEKVLAKGLVERIGIDGSRIVHKVNGEKHVLEHEIKNHEIGLKLVLDLLTDEKYGVLKDLKEIDAVGHRVVHGGERFASSVKITDEVLKTIETLSFLAPLHNPANIMGIKSSMKVLPGVPQVAVFDTAFHQKMPEKAYLYAIPYEYYEKYKIRRYGFHGTSHRYVSKRAAEIMGKPYDQLKIITLHVGNGASVAAVKNGVSVDTSMGFTPLEGLVMGTRSGDIDPAIVEFLEKEEGLSAKEVVNILNKKSGVYGLTKGFSSDMRDIEDNAIEGDPVCRLALDVYEYRIAKYIGAYAAAMNGVDAIVFTAGVGENSPIMREEIIENYLGYLGIKIDKEANDFKGEEKIISTPDSKVIAMVVPTNEELMIAKDTKEIIEKGLDELKI

SEQ ID NO: 3021 - DNA, 1257 bp, synthetic construct
  misc_feature 1..1257: note = Variant of acetate kinase
  source 1..1257: mol_type = other DNA
atgcaccatcatcatcatcatggcggtagcggcatgaaagttctggtgattaattctggtagctcctccatcaaatatcagctcctcgatatgaccaacgaaaaggtattagcgaaaggcttggtcgagcgcattggcatcgacggttcgcgtatcgtgcataaagttaacggcgaaaaacacgtgctgctgcatgagattaagaatcacgaaattggacttaaattggtcctggatcttcttacggacgaaaaatacggtgtgttgaaggatctcaaagaaatcgatgcagttgggcatcgcgtagtacatggcggcgagcgttttgccagtagcgtgaagattactgacgaagtcttaaagaccatcgagacgttgtcgttcttagctccgttacacaatccagcgaacattatgggtatcaagagcagcatgaaagtgttaccgggtgtgcctcaagttgccgtctttgatacagcgttccaccagaagatgccggagaaagcctatttgtacgcaatcccctatgagtactacgagaaatataaaattcgccgctatgggtttcatggaacctcacatcgttatgtgagtaaacgtgctgcggaaattatgggcaaaccgtacgatcagctcaagatcattaccgttcacgtgggtaacggcgcatcagttgcggcggtgaagaatggcgtatctgttgacacttccatgggtttcacaccacttgaaggtcttgtcatgggcacgcgcagcggcgatattgatccggccatcgtggaatttcttgagaaagaagaaggattgtcggccaaagaagtcgtcaacatcctcaacaagaaatctggtgtgtatgggctcaccaaaggctttagtagtgacatgcgtgacattgaagataatgctattgaaggtgatcctgtatgccgccttgcattagatgtgtacgaatatcgtatcgcgaaatatattggcgcatacgctgcggccatgaacggtgttgacgcgatcgtctttaccgcaggagttggcgaaaatagcccgattatgcgcgaagaaattattgagaactacttgggctacttagggatcaagatcgataaagaagccaatgacttcaaaggtgaggagaagatcatttcaacgcccgattccaaagtgattgcgatggtagttccgaccaacgaggagctcatgatcgccaaagacacgaaagaaatcattgagaaagggttggacgagcttaagatctaatga

SEQ ID NO: 3022 - protein, 417 aa, synthetic construct
  REGION 1..417: note = Variant of acetate kinase
MHHHHHHGGSGMKVLVINSGSSSIKYQLLDMTNEKVLAKGLVERIGIDGSRIVHKVNGEKHVLLHEIKNHEIGLKLVLDLLTDEKYGVLKDLKEIDAVGHRVVHGGERFASSVKITDEVLKTIETLSFLAPLHNPANIMGIKSSMKVLPGVPQVAVFDTAFHQKMPEKAYLYAIPYEYYEKYKIRRYGFHGTSHRYVSKRAAEIMGKPYDQLKIITVHVGNGASVAAVKNGVSVDTSMGFTPLEGLVMGTRSGDIDPAIVEFLEKEEGLSAKEVVNILNKKSGVYGLTKGFSSDMRDIEDNAIEGDPVCRLALDVYEYRIAKYIGAYAAAMNGVDAIVFTAGVGENSPIMREEIIENYLGYLGIKIDKEANDFKGEEKIISTPDSKVIAMVVPTNEELMIAKDTKEIIEKGLDELKI

SEQ ID NO: 3023 - DNA, 1257 bp, synthetic construct
  misc_feature 1..1257: note = Variant of acetate kinase
  source 1..1257: mol_type = other DNA
atgcaccatcatcatcatcatggcggtagcggcatgaaagttctggtgattaattctggtagctcctccatcaaatatcagctcctcgatatgaccaacgaaaaggtattagcgaaaggcttggtcgagcgcattggcatcgacggttcgcgtatcgtgcataaagttaacggcgaaaaacacgtgctgcggcatgagattaagaatcacgaaattggacttaaattggtcctggatcttcttacggacgaaaaatacggtgtgttgaaggatctcaaagaaatcgatgcagttgggcatcgcgtagtacatggcggcgagcgttttgccagtagcgtgaagattactgacgaagtcttaaagaccatcgagacgttgtcgttcttagctccgttacacaatccagcgaacattatgggtatcaagagcagcatgaaagtgttaccgggtgtgcctcaagttgccgtctttgatacagcgttccaccagaagatgccggagaaagcctatttgtacgcaatcccctatgagtactacgagaaatataaaattcgccgctatgggtttcatggaacctcacatcgttatgtgagtaaacgtgctgcggaaattatgggcaaaccgtacgatcagctcaagatcattaccgttcacgtgggtaacggcgcatcagttgcggcggtgaagaatggcgtatctgttgacacttccatgggtttcacaccacttgaaggtcttgtcatgggcacgcgcagcggcgatattgatccggccatcgtggaatttcttgagaaagaagaaggattgtcggccaaagaagtcgtcaacatcctcaacaagaaatctggtgtgtatgggctcaccaaaggctttagtagtgacatgcgtgacattgaagataatgctattgaaggtgatcctgtatgccgccttgcattagatgtgtacgaatatcgtatcgcgaaatatattggcgcatacgctgcggccatgaacggtgttgacgcgatcgtctttaccgcaggagttggcgaaaatagcccgattatgcgcgaagaaattattgagaactacttgggctacttagggatcaagatcgataaagaagccaatgacttcaaaggtgaggagaagatcatttcaacgcccgattccaaagtgattgcgatggtagttccgaccaacgaggagctcatgatcgccaaagacacgaaagaaatcattgagaaagggttggacgagcttaagatctaatga

SEQ ID NO: 3024 - protein, 417 aa, synthetic construct
  REGION 1..417: note = Variant of acetate kinase
MHHHHHHGGSGMKVLVINSGSSSIKYQLLDMTNEKVLAKGLVERIGIDGSRIVHKVNGEKHVLRHEIKNHEIGLKLVLDLLTDEKYGVLKDLKEIDAVGHRVVHGGERFASSVKITDEVLKTIETLSFLAPLHNPANIMGIKSSMKVLPGVPQVAVFDTAFHQKMPEKAYLYAIPYEYYEKYKIRRYGFHGTSHRYVSKRAAEIMGKPYDQLKIITVHVGNGASVAAVKNGVSVDTSMGFTPLEGLVMGTRSGDIDPAIVEFLEKEEGLSAKEVVNILNKKSGVYGLTKGFSSDMRDIEDNAIEGDPVCRLALDVYEYRIAKYIGAYAAAMNGVDAIVFTAGVGENSPIMREEIIENYLGYLGIKIDKEANDFKGEEKIISTPDSKVIAMVVPTNEELMIAKDTKEIIEKGLDELKI

SEQ ID NO: 3025 - DNA, 1257 bp, synthetic construct
  misc_feature 1..1257: note = Variant of acetate kinase
  source 1..1257: mol_type = other DNA
atgcaccatcatcatcatcatggcggtagcggcatgaaagttctggtgattaattctggtagctcctccatcaaatatcagctcctcgatatgaccaacgaaaaggtattagcgaaaggcttggtcgagcgcattggcatcgacggttcgcgtatcgtgcataaagttaacggcgaaaaacacgtgctgaagcatgagattaagaatcacgaaattggacttaaattggtcctggatcttcttacggacgaaaaatacggtgtgttgaaggatctcaaagaaatcgatgcagttgggcatcgcgtagtacatggcggcgagcgttttgccagtagcgtgaagattactgacgaagtcttaaagaccatcgagacgttgtcgttcttagctccgttacacaatccagcgaacattatgggtatcaagagcagcatgaaagtgttaccgggtgtgcctcaagttgccgtctttgatacagcgttccaccagaagatgccggagaaagcctatttgtacgcaatcccctatgagtactacgagaaatataaaattcgccgctatgggtttcatggaacctcacatcgttatgtgagtaaacgtgctgcggaaattatgggcaaaccgtacgatcagctcaagatcattaccgttcacgtgggtaacggcgcatcagttgcggcggtgaagaatggcgtatctgttgacacttccatgggtttcacaccacttgaaggtcttgtcatgggcacgcgcagcggcgatattgatccggccatcgtggaatttcttgagaaagaagaaggattgtcggccaaagaagtcgtcaacatcctcaacaagaaatctggtgtgtatgggctcaccaaaggctttagtagtgacatgcgtgacattgaagataatgctattgaaggtgatcctgtatgccgccttgcattagatgtgtacgaatatcgtatcgcgaaatatattggcgcatacgctgcggccatgaacggtgttgacgcgatcgtctttaccgcaggagttggcgaaaatagcccgattatgcgcgaagaaattattgagaactacttgggctacttagggatcaagatcgataaagaagccaatgacttcaaaggtgaggagaagatcatttcaacgcccgattccaaagtgattgcgatggtagttccgaccaacgaggagctcatgatcgccaaagacacgaaagaaatcattgagaaagggttggacgagcttaagatctaatga

SEQ ID NO: 3026 - protein, 417 aa, synthetic construct
  REGION 1..417: note = Variant of acetate kinase
MHHHHHHGGSGMKVLVINSGSSSIKYQLLDMTNEKVLAKGLVERIGIDGSRIVHKVNGEKHVLKHEIKNHEIGLKLVLDLLTDEKYGVLKDLKEIDAVGHRVVHGGERFASSVKITDEVLKTIETLSFLAPLHNPANIMGIKSSMKVLPGVPQVAVFDTAFHQKMPEKAYLYAIPYEYYEKYKIRRYGFHGTSHRYVSKRAAEIMGKPYDQLKIITVHVGNGASVAAVKNGVSVDTSMGFTPLEGLVMGTRSGDIDPAIVEFLEKEEGLSAKEVVNILNKKSGVYGLTKGFSSDMRDIEDNAIEGDPVCRLALDVYEYRIAKYIGAYAAAMNGVDAIVFTAGVGENSPIMREEIIENYLGYLGIKIDKEANDFKGEEKIISTPDSKVIAMVVPTNEELMIAKDTKEIIEKGLDELKI

SEQ ID NO: 3027 - DNA, 1257 bp, synthetic construct
  misc_feature 1..1257: note = Variant of acetate kinase
  source 1..1257: mol_type = other DNA
atgcaccatcatcatcatcatggcggtagcggcatgaaagttctggtgattaattctggtagctcctccatcaaatatcagctcctcgatatgaccaacgaaaaggtattagcgaaaggcttggtcgagcgcattggcatcgacggttcgcgtatcgtgcataaagttaacggcgaaaaacacgtgctggaacatgagattaagaatcacgaaattggacttaaattggtcctggatcttcttacggacgaaaaatacggtgtgttgaaggatctcaaagaaatcgatgcagttgggcatcgcgtagtacatggcggcgagcgttttgccagtagcgtgaagattactgacgaagtcttaaagaccatcgagacgttgtcgttcttagctccgttacacaatccagcgaacattatgggtatcaagagcagcatgaaagtgttaccgggtgtgcctcaagttgccgtctttgatacagcgttccaccagaagatgccggagaaagcctatttgtacgcaatcccctatgagtactacgagaaatataaaattcgccgctatgggtttcatggaacctcacatcgttatgtgagtaaacgtgctgcggaaattatgggcaaaccgtacgatcagctcaagatcattaccgttcacgtgggtaacggcgcatcagttgcggcggtgaagaatggcgtatctgttgacacttccatgggtttcacaccacttgaaggtcttgtcgggggcacgcgcagcggcgatattgatccggccatcgtggaatttcttgagaaagaagaaggattgtcggccaaagaagtcgtcaacatcctcaacaagaaatctggtgtgtatgggctcaccaaaggctttagtagtgacatgcgtgacattgaagataatgctattgaaggtgatcctgtatgccgccttgcattagatgtgtacgaatatcgtatcgcgaaatatattggcgcatacgctgcggccatgaacggtgttgacgcgatcgtctttaccgcaggagttggcgaaaatagcccgattatgcgcgaagaaattattgagaactacttgggctacttagggatcaagatcgataaagaagccaatgacttcaaaggtgaggagaagatcatttcaacgcccgattccaaagtgattgcgatggtagttccgaccaacgaggagctcatgatcgccaaagacacgaaagaaatcattgagaaagggttggacgagcttaagatctaatga

SEQ ID NO: 3028 - protein, 417 aa, synthetic construct
  REGION 1..417: note = Variant of acetate kinase
MHHHHHHGGSGMKVLVINSGSSSIKYQLLDMTNEKVLAKGLVERIGIDGSRIVHKVNGEKHVLEHEIKNHEIGLKLVLDLLTDEKYGVLKDLKEIDAVGHRVVHGGERFASSVKITDEVLKTIETLSFLAPLHNPANIMGIKSSMKVLPGVPQVAVFDTAFHQKMPEKAYLYAIPYEYYEKYKIRRYGFHGTSHRYVSKRAAEIMGKPYDQLKIITVHVGNGASVAAVKNGVSVDTSMGFTPLEGLVGGTRSGDIDPAIVEFLEKEEGLSAKEVVNILNKKSGVYGLTKGFSSDMRDIEDNAIEGDPVCRLALDVYEYRIAKYIGAYAAAMNGVDAIVFTAGVGENSPIMREEIIENYLGYLGIKIDKEANDFKGEEKIISTPDSKVIAMVVPTNEELMIAKDTKEIIEKGLDELKI

SEQ ID NO: 3029 - DNA, 1257 bp, synthetic construct
  misc_feature 1..1257: note = Variant of acetate kinase
  source 1..1257: mol_type = other DNA
atgcaccatcatcatcatcatggcggtagcggcatgaaagttctggtgattaattctggtagctcctccatcaaatatcagctcctcgatatgaccaacgaaaaggtattagcgaaaggcttggtcgagcgcattggcatcgacggttcgcgtatcgtgcataaagttaacggcgaaaaacacgtgctggttcatgagattaagaatcacgaaattggacttaaattggtcctggatcttcttacggacgaaaaatacggtgtgttgaaggatctcaaagaaatcgatgcagttgggcatcgcgtagtacatggcggcgagcgttttgccagtagcgtgaagattactgacgaagtcttaaagaccatcgagacgttgtcgttcttagctccgttacacaatccagcgaacattatgggtatcaagagcagcatgaaagtgttaccgggtgtgcctcaagttgccgtctttgatacagcgttccaccagaagatgccggagaaagcctatttgtacgcaatcccctatgagtactacgagaaatataaaattcgccgctatgggtttcatggaacctcacatcgttatgtgagtaaacgtgctgcggaaattatgggcaaaccgtacgatcagctcaagatcattaccgttcacgtgggtaacggcgcatcagttgcggcggtgaagaatggcgtatctgttgacacttccatgggtttcacaccacttgaaggtcttgtcatgggcacgcgcagcggcgatattgatccggccatcgtggaatttcttgagaaagaagaaggattgtcggccaaagaagtcgtcaacatcctcaacaagaaatctggtgtgtatgggctcaccaaaggctttagtagtgacatgcgtgacattgaagataatgctattgaaggtgatcctgtatgccgccttgcattagatgtgtacgaatatcgtatcgcgaaatatattggcgcatacgctgcggccatgaacggtgttgacgcgatcgtctttaccgcaggagttggcgaaaatagcccgattatgcgcgaagaaattattgagaactacttgggctacttagggatcaagatcgataaagaagccaatgacttcaaaggtgaggagaagatcatttcaacgcccgattccaaagtgattgcgatggtagttccgaccaacgaggagctcatgatcgccaaagacacgaaagaaatcattgagaaagggttggacgagcttaagatctaatga

SEQ ID NO: 3030 - protein, 417 aa, synthetic construct
  REGION 1..417: note = Variant of acetate kinase
MHHHHHHGGSGMKVLVINSGSSSIKYQLLDMTNEKVLAKGLVERIGIDGSRIVHKVNGEKHVLVHEIKNHEIGLKLVLDLLTDEKYGVLKDLKEIDAVGHRVVHGGERFASSVKITDEVLKTIETLSFLAPLHNPANIMGIKSSMKVLPGVPQVAVFDTAFHQKMPEKAYLYAIPYEYYEKYKIRRYGFHGTSHRYVSKRAAEIMGKPYDQLKIITVHVGNGASVAAVKNGVSVDTSMGFTPLEGLVMGTRSGDIDPAIVEFLEKEEGLSAKEVVNILNKKSGVYGLTKGFSSDMRDIEDNAIEGDPVCRLALDVYEYRIAKYIGAYAAAMNGVDAIVFTAGVGENSPIMREEIIENYLGYLGIKIDKEANDFKGEEKIISTPDSKVIAMVVPTNEELMIAKDTKEIIEKGLDELKI

SEQ ID NO: 3031 - DNA, 1257 bp, synthetic construct
  misc_feature 1..1257: note = Variant of acetate kinase
  source 1..1257: mol_type = other DNA
atgcaccatcatcatcatcatggcggtagcggcatgaaagttctggtgattaattctggtagctcctccatcaaatatcagctcctcgatatgaccaacgaaaaggtattagcgaaaggcttggtcgagcgcattggcatcgacggttcgcgtatcgtgcataaagttaacggcgaaaaacacgtgctggaacatgagattaagaatcacgaaattggacttaaattggtcctggatcttcttacggacgaaaaatacggtgtgttgaaggatctcaaagaaatcgatgcagttgggcatcgcgtagtacatggcggcgagcgttttgccagtagcgtgaagattactgacgaagtcttaaagaccatcgagacgttgtcgttcttagctccgttacacaatccagcgaacattatgggtatcaagagcagcatgaaagtgttaccgggtgtgcctcaagttgccgtctttgatacagcgttccaccagaagatgccggagaaagcctatttgtacgcaatcccctatgagtactacgagaaatataaaattcgccgctatgggtttcatggaacctcacatcgttatgtgagtaaacgtgctgcggaaattatgggcaaaccgtacgatcagctcaagatcattaccgttcacgtgggtaacggcgcatcagttgcggcggtgaagaatggcgtatctgttgacacttccatgggtttcacaccacttgaaggtcttgtcatgggcacgcgcagcggcgatattgatccggccatcgtggaatttcttgagaaagaagaaggattgtcggccaaagaagtcgtcaacatcctcaacaagaaatctggtgtgtatgggctcaccaaaggctttagtagtgacttgcgtgacattgaagataatgctattgaaggtgatcctgtatgccgccttgcattagatgtgtacgaatatcgtatcgcgaaatatattggcgcatacgctgcggccatgaacggtgttgacgcgatcgtctttaccgcaggagttggcgaaaatagcccgattatgcgcgaagaaattattgagaactacttgggctacttagggatcaagatcgataaagaagccaatgacttcaaaggtgaggagaagatcatttcaacgcccgattccaaagtgattgcgatggtagttccgaccaacgaggagctcatgatcgccaaagacacgaaagaaatcattgagaaagggttggacgagcttaagatctaatga

SEQ ID NO: 3032 - protein, 417 aa, synthetic construct
  REGION 1..417: note = Variant of acetate kinase
MHHHHHHGGSGMKVLVINSGSSSIKYQLLDMTNEKVLAKGLVERIGIDGSRIVHKVNGEKHVLEHEIKNHEIGLKLVLDLLTDEKYGVLKDLKEIDAVGHRVVHGGERFASSVKITDEVLKTIETLSFLAPLHNPANIMGIKSSMKVLPGVPQVAVFDTAFHQKMPEKAYLYAIPYEYYEKYKIRRYGFHGTSHRYVSKRAAEIMGKPYDQLKIITVHVGNGASVAAVKNGVSVDTSMGFTPLEGLVMGTRSGDIDPAIVEFLEKEEGLSAKEVVNILNKKSGVYGLTKGFSSDLRDIEDNAIEGDPVCRLALDVYEYRIAKYIGAYAAAMNGVDAIVFTAGVGENSPIMREEIIENYLGYLGIKIDKEANDFKGEEKIISTPDSKVIAMVVPTNEELMIAKDTKEIIEKGLDELKI

SEQ ID NO: 3033 - DNA, 1257 bp, synthetic construct
  misc_feature 1..1257: note = Variant of acetate kinase
  source 1..1257: mol_type = other DNA
atgcaccatcatcatcatcatggcggtagcggcatgaaagttctggtgattaattctggtagctcctccatcaaatatcagctcctcgatatgaccaacgaaaaggtattagcgaaaggcttggtcgagcgcattggcatcgacggttcgcgtatcgtgcataaagttaacggcgaaaaacacgtgctggaacatgagattaagaatcacgaaattggacttaaattggtcctggatcttcttacggacgaaaaatacggtgtgttgaaggatctcaaagaaatcgatgcagttgggcatcgcgtagtacatggcggcgagcgttttgccagtagcgtgaagattactgacgaagtcttaaagaccatcgagacgttgtcgttcttagctccgttacacaatccagcgaacattatgggtatcaagagcagcatgaaagtgttaccgggtgtgcctcaagttgccgtctttgatacagcgttccaccagaagatgccggagaaagcctatttgtacgcaatcccctatgagtactacgagaaatataaaattcgccgctatgggtttcatggaacctcacatcgttatgtgagtaaacgtgctgcggaaattatgggcaaaccgtacgatcagctcaagatcattaccgttcacgtgggtaacggcgcatcagttgcggcggtgaagaatggcgtatctgttgacacttccatgggtttcacaccacttgaaggtcttgtcatgggcacgcgcagcggcgatattgatccggccatcgtggaatttcttgagaaagaagaaggattgtcggccaaagaagtcgtcaacatcctcaacaagaaatctggtgtgttggggctcaccaaaggctttagtagtgacatgcgtgacattgaagataatgctattgaaggtgatcctgtatgccgccttgcattagatgtgtacgaatatcgtatcgcgaaatatattggcgcatacgctgcggccatgaacggtgttgacgcgatcgtctttaccgcaggagttggcgaaaatagcccgattatgcgcgaagaaattattgagaactacttgggctacttagggatcaagatcgataaagaagccaatgacttcaaaggtgaggagaagatcatttcaacgcccgattccaaagtgattgcgatggtagttccgaccaacgaggagctcatgatcgccaaagacacgaaagaaatcattgagaaagggttggacgagcttaagatctaatga

SEQ ID NO: 3034 - protein, 417 aa, synthetic construct
  REGION 1..417: note = Variant of acetate kinase
MHHHHHHGGSGMKVLVINSGSSSIKYQLLDMTNEKVLAKGLVERIGIDGSRIVHKVNGEKHVLEHEIKNHEIGLKLVLDLLTDEKYGVLKDLKEIDAVGHRVVHGGERFASSVKITDEVLKTIETLSFLAPLHNPANIMGIKSSMKVLPGVPQVAVFDTAFHQKMPEKAYLYAIPYEYYEKYKIRRYGFHGTSHRYVSKRAAEIMGKPYDQLKIITVHVGNGASVAAVKNGVSVDTSMGFTPLEGLVMGTRSGDIDPAIVEFLEKEEGLSAKEVVNILNKKSGVLGLTKGFSSDMRDIEDNAIEGDPVCRLALDVYEYRIAKYIGAYAAAMNGVDAIVFTAGVGENSPIMREEIIENYLGYLGIKIDKEANDFKGEEKIISTPDSKVIAMVVPTNEELMIAKDTKEIIEKGLDELKI

SEQ ID NO: 3035 - DNA, 1257 bp, synthetic construct
  misc_feature 1..1257: note = Variant of acetate kinase
  source 1..1257: mol_type = other DNA
atgcaccatcatcatcatcatggcggtagcggcatgaaagttctggtgattaattctggtagctcctccatcaaatatcagctcctcgatatgaccaacgaaaaggtattagcgaaaggcttggtcgagcgcattggcatcgacggttcgcgtatcgtgcataaagttaacggcgaaaaacacgtgctggaacatgagattaagaatcacgaaattggaagtaaattggtcctggatcttcttacggacgaaaaatacggtgtgttgaaggatctcaaagaaatcgatgcagttgggcatcgcgtagtacatggcggcgagcgttttgccagtagcgtgaagattactgacgaagtcttaaagaccatcgagacgttgtcgttcttagctccgttacacaatccagcgaacattatgggtatcaagagcagcatgaaagtgttaccgggtgtgcctcaagttgccgtctttgatacagcgttccaccagaagatgccggagaaagcctatttgtacgcaatcccctatgagtactacgagaaatataaaattcgccgctatgggtttcatggaacctcacatcgttatgtgagtaaacgtgctgcggaaattatgggcaaaccgtacgatcagctcaagatcattaccgttcacgtgggtaacggcgcatcagttgcggcggtgaagaatggcgtatctgttgacacttccatgggtttcacaccacttgaaggtcttgtcatgggcacgcgcagcggcgatattgatccggccatcgtggaatttcttgagaaagaagaaggattgtcggccaaagaagtcgtcaacatcctcaacaagaaatctggtgtgtatgggctcaccaaaggctttagtagtgacatgcgtgacattgaagataatgctattgaaggtgatcctgtatgccgccttgcattagatgtgtacgaatatcgtatcgcgaaatatattggcgcatacgctgcggccatgaacggtgttgacgcgatcgtctttaccgcaggagttggcgaaaatagcccgattatgcgcgaagaaattattgagaactacttgggctacttagggatcaagatcgataaagaagccaatgacttcaaaggtgaggagaagatcatttcaacgcccgattccaaagtgattgcgatggtagttccgaccaacgaggagctcatgatcgccaaagacacgaaagaaatcattgagaaagggttggacgagcttaagatctaatga

SEQ ID NO: 3036 - protein, 417 aa, synthetic construct
  REGION 1..417: note = Variant of acetate kinase
MHHHHHHGGSGMKVLVINSGSSSIKYQLLDMTNEKVLAKGLVERIGIDGSRIVHKVNGEKHVLEHEIKNHEIGSKLVLDLLTDEKYGVLKDLKEIDAVGHRVVHGGERFASSVKITDEVLKTIETLSFLAPLHNPANIMGIKSSMKVLPGVPQVAVFDTAFHQKMPEKAYLYAIPYEYYEKYKIRRYGFHGTSHRYVSKRAAEIMGKPYDQLKIITVHVGNGASVAAVKNGVSVDTSMGFTPLEGLVMGTRSGDIDPAIVEFLEKEEGLSAKEVVNILNKKSGVYGLTKGFSSDMRDIEDNAIEGDPVCRLALDVYEYRIAKYIGAYAAAMNGVDAIVFTAGVGENSPIMREEIIENYLGYLGIKIDKEANDFKGEEKIISTPDSKVIAMVVPTNEELMIAKDTKEIIEKGLDELKI

SEQ ID NO: 3037 - DNA, 1257 bp, synthetic construct
  misc_feature 1..1257: note = Variant of acetate kinase
  source 1..1257: mol_type = other DNA
atgcaccatcatcatcatcatggcggtagcggcatgaaagttctggtgattaattctggtagctcctccatcaaatatcagctcctcgatatgaccaacgaaaaggtattagcgaaaggcttggtcgagcgcattggcatcgacggttcgcgtatcgtgcataaagttaacggcgaaaaacacacgctggaacatgagattaagaatcacgaaattggacttaaattggtcctggatcttcttacggacgaaaaatacggtgtgttgaaggatctcaaagaaatcgatgcagttgggcatcgcgtagtacatggcggcgagcgttttgccagtagcgtgaagattactgacgaagtcttaaagaccatcgagacgttgtcgttcttagctccgttacacaatccagcgaacattatgggtatcaagagcagcatgaaagtgttaccgggtgtgcctcaagttgccgtctttgatacagcgttccaccagaagatgccggagaaagcctatttgtacgcaatcccctatgagtactacgagaaatataaaattcgccgctatgggtttcatggaacctcacatcgttatgtgagtaaacgtgctgcggaaattatgggcaaaccgtacgatcagctcaagatcattaccgttcacgtgggtaacggcgcatcagttgcggcggtgaagaatggcgtatctgttgacacttccatgggtttcacaccacttgaaggtcttgtcatgggcacgcgcagcggcgatattgatccggccatcgtggaatttcttgagaaagaagaaggattgtcggccaaagaagtcgtcaacatcctcaacaagaaatctggtgtgtatgggctcaccaaaggctttagtagtgacatgcgtgacattgaagataatgctattgaaggtgatcctgtatgccgccttgcattagatgtgtacgaatatcgtatcgcgaaatatattggcgcatacgctgcggccatgaacggtgttgacgcgatcgtctttaccgcaggagttggcgaaaatagcccgattatgcgcgaagaaattattgagaactacttgggctacttagggatcaagatcgataaagaagccaatgacttcaaaggtgaggagaagatcatttcaacgcccgattccaaagtgattgcgatggtagttccgaccaacgaggagctcatgatcgccaaagacacgaaagaaatcattgagaaagggttggacgagcttaagatctaatga

SEQ ID NO: 3038 - protein, 417 aa, synthetic construct
  REGION 1..417: note = Variant of acetate kinase
MHHHHHHGGSGMKVLVINSGSSSIKYQLLDMTNEKVLAKGLVERIGIDGSRIVHKVNGEKHTLEHEIKNHEIGLKLVLDLLTDEKYGVLKDLKEIDAVGHRVVHGGERFASSVKITDEVLKTIETLSFLAPLHNPANIMGIKSSMKVLPGVPQVAVFDTAFHQKMPEKAYLYAIPYEYYEKYKIRRYGFHGTSHRYVSKRAAEIMGKPYDQLKIITVHVGNGASVAAVKNGVSVDTSMGFTPLEGLVMGTRSGDIDPAIVEFLEKEEGLSAKEVVNILNKKSGVYGLTKGFSSDMRDIEDNAIEGDPVCRLALDVYEYRIAKYIGAYAAAMNGVDAIVFTAGVGENSPIMREEIIENYLGYLGIKIDKEANDFKGEEKIISTPDSKVIAMVVPTNEELMIAKDTKEIIEKGLDELKI

SEQ ID NO: 3039 - DNA, 1257 bp, synthetic construct
  misc_feature 1..1257: note = Variant of acetate kinase
  source 1..1257: mol_type = other DNA
atgcaccatcatcatcatcatggcggtagcggcatgaaagttctggtgattaattctggtagctcctccatcaaatatcagctcctcgatatgaccaacgaaaaggtattagcgaaaggcttggtcgagcgcattggcatcgacggttcgcgtatcgtgcataaagttaacggcgaaaaacacgtgctggaaattgagattaagaatcacgaaattggacttaaattggtcctggatcttcttacggacgaaaaatacggtgtgttgaaggatctcaaagaaatcgatgcagttgggcatcgcgtagtacatggcggcgagcgttttgccagtagcgtgaagattactgacgaagtcttaaagaccatcgagacgttgtcgttcttagctccgttacacaatccagcgaacattatgggtatcaagagcagcatgaaagtgttaccgggtgtgcctcaagttgccgtctttgatacagcgttccaccagaagatgccggagaaagcctatttgtacgcaatcccctatgagtactacgagaaatataaaattcgccgctatgggtttcatggaacctcacatcgttatgtgagtaaacgtgctgcggaaattatgggcaaaccgtacgatcagctcaagatcattaccgttcacgtgggtaacggcgcatcagttgcggcggtgaagaatggcgtatctgttgacacttccatgggtttcacaccacttgaaggtcttgtcatgggcacgcgcagcggcgatattgatccggccatcgtggaatttcttgagaaagaagaaggattgtcggccaaagaagtcgtcaacatcctcaacaagaaatctggtgtgtatgggctcaccaaaggctttagtagtgacatgcgtgacattgaagataatgctattgaaggtgatcctgtatgccgccttgcattagatgtgtacgaatatcgtatcgcgaaatatattggcgcatacgctgcggccatgaacggtgttgacgcgatcgtctttaccgcaggagttggcgaaaatagcccgattatgcgcgaagaaattattgagaactacttgggctacttagggatcaagatcgataaagaagccaatgacttcaaaggtgaggagaagatcatttcaacgcccgattccaaagtgattgcgatggtagttccgaccaacgaggagctcatgatcgccaaagacacgaaagaaatcattgagaaagggttggacgagcttaagatctaatga

SEQ ID NO: 3040 - protein, 417 aa, synthetic construct
  REGION 1..417: note = Variant of acetate kinase
MHHHHHHGGSGMKVLVINSGSSSIKYQLLDMTNEKVLAKGLVERIGIDGSRIVHKVNGEKHVLEIEIKNHEIGLKLVLDLLTDEKYGVLKDLKEIDAVGHRVVHGGERFASSVKITDEVLKTIETLSFLAPLHNPANIMGIKSSMKVLPGVPQVAVFDTAFHQKMPEKAYLYAIPYEYYEKYKIRRYGFHGTSHRYVSKRAAEIMGKPYDQLKIITVHVGNGASVAAVKNGVSVDTSMGFTPLEGLVMGTRSGDIDPAIVEFLEKEEGLSAKEVVNILNKKSGVYGLTKGFSSDMRDIEDNAIEGDPVCRLALDVYEYRIAKYIGAYAAAMNGVDAIVFTAGVGENSPIMREEIIENYLGYLGIKIDKEANDFKGEEKIISTPDSKVIAMVVPTNEELMIAKDTKEIIEKGLDELKI

SEQ ID NO: 3041 - DNA, 1257 bp, synthetic construct
  misc_feature 1..1257: note = Variant of acetate kinase
  source 1..1257: mol_type = other DNA
atgcaccatcatcatcatcatggcggtagcggcatgaaagttctggtgattaattctggtagctcctccatcaaatatcagctcctcgatatgaccaacgaaaaggtattagcgaaaggcttggtcgagcgcattggcatcgacggttcgcgtatcgtgcataaagttaacggcgaaaaacacgtgctggaacatgagattaagaatcacgaaattggacttaaattggtcctggatcttcttacggacgaaaaatacggtgtgttgaaggatctcaaagaaatcgatgcagttgggcatcgcgtagtacatggcggcgagcgttttgccagtagcgtgaagattactgacgaagtcttaaagaccatcgagacgttgtcgttcttagctccgttacacaatccagcgaacattatgggtatcaagagcagcatgaaagtgttaccgggtgtgcctcaagttgccgtctttgatacagcgttccaccagaagatgccggagaaagcctatttgtacgcaatcccctatgagtactacgagaaatataaaattcgccgctatgggtttcatggaacctcacatcgttatgtgagtaaacgtgctgcggaaattatgggcaaaccgtacgatcagctcaagatcattaccgttcacgtgggtaacggcgcatcagttgcggcggtgaagaatggcgtatctgttgacacttccatgggtttcacaccacttgaaggtcttgtcatgggcacgcgcagcggcgatattgatccggccatcgtggaatttcttgagaaagaagaaggattgtcggccaaagaagtcgtcaacatcctcaacaagaaatctggtgtgtatgggctcaccaaaggctttagtagtgacatgcgtgacattgaagataatgctattgaaggtgatcctgtatgccgccttgcattagatgtgtacgaatatcgtatcgcgaaatatattggcgcatacgctgcggccatgaacggtgttgacgcgatcgtctttaccgcaggagttggcgaaaatagcccgattatgcgcgaagaaattattgagaactacttgggctacttagggatcaagatcgataaagaagccaatgacttcaaaggtgaggagaagatcatttcaacgcccgattccaaagtgattgcgatggtagttccgacccaggaggagctcatgatcgccaaagacacgaaagaaatcattgagaaagggttggacgagcttaagatctaatga

SEQ ID NO: 3042 - protein, 417 aa, synthetic construct
  REGION 1..417: note = Variant of acetate kinase
MHHHHHHGGSGMKVLVINSGSSSIKYQLLDMTNEKVLAKGLVERIGIDGSRIVHKVNGEKHVLEHEIKNHEIGLKLVLDLLTDEKYGVLKDLKEIDAVGHRVVHGGERFASSVKITDEVLKTIETLSFLAPLHNPANIMGIKSSMKVLPGVPQVAVFDTAFHQKMPEKAYLYAIPYEYYEKYKIRRYGFHGTSHRYVSKRAAEIMGKPYDQLKIITVHVGNGASVAAVKNGVSVDTSMGFTPLEGLVMGTRSGDIDPAIVEFLEKEEGLSAKEVVNILNKKSGVYGLTKGFSSDMRDIEDNAIEGDPVCRLALDVYEYRIAKYIGAYAAAMNGVDAIVFTAGVGENSPIMREEIIENYLGYLGIKIDKEANDFKGEEKIISTPDSKVIAMVVPTQEELMIAKDTKEIIEKGLDELKI

SEQ ID NO: 3043 - DNA, 1257 bp, synthetic construct
  misc_feature 1..1257: note = Variant of acetate kinase
  source 1..1257: mol_type = other DNA
atgcaccatcatcatcatcatggcggtagcggcatgaaagttctggtgattaattctggtagctcctccatcaaatatcagctcctcgatatgaccaacgaaaaggtattagcgaaaggcttggtcgagcgcattggcatcgacggttcgcgtatcgtgcataaagttaacggcgaaaaacacgtgctggaacatgagattaagaatcacgaaattggacttaaaggggtcctggatcttcttacggacgaaaaatacggtgtgttgaaggatctcaaagaaatcgatgcagttgggcatcgcgtagtacatggcggcgagcgttttgccagtagcgtgaagattactgacgaagtcttaaagaccatcgagacgttgtcgttcttagctccgttacacaatccagcgaacattatgggtatcaagagcagcatgaaagtgttaccgggtgtgcctcaagttgccgtctttgatacagcgttccaccagaagatgccggagaaagcctatttgtacgcaatcccctatgagtactacgagaaatataaaattcgccgctatgggtttcatggaacctcacatcgttatgtgagtaaacgtgctgcggaaattatgggcaaaccgtacgatcagctcaagatcattaccgttcacgtgggtaacggcgcatcagttgcggcggtgaagaatggcgtatctgttgacacttccatgggtttcacaccacttgaaggtcttgtcatgggcacgcgcagcggcgatattgatccggccatcgtggaatttcttgagaaagaagaaggattgtcggccaaagaagtcgtcaacatcctcaacaagaaatctggtgtgtatgggctcaccaaaggctttagtagtgacatgcgtgacattgaagataatgctattgaaggtgatcctgtatgccgccttgcattagatgtgtacgaatatcgtatcgcgaaatatattggcgcatacgctgcggccatgaacggtgttgacgcgatcgtctttaccgcaggagttggcgaaaatagcccgattatgcgcgaagaaattattgagaactacttgggctacttagggatcaagatcgataaagaagccaatgacttcaaaggtgaggagaagatcatttcaacgcccgattccaaagtgattgcgatggtagttccgaccaacgaggagctcatgatcgccaaagacacgaaagaaatcattgagaaagggttggacgagcttaagatctaatga

SEQ ID NO: 3044 - protein, 417 aa, synthetic construct
  REGION 1..417: note = Variant of acetate kinase
MHHHHHHGGSGMKVLVINSGSSSIKYQLLDMTNEKVLAKGLVERIGIDGSRIVHKVNGEKHVLEHEIKNHEIGLKGVLDLLTDEKYGVLKDLKEIDAVGHRVVHGGERFASSVKITDEVLKTIETLSFLAPLHNPANIMGIKSSMKVLPGVPQVAVFDTAFHQKMPEKAYLYAIPYEYYEKYKIRRYGFHGTSHRYVSKRAAEIMGKPYDQLKIITVHVGNGASVAAVKNGVSVDTSMGFTPLEGLVMGTRSGDIDPAIVEFLEKEEGLSAKEVVNILNKKSGVYGLTKGFSSDMRDIEDNAIEGDPVCRLALDVYEYRIAKYIGAYAAAMNGVDAIVFTAGVGENSPIMREEIIENYLGYLGIKIDKEANDFKGEEKIISTPDSKVIAMVVPTNEELMIAKDTKEIIEKGLDELKI

SEQ ID NO: 3045 - DNA, 1257 bp, synthetic construct
  misc_feature 1..1257: note = Variant of acetate kinase
  source 1..1257: mol_type = other DNA
atgcaccatcatcatcatcatggcggtagcggcatgaaagttctggtgattaattctggtagctcctccatcaaatatcagctcctcgatatgaccaacgaaaaggtattagcgaaaggcttggtcgagcgcattggcatcgacggttcgcgtatcgtgcataaagttaacggcgaaaaacacgtgctggaacatgagattaagaatcacgaaattggacttaaattggtcctggagcttcttacggacgaaaaatacggtgtgttgaaggatctcaaagaaatcgatgcagttgggcatcgcgtagtacatggcggcgagcgttttgccagtagcgtgaagattactgacgaagtcttaaagaccatcgagacgttgtcgttcttagctccgttacacaatccagcgaacattatgggtatcaagagcagcatgaaagtgttaccgggtgtgcctcaagttgccgtctttgatacagcgttccaccagaagatgccggagaaagcctatttgtacgcaatcccctatgagtactacgagaaatataaaattcgccgctatgggtttcatggaacctcacatcgttatgtgagtaaacgtgctgcggaaattatgggcaaaccgtacgatcagctcaagatcattaccgttcacgtgggtaacggcgcatcagttgcggcggtgaagaatggcgtatctgttgacacttccatgggtttcacaccacttgaaggtcttgtcatgggcacgcgcagcggcgatattgatccggccatcgtggaatttcttgagaaagaagaaggattgtcggccaaagaagtcgtcaacatcctcaacaagaaatctggtgtgtatgggctcaccaaaggctttagtagtgacatgcgtgacattgaagataatgctattgaaggtgatcctgtatgccgccttgcattagatgtgtacgaatatcgtatcgcgaaatatattggcgcatacgctgcggccatgaacggtgttgacgcgatcgtctttaccgcaggagttggcgaaaatagcccgattatgcgcgaagaaattattgagaactacttgggctacttagggatcaagatcgataaagaagccaatgacttcaaaggtgaggagaagatcatttcaacgcccgattccaaagtgattgcgatggtagttccgaccaacgaggagctcatgatcgccaaagacacgaaagaaatcattgagaaagggttggacgagcttaagatctaatga

SEQ ID NO: 3046 - protein, 417 aa, synthetic construct
  REGION 1..417: note = Variant of acetate kinase
MHHHHHHGGSGMKVLVINSGSSSIKYQLLDMTNEKVLAKGLVERIGIDGSRIVHKVNGEKHVLEHEIKNHEIGLKLVLELLTDEKYGVLKDLKEIDAVGHRVVHGGERFASSVKITDEVLKTIETLSFLAPLHNPANIMGIKSSMKVLPGVPQVAVFDTAFHQKMPEKAYLYAIPYEYYEKYKIRRYGFHGTSHRYVSKRAAEIMGKPYDQLKIITVHVGNGASVAAVKNGVSVDTSMGFTPLEGLVMGTRSGDIDPAIVEFLEKEEGLSAKEVVNILNKKSGVYGLTKGFSSDMRDIEDNAIEGDPVCRLALDVYEYRIAKYIGAYAAAMNGVDAIVFTAGVGENSPIMREEIIENYLGYLGIKIDKEANDFKGEEKIISTPDSKVIAMVVPTNEELMIAKDTKEIIEKGLDELKI

SEQ ID NO: 3047 - DNA, 1257 bp, synthetic construct
  misc_feature 1..1257: note = Variant of acetate kinase
  source 1..1257: mol_type = other DNA
atgcaccatcatcatcatcatggcggtagcggcatgaaagttctggtgattaattctggtagctcctccatcaaatatcagctcctcgatatgaccaacgaaaaggtattagcgaaaggcttggtcgagcgcattggcatcgacggttcgcgtatcgtgcataaagttaacggcgaaaaacacgtgctggaacatgagattaagaatcacgaaattggacttaaattggtcctggatattcttacggacgaaaaatacggtgtgttgaaggatctcaaagaaatcgatgcagttgggcatcgcgtagtacatggcggcgagcgttttgccagtagcgtgaagattactgacgaagtcttaaagaccatcgagacgttgtcgttcttagctccgttacacaatccagcgaacattatgggtatcaagagcagcatgaaagtgttaccgggtgtgcctcaagttgccgtctttgatacagcgttccaccagaagatgccggagaaagcctatttgtacgcaatcccctatgagtactacgagaaatataaaattcgccgctatgggtttcatggaacctcacatcgttatgtgagtaaacgtgctgcggaaattatgggcaaaccgtacgatcagctcaagatcattaccgttcacgtgggtaacggcgcatcagttgcggcggtgaagaatggcgtatctgttgacacttccatgggtttcacaccacttgaaggtcttgtcatgggcacgcgcagcggcgatattgatccggccatcgtggaatttcttgagaaagaagaaggattgtcggccaaagaagtcgtcaacatcctcaacaagaaatctggtgtgtatgggctcaccaaaggctttagtagtgacatgcgtgacattgaagataatgctattgaaggtgatcctgtatgccgccttgcattagatgtgtacgaatatcgtatcgcgaaatatattggcgcatacgctgcggccatgaacggtgttgacgcgatcgtctttaccgcaggagttggcgaaaatagcccgattatgcgcgaagaaattattgagaactacttgggctacttagggatcaagatcgataaagaagccaatgacttcaaaggtgaggagaagatcatttcaacgcccgattccaaagtgattgcgatggtagttccgaccaacgaggagctcatgatcgccaaagacacgaaagaaatcattgagaaagggttggacgagcttaagatctaatga

SEQ ID NO: 3048 - protein, 417 aa, synthetic construct
  REGION 1..417: note = Variant of acetate kinase
MHHHHHHGGSGMKVLVINSGSSSIKYQLLDMTNEKVLAKGLVERIGIDGSRIVHKVNGEKHVLEHEIKNHEIGLKLVLDILTDEKYGVLKDLKEIDAVGHRVVHGGERFASSVKITDEVLKTIETLSFLAPLHNPANIMGIKSSMKVLPGVPQVAVFDTAFHQKMPEKAYLYAIPYEYYEKYKIRRYGFHGTSHRYVSKRAAEIMGKPYDQLKIITVHVGNGASVAAVKNGVSVDTSMGFTPLEGLVMGTRSGDIDPAIVEFLEKEEGLSAKEVVNILNKKSGVYGLTKGFSSDMRDIEDNAIEGDPVCRLALDVYEYRIAKYIGAYAAAMNGVDAIVFTAGVGENSPIMREEIIENYLGYLGIKIDKEANDFKGEEKIISTPDSKVIAMVVPTNEELMIAKDTKEIIEKGLDELKI

SEQ ID NO: 3049 - DNA, 1257 bp, synthetic construct
  misc_feature 1..1257: note = Variant of acetate kinase
  source 1..1257: mol_type = other DNA
atgcaccatcatcatcatcatggcggtagcggcatgaaagttctggtgattaattctggtagctcctccatcaaatatcagctcctcgatatgaccaacgaaaaggtattagcgaaaggcttggtcgagcgcattggcatcgacggttcgcgtatcgtgcataaagttaacggcgaaaaacacgtgctggaacatgagattaagaatcacgaaattggacttaaatcggtcctggatcttcttacggacgaaaaatacggtgtgttgaaggatctcaaagaaatcgatgcagttgggcatcgcgtagtacatggcggcgagcgttttgccagtagcgtgaagattactgacgaagtcttaaagaccatcgagacgttgtcgttcttagctccgttacacaatccagcgaacattatgggtatcaagagcagcatgaaagtgttaccgggtgtgcctcaagttgccgtctttgatacagcgttccaccagaagatgccggagaaagcctatttgtacgcaatcccctatgagtactacgagaaatataaaattcgccgctatgggtttcatggaacctcacatcgttatgtgagtaaacgtgctgcggaaattatgggcaaaccgtacgatcagctcaagatcattaccgttcacgtgggtaacggcgcatcagttgcggcggtgaagaatggcgtatctgttgacacttccatgggtttcacaccacttgaaggtcttgtcatgggcacgcgcagcggcgatattgatccggccatcgtggaatttcttgagaaagaagaaggattgtcggccaaagaagtcgtcaacatcctcaacaagaaatctggtgtgtatgggctcaccaaaggctttagtagtgacatgcgtgacattgaagataatgctattgaaggtgatcctgtatgccgccttgcattagatgtgtacgaatatcgtatcgcgaaatatattggcgcatacgctgcggccatgaacggtgttgacgcgatcgtctttaccgcaggagttggcgaaaatagcccgattatgcgcgaagaaattattgagaactacttgggctacttagggatcaagatcgataaagaagccaatgacttcaaaggtgaggagaagatcatttcaacgcccgattccaaagtgattgcgatggtagttccgaccaacgaggagctcatgatcgccaaagacacgaaagaaatcattgagaaagggttggacgagcttaagatctaatga

SEQ ID NO: 3050 - protein, 417 aa, synthetic construct
  REGION 1..417: note = Variant of acetate kinase
MHHHHHHGGSGMKVLVINSGSSSIKYQLLDMTNEKVLAKGLVERIGIDGSRIVHKVNGEKHVLEHEIKNHEIGLKSVLDLLTDEKYGVLKDLKEIDAVGHRVVHGGERFASSVKITDEVLKTIETLSFLAPLHNPANIMGIKSSMKVLPGVPQVAVFDTAFHQKMPEKAYLYAIPYEYYEKYKIRRYGFHGTSHRYVSKRAAEIMGKPYDQLKIITVHVGNGASVAAVKNGVSVDTSMGFTPLEGLVMGTRSGDIDPAIVEFLEKEEGLSAKEVVNILNKKSGVYGLTKGFSSDMRDIEDNAIEGDPVCRLALDVYEYRIAKYIGAYAAAMNGVDAIVFTAGVGENSPIMREEIIENYLGYLGIKIDKEANDFKGEEKIISTPDSKVIAMVVPTNEELMIAKDTKEIIEKGLDELKI

SEQ ID NO: 3051 - DNA, 1257 bp, synthetic construct
  misc_feature 1..1257: note = Variant of acetate kinase
  source 1..1257: mol_type = other DNA
atgcaccatcatcatcatcatggcggtagcggcatgaaagttctggtgattaattctggtagctcctccatcaaatatcagctcctcgatatgaccaacgaaaaggtattagcgaaaggcttggtcgagcgcattggcatcgacggttcgcgtatcgtgcataaagttaacggcgaaaaacacgtgctggaacatgagattaagaatcacgaaattggacttaaattggtcctgaagcttcttacggacgaaaaatacggtgtgttgaaggatctcaaagaaatcgatgcagttgggcatcgcgtagtacatggcggcgagcgttttgccagtagcgtgaagattactgacgaagtcttaaagaccatcgagacgttgtcgttcttagctccgttacacaatccagcgaacattatgggtatcaagagcagcatgaaagtgttaccgggtgtgcctcaagttgccgtctttgatacagcgttccaccagaagatgccggagaaagcctatttgtacgcaatcccctatgagtactacgagaaatataaaattcgccgctatgggtttcatggaacctcacatcgttatgtgagtaaacgtgctgcggaaattatgggcaaaccgtacgatcagctcaagatcattaccgttcacgtgggtaacggcgcatcagttgcggcggtgaagaatggcgtatctgttgacacttccatgggtttcacaccacttgaaggtcttgtcatgggcacgcgcagcggcgatattgatccggccatcgtggaatttcttgagaaagaagaaggattgtcggccaaagaagtcgtcaacatcctcaacaagaaatctggtgtgtatgggctcaccaaaggctttagtagtgacatgcgtgacattgaagataatgctattgaaggtgatcctgtatgccgccttgcattagatgtgtacgaatatcgtatcgcgaaatatattggcgcatacgctgcggccatgaacggtgttgacgcgatcgtctttaccgcaggagttggcgaaaatagcccgattatgcgcgaagaaattattgagaactacttgggctacttagggatcaagatcgataaagaagccaatgacttcaaaggtgaggagaagatcatttcaacgcccgattccaaagtgattgcgatggtagttccgaccaacgaggagctcatgatcgccaaagacacgaaagaaatcattgagaaagggttggacgagcttaagatctaatga

SEQ ID NO: 3052 - protein, 417 aa, synthetic construct
  REGION 1..417: note = Variant of acetate kinase
MHHHHHHGGSGMKVLVINSGSSSIKYQLLDMTNEKVLAKGLVERIGIDGSRIVHKVNGEKHVLEHEIKNHEIGLKLVLKLLTDEKYGVLKDLKEIDAVGHRVVHGGERFASSVKITDEVLKTIETLSFLAPLHNPANIMGIKSSMKVLPGVPQVAVFDTAFHQKMPEKAYLYAIPYEYYEKYKIRRYGFHGTSHRYVSKRAAEIMGKPYDQLKIITVHVGNGASVAAVKNGVSVDTSMGFTPLEGLVMGTRSGDIDPAIVEFLEKEEGLSAKEVVNILNKKSGVYGLTKGFSSDMRDIEDNAIEGDPVCRLALDVYEYRIAKYIGAYAAAMNGVDAIVFTAGVGENSPIMREEIIENYLGYLGIKIDKEANDFKGEEKIISTPDSKVIAMVVPTNEELMIAKDTKEIIEKGLDELKI

SEQ ID NO: 3053 - DNA, 1257 bp, synthetic construct
  misc_feature 1..1257: note = Variant of acetate kinase
  source 1..1257: mol_type = other DNA
atgcaccatcatcatcatcatggcggtagcggcatgaaagttctggtgattaattctggtagctcctccatcaaatatcagctcctcgatatgaccaacgaaaaggtattagcgaaaggcttggtcgagcgcattggcatcgacggttcgcgtatcgtgcataaagttaacggcgaaaaacacgtgctggaacatgagattaagaatcacgaaattggacttaaattggtcctggatcttcttacggacgaaaaatacggtgtgttgaaggatctcaaagaaatcgatgcagttgggcatcgcgtagtacatggcggcgagcgttttgccagtagcgtgaagattactgacgaagtcttaaagaccatcgagacgttgtcgttcttagctccgttacacaatccagcgaacattatgggtatcaagagcagcatgaaagtgttaccgggtgtgcctcaagttgccgtctttgatacagcgttccaccagaagatgccggagaaagcctatttgtacgcaatcccctatgagtactacgagaaatataaaattcgccgctatgggtttcatggatgttcacatcgttatgtgagtaaacgtgctgcggaaattatgggcaaaccgtacgatcagctcaagatcattaccgttcacgtgggtaacggcgcatcagttgcggcggtgaagaatggcgtatctgttgacacttccatgggtttcacaccacttgaaggtcttgtcatgggcacgcgcagcggcgatattgatccggccatcgtggaatttcttgagaaagaagaaggattgtcggccaaagaagtcgtcaacatcctcaacaagaaatctggtgtgtatgggctcaccaaaggctttagtagtgacatgcgtgacattgaagataatgctattgaaggtgatcctgtatgccgccttgcattagatgtgtacgaatatcgtatcgcgaaatatattggcgcatacgctgcggccatgaacggtgttgacgcgatcgtctttaccgcaggagttggcgaaaatagcccgattatgcgcgaagaaattattgagaactacttgggctacttagggatcaagatcgataaagaagccaatgacttcaaaggtgaggagaagatcatttcaacgcccgattccaaagtgattgcgatggtagttccgaccaacgaggagctcatgatcgccaaagacacgaaagaaatcattgagaaagggttggacgagcttaagatctaatga

SEQ ID NO: 3054 - protein, 417 aa, synthetic construct
  REGION 1..417: note = Variant of acetate kinase
MHHHHHHGGSGMKVLVINSGSSSIKYQLLDMTNEKVLAKGLVERIGIDGSRIVHKVNGEKHVLEHEIKNHEIGLKLVLDLLTDEKYGVLKDLKEIDAVGHRVVHGGERFASSVKITDEVLKTIETLSFLAPLHNPANIMGIKSSMKVLPGVPQVAVFDTAFHQKMPEKAYLYAIPYEYYEKYKIRRYGFHGCSHRYVSKRAAEIMGKPYDQLKIITVHVGNGASVAAVKNGVSVDTSMGFTPLEGLVMGTRSGDIDPAIVEFLEKEEGLSAKEVVNILNKKSGVYGLTKGFSSDMRDIEDNAIEGDPVCRLALDVYEYRIAKYIGAYAAAMNGVDAIVFTAGVGENSPIMREEIIENYLGYLGIKIDKEANDFKGEEKIISTPDSKVIAMVVPTNEELMIAKDTKEIIEKGLDELKI

SEQ ID NO: 3055 - DNA, 1257 bp, synthetic construct
  misc_feature 1..1257: note = Variant of acetate kinase
  source 1..1257: mol_type = other DNA
atgcaccatcatcatcatcatggcggtagcggcatgaaagttctggtgattaattctggtagctcctccatcaaatatcagctcctcgatatgaccaacgaaaaggtattagcgaaaggcttggtcgagcgcattggcatcgacggttcgcgtatcgtgcataaagttaacggcgaaaaatcggtgctggaacatgagattaagaatcacgaaattggacttaaattggtcctggatcttcttacggacgaaaaatacggtgtgttgaaggatctcaaagaaatcgatgcagttgggcatcgcgtagtacatggcggcgagcgttttgccagtagcgtgaagattactgacgaagtcttaaagaccatcgagacgttgtcgttcttagctccgttacacaatccagcgaacattatgggtatcaagagcagcatgaaagtgttaccgggtgtgcctcaagttgccgtctttgatacagcgttccaccagaagatgccggagaaagcctatttgtacgcaatcccctatgagtactacgagaaatataaaattcgccgctatgggtttcatggaacctcacatcgttatgtgagtaaacgtgctgcggaaattatgggcaaaccgtacgatcagctcaagatcattaccgttcacgtgggtaacggcgcatcagttgcggcggtgaagaatggcgtatctgttgacacttccatgggtttcacaccacttgaaggtcttgtcatgggcacgcgcagcggcgatattgatccggccatcgtggaatttcttgagaaagaagaaggattgtcggccaaagaagtcgtcaacatcctcaacaagaaatctggtgtgtatgggctcaccaaaggctttagtagtgacatgcgtgacattgaagataatgctattgaaggtgatcctgtatgccgccttgcattagatgtgtacgaatatcgtatcgcgaaatatattggcgcatacgctgcggccatgaacggtgttgacgcgatcgtctttaccgcaggagttggcgaaaatagcccgattatgcgcgaagaaattattgagaactacttgggctacttagggatcaagatcgataaagaagccaatgacttcaaaggtgaggagaagatcatttcaacgcccgattccaaagtgattgcgatggtagttccgaccaacgaggagctcatgatcgccaaagacacgaaagaaatcattgagaaagggttggacgagcttaagatctaatga

SEQ ID NO: 3056 - protein, 417 aa, synthetic construct
  REGION 1..417: note = Variant of acetate kinase
MHHHHHHGGSGMKVLVINSGSSSIKYQLLDMTNEKVLAKGLVERIGIDGSRIVHKVNGEKSVLEHEIKNHEIGLKLVLDLLTDEKYGVLKDLKEIDAVGHRVVHGGERFASSVKITDEVLKTIETLSFLAPLHNPANIMGIKSSMKVLPGVPQVAVFDTAFHQKMPEKAYLYAIPYEYYEKYKIRRYGFHGTSHRYVSKRAAEIMGKPYDQLKIITVHVGNGASVAAVKNGVSVDTSMGFTPLEGLVMGTRSGDIDPAIVEFLEKEEGLSAKEVVNILNKKSGVYGLTKGFSSDMRDIEDNAIEGDPVCRLALDVYEYRIAKYIGAYAAAMNGVDAIVFTAGVGENSPIMREEIIENYLGYLGIKIDKEANDFKGEEKIISTPDSKVIAMVVPTNEELMIAKDTKEIIEKGLDELKI

SEQ ID NO: 3057 - DNA, 1257 bp, synthetic construct
  misc_feature 1..1257: note = Variant of acetate kinase
  source 1..1257: mol_type = other DNA
atgcaccatcatcatcatcatggcggtagcggcatgaaagttctggtgattaattctggtagctcctccatcaaatatcagctcctcgatatgaccaacgaaaaggtattagcgaaaggcttggtcgagcgcattggcatcgacggttcgcgtatcgtgcataaagttaacggcgaaaaacacgtgctggcgcatgagattaagaatcacgaaattggacttaaattggtcctggatcttcttacggacgaaaaatacggtgtgttgaaggatctcaaagaaatcgatgcagttgggcatcgcgtagtacatggcggcgagcgttttgccagtagcgtgaagattactgacgaagtcttaaagaccatcgagacgttgtcgttcttagctccgttacacaatccagcgaacattatgggtatcaagagcagcatgaaagtgttaccgggtgtgcctcaagttgccgtctttgatacagcgttccaccagaagatgccggagaaagcctatttgtacgcaatcccctatgagtactacgagaaatataaaattcgccgctatgggtttcatggaacctcacatcgttatgtgagtaaacgtgctgcggaaattatgggcaaaccgtacgatcagctcaagatcattaccgttcacgtgggtaacggcgcatcagttgcggcggtgaagaatggcgtatctgttgacacttccatgggtttcacaccacttgaaggtcttgtcatgggcacgcgcagcggcgatattgatccggccatcgtggaatttcttgagaaagaagaaggattgtcggccaaagaagtcgtcaacatcctcaacaagaaatctggtgtgtatgggctcaccaaaggctttagtagtgacatgcgtgacattgaagataatgctattgaaggtgatcctgtatgccgccttgcattagatgtgtacgaatatcgtatcgcgaaatatattggcgcatacgctgcggccatgaacggtgttgacgcgatcgtctttaccgcaggagttggcgaaaatagcccgattatgcgcgaagaaattattgagaactacttgggctacttagggatcaagatcgataaagaagccaatgacttcaaaggtgaggagaagatcatttcaacgcccgattccaaagtgattgcgatggtagttccgaccaacgaggagctcatgatcgccaaagacacgaaagaaatcattgagaaagggttggacgagcttaagatctaatga

SEQ ID NO: 3058 - protein, 417 aa, synthetic construct
  REGION 1..417: note = Variant of acetate kinase
MHHHHHHGGSGMKVLVINSGSSSIKYQLLDMTNEKVLAKGLVERIGIDGSRIVHKVNGEKHVLAHEIKNHEIGLKLVLDLLTDEKYGVLKDLKEIDAVGHRVVHGGERFASSVKITDEVLKTIETLSFLAPLHNPANIMGIKSSMKVLPGVPQVAVFDTAFHQKMPEKAYLYAIPYEYYEKYKIRRYGFHGTSHRYVSKRAAEIMGKPYDQLKIITVHVGNGASVAAVKNGVSVDTSMGFTPLEGLVMGTRSGDIDPAIVEFLEKEEGLSAKEVVNILNKKSGVYGLTKGFSSDMRDIEDNAIEGDPVCRLALDVYEYRIAKYIGAYAAAMNGVDAIVFTAGVGENSPIMREEIIENYLGYLGIKIDKEANDFKGEEKIISTPDSKVIAMVVPTNEELMIAKDTKEIIEKGLDELKI

SEQ ID NO: 3059 - DNA, 639 bp, synthetic construct
  misc_feature 1..639: note = Variant of 3'O-kinase
  source 1..639: mol_type = other DNA
atggcgtttaccattggtttaacaggagggatcgcaagcggcaaatcgactgtgagtgccatgatgcgtgaactgggtctgccggtcatcgatgctgacgaggcagcacgcgccgttgttcgtccaggcgaagaagcttatcgccagattgtagctgcgttcggtccgggcattcttcgtgccgatggcgagatcgatcgcgccaaattgggtgccatcgtgtttaacgacgaacaacaacgtaaggtgctgaatgcgattgtacatcctgcagtccgcaagaagatgctcgctgagaaagaagctcatatccgctcaggcgccaagacggttgtgctggatatcccgctgctgttcgaatccggattgacccattgggtcgacaaagtgctcgtggtgtacgtcgatgatgatgttcagttacgccgccttatggcacgtaacgggtttaccgaagaagaagctctggcccgcattcgttcacagtggccctcggccgagaaagttaaacgtgcagacgctgtaatcgacaataatggcacgattgaagaaacccgccgccagctgctggccattttacaccagtgggatgcactgggtaagggtggctccggccaccatcatcaccatcactaatga

SEQ ID NO: 3060 - protein, 211 aa, synthetic construct
  REGION 1..211: note = Variant of 3'O-kinase
MAFTIGLTGGIASGKSTVSAMMRELGLPVIDADEAARAVVRPGEEAYRQIVAAFGPGILRADGEIDRAKLGAIVFNDEQQRKVLNAIVHPAVRKKMLAEKEAHIRSGAKTVVLDIPLLFESGLTHWVDKVLVVYVDDDVQLRRLMARNGFTEEEALARIRSQWPSAEKVKRADAVIDNNGTIEETRRQLLAILHQWDALGKGGSGHHHHHH

SEQ ID NO: 3061 - DNA, 639 bp, synthetic construct
  misc_feature 1..639: note = Variant of 3'O-kinase
  source 1..639: mol_type = other DNA
atggcgtttaccattggtttaacaggagggatcgcagtgggcaaatcgactgtgagtgccatgatgcgtgaactgggtctgccggtcatcgatgctgacgaggcagcacgcgccgttgttcgtccaggcgaagaagcttatcgccagattgtagctgcgttcggtccgggcattcttcgtgccgatggcgagatcgatcgcgccaaattgggtgccatcgtgtttaacgacgaacaacaacgtaaggtgctgaatgcgattgtacatcctgcagtccgcaagaagatgctcgctgagaaagaagctcatatccgctcaggcgccaagacggttgtgctggatatcccgctgctgttcgaatccggattgacccattgggtcgacaaagtgctcgtggtgtacgtcgatgatgatgttcagttacgccgccttatggcacgtaacgggtttaccgaagaagaagctctggcccgcattcgttcacagtggcccatggccgagaaagttaaacgtgcagacgctgtaatcgacaataatggcacgattgaagaaacccgccgccagctgctggccattttacaccagtgggatgcactgggtaagggtggctccggccaccatcatcaccatcactaatga

SEQ ID NO: 3062 - protein, 211 aa, synthetic construct
  REGION 1..211: note = Variant of 3'O-kinase
MAFTIGLTGGIAVGKSTVSAMMRELGLPVIDADEAARAVVRPGEEAYRQIVAAFGPGILRADGEIDRAKLGAIVFNDEQQRKVLNAIVHPAVRKKMLAEKEAHIRSGAKTVVLDIPLLFESGLTHWVDKVLVVYVDDDVQLRRLMARNGFTEEEALARIRSQWPMAEKVKRADAVIDNNGTIEETRRQLLAILHQWDALGKGGSGHHHHHH

SEQ ID NO: 3063 - DNA, 639 bp, synthetic construct
  misc_feature 1..639: note = Variant of 3'O-kinase
  source 1..639: mol_type = other DNA
atggcgtttaccattggtttaacaggagggatcgcaagcggcaaatcgactgtgagtgccatgatgcgtgaactgggtctgccggtcatcgatgctgacgaggcagcacgcgccgttgttcgtccaggcgaagaagcttatcgccagattgtagctgcgttcggtccgggcattcttcgtgccgatggcgagatcgatcgcgccaaattgggtgccatcgtgtttaacgacgaacaacaacgtaaggtgctgaatgcgattgtacatcctgcagtctataagaagatgctcgctgagaaagaagctcatatccgctcaggcgccaagacggttgtgctggatatcccgctgctgttcgaatccggattgacccattgggtcgacaaagtgctcgtggtgtacgtcgatgatgatgttcagttacgccgccttatggcacgtaacgggtttaccgaagaagaagctctggcccgcattcgttcacagtggcccatggccgagaaagttaaacgtgcagacgctgtaatcgacaataatggcacgattgaagaaacccgccgccagctgctggccattttacaccagtgggatgcactgggtaagggtggctccggccaccatcatcaccatcactaatga

SEQ ID NO: 3064 - protein, 211 aa, synthetic construct
  REGION 1..211: note = Variant of 3'O-kinase
MAFTIGLTGGIASGKSTVSAMMRELGLPVIDADEAARAVVRPGEEAYRQIVAAFGPGILRADGEIDRAKLGAIVFNDEQQRKVLNAIVHPAVYKKMLAEKEAHIRSGAKTVVLDIPLLFESGLTHWVDKVLVVYVDDDVQLRRLMARNGFTEEEALARIRSQWPMAEKVKRADAVIDNNGTIEETRRQLLAILHQWDALGKGGSGHHHHHH

SEQ ID NO: 3065 - DNA, 639 bp, synthetic construct
  misc_feature 1..639: note = Variant of 3'O-kinase
  source 1..639: mol_type = other DNA
atggcgtttaccattggtttaacaggagggatcgcaagcggcaaatcgactgtgagtgccatgatgcgtgaactgggtctgccggtcatcgatgctgacgaggcagcacgcgccgttgttcgtccaggcgaagaagcttatcgccagattgtagctgcgttcggtccgggcattcttcgtgccgatggcgagatcgatcgcgccaaattgggtgccatcaagtttaacgacgaacaacaacgtaaggtgctgaatgcgattgtacatcctgcagtccgcaagaagatgctcgctgagaaagaagctcatatccgctcaggcgccaagacggttgtgctggatatcccgctgctgttcgaatccggattgacccattgggtcgacaaagtgctcgtggtgtacgtcgatgatgatgttcagttacgccgccttatggcacgtaacgggtttaccgaagaagaagctctggcccgcattcgttcacagtggcccatggccgagaaagttaaacgtgcagacgctgtaatcgacaataatggcacgattgaagaaacccgccgccagctgctggccattttacaccagtgggatgcactgggtaagggtggctccggccaccatcatcaccatcactaatga

SEQ ID NO: 3066 - protein, 211 aa, synthetic construct
  REGION 1..211: note = Variant of 3'O-kinase
MAFTIGLTGGIASGKSTVSAMMRELGLPVIDADEAARAVVRPGEEAYRQIVAAFGPGILRADGEIDRAKLGAIKFNDEQQRKVLNAIVHPAVRKKMLAEKEAHIRSGAKTVVLDIPLLFESGLTHWVDKVLVVYVDDDVQLRRLMARNGFTEEEALARIRSQWPMAEKVKRADAVIDNNGTIEETRRQLLAILHQWDALGKGGSGHHHHHH

SEQ ID NO: 3067 - DNA, 639 bp, synthetic construct
  misc_feature 1..639: note = Variant of 3'O-kinase
  source 1..639: mol_type = other DNA
atggcgtttaccattggtttaacaggagggatcgcaagcggcaaatcgactgtgagtgccatgatgcgtgaactgggtctgccggtcatcgatgctgacgaggcagcacgcgaggttgttcgtccaggcgaagaagcttatcgccagattgtagctgcgttcggtccgggcattcttcgtgccgatggcgagatcgatcgcgccaaattgggtgccatcgtgtttaacgacgaacaacaacgtaaggtgctgaatgcgattgtacatcctgcagtccgcaagaagatgctcgctgagaaagaagctcatatccgctcaggcgccaagacggttgtgctggatatcccgctgctgttcgaatccggattgacccattgggtcgacaaagtgctcgtggtgtacgtcgatgatgatgttcagttacgccgccttatggcacgtaacgggtttaccgaagaagaagctctggcccgcattcgttcacagtggcccatggccgagaaagttaaacgtgcagacgctgtaatcgacaataatggcacgattgaagaaacccgccgccagctgctggccattttacaccagtgggatgcactgggtaagggtggctccggccaccatcatcaccatcactaatga

SEQ ID NO: 3068 - protein, 211 aa, synthetic construct
  REGION 1..211: note = Variant of 3'O-kinase
MAFTIGLTGGIASGKSTVSAMMRELGLPVIDADEAAREVVRPGEEAYRQIVAAFGPGILRADGEIDRAKLGAIVFNDEQQRKVLNAIVHPAVRKKMLAEKEAHIRSGAKTVVLDIPLLFESGLTHWVDKVLVVYVDDDVQLRRLMARNGFTEEEALARIRSQWPMAEKVKRADAVIDNNGTIEETRRQLLAILHQWDALGKGGSGHHHHHH

SEQ ID NO: 3069 - DNA, 639 bp, synthetic construct
  misc_feature 1..639: note = Variant of 3'O-kinase
  source 1..639: mol_type = other DNA
atggcgtttaccattggtttaacaggagggatcgcaagcggcaaatcgactgtgagtgccatgatgcgtgaactgggtctgccggtcatcgatgctgacgaggcagcacgcgccctggttcgtccaggcgaagaagcttatcgccagattgtagctgcgttcggtccgggcattcttcgtgccgatggcgagatcgatcgcgccaaattgggtgccatcgtgtttaacgacgaacaacaacgtaaggtgctgaatgcgattgtacatcctgcagtccgcaagaagatgctcgctgagaaagaagctcatatccgctcaggcgccaagacggttgtgctggatatcccgctgctgttcgaatccggattgacccattgggtcgacaaagtgctcgtggtgtacgtcgatgatgatgttcagttacgccgccttatggcacgtaacgggtttaccgaagaagaagctctggcccgcattcgttcacagtggcccatggccgagaaagttaaacgtgcagacgctgtaatcgacaataatggcacgattgaagaaacccgccgccagctgctggccattttacaccagtgggatgcactgggtaagggtggctccggccaccatcatcaccatcactaatga

SEQ ID NO: 3070 - protein, 211 aa, synthetic construct
  REGION 1..211: note = Variant of 3'O-kinase
MAFTIGLTGGIASGKSTVSAMMRELGLPVIDADEAARALVRPGEEAYRQIVAAFGPGILRADGEIDRAKLGAIVFNDEQQRKVLNAIVHPAVRKKMLAEKEAHIRSGAKTVVLDIPLLFESGLTHWVDKVLVVYVDDDVQLRRLMARNGFTEEEALARIRSQWPMAEKVKRADAVIDNNGTIEETRRQLLAILHQWDALGKGGSGHHHHHH

SEQ ID NO: 3071 - DNA, 639 bp, synthetic construct
  misc_feature 1..639: note = Variant of 3'O-kinase
  source 1..639: mol_type = other DNA
atggcgtttaccattggtttaacaggagggatcgcagcgggcaaatcgactgtgagtgccatgatgcgtgaactgggtctgccggtcatcgatgctgacgaggcagcacgcgccgttgttcgtccaggcgaagaagcttatcgccagattgtagctgcgttcggtccgggcattcttcgtgccgatggcgagatcgatcgcgccaaattgggtgccatcgtgtttaacgacgaacaacaacgtaaggtgctgaatgcgattgtacatcctgcagtccgcaagaagatgctcgctgagaaagaagctcatatccgctcaggcgccaagacggttgtgctggatatcccgctgctgttcgaatccggattgacccattgggtcgacaaagtgctcgtggtgtacgtcgatgatgatgttcagttacgccgccttatggcacgtaacgggtttaccgaagaagaagctctggcccgcattcgttcacagtggcccatggccgagaaagttaaacgtgcagacgctgtaatcgacaataatggcacgattgaagaaacccgccgccagctgctggccattttacaccagtgggatgcactgggtaagggtggctccggccaccatcatcaccatcactaatga

SEQ ID NO: 3072 - protein, 211 aa, synthetic construct
  REGION 1..211: note = Variant of 3'O-kinase
MAFTIGLTGGIAAGKSTVSAMMRELGLPVIDADEAARAVVRPGEEAYRQIVAAFGPGILRADGEIDRAKLGAIVFNDEQQRKVLNAIVHPAVRKKMLAEKEAHIRSGAKTVVLDIPLLFESGLTHWVDKVLVVYVDDDVQLRRLMARNGFTEEEALARIRSQWPMAEKVKRADAVIDNNGTIEETRRQLLAILHQWDALGKGGSGHHHHHH

SEQ ID NO: 3073 - DNA, 639 bp, synthetic construct
  misc_feature 1..639: note = Variant of 3'O-kinase
  source 1..639: mol_type = other DNA
atggcgtttaccattggtttaacaggagggatcgcaagcggcaaatcgactgtgagtgccatgatgcgtgaactgggtctgccggtcatcgatgctgacgaggcagcacgcgccgttgttcgtccaggcgaagaagcttatcgccagattgtagctgcgttcggtccgggcattcttcgtgccgatggcgagatcgatcgcgccaaattgggtgccatcgtgtttaacgacgaacaacaacgtaaggtgctgaatgcgattgtattgcctgcagtccgcaagaagatgctcgctgagaaagaagctcatatccgctcaggcgccaagacggttgtgctggatatcccgctgctgttcgaatccggattgacccattgggtcgacaaagtgctcgtggtgtacgtcgatgatgatgttcagttacgccgccttatggcacgtaacgggtttaccgaagaagaagctctggcccgcattcgttcacagtggcccatggccgagaaagttaaacgtgcagacgctgtaatcgacaataatggcacgattgaagaaacccgccgccagctgctggccattttacaccagtgggatgcactgggtaagggtggctccggccaccatcatcaccatcactaatga

SEQ ID NO: 3074 - protein, 211 aa, synthetic construct
  REGION 1..211: note = Variant of 3'O-kinase
MAFTIGLTGGIASGKSTVSAMMRELGLPVIDADEAARAVVRPGEEAYRQIVAAFGPGILRADGEIDRAKLGAIVFNDEQQRKVLNAIVLPAVRKKMLAEKEAHIRSGAKTVVLDIPLLFESGLTHWVDKVLVVYVDDDVQLRRLMARNGFTEEEALARIRSQWPMAEKVKRADAVIDNNGTIEETRRQLLAILHQWDALGKGGSGHHHHHH

SEQ ID NO: 3075 - DNA, 639 bp, synthetic construct
  misc_feature 1..639: note = Variant of 3'O-kinase
  source 1..639: mol_type = other DNA
atggcgtttaccattggtttaacaggagggatcgcaagcggcaaatcgactgtgagtgccatgatgcgtgaactgggtctgccggtcatcgatgctgacgaggcagcacgcgccgttgttcgtccaggcgaagaagcttatcgccagattgtagctgcgttcggtccgggcattcttcgtgccgatggcgagatcgatcgcgccaaattgggtgccatcgtgtttaacgacgaacaacaacgtaaggtgctgaatgcgattgtacatcctgcagtccgcaagaagatgctcgctgagaaagaagctcatatccgctcaggcgccaagacggttgtgctggatatcccgctgctgttcgaatccggattgtggcattgggtcgacaaagtgctcgtggtgtacgtcgatgatgatgttcagttacgccgccttatggcacgtaacgggtttaccgaagaagaagctctggcccgcattcgttcacagtggcccatggccgagaaagttaaacgtgcagacgctgtaatcgacaataatggcacgattgaagaaacccgccgccagctgctggccattttacaccagtgggatgcactgggtaagggtggctccggccaccatcatcaccatcactaatga

SEQ ID NO: 3076 - protein, 211 aa, synthetic construct
  REGION 1..211: note = Variant of 3'O-kinase
MAFTIGLTGGIASGKSTVSAMMRELGLPVIDADEAARAVVRPGEEAYRQIVAAFGPGILRADGEIDRAKLGAIVFNDEQQRKVLNAIVHPAVRKKMLAEKEAHIRSGAKTVVLDIPLLFESGLWHWVDKVLVVYVDDDVQLRRLMARNGFTEEEALARIRSQWPMAEKVKRADAVIDNNGTIEETRRQLLAILHQWDALGKGGSGHHHHHH

SEQ ID NO: 3077 - DNA, 639 bp, synthetic construct
  misc_feature 1..639: note = Variant of 3'O-kinase
  source 1..639: mol_type = other DNA
atggcgtttaccattggtttaacaggagggatcgcaagcggcaaatcgactgtgagtgccatgatgcgtgaactgggtctgccggtcatcgatgctgacgaggcagcacgcgccgttgttcgtccaggcgaagaagcttatcgccagattgtagctgcgttcggtccgggcattcttcgtgccgatggcgagatcgatcgcgccaaattgggtcgtatcgtgtttaacgacgaacaacaacgtaaggtgctgaatgcgattgtacatcctgcagtccgcaagaagatgctcgctgagaaagaagctcatatccgctcaggcgccaagacggttgtgctggatatcccgctgctgttcgaatccggattgacccattgggtcgacaaagtgctcgtggtgtacgtcgatgatgatgttcagttacgccgccttatggcacgtaacgggtttaccgaagaagaagctctggcccgcattcgttcacagtggcccatggccgagaaagttaaacgtgcagacgctgtaatcgacaataatggcacgattgaagaaacccgccgccagctgctggccattttacaccagtgggatgcactgggtaagggtggctccggccaccatcatcaccatcactaatga

SEQ ID NO: 3078 - protein, 211 aa, synthetic construct
  REGION 1..211: note = Variant of 3'O-kinase
MAFTIGLTGGIASGKSTVSAMMRELGLPVIDADEAARAVVRPGEEAYRQIVAAFGPGILRADGEIDRAKLGRIVFNDEQQRKVLNAIVHPAVRKKMLAEKEAHIRSGAKTVVLDIPLLFESGLTHWVDKVLVVYVDDDVQLRRLMARNGFTEEEALARIRSQWPMAEKVKRADAVIDNNGTIEETRRQLLAILHQWDALGKGGSGHHHHHH

SEQ ID NO: 3079 - DNA, 639 bp, synthetic construct
  misc_feature 1..639: note = Variant of 3'O-kinase
  source 1..639: mol_type = other DNA
atggcgtttaccattggtttaacaggagggatcgcaagcggcaaatcgactgtgagtgccatgatgcgtgaactgggtctgccggtcatcgatgctgacgaggcagcacgcgccgttgttcgtccaggcgaagaagcttatcgccagattgtagctgcgttcggtccgggcattcttcgtgccgatggcgagatcgatcgcgccaaattgggtgccatcgtgtttaacgacgaacaacaacgtaaggtgctgaatgcgattgtacatcctgcagtccgcaagaagatgctcgctgagaaagaagctcatatccgctcaggcgccaagacggttgtgctggatatcccgctgctgttcgaatccggattggtgcattgggtcgacaaagtgctcgtggtgtacgtcgatgatgatgttcagttacgccgccttatggcacgtaacgggtttaccgaagaagaagctctggcccgcattcgttcacagtggcccatggccgagaaagttaaacgtgcagacgctgtaatcgacaataatggcacgattgaagaaacccgccgccagctgctggccattttacaccagtgggatgcactgggtaagggtggctccggccaccatcatcaccatcactaatga

SEQ ID NO: 3080 - protein, 211 aa, synthetic construct
  REGION 1..211: note = Variant of 3'O-kinase
MAFTIGLTGGIASGKSTVSAMMRELGLPVIDADEAARAVVRPGEEAYRQIVAAFGPGILRADGEIDRAKLGAIVFNDEQQRKVLNAIVHPAVRKKMLAEKEAHIRSGAKTVVLDIPLLFESGLVHWVDKVLVVYVDDDVQLRRLMARNGFTEEEALARIRSQWPMAEKVKRADAVIDNNGTIEETRRQLLAILHQWDALGKGGSGHHHHHH

SEQ ID NO: 3081 - DNA, 639 bp, synthetic construct
  misc_feature 1..639: note = Variant of 3'O-kinase
  source 1..639: mol_type = other DNA
atggcgtttaccattggtttaacaggagggatcgcaagcggcaaatcgactgtgagtgccatgatgcgtgaactgggtctgccggtcatcgatgctgacgaggcagcacgcgccgttgttcgtccaggcgaagaagcttatcgccagattgtagctgcgttcggtccgggcattcttcgtgccgatggcgagatcgatcgcgccaaattgggtgccatcgtgtttaacgacgaacaacaacgtaaggtgctgaatgcgattgtacatcctgcagtccgcaagaagatgctcgctgagaaagaagctcatatccgctcaggcgccaagacggttgtgctggatatcccgctgctgttcgaatccggattgacccattgggtcgacaaagtgctcgtggtgtacgtcgatgatgatgttcagttacgccgccttatggcacgtaacgggtttaccgaagaagaagctctggcccgcattcgttcacagtggcccatggccgagaaagttaaacgtgcagacgctgtaatcgaccataatggcacgattgaagaaacccgccgccagctgctggccattttacaccagtgggatgcactgggtaagggtggctccggccaccatcatcaccatcactaatga

SEQ ID NO: 3082 - protein, 211 aa, synthetic construct
  REGION 1..211: note = Variant of 3'O-kinase
MAFTIGLTGGIASGKSTVSAMMRELGLPVIDADEAARAVVRPGEEAYRQIVAAFGPGILRADGEIDRAKLGAIVFNDEQQRKVLNAIVHPAVRKKMLAEKEAHIRSGAKTVVLDIPLLFESGLTHWVDKVLVVYVDDDVQLRRLMARNGFTEEEALARIRSQWPMAEKVKRADAVIDHNGTIEETRRQLLAILHQWDALGKGGSGHHHHHH

SEQ ID NO: 3083 - DNA, 633 bp, synthetic construct
  misc_feature 1..633: note = Variant of 3'O-kinase
  source 1..633: mol_type = other DNA
atggcgtttaccattggtttaacaggagggatcgcaagcggcaaatcgactgtgagtgccatgatgcgtgaactgggtctgccggtcatcgatgctgacgaggcagcacgcgccgttgttcgtccaggcgaagaagcttatcgccagattgtagctgcgttcggtccgggcattcttcgtgccgatggcgagatcgatcgcgccaaattgggtgccatcgtgtttaacgacgaacaacaacgtaaggtgctgaatgcgattgtacatcctgcagtccgcaagaagatgctcgctgagaaagaagctcatatccgctcaggcgccaagacggttgtgctggatatcccgctgctgttcgaatccggattgacccattgggtcgacaaagtgctcgtggtgtacgtcgatgatcagttacgccgccttatggcacgtaacgggtttaccgaagaagaagctctggcccgcattcgttcacagtggcccatggccgagaaagttaaacgtgcagacgctgtaatcgacaataatggcacgattgaagaaacccgccgccagctgctggccattttacaccagtgggatgcactgggtaagggtggctccggccaccatcatcaccatcactaatga

SEQ ID NO: 3084 - protein, 209 aa, synthetic construct
  REGION 1..209: note = Variant of 3'O-kinase
MAFTIGLTGGIASGKSTVSAMMRELGLPVIDADEAARAVVRPGEEAYRQIVAAFGPGILRADGEIDRAKLGAIVFNDEQQRKVLNAIVHPAVRKKMLAEKEAHIRSGAKTVVLDIPLLFESGLTHWVDKVLVVYVDDQLRRLMARNGFTEEEALARIRSQWPMAEKVKRADAVIDNNGTIEETRRQLLAILHQWDALGKGGSGHHHHHH

SEQ ID NO: 3085 - DNA, 639 bp, synthetic construct
  misc_feature 1..639: note = Variant of 3'O-kinase
  source 1..639: mol_type = other DNA
atggcgtttaccattggtttaacaggagggatcgcaagcggcaaatcgcgggtgagtgccatgatgcgtgaactgggtctgccggtcatcgatgctgacgaggcagcacgcgccgttgttcgtccaggcgaagaagcttatcgccagattgtagctgcgttcggtccgggcattcttcgtgccgatggcgagatcgatcgcgccaaattgggtgccatcgtgtttaacgacgaacaacaacgtaaggtgctgaatgcgattgtacatcctgcagtccgcaagaagatgctcgctgagaaagaagctcatatccgctcaggcgccaagacggttgtgctggatatcccgctgctgttcgaatccggattgacccattgggtcgacaaagtgctcgtggtgtacgtcgatgatgatgttcagttacgccgccttatggcacgtaacgggtttaccgaagaagaagctctggcccgcattcgttcacagtggcccatggccgagaaagttaaacgtgcagacgctgtaatcgacaataatggcacgattgaagaaacccgccgccagctgctggccattttacaccagtgggatgcactgggtaagggtggctccggccaccatcatcaccatcactaatga

SEQ ID NO: 3086 - protein, 211 aa, synthetic construct
  REGION 1..211: note = Variant of 3'O-kinase
MAFTIGLTGGIASGKSRVSAMMRELGLPVIDADEAARAVVRPGEEAYRQIVAAFGPGILRADGEIDRAKLGAIVFNDEQQRKVLNAIVHPAVRKKMLAEKEAHIRSGAKTVVLDIPLLFESGLTHWVDKVLVVYVDDDVQLRRLMARNGFTEEEALARIRSQWPMAEKVKRADAVIDNNGTIEETRRQLLAILHQWDALGKGGSGHHHHHH

SEQ ID NO: 3087 - DNA, 639 bp, synthetic construct
  misc_feature 1..639: note = Variant of 3'O-kinase
  source 1..639: mol_type = other DNA
atggcgtttaccattggtttaacaggagggatcgcaagcggcaaatcgactgtgagtgccatgatgcgtgaactgggtctgccggtcatcgatgctgacgaggcagcacgcgccgttgttcgtccaggcgaagaagcttatcgccagattgtagctgcgttcggtccgggcattcttcgtgccgatggcgagatcgatcgcgccaaattgggtgccatcgtgtttaacgacgaacaacaacgtaaggtgctgaatgcgattgtacatcctgcagtccgcaagaagatgctcgctgagaaagaagctcatatccgctcaggcgccaagacggttgtgctggatatcccgctgctgttcgaatccggattgacccattgggtcgacaaagtgctcgtggtgtacgtcgatgatgatgttcagttacgccgccttatggcacgtagggggtttaccgaagaagaagctctggcccgcattcgttcacagtggcccatggccgagaaagttaaacgtgcagacgctgtaatcgacaataatggcacgattgaagaaacccgccgccagctgctggccattttacaccagtgggatgcactgggtaagggtggctccggccaccatcatcaccatcactaatga

SEQ ID NO: 3088 - protein, 211 aa, synthetic construct
  REGION 1..211: note = Variant of 3'O-kinase
MAFTIGLTGGIASGKSTVSAMMRELGLPVIDADEAARAVVRPGEEAYRQIVAAFGPGILRADGEIDRAKLGAIVFNDEQQRKVLNAIVHPAVRKKMLAEKEAHIRSGAKTVVLDIPLLFESGLTHWVDKVLVVYVDDDVQLRRLMARRGFTEEEALARIRSQWPMAEKVKRADAVIDNNGTIEETRRQLLAILHQWDALGKGGSGHHHHHH

SEQ ID NO: 3089 - DNA, 639 bp, synthetic construct
  misc_feature 1..639: note = Variant of 3'O-kinase
  source 1..639: mol_type = other DNA
atggcgtttaccattggtttaacaggagggatcgcaagcggcaaatcgactgtgagtgccatgatgcgtgaactgggtctgccggtcatcgatgctgacgaggcagcacgcgccgttgttcgtccaggcgaagaagcttatcgccagattgtagctgcgttcggtccgggcattcttcgtgccgatggcgagatcgatcgcgccaaattgggtgccatcgtgtttaacgacgaacaacaacgtaaggtgctgaatgcgattgtacatcctgcagtccgcaagaagatgctcgctgagaaagaagctcatatccgctcaggcgccaagacggttgtgctggatatcccgctgctgttcgaatccggagctacccattgggtcgacaaagtgctcgtggtgtacgtcgatgatgatgttcagttacgccgccttatggcacgtaacgggtttaccgaagaagaagctctggcccgcattcgttcacagtggcccatggccgagaaagttaaacgtgcagacgctgtaatcgacaataatggcacgattgaagaaacccgccgccagctgctggccattttacaccagtgggatgcactgggtaagggtggctccggccaccatcatcaccatcactaatga

SEQ ID NO: 3090 - protein, 211 aa, synthetic construct
  REGION 1..211: note = Variant of 3'O-kinase
MAFTIGLTGGIASGKSTVSAMMRELGLPVIDADEAARAVVRPGEEAYRQIVAAFGPGILRADGEIDRAKLGAIVFNDEQQRKVLNAIVHPAVRKKMLAEKEAHIRSGAKTVVLDIPLLFESGATHWVDKVLVVYVDDDVQLRRLMARNGFTEEEALARIRSQWPMAEKVKRADAVIDNNGTIEETRRQLLAILHQWDALGKGGSGHHHHHH

SEQ ID NO: 3091 - DNA, 639 bp, synthetic construct
  misc_feature 1..639: note = Variant of 3'O-kinase
  source 1..639: mol_type = other DNA
atggcgtttaccattggtttaacaggagggatcgcaagcggcaaatcgactgtgagtgccatgatgcgtgaactgggtctgccggtcatcgatgctgacgaggcagcacgcgccgttgttcgtccaggcgaagaagcttatcgccagattgtagctgcgttcggtccgggcattcttcgtgccgatggcgagatcgatcgcgccaaattgggtgccatcgtgtttaacgacgaacaacaacgtaaggtgctgaatgcgattgtacatcctgcagtccgcaagaagatgctcgctgagaaagaagctcatatccgctcaggcgccaagacggttgtgctggatatcccgctgctgttcgaatccggattgacccattgggtcgacaaagtgctcgtggtgtacgtcgatgatgatgttcagttacgccgccttatggcacgtaacgggtttaccgaagaagaagctctggcccgcattcgttcacagtggcccatggccgagaaagttaaacgtgcagacgctgtaatctcgaataatggcacgattgaagaaacccgccgccagctgctggccattttacaccagtgggatgcactgggtaagggtggctccggccaccatcatcaccatcactaatga

SEQ ID NO: 3092 - protein, 211 aa, synthetic construct
  REGION 1..211: note = Variant of 3'O-kinase
MAFTIGLTGGIASGKSTVSAMMRELGLPVIDADEAARAVVRPGEEAYRQIVAAFGPGILRADGEIDRAKLGAIVFNDEQQRKVLNAIVHPAVRKKMLAEKEAHIRSGAKTVVLDIPLLFESGLTHWVDKVLVVYVDDDVQLRRLMARNGFTEEEALARIRSQWPMAEKVKRADAVISNNGTIEETRRQLLAILHQWDALGKGGSGHHHHHH

SEQ ID NO: 3093 - DNA, 639 bp, synthetic construct
  misc_feature 1..639: note = Variant of 3'O-kinase
  source 1..639: mol_type = other DNA
atggcgtttaccattggtttaacaggagggatcgcaagcggcaaatcgactgtgagtgccatgatgcgtgaactgggtctgccggtcatcgatgctgacgaggcagcacgcgccgttgttcgtccaggcgaagaagcttatcgccagattgtagctgcgttcggtccgggcattcttcgtgccgatggcgagatcgatcgcgccaaattgggtgccatcgtgtttaacgacgaacaacaacgtaaggtgctgaatgcgattgtacatcctgcagtccgcaagaagatgctcgctgagaaagaagctcatatccgctcaggcgccaagacggttgtgctggatatcccgctgctgttcgaatccggaattacccattgggtcgacaaagtgctcgtggtgtacgtcgatgatgatgttcagttacgccgccttatggcacgtaacgggtttaccgaagaagaagctctggcccgcattcgttcacagtggcccatggccgagaaagttaaacgtgcagacgctgtaatcgacaataatggcacgattgaagaaacccgccgccagctgctggccattttacaccagtgggatgcactgggtaagggtggctccggccaccatcatcaccatcactaatga

SEQ ID NO: 3094 - protein, 211 aa, synthetic construct
  REGION 1..211: note = Variant of 3'O-kinase
MAFTIGLTGGIASGKSTVSAMMRELGLPVIDADEAARAVVRPGEEAYRQIVAAFGPGILRADGEIDRAKLGAIVFNDEQQRKVLNAIVHPAVRKKMLAEKEAHIRSGAKTVVLDIPLLFESGITHWVDKVLVVYVDDDVQLRRLMARNGFTEEEALARIRSQWPMAEKVKRADAVIDNNGTIEETRRQLLAILHQWDALGKGGSGHHHHHH

SEQ ID NO: 3095 - DNA, 639 bp, synthetic construct
  misc_feature 1..639: note = Variant of 3'O-kinase
  source 1..639: mol_type = other DNA
atggcgtttaccattggtttaacaggagggatcgcaagcggcaaatcgactgtgagtgccatgatgcgtgaactgggtctgccggtcatcgatgctgacgaggcagcacgcgccgttgttatgccaggcgaagaagcttatcgccagattgtagctgcgttcggtccgggcattcttcgtgccgatggcgagatcgatcgcgccaaattgggtgccatcgtgtttaacgacgaacaacaacgtaaggtgctgaatgcgattgtacatcctgcagtccgcaagaagatgctcgctgagaaagaagctcatatccgctcaggcgccaagacggttgtgctggatatcccgctgctgttcgaatccggattgacccattgggtcgacaaagtgctcgtggtgtacgtcgatgatgatgttcagttacgccgccttatggcacgtaacgggtttaccgaagaagaagctctggcccgcattcgttcacagtggcccatggccgagaaagttaaacgtgcagacgctgtaatcgacaataatggcacgattgaagaaacccgccgccagctgctggccattttacaccagtgggatgcactgggtaagggtggctccggccaccatcatcaccatcactaatga

SEQ ID NO: 3096 - protein, 211 aa, synthetic construct
  REGION 1..211: note = Variant of 3'O-kinase
MAFTIGLTGGIASGKSTVSAMMRELGLPVIDADEAARAVVMPGEEAYRQIVAAFGPGILRADGEIDRAKLGAIVFNDEQQRKVLNAIVHPAVRKKMLAEKEAHIRSGAKTVVLDIPLLFESGLTHWVDKVLVVYVDDDVQLRRLMARNGFTEEEALARIRSQWPMAEKVKRADAVIDNNGTIEETRRQLLAILHQWDALGKGGSGHHHHHH

SEQ ID NO: 3097 - DNA, 639 bp, synthetic construct
  misc_feature 1..639: note = Variant of 3'O-kinase
  source 1..639: mol_type = other DNA
atggcgtttaccattggtttaacaggagggatcgcaagcggcaaatcgactgtgagtgccatgatgcgtgaactgggtctgccggtcatcgatgctgacgaggcagcacgcgccgttgttcgtccaggcgaagaagcttatcgccagattgtagctgcgttcggtccgggcattcttcgtgccgatggcgagatcgatcgcgccaaattgggtgccatcgtgtttaacgacgaacaacaacgtaaggtgctgaatgcgattgtacatcctgcagtccgcaagaagatgctcgctgagaaagaagctcatatccgctcaggcgccaagacggttgtgctggatatcccgctgctgttcgaatccggattgacccattgggtcgacaaagtgctcgtggtgtacgtcgatgatgatgttcagttacgccgccttatggcacgtaacgggtttaccgaagaagaagctctggcccgcattcgttcacagtggcccatggccgagaaagttaaacgtgcagacgctgtaatcgacaatatgggcacgattgaagaaacccgccgccagctgctggccattttacaccagtgggatgcactgggtaagggtggctccggccaccatcatcaccatcactaatga

SEQ ID NO: 3098 - protein, 211 aa, synthetic construct
  REGION 1..211: note = Variant of 3'O-kinase
MAFTIGLTGGIASGKSTVSAMMRELGLPVIDADEAARAVVRPGEEAYRQIVAAFGPGILRADGEIDRAKLGAIVFNDEQQRKVLNAIVHPAVRKKMLAEKEAHIRSGAKTVVLDIPLLFESGLTHWVDKVLVVYVDDDVQLRRLMARNGFTEEEALARIRSQWPMAEKVKRADAVIDNMGTIEETRRQLLAILHQWDALGKGGSGHHHHHH

SEQ ID NO: 3099 - DNA, 639 bp, synthetic construct
  misc_feature 1..639: note = Variant of 3'O-kinase
  source 1..639: mol_type = other DNA
atggcgtttaccattggtttaacaggagggatcgcaagcggcaaatcgactgtgagtgccatgatgcgtgaactgggtctgccggtcatcgatgctgacgaggcagcacgcgccgttgttcgtccaggcgaagaagcttatcgccagattgtagctgcgttcggtccgggcattcttcgtgccgatggcgagatcgatcgcgccaaattgggtgccatcgtgtttaacgacgaacaacaacgtaaggtgctgaatgcgattgtacatcctgcagtccgcaagaagatgctcgctgagaaagaagctcatatccgctcaggcgccaagacggttgtgctggatatcccgctgctgttcgaatccggattgacccattgggtcgacaaagtgctcgtggtgtacgtcgatgatgatgttcagttacgccgccttatggcacgtaacgggtttaccgaagaagaagctctggcccgcattcgttcacagtggcccatggccgagaaagttaaacgtgcagacgctgtaatcgaccgtaatggcacgattgaagaaacccgccgccagctgctggccattttacaccagtgggatgcactgggtaagggtggctccggccaccatcatcaccatcactaatga

SEQ ID NO: 3100 - protein, 211 aa, synthetic construct
  REGION 1..211: note = Variant of 3'O-kinase
MAFTIGLTGGIASGKSTVSAMMRELGLPVIDADEAARAVVRPGEEAYRQIVAAFGPGILRADGEIDRAKLGAIVFNDEQQRKVLNAIVHPAVRKKMLAEKEAHIRSGAKTVVLDIPLLFESGLTHWVDKVLVVYVDDDVQLRRLMARNGFTEEEALARIRSQWPMAEKVKRADAVIDRNGTIEETRRQLLAILHQWDALGKGGSGHHHHHH

SEQ ID NO: 3101 - DNA, 639 bp, synthetic construct
  misc_feature 1..639: note = Variant of 3'O-kinase
  source 1..639: mol_type = other DNA
atggcgtttaccattggtttaacaggagggatcgcaagcggcaaatcgactgtgagtgccatgatgcgtgaactgggtctgccggtcatcgatgctgacgaggcagcacgcgccgttgttcgtccaggcgaagaagcttatcgccagattgtagctgcgttcggtccgggcattcttcgtgccgatggcgagatcgatcgcgccaaattgggtgccatcgtgtttaacgacgaacaacaacgtaaggtgctgaatgcgattgtacatcctgcagtccgcaagaagatgctcgctgagaaagaagctcatatccgctcaggcgccaagacggttgtgctggatatcccgctgctgttcgaatccggattgacccattgggtcgacaaagtgctcgtggtgtacgtcgatgatgatgttcagttacgccgccttatggcacgtaacgggatgaccgaagaagaagctctggcccgcattcgttcacagtggcccatggccgagaaagttaaacgtgcagacgctgtaatcgacaataatggcacgattgaagaaacccgccgccagctgctggccattttacaccagtgggatgcactgggtaagggtggctccggccaccatcatcaccatcactaatga

SEQ ID NO: 3102 - protein, 211 aa, synthetic construct
  REGION 1..211: note = Variant of 3'O-kinase
MAFTIGLTGGIASGKSTVSAMMRELGLPVIDADEAARAVVRPGEEAYRQIVAAFGPGILRADGEIDRAKLGAIVFNDEQQRKVLNAIVHPAVRKKMLAEKEAHIRSGAKTVVLDIPLLFESGLTHWVDKVLVVYVDDDVQLRRLMARNGMTEEEALARIRSQWPMAEKVKRADAVIDNNGTIEETRRQLLAILHQWDALGKGGSGHHHHHH

SEQ ID NO: 3103 - DNA, 639 bp, synthetic construct
  misc_feature 1..639: note = Variant of 3'O-kinase
  source 1..639: mol_type = other DNA
atggcgtttaccattggtttaacaggagggatcgcaagcggcaaatcgactgtgagtgccatgatgcgtgaactgggtctgccggtcatcgatgctgacgaggcagcacgcgccgttgttcgtccaggcgaagaagcttatcgccagattgtagctgcgttcggtccgggcattcttttggccgatggcgagatcgatcgcgccaaattgggtgccatcgtgtttaacgacgaacaacaacgtaaggtgctgaatgcgattgtacatcctgcagtccgcaagaagatgctcgctgagaaagaagctcatatccgctcaggcgccaagacggttgtgctggatatcccgctgctgttcgaatccggattgacccattgggtcgacaaagtgctcgtggtgtacgtcgatgatgatgttcagttacgccgccttatggcacgtaacgggtttaccgaagaagaagctctggcccgcattcgttcacagtggcccatggccgagaaagttaaacgtgcagacgctgtaatcgacaataatggcacgattgaagaaacccgccgccagctgctggccattttacaccagtgggatgcactgggtaagggtggctccggccaccatcatcaccatcactaatga

SEQ ID NO: 3104 - protein, 211 aa, synthetic construct
  REGION 1..211: note = Variant of 3'O-kinase
MAFTIGLTGGIASGKSTVSAMMRELGLPVIDADEAARAVVRPGEEAYRQIVAAFGPGILLADGEIDRAKLGAIVFNDEQQRKVLNAIVHPAVRKKMLAEKEAHIRSGAKTVVLDIPLLFESGLTHWVDKVLVVYVDDDVQLRRLMARNGFTEEEALARIRSQWPMAEKVKRADAVIDNNGTIEETRRQLLAILHQWDALGKGGSGHHHHHH

SEQ ID NO: 3105 - DNA, 639 bp, synthetic construct
  misc_feature 1..639: note = Variant of 3'O-kinase
  source 1..639: mol_type = other DNA
atggcgtttaccattggtttaacaggagggatcgcaagcggcaaatcgactgtgagtgccatgatgcgtgaactgggtctgccggtcatcgatgctgacgaggcagcacgcgccgttgttcgtccaggcgaagaagcttatcgccagattgtagctgcgttcggtccgggcattcttcgtgccgatggcgagatcgatcgcgccaaattgggtgccatcgtgtttaacgacgaacaacaacgtaaggtgctgaatgcgattgtacatcctgcagtccgcaagaagatgctcgctgagaaagaagctcatatccgctcaggcgccaagacggttgtgctggatatcccgctgctgttcgaatccggattgacccattgggtcgacaaagtgctcgtggtgtacgtcgatgatgatgttcagttacgccgccttatggcacgtggggggtttaccgaagaagaagctctggcccgcattcgttcacagtggcccatggccgagaaagttaaacgtgcagacgctgtaatcgacaataatggcacgattgaagaaacccgccgccagctgctggccattttacaccagtgggatgcactgggtaagggtggctccggccaccatcatcaccatcactaatga

SEQ ID NO: 3106 - protein, 211 aa, synthetic construct
  REGION 1..211: note = Variant of 3'O-kinase
MAFTIGLTGGIASGKSTVSAMMRELGLPVIDADEAARAVVRPGEEAYRQIVAAFGPGILRADGEIDRAKLGAIVFNDEQQRKVLNAIVHPAVRKKMLAEKEAHIRSGAKTVVLDIPLLFESGLTHWVDKVLVVYVDDDVQLRRLMARGGFTEEEALARIRSQWPMAEKVKRADAVIDNNGTIEETRRQLLAILHQWDALGKGGSGHHHHHH

SEQ ID NO: 3107 - DNA, 639 bp, synthetic construct
  misc_feature 1..639: note = Variant of 3'O-kinase
  source 1..639: mol_type = other DNA
atggcgtttaccattggtttaacaggagggatcgcaagcggcaaatcgactgtgagtgccatgatgcgtgaactgggtctgccggtcatcgatgctgacgaggcagcacgcgccgttgttcgtccaggcgaagaagcttatcgccagattgtagctgcgttcggtccgggcattcttcgtgccgatggcgagatcgatcgcgccaaattgggtgccatcgtgtttaacgacgaacaacaacgtaaggtgctgaatgcgattgtacatcctgcagtccgcaagaagatgctcgctgagaaagaagctcatatccgctcaggcgccaagacggttgtgctggatatcccgctgctgttcgaatccggattgacccattgggtcgacaaagtgctcgtggtgtacgtcgatgatgatgttcagttacgccgccttatggcacgtaacgggtttaccgaagaagaagctctggcccgcattcgttcacagagtcccatggccgagaaagttaaacgtgcagacgctgtaatcgacaataatggcacgattgaagaaacccgccgccagctgctggccattttacaccagtgggatgcactgggtaagggtggctccggccaccatcatcaccatcactaatga

SEQ ID NO: 3108 - protein, 211 aa, synthetic construct
  REGION 1..211: note = Variant of 3'O-kinase
MAFTIGLTGGIASGKSTVSAMMRELGLPVIDADEAARAVVRPGEEAYRQIVAAFGPGILRADGEIDRAKLGAIVFNDEQQRKVLNAIVHPAVRKKMLAEKEAHIRSGAKTVVLDIPLLFESGLTHWVDKVLVVYVDDDVQLRRLMARNGFTEEEALARIRSQSPMAEKVKRADAVIDNNGTIEETRRQLLAILHQWDALGKGGSGHHHHHH

SEQ ID NO: 3109 - DNA, 639 bp, synthetic construct
  misc_feature 1..639: note = Variant of 3'O-kinase
  source 1..639: mol_type = other DNA
atggcgtttaccattggtttaacaggagggatcgcaagcggcaaatcgactgtgagtgccatgatgcgtgaactgggtctgccggtcatcgatgctgacgaggcagcacgcgccgttgttcgtccaggcgaagaagcttatcgccagattgtagctgcgttcggtccgggcattcttcgtgccgatggcgagatcgatcgcgccaaattgggtgccatcgtgtttaacgacgaacaacaacgtaaggtgctgaatgcgattgtacatcctgcagtccgcaagaagatgctcgctgagaaagaagctcatatccgctcaggcgccaagacggttgtgctggatatcccgctgctgttcgaatccggattgacccattgggtcgacaaagtgctcgtggtgtacgtcgatgatgatgttcagttacgccgcgtgatggcacgtaacgggtttaccgaagaagaagctctggcccgcattcgttcacagtggcccatggccgagaaagttaaacgtgcagacgctgtaatcgacaataatggcacgattgaagaaacccgccgccagctgctggccattttacaccagtgggatgcactgggtaagggtggctccggccaccatcatcaccatcactaatga

SEQ ID NO: 3110 - protein, 211 aa, synthetic construct
  REGION 1..211: note = Variant of 3'O-kinase
MAFTIGLTGGIASGKSTVSAMMRELGLPVIDADEAARAVVRPGEEAYRQIVAAFGPGILRADGEIDRAKLGAIVFNDEQQRKVLNAIVHPAVRKKMLAEKEAHIRSGAKTVVLDIPLLFESGLTHWVDKVLVVYVDDDVQLRRVMARNGFTEEEALARIRSQWPMAEKVKRADAVIDNNGTIEETRRQLLAILHQWDALGKGGSGHHHHHH

SEQ ID NO: 3111 - DNA, 639 bp, synthetic construct
  misc_feature 1..639: note = Variant of 3'O-kinase
  source 1..639: mol_type = other DNA
atggcgtttaccattggtttaacaggagggatcgcaagcggcaaatcgactgtgagtgccatgatgcgtgaactgggtctgccggtcatcgatgctgacgaggcagcacgcgccgttgttcgtccaggcgaagaagcttatcgccagattgtagctgcgttcggtccgggcattcttcgtgccgatggcgagatcgatcgcgccaaattgggtgccatcgtgtttaacgacgaacaacaacgtaaggtgctgaatgcgattgtacatcctgcagtccgcaagaagatgctcgctgagaaagaagctcatatccgctcaggcgccaagacggttgtgctggatatcccgctgctgttcgaatccggattgacccattgggtcgacaaagtgctcgtggtgtacgtcgatgattcggttcagttacgccgccttatggcacgtaacgggtttaccgaagaagaagctctggcccgcattcgttcacagtggcccatggccgagaaagttaaacgtgcagacgctgtaatcgacaataatggcacgattgaagaaacccgccgccagctgctggccattttacaccagtgggatgcactgggtaagggtggctccggccaccatcatcaccatcactaatga

SEQ ID NO: 3112 - protein, 211 aa, synthetic construct
  REGION 1..211: note = Variant of 3'O-kinase
MAFTIGLTGGIASGKSTVSAMMRELGLPVIDADEAARAVVRPGEEAYRQIVAAFGPGILRADGEIDRAKLGAIVFNDEQQRKVLNAIVHPAVRKKMLAEKEAHIRSGAKTVVLDIPLLFESGLTHWVDKVLVVYVDDSVQLRRLMARNGFTEEEALARIRSQWPMAEKVKRADAVIDNNGTIEETRRQLLAILHQWDALGKGGSGHHHHHH

SEQ ID NO: 3113 - DNA, 639 bp, synthetic construct
  misc_feature 1..639: note = Variant of 3'O-kinase
  source 1..639: mol_type = other DNA
atggcgtttaccattggtttaacaggagggatcgcaagcggcaaatcgactgtgagtgccatgatgcgtgaactgggtctgccggtcatcgatgctgacgaggcagcacgcgccgttgttcgtccaggcgaagaagcttatcgccagattgtagctgcgttcggtccgggcattcttcgtgccgatggcgagatcgatcgcgccaaattgggtgccatcgtgtttaacgacgaacaacaacgtaaggtgctgaatgcgattgtaagtcctgcagtccgcaagaagatgctcgctgagaaagaagctcatatccgctcaggcgccaagacggttgtgctggatatcccgctgctgttcgaatccggattgacccattgggtcgacaaagtgctcgtggtgtacgtcgatgatgatgttcagttacgccgccttatggcacgtaacgggtttaccgaagaagaagctctggcccgcattcgttcacagtggcccatggccgagaaagttaaacgtgcagacgctgtaatcgacaataatggcacgattgaagaaacccgccgccagctgctggccattttacaccagtgggatgcactgggtaagggtggctccggccaccatcatcaccatcactaatga

SEQ ID NO: 3114 - protein, 211 aa, synthetic construct
  REGION 1..211: note = Variant of 3'O-kinase
MAFTIGLTGGIASGKSTVSAMMRELGLPVIDADEAARAVVRPGEEAYRQIVAAFGPGILRADGEIDRAKLGAIVFNDEQQRKVLNAIVSPAVRKKMLAEKEAHIRSGAKTVVLDIPLLFESGLTHWVDKVLVVYVDDDVQLRRLMARNGFTEEEALARIRSQWPMAEKVKRADAVIDNNGTIEETRRQLLAILHQWDALGKGGSGHHHHHH

SEQ ID NO: 3115 - DNA, 639 bp, synthetic construct
  misc_feature 1..639: note = Variant of 3'O-kinase
  source 1..639: mol_type = other DNA
atggcgtttaccattggtttaacaggagggatcgcaagcggcaaatcgactgtgagtgccatgatgcgtgaactgggtctgccggtcatcgatgctgacgaggcagcacgcgccgttgttcgtccaggcgaagaagcttatcgccagattgtagctgcgttcggtccgggcattcttcgtgccgatggcgagatcgatcgcgccaaattgggtgccatcgtgtttaacgacgaacaacaacgtaaggtgctgaatgcgattgtacatcctgcagctcgcaagaagatgctcgctgagaaagaagctcatatccgctcaggcgccaagacggttgtgctggatatcccgctgctgttcgaatccggattgacccattgggtcgacaaagtgctcgtggtgtacgtcgatgatgatgttcagttacgccgccttatggcacgtaacgggtttaccgaagaagaagctctggcccgcattcgttcacagtggcccatggccgagaaagttaaacgtgcagacgctgtaatcgacaataatggcacgattgaagaaacccgccgccagctgctggccattttacaccagtgggatgcactgggtaagggtggctccggccaccatcatcaccatcactaatga

SEQ ID NO: 3116 - protein, 211 aa, synthetic construct
  REGION 1..211: note = Variant of 3'O-kinase
MAFTIGLTGGIASGKSTVSAMMRELGLPVIDADEAARAVVRPGEEAYRQIVAAFGPGILRADGEIDRAKLGAIVFNDEQQRKVLNAIVHPAARKKMLAEKEAHIRSGAKTVVLDIPLLFESGLTHWVDKVLVVYVDDDVQLRRLMARNGFTEEEALARIRSQWPMAEKVKRADAVIDNNGTIEETRRQLLAILHQWDALGKGGSGHHHHHH

SEQ ID NO: 3117 - DNA, 639 bp, synthetic construct
  misc_feature 1..639: note = Variant of 3'O-kinase
  source 1..639: mol_type = other DNA
atggcgtttaccattggtttaacaggagggatcgcaagcggcaaatcgactgtgagtgccatgatgcgtgaactgggtctgccggtcatcgatgctgacgaggcaacgcgcgccgttgttcgtccaggcgaagaagcttatcgccagattgtagctgcgttcggtccgggcattcttcgtgccgatggcgagatcgatcgcgccaaattgggtgccatcgtgtttaacgacgaacaacaacgtaaggtgctgaatgcgattgtacatcctgcagtccgcaagaagatgctcgctgagaaagaagctcatatccgctcaggcgccaagacggttgtgctggatatcccgctgctgttcgaatccggattgacccattgggtcgacaaagtgctcgtggtgtacgtcgatgatgatgttcagttacgccgccttatggcacgtaacgggtttaccgaagaagaagctctggcccgcattcgttcacagtggcccatggccgagaaagttaaacgtgcagacgctgtaatcgacaataatggcacgattgaagaaacccgccgccagctgctggccattttacaccagtgggatgcactgggtaagggtggctccggccaccatcatcaccatcactaatga

SEQ ID NO: 3118 - protein, 211 aa, synthetic construct
  REGION 1..211: note = Variant of 3'O-kinase
MAFTIGLTGGIASGKSTVSAMMRELGLPVIDADEATRAVVRPGEEAYRQIVAAFGPGILRADGEIDRAKLGAIVFNDEQQRKVLNAIVHPAVRKKMLAEKEAHIRSGAKTVVLDIPLLFESGLTHWVDKVLVVYVDDDVQLRRLMARNGFTEEEALARIRSQWPMAEKVKRADAVIDNNGTIEETRRQLLAILHQWDALGKGGSGHHHHHH

SEQ ID NO: 3119 - DNA, 639 bp, synthetic construct
  misc_feature 1..639: note = Variant of 3'O-kinase
  source 1..639: mol_type = other DNA
atggcgtttaccattggtttaacaggagggatcgcaagcggcaaatcgactgtgagtgccatgatgcgtgaactgggtctgccggtcatcgatgctgacgaggcagcacgcgccgttgttcgtccaggcgaagaagcttatcgccagattgtagctgcgttcggtccgggcattcttcgtgccgatggcgagatcgatcgcgccaaattgggtgccatcgtgtttaacgacgaacaacaacgtaaggtgctgaatgcgattgtaggtcctgcagtccgcaagaagatgctcgctgagaaagaagctcatatccgctcaggcgccaagacggttgtgctggatatcccgctgctgttcgaatccggattgacccattgggtcgacaaagtgctcgtggtgtacgtcgatgatgatgttcagttacgccgccttatggcacgtaacgggtttaccgaagaagaagctctggcccgcattcgttcacagtggcccatggccgagaaagttaaacgtgcagacgctgtaatcgacaataatggcacgattgaagaaacccgccgccagctgctggccattttacaccagtgggatgcactgggtaagggtggctccggccaccatcatcaccatcactaatga

SEQ ID NO: 3120 - protein, 211 aa, synthetic construct
  REGION 1..211: note = Variant of 3'O-kinase
MAFTIGLTGGIASGKSTVSAMMRELGLPVIDADEAARAVVRPGEEAYRQIVAAFGPGILRADGEIDRAKLGAIVFNDEQQRKVLNAIVGPAVRKKMLAEKEAHIRSGAKTVVLDIPLLFESGLTHWVDKVLVVYVDDDVQLRRLMARNGFTEEEALARIRSQWPMAEKVKRADAVIDNNGTIEETRRQLLAILHQWDALGKGGSGHHHHHH

SEQ ID NO: 3121 - DNA, 639 bp, synthetic construct
  misc_feature 1..639: note = Variant of 3'O-kinase
  source 1..639: mol_type = other DNA
atggcgtttaccattggtttaacaggagggatcgcaagcggcaaatcgactgtgagtgccatgatgcgtgaactgggtctgccggtcatcgatgctgacgaggcagcacgcgccgttgttcgtccaggcgaagaagcttatcgccagattgtagctgcgttcggtccgggcattcttcgtgccgatggcgagatcgatcgcgccaaattgggtgccatcatgtttaacgacgaacaacaacgtaaggtgctgaatgcgattgtacatcctgcagtccgcaagaagatgctcgctgagaaagaagctcatatccgctcaggcgccaagacggttgtgctggatatcccgctgctgttcgaatccggattgacccattgggtcgacaaagtgctcgtggtgtacgtcgatgatgatgttcagttacgccgccttatggcacgtaacgggtttaccgaagaagaagctctggcccgcattcgttcacagtggcccatggccgagaaagttaaacgtgcagacgctgtaatcgacaataatggcacgattgaagaaacccgccgccagctgctggccattttacaccagtgggatgcactgggtaagggtggctccggccaccatcatcaccatcactaatga

SEQ ID NO: 3122 - protein, 211 aa, synthetic construct
  REGION 1..211: note = Variant of 3'O-kinase
MAFTIGLTGGIASGKSTVSAMMRELGLPVIDADEAARAVVRPGEEAYRQIVAAFGPGILRADGEIDRAKLGAIMFNDEQQRKVLNAIVHPAVRKKMLAEKEAHIRSGAKTVVLDIPLLFESGLTHWVDKVLVVYVDDDVQLRRLMARNGFTEEEALARIRSQWPMAEKVKRADAVIDNNGTIEETRRQLLAILHQWDALGKGGSGHHHHHH

SEQ ID NO: 3123 - DNA, 639 bp, synthetic construct
  misc_feature 1..639: note = Variant of 3'O-kinase
  source 1..639: mol_type = other DNA
atggcgtttaccattggtttaacaggagggatcgcaagcggcaaatcgactgtgagtgccatgatgcgtgaactgggtctgccggtcatcgatgctgacgagtcggcacgcgccgttgttcgtccaggcgaagaagcttatcgccagattgtagctgcgttcggtccgggcattcttcgtgccgatggcgagatcgatcgcgccaaattgggtgccatcgtgtttaacgacgaacaacaacgtaaggtgctgaatgcgattgtacatcctgcagtccgcaagaagatgctcgctgagaaagaagctcatatccgctcaggcgccaagacggttgtgctggatatcccgctgctgttcgaatccggattgacccattgggtcgacaaagtgctcgtggtgtacgtcgatgatgatgttcagttacgccgccttatggcacgtaacgggtttaccgaagaagaagctctggcccgcattcgttcacagtggcccatggccgagaaagttaaacgtgcagacgctgtaatcgacaataatggcacgattgaagaaacccgccgccagctgctggccattttacaccagtgggatgcactgggtaagggtggctccggccaccatcatcaccatcactaatga

SEQ ID NO: 3124 - protein, 211 aa, synthetic construct
  REGION 1..211: note = Variant of 3'O-kinase
MAFTIGLTGGIASGKSTVSAMMRELGLPVIDADESARAVVRPGEEAYRQIVAAFGPGILRADGEIDRAKLGAIVFNDEQQRKVLNAIVHPAVRKKMLAEKEAHIRSGAKTVVLDIPLLFESGLTHWVDKVLVVYVDDDVQLRRLMARNGFTEEEALARIRSQWPMAEKVKRADAVIDNNGTIEETRRQLLAILHQWDALGKGGSGHHHHHH

SEQ ID NO: 3125 - DNA, 639 bp, synthetic construct
  misc_feature 1..639: note = Variant of 3'O-kinase
  source 1..639: mol_type = other DNA
atggcgtttaccattggtttaacaggagggatcgcaagcggcaaatcgactgtgagtgccatgatgcgtgaactgggtctgccggtcatcgatggtgacgaggcagcacgcgccgttgttcgtccaggcgaagaagcttatcgccagattgtagctgcgttcggtccgggcattcttcgtgccgatggcgagatcgatcgcgccaaattgggtgccatcgtgtttaacgacgaacaacaacgtaaggtgctgaatgcgattgtacatcctgcagtccgcaagaagatgctcgctgagaaagaagctcatatccgctcaggcgccaagacggttgtgctggatatcccgctgctgttcgaatccggattgacccattgggtcgacaaagtgctcgtggtgtacgtcgatgatgatgttcagttacgccgccttatggcacgtaacgggtttaccgaagaagaagctctggcccgcattcgttcacagtggcccatggccgagaaagttaaacgtgcagacgctgtaatcgacaataatggcacgattgaagaaacccgccgccagctgctggccattttacaccagtgggatgcactgggtaagggtggctccggccaccatcatcaccatcactaatga

SEQ ID NO: 3126 - protein, 211 aa, synthetic construct
  REGION 1..211: note = Variant of 3'O-kinase
MAFTIGLTGGIASGKSTVSAMMRELGLPVIDGDEAARAVVRPGEEAYRQIVAAFGPGILRADGEIDRAKLGAIVFNDEQQRKVLNAIVHPAVRKKMLAEKEAHIRSGAKTVVLDIPLLFESGLTHWVDKVLVVYVDDDVQLRRLMARNGFTEEEALARIRSQWPMAEKVKRADAVIDNNGTIEETRRQLLAILHQWDALGKGGSGHHHHHH

SEQ ID NO: 3127 - DNA, 639 bp, synthetic construct
  misc_feature 1..639: note = Variant of 3'O-kinase
  source 1..639: mol_type = other DNA
atggcgtttaccattggtttaacaggagggatcgcaagcggcaaatcgactgtgagtgccatgatgcgtgaactgggtctgccggtcatcgatgctgacgaggcagcacgcgccgttgttcgtccaggcgaagaagcttatcgccagattgtagctgcgttcggtccgggcattcttcgtgccgatggcgagatcgatcgcgccaaattgggtgccatcgtgtttaacgacgaacaacaacgtaaggtgctgaatgcgattgtacatcctgcagtccgcaagaagatgctcgctgagaaagaagctcatatccgctcaggcgccaagacggttgtgctggatatcccgctgctgttcgaatccggattgacccattgggtcgacaaagtgctcgtggtgtacgtcgatgatgatgttcagttacgccgccttatggcacgtaacgggtggaccgaagaagaagctctggcccgcattcgttcacagtggcccatggccgagaaagttaaacgtgcagacgctgtaatcgacaataatggcacgattgaagaaacccgccgccagctgctggccattttacaccagtgggatgcactgggtaagggtggctccggccaccatcatcaccatcactaatga

SEQ ID NO: 3128 - protein, 211 aa, synthetic construct
  REGION 1..211: note = Variant of 3'O-kinase
MAFTIGLTGGIASGKSTVSAMMRELGLPVIDADEAARAVVRPGEEAYRQIVAAFGPGILRADGEIDRAKLGAIVFNDEQQRKVLNAIVHPAVRKKMLAEKEAHIRSGAKTVVLDIPLLFESGLTHWVDKVLVVYVDDDVQLRRLMARNGWTEEEALARIRSQWPMAEKVKRADAVIDNNGTIEETRRQLLAILHQWDALGKGGSGHHHHHH

SEQ ID NO: 3129 - DNA, 639 bp, synthetic construct
  misc_feature 1..639: note = Variant of 3'O-kinase
  source 1..639: mol_type = other DNA
atggcgtttaccattggtttaacaggagggatcgcaagcggcaaatcgactgtgagtgccatgatgcgtgaactgggtctgccggtcatcgatgctgacgaggcagcacgcgccgttgttcgtccaggcgaagaagcttatcgccagattgtagctgcgttcggtccgggcattcttcgtgccgatggcgagatcgatcgcgccaaattgggtgccatcgtgtttgcggacgaacaacaacgtaaggtgctgaatgcgattgtacatcctgcagtccgcaagaagatgctcgctgagaaagaagctcatatccgctcaggcgccaagacggttgtgctggatatcccgctgctgttcgaatccggattgacccattgggtcgacaaagtgctcgtggtgtacgtcgatgatgatgttcagttacgccgccttatggcacgtaacgggtttaccgaagaagaagctctggcccgcattcgttcacagtggcccatggccgagaaagttaaacgtgcagacgctgtaatcgacaataatggcacgattgaagaaacccgccgccagctgctggccattttacaccagtgggatgcactgggtaagggtggctccggccaccatcatcaccatcactaatga

SEQ ID NO: 3130 - protein, 211 aa, synthetic construct
  REGION 1..211: note = Variant of 3'O-kinase
MAFTIGLTGGIASGKSTVSAMMRELGLPVIDADEAARAVVRPGEEAYRQIVAAFGPGILRADGEIDRAKLGAIVFADEQQRKVLNAIVHPAVRKKMLAEKEAHIRSGAKTVVLDIPLLFESGLTHWVDKVLVVYVDDDVQLRRLMARNGFTEEEALARIRSQWPMAEKVKRADAVIDNNGTIEETRRQLLAILHQWDALGKGGSGHHHHHH

SEQ ID NO: 3131 - DNA, 639 bp, synthetic construct
  misc_feature 1..639: note = Variant of 3'O-kinase
  source 1..639: mol_type = other DNA
atggcgtttaccattggtttaacaggagggatcgcaagcggcaaatcgactgtgagtgccatgatgcgtgaactgggtctgccggtcatcgatgctgacgaggcagcacgcgccgttatgcgtccaggcgaagaagcttatcgccagattgtagctgcgttcggtccgggcattcttcgtgccgatggcgagatcgatcgcgccaaattgggtgccatcgtgtttaacgacgaacaacaacgtaaggtgctgaatgcgattgtacatcctgcagtccgcaagaagatgctcgctgagaaagaagctcatatccgctcaggcgccaagacggttgtgctggatatcccgctgctgttcgaatccggattgacccattgggtcgacaaagtgctcgtggtgtacgtcgatgatgatgttcagttacgccgccttatggcacgtaacgggtttaccgaagaagaagctctggcccgcattcgttcacagtggcccatggccgagaaagttaaacgtgcagacgctgtaatcgacaataatggcacgattgaagaaacccgccgccagctgctggccattttacaccagtgggatgcactgggtaagggtggctccggccaccatcatcaccatcactaatga

SEQ ID NO: 3132 - protein, 211 aa, synthetic construct
  REGION 1..211: note = Variant of 3'O-kinase
MAFTIGLTGGIASGKSTVSAMMRELGLPVIDADEAARAVMRPGEEAYRQIVAAFGPGILRADGEIDRAKLGAIVFNDEQQRKVLNAIVHPAVRKKMLAEKEAHIRSGAKTVVLDIPLLFESGLTHWVDKVLVVYVDDDVQLRRLMARNGFTEEEALARIRSQWPMAEKVKRADAVIDNNGTIEETRRQLLAILHQWDALGKGGSGHHHHHH

SEQ ID NO: 3133 - DNA, 639 bp, synthetic construct
  misc_feature 1..639: note = Variant of 3'O-kinase
  source 1..639: mol_type = other DNA
atggcgtttaccattggtttaacaggagggatcgcaagcggcaaatcgactgtgagtgccatgatgcgtgaactgggtctgccggtcatcgatgctgacgaggcagcacgcgccgttgttcgtccaggcgaagaagcttatcgccagattgtagctgcgttcggtccgggcattcttcgtgccgatggcgagatcgatcgcgccaaattgggtgccatcgtgtttaacgacgaacaacaacgtaaggtgctgaatgcgattgtacatcctgcagtccgcaagaagatgctcgctgagaaagaagctcatatccgctcaggcgccaagacggttgtgctggatatcccgctgctgttcgaatccggattgacccattgggtcgacaaagtgctcgtggtgtacgtcgatgatgatgttcagttacgccgccttatggcacgtaacgggtttaccgaagaagaagctatggcccgcattcgttcacagtggcccatggccgagaaagttaaacgtgcagacgctgtaatcgacaataatggcacgattgaagaaacccgccgccagctgctggccattttacaccagtgggatgcactgggtaagggtggctccggccaccatcatcaccatcactaatga

SEQ ID NO: 3134 - protein, 211 aa, synthetic construct
  REGION 1..211: note = Variant of 3'O-kinase
MAFTIGLTGGIASGKSTVSAMMRELGLPVIDADEAARAVVRPGEEAYRQIVAAFGPGILRADGEIDRAKLGAIVFNDEQQRKVLNAIVHPAVRKKMLAEKEAHIRSGAKTVVLDIPLLFESGLTHWVDKVLVVYVDDDVQLRRLMARNGFTEEEAMARIRSQWPMAEKVKRADAVIDNNGTIEETRRQLLAILHQWDALGKGGSGHHHHHH

SEQ ID NO: 3135 - DNA, 639 bp, synthetic construct
  misc_feature 1..639: note = Variant of 3'O-kinase
  source 1..639: mol_type = other DNA
atggcgtttaccattggtttaacaggagggatcgcaagcggcaaatcgactgtgagtgccatgatgcgtgaactgggtctgccggtcatcgatgctgacgaggcagcacgcgccgttgttcgtccaggcgaagaagcttatcgccagattgtagctgcgttcggtccgggcattcttcgtgccgatggcgagatcgatcgcgccaaattgggtgccatcgtgtttaacgacgaacaacaacgtaaggtgctgaatgcgattgtacatcctgcagtccgcaagaagatgctcgctgagaaagaagctcatatccgctcaggcgccaagacggttgtgctggatatcccgctgctgttcgaatccggagttacccattgggtcgacaaagtgctcgtggtgtacgtcgatgatgatgttcagttacgccgccttatggcacgtaacgggtttaccgaagaagaagctctggcccgcattcgttcacagtggcccatggccgagaaagttaaacgtgcagacgctgtaatcgacaataatggcacgattgaagaaacccgccgccagctgctggccattttacaccagtgggatgcactgggtaagggtggctccggccaccatcatcaccatcactaatga

SEQ ID NO: 3136 - protein, 211 aa, synthetic construct
  REGION 1..211: note = Variant of 3'O-kinase
MAFTIGLTGGIASGKSTVSAMMRELGLPVIDADEAARAVVRPGEEAYRQIVAAFGPGILRADGEIDRAKLGAIVFNDEQQRKVLNAIVHPAVRKKMLAEKEAHIRSGAKTVVLDIPLLFESGVTHWVDKVLVVYVDDDVQLRRLMARNGFTEEEALARIRSQWPMAEKVKRADAVIDNNGTIEETRRQLLAILHQWDALGKGGSGHHHHHH

SEQ ID NO: 3137 - DNA, 639 bp, synthetic construct
  misc_feature 1..639: note = Variant of 3'O-kinase
  source 1..639: mol_type = other DNA
atggcgtttaccattggtttaacaggagggatcgcaagcggcaaatcgcaggtgagtgccatgatgcgtgaactgggtctgccggtcatcgatgctgacgaggcagcacgcgccgttgttcgtccaggcgaagaagcttatcgccagattgtagctgcgttcggtccgggcattcttcgtgccgatggcgagatcgatcgcgccaaattgggtgccatcgtgtttaacgacgaacaacaacgtaaggtgctgaatgcgattgtacatcctgcagtccgcaagaagatgctcgctgagaaagaagctcatatccgctcaggcgccaagacggttgtgctggatatcccgctgctgttcgaatccggattgacccattgggtcgacaaagtgctcgtggtgtacgtcgatgatgatgttcagttacgccgccttatggcacgtaacgggtttaccgaagaagaagctctggcccgcattcgttcacagtggcccatggccgagaaagttaaacgtgcagacgctgtaatcgacaataatggcacgattgaagaaacccgccgccagctgctggccattttacaccagtgggatgcactgggtaagggtggctccggccaccatcatcaccatcactaatga

SEQ ID NO: 3138 - protein, 211 aa, synthetic construct
  REGION 1..211: note = Variant of 3'O-kinase
MAFTIGLTGGIASGKSQVSAMMRELGLPVIDADEAARAVVRPGEEAYRQIVAAFGPGILRADGEIDRAKLGAIVFNDEQQRKVLNAIVHPAVRKKMLAEKEAHIRSGAKTVVLDIPLLFESGLTHWVDKVLVVYVDDDVQLRRLMARNGFTEEEALARIRSQWPMAEKVKRADAVIDNNGTIEETRRQLLAILHQWDALGKGGSGHHHHHH

SEQ ID NO: 3139 - DNA, 639 bp, synthetic construct
  misc_feature 1..639: note = Variant of 3'O-kinase
  source 1..639: mol_type = other DNA
atggcgtttaccattggtttaacaggagggatcgcaagcggcaaatcgactgtgagtgccatgatgcgtgaactgggtctgccggtcatcgatgctgacgaggcagcacgcgccgttgttcgtccaggcgaagaagcttatcgccagattgtagctgcgttcggtccgggcattcttcgtgccgatggcgagatcgatcgcgccaaattgggtgccatcgtgtttaacgacgaacaacaacgtaaggtgctgaatgcgattgtacatcctgcagtccgcaagaagatgctcgctgagaaagaagctcatatccgctcaggcgccaagacggttgtgctggatatcccgctgctgttcgaatccggattgacccattgggtcgacaaagtgctcgtggtgtacgtcgatgatgatgttcagttacgccgccttatggcacgtaacgggtttaccgaagaagaagctctggcccgcattcgttcacagtggcccatggccgagaaagttaaacgtgcagacgctgtaatcgactctaatggcacgattgaagaaacccgccgccagctgctggccattttacaccagtgggatgcactgggtaagggtggctccggccaccatcatcaccatcactaatga

SEQ ID NO: 3140 - protein, 211 aa, synthetic construct
  REGION 1..211: note = Variant of 3'O-kinase
MAFTIGLTGGIASGKSTVSAMMRELGLPVIDADEAARAVVRPGEEAYRQIVAAFGPGILRADGEIDRAKLGAIVFNDEQQRKVLNAIVHPAVRKKMLAEKEAHIRSGAKTVVLDIPLLFESGLTHWVDKVLVVYVDDDVQLRRLMARNGFTEEEALARIRSQWPMAEKVKRADAVIDSNGTIEETRRQLLAILHQWDALGKGGSGHHHHHH

SEQ ID NO: 3141 - DNA, 639 bp, synthetic construct
  misc_feature 1..639: note = Variant of 3'O-kinase
  source 1..639: mol_type = other DNA
atggcgtttaccattggtttaacaggagggatcgcaagcggcaaatcgactgtgagtgccatgatgcgtgaactgggtctgccggtcatcgatgctgacgaggcagcacgcgccgttgttcgtccaggcgaagaagcttatcgccagattgtagctgcgttcggtccgggcattcttcgtgccgatggcgagatcgatcgcgccaaattgggtgccatcgtgtttaacgacgaacaacaacgtaaggtgctgaatgcgattgtacatcctgcagtccgcaagaagatgctcgctgagaaagaagctcatatccgctcaggcgccaagacggttgtgctggatatctcgctgctgttcgaatccggattgacccattgggtcgacaaagtgctcgtggtgtacgtcgatgatgatgttcagttacgccgccttatggcacgtaacgggtttaccgaagaagaagctctggcccgcattcgttcacagtggcccatggccgagaaagttaaacgtgcagacgctgtaatcgacaataatggcacgattgaagaaacccgccgccagctgctggccattttacaccagtgggatgcactgggtaagggtggctccggccaccatcatcaccatcactaatga

SEQ ID NO: 3142 - protein, 211 aa, synthetic construct
  REGION 1..211: note = Variant of 3'O-kinase
MAFTIGLTGGIASGKSTVSAMMRELGLPVIDADEAARAVVRPGEEAYRQIVAAFGPGILRADGEIDRAKLGAIVFNDEQQRKVLNAIVHPAVRKKMLAEKEAHIRSGAKTVVLDISLLFESGLTHWVDKVLVVYVDDDVQLRRLMARNGFTEEEALARIRSQWPMAEKVKRADAVIDNNGTIEETRRQLLAILHQWDALGKGGSGHHHHHH

SEQ ID NO: 3143 - DNA, 639 bp, synthetic construct
  misc_feature 1..639: note = Variant of 3'O-kinase
  source 1..639: mol_type = other DNA
atggcgtttaccattggtttaacaggagggatcgcagtaggcaaatcgactgtgagtgccatgatgcgtgaactgggtctgccggtcatcgatgctgacgaggcaacccgcgaagtgatgcgtccaggcgaagaagcttatcgccagattgtagctgcgttcggtccgggcattcttcgtgccgatggcgagatcgatcgcgccaaattgggtcgtatcaagtttaacgacgaacaacaacgtaaggtgctgaatgcgattgtactgcctgcagtctataagaagatgctcgctgagaaagaagctcatatccgctcaggcgccaagacggttgtgctggatatcccgctgctgttcgaatccggattgacccattgggtcgacaaagtgctcgtggtgtacgtcgatgatgatgttcagttacgccgccttatggcacgtaacgggtttaccgaagaagaagctctggcccgcattcgttcacagtggcccatggccgagaaagttaaacgtgcagacgctgtaatcgacaataatggcacgattgaagaaacccgccgccagctgctggccattttacaccagtgggatgcactgggtaagggtggctccggccaccatcatcaccatcactaatga

SEQ ID NO: 3144 - protein, 211 aa, synthetic construct
  REGION 1..211: note = Variant of 3'O-kinase
MAFTIGLTGGIAVGKSTVSAMMRELGLPVIDADEATREVMRPGEEAYRQIVAAFGPGILRADGEIDRAKLGRIKFNDEQQRKVLNAIVLPAVYKKMLAEKEAHIRSGAKTVVLDIPLLFESGLTHWVDKVLVVYVDDDVQLRRLMARNGFTEEEALARIRSQWPMAEKVKRADAVIDNNGTIEETRRQLLAILHQWDALGKGGSGHHHHHH

SEQ ID NO: 3145 - DNA, 639 bp, synthetic construct
  misc_feature 1..639: note = Variant of 3'O-kinase
  source 1..639: mol_type = other DNA
atggcgtttaccattggtttaacaggagggatcgcatcgggcaaatcgactgtgagtgccatgatgcgtgaactgggtctgccggtcatcgatgctgacgaggcagcacgcgccgttgttcgtccaggcgaagaagcttatcgccagattgtagctgcgttcggtccgggcattcttcgtgccgatggcgagatcgatcgcgccaaattgggtgctatcgtgtttgctgacgaacaacaacgtaaggtgctgaatgcgattgtaggtcctgcagtctataagaagatgctcgctgagaaagaagctcatatccgctcaggcgccaagacggttgtgctggatatcccgctgctgttcgaatccggattgacccattgggtcgacaaagtgctcgtggtgtacgtcgatgatgatgttcagttacgccgccttatggcacgtaacgggtttaccgaagaagaagctctggcccgcattcgttcacagtggcccagtgccgagaaagttaaacgtgcagacgctgtaatcgacaataatggcacgattgaagaaacccgccgccagctgctggccattttacaccagtgggatgcactgggtaagggtggctccggccaccatcatcaccatcactaatga

SEQ ID NO: 3146 - protein, 211 aa, synthetic construct
  REGION 1..211: note = Variant of 3'O-kinase
MAFTIGLTGGIASGKSTVSAMMRELGLPVIDADEAARAVVRPGEEAYRQIVAAFGPGILRADGEIDRAKLGAIVFADEQQRKVLNAIVGPAVYKKMLAEKEAHIRSGAKTVVLDIPLLFESGLTHWVDKVLVVYVDDDVQLRRLMARNGFTEEEALARIRSQWPSAEKVKRADAVIDNNGTIEETRRQLLAILHQWDALGKGGSGHHHHHH

SEQ ID NO: 3147 - DNA, 639 bp, synthetic construct
  misc_feature 1..639: note = Variant of 3'O-kinase
  source 1..639: mol_type = other DNA
atggcgtttaccattggtttaacaggagggatcgcatcgggcaaatcgactgtgagtgccatgatgcgtgaactgggtctgccggtcatcgatgctgacgaggcaacccgcgcagtgatgcgtccaggcgaagaagcttatcgccagattgtagctgcgttcggtccgggcattcttcgtgccgatggcgagatcgatcgcgccaaattgggtcgtatcaagtttaacgacgaacaacaacgtaaggtgctgaatgcgattgtaggtcctgcagtctataagaagatgctcgctgagaaagaagctcatatccgctcaggcgccaagacggttgtgctggatatcccgctgctgttcgaatccggattgactcattgggtcgacaaagtgctcgtggtgtacgtcgatgatgatgttcagttacgccgccttatggcacgtaacgggtttaccgaagaagaagctctggcccgcattcgttcacagtggcccatggccgagaaagttaaacgtgcagacgctgtaatcgacaataatggcacgattgaagaaacccgccgccagctgctggccattttacaccagtgggatgcactgggtaagggtggctccggccaccatcatcaccatcactaatga

SEQ ID NO: 3148 - protein, 211 aa, synthetic construct
  REGION 1..211: note = Variant of 3'O-kinase
MAFTIGLTGGIASGKSTVSAMMRELGLPVIDADEATRAVMRPGEEAYRQIVAAFGPGILRADGEIDRAKLGRIKFNDEQQRKVLNAIVGPAVYKKMLAEKEAHIRSGAKTVVLDIPLLFESGLTHWVDKVLVVYVDDDVQLRRLMARNGFTEEEALARIRSQWPMAEKVKRADAVIDNNGTIEETRRQLLAILHQWDALGKGGSGHHHHHH

SEQ ID NO: 3149 - DNA, 639 bp, synthetic construct
  misc_feature 1..639: note = Variant of 3'O-kinase
  source 1..639: mol_type = other DNA
atggcgtttaccattggtttaacaggagggatcgcatcgggcaaatcgactgtgagtgccatgatgcgtgaactgggtctgccggtcatcgatgctgacgaggcagcacgcgccgttgttcgtccaggcgaagaagcttatcgccagattgtagctgcgttcggtccgggcattcttcgtgccgatggcgagatcgatcgcgccaaattgggtcgtatcgtgtttaacgacgaacaacaacgtaaggtgctgaatgcgattgtactgcctgcagtccgtaagaagatgctcgctgagaaagaagctcatatccgctcaggcgccaagacggttgtgctggatatcccgctgctgttcgaatccggattgacccattgggtcgacaaagtgctcgtggtgtacgtcgatgatgatgttcagttacgccgccttatggcacgtaacgggtttaccgaagaagaagctctggcccgcattcgttcacagtggcccagtgccgagaaagttaaacgtgcagacgctgtaatcgacaataatggcacgattgaagaaacccgccgccagctgctggccattttacaccagtgggatgcactgggtaagggtggctccggccaccatcatcaccatcactaatga

SEQ ID NO: 3150 - protein, 211 aa, synthetic construct
  REGION 1..211: note = Variant of 3'O-kinase
MAFTIGLTGGIASGKSTVSAMMRELGLPVIDADEAARAVVRPGEEAYRQIVAAFGPGILRADGEIDRAKLGRIVFNDEQQRKVLNAIVLPAVRKKMLAEKEAHIRSGAKTVVLDIPLLFESGLTHWVDKVLVVYVDDDVQLRRLMARNGFTEEEALARIRSQWPSAEKVKRADAVIDNNGTIEETRRQLLAILHQWDALGKGGSGHHHHHH

SEQ ID NO: 3151 - DNA, 639 bp, synthetic construct
  misc_feature 1..639: note = Variant of 3'O-kinase
  source 1..639: mol_type = other DNA
atggcgtttaccattggtttaacaggagggatcgcagtaggcaaatcgactgtgagtgccatgatgcgtgaactgggtctgccggtcatcgatgctgacgaggcagcccgcgaactgatgcgtccaggcgaagaagcttatcgccagattgtagctgcgttcggtccgggcattcttcgtgccgatggcgagatcgatcgcgccaaattgggtgctatcgtgtttaacgacgaacaacaacgtaaggtgctgaatgcgattgtactgcctgcagtccgtaagaagatgctcgctgagaaagaagctcatatccgctcaggcgccaagacggttgtgctggatatcccgctgctgttcgaatccggattgtggcattgggtcgacaaagtgctcgtggtgtacgtcgatgatgatgttcagttacgccgccttatggcacgtaacgggtttaccgaagaagaagctatggcccgcattcgttcacagtggcccatggccgagaaagttaaacgtgcagacgctgtaatcgacaataatggcacgattgaagaaacccgccgccagctgctggccattttacaccagtgggatgcactgggtaagggtggctccggccaccatcatcaccatcactaatga

SEQ ID NO: 3152 - protein, 211 aa, synthetic construct
  REGION 1..211: note = Variant of 3'O-kinase
MAFTIGLTGGIAVGKSTVSAMMRELGLPVIDADEAARELMRPGEEAYRQIVAAFGPGILRADGEIDRAKLGAIVFNDEQQRKVLNAIVLPAVRKKMLAEKEAHIRSGAKTVVLDIPLLFESGLWHWVDKVLVVYVDDDVQLRRLMARNGFTEEEAMARIRSQWPMAEKVKRADAVIDNNGTIEETRRQLLAILHQWDALGKGGSGHHHHHH

SEQ ID NO: 3153 - DNA, 639 bp, synthetic construct
  misc_feature 1..639: note = Variant of 3'O-kinase
  source 1..639: mol_type = other DNA
atggcgtttaccattggtttaacaggagggatcgcatcgggcaaatcgactgtgagtgccatgatgcgtgaactgggtctgccggtcatcgatgctgacgaggcaacccgcgaagtgatgcgtccaggcgaagaagcttatcgccagattgtagctgcgttcggtccgggcattcttcgtgccgatggcgagatcgatcgcgccaaattgggtcgtatcaagtttaacgacgaacaacaacgtaaggtgctgaatgcgattgtaagtcctgcagtctataagaagatgctcgctgagaaagaagctcatatccgctcaggcgccaagacggttgtgctggatatcccgctgctgttcgaatccggattgtggcattgggtcgacaaagtgctcgtggtgtacgtcgatgatgatgttcagttacgccgccttatggcacgtaacgggtttaccgaagaagaagctatggcccgcattcgttcacagtggcccatggccgagaaagttaaacgtgcagacgctgtaatcgacaataatggcacgattgaagaaacccgccgccagctgctggccattttacaccagtgggatgcactgggtaagggtggctccggccaccatcatcaccatcactaatga

SEQ ID NO: 3154 - protein, 211 aa, synthetic construct
  REGION 1..211: note = Variant of 3'O-kinase
MAFTIGLTGGIASGKSTVSAMMRELGLPVIDADEATREVMRPGEEAYRQIVAAFGPGILRADGEIDRAKLGRIKFNDEQQRKVLNAIVSPAVYKKMLAEKEAHIRSGAKTVVLDIPLLFESGLWHWVDKVLVVYVDDDVQLRRLMARNGFTEEEAMARIRSQWPMAEKVKRADAVIDNNGTIEETRRQLLAILHQWDALGKGGSGHHHHHH

SEQ ID NO: 3155 - DNA, 639 bp, synthetic construct
  misc_feature 1..639: note = Variant of 3'O-kinase
  source 1..639: mol_type = other DNA
atggcgtttaccattggtttaacaggagggatcgcagtaggcaaatcgactgtgagtgccatgatgcgtgaactgggtctgccggtcatcgatgctgacgaggcagcacgcgccgttgttcgtccaggcgaagaagcttatcgccagattgtagctgcgttcggtccgggcattcttcgtgccgatggcgagatcgatcgcgccaaattgggtgctatcaagtttaacgacgaacaacaacgtaaggtgctgaatgcgattgtactgcctgcagtctataagaagatgctcgctgagaaagaagctcatatccgctcaggcgccaagacggttgtgctggatatcccgctgctgttcgaatccggattgacccattgggtcgacaaagtgctcgtggtgtacgtcgatgatgatgttcagttacgccgccttatggcacgtaacgggtttaccgaagaagaagctctggcccgcattcgttcacagtggcccatggccgagaaagttaaacgtgcagacgctgtaatcgacaataatggcacgattgaagaaacccgccgccagctgctggccattttacaccagtgggatgcactgggtaagggtggctccggccaccatcatcaccatcactaatga

SEQ ID NO: 3156 - protein, 211 aa, synthetic construct
  REGION 1..211: note = Variant of 3'O-kinase
MAFTIGLTGGIAVGKSTVSAMMRELGLPVIDADEAARAVVRPGEEAYRQIVAAFGPGILRADGEIDRAKLGAIKFNDEQQRKVLNAIVLPAVYKKMLAEKEAHIRSGAKTVVLDIPLLFESGLTHWVDKVLVVYVDDDVQLRRLMARNGFTEEEALARIRSQWPMAEKVKRADAVIDNNGTIEETRRQLLAILHQWDALGKGGSGHHHHHH

SEQ ID NO: 3157 - DNA, 639 bp, synthetic construct
  misc_feature 1..639: note = Variant of 3'O-kinase
  source 1..639: mol_type = other DNA
atggcgtttaccattggtttaacaggagggatcgcatcgggcaaatcgactgtgagtgccatgatgcgtgaactgggtctgccggtcatcgatgctgacgaggcagcacgcgccgttgttcgtccaggcgaagaagcttatcgccagattgtagctgcgttcggtccgggcattcttcgtgccgatggcgagatcgatcgcgccaaattgggtgctatcgtgtttgctgacgaacaacaacgtaaggtgctgaatgcgattgtactgcctgcagtccgtaagaagatgctcgctgagaaagaagctcatatccgctcaggcgccaagacggttgtgctggatatcccgctgctgttcgaatccggattggttcattgggtcgacaaagtgctcgtggtgtacgtcgatgatgatgttcagttacgccgccttatggcacgtaacgggtttaccgaagaagaagctctggcccgcattcgttcacagtggcccagtgccgagaaagttaaacgtgcagacgctgtaatcgacaataatggcacgattgaagaaacccgccgccagctgctggccattttacaccagtgggatgcactgggtaagggtggctccggccaccatcatcaccatcactaatga

SEQ ID NO: 3158 - protein, 211 aa, synthetic construct
  REGION 1..211: note = Variant of 3'O-kinase
MAFTIGLTGGIASGKSTVSAMMRELGLPVIDADEAARAVVRPGEEAYRQIVAAFGPGILRADGEIDRAKLGAIVFADEQQRKVLNAIVLPAVRKKMLAEKEAHIRSGAKTVVLDIPLLFESGLVHWVDKVLVVYVDDDVQLRRLMARNGFTEEEALARIRSQWPSAEKVKRADAVIDNNGTIEETRRQLLAILHQWDALGKGGSGHHHHHH

SEQ ID NO: 3159 - DNA, 639 bp, synthetic construct
  misc_feature 1..639: note = Variant of 3'O-kinase
  source 1..639: mol_type = other DNA
atggcgtttaccattggtttaacaggagggatcgcagcgggcaaatcgactgtgagtgccatgatgcgtgaactgggtctgccggtcatcgatgctgacgaggcagcccgcgaagtgatgcgtccaggcgaagaagcttatcgccagattgtagctgcgttcggtccgggcattcttcgtgccgatggcgagatcgatcgcgccaaattgggtgctatcgtgtttaacgacgaacaacaacgtaaggtgctgaatgcgattgtaggtcctgcagtccgtaagaagatgctcgctgagaaagaagctcatatccgctcaggcgccaagacggttgtgctggatatcccgctgctgttcgaatccggattgacccattgggtcgacaaagtgctcgtggtgtacgtcgatgatgatgttcagttacgccgccttatggcacgtaacgggtttaccgaagaagaagctctggcccgcattcgttcacagtggcccatggccgagaaagttaaacgtgcagacgctgtaatcgacaataatggcacgattgaagaaacccgccgccagctgctggccattttacaccagtgggatgcactgggtaagggtggctccggccaccatcatcaccatcactaatga

SEQ ID NO: 3160 - protein, 211 aa, synthetic construct
  REGION 1..211: note = Variant of 3'O-kinase
MAFTIGLTGGIAAGKSTVSAMMRELGLPVIDADEAAREVMRPGEEAYRQIVAAFGPGILRADGEIDRAKLGAIVFNDEQQRKVLNAIVGPAVRKKMLAEKEAHIRSGAKTVVLDIPLLFESGLTHWVDKVLVVYVDDDVQLRRLMARNGFTEEEALARIRSQWPMAEKVKRADAVIDNNGTIEETRRQLLAILHQWDALGKGGSGHHHHHH

SEQ ID NO: 3161 - DNA, 639 bp, synthetic construct
  misc_feature 1..639: note = Variant of 3'O-kinase
  source 1..639: mol_type = other DNA
atggcgtttaccattggtttaacaggagggatcgcagcgggcaaatcgactgtgagtgccatgatgcgtgaactgggtctgccggtcatcgatgctgacgaggcaacccgcgaagtgatgcgtccaggcgaagaagcttatcgccagattgtagctgcgttcggtccgggcattcttcgtgccgatggcgagatcgatcgcgccaaattgggtcgtatcgtgtttgctgacgaacaacaacgtaaggtgctgaatgcgattgtaggtcctgcagtccgtaagaagatgctcgctgagaaagaagctcatatccgctcaggcgccaagacggttgtgctggatatcccgctgctgttcgaatccggattgactcattgggtcgacaaagtgctcgtggtgtacgtcgatgatgatgttcagttacgccgccttatggcacgtaacgggtttaccgaagaagaagctctggcccgcattcgttcacagtggcccatggccgagaaagttaaacgtgcagacgctgtaatcgacaataatggcacgattgaagaaacccgccgccagctgctggccattttacaccagtgggatgcactgggtaagggtggctccggccaccatcatcaccatcactaatga

SEQ ID NO: 3162 - protein, 211 aa, synthetic construct
  REGION 1..211: note = Variant of 3'O-kinase
MAFTIGLTGGIAAGKSTVSAMMRELGLPVIDADEATREVMRPGEEAYRQIVAAFGPGILRADGEIDRAKLGRIVFADEQQRKVLNAIVGPAVRKKMLAEKEAHIRSGAKTVVLDIPLLFESGLTHWVDKVLVVYVDDDVQLRRLMARNGFTEEEALARIRSQWPMAEKVKRADAVIDNNGTIEETRRQLLAILHQWDALGKGGSGHHHHHH

SEQ ID NO: 3163 - DNA, 639 bp, synthetic construct
  misc_feature 1..639: note = Variant of 3'O-kinase
  source 1..639: mol_type = other DNA
atggcgtttaccattggtttaacaggagggatcgcagtaggcaaatcgactgtgagtgccatgatgcgtgaactgggtctgccggtcatcgatgctgacgaggcagcccgcgaactgatgcgtccaggcgaagaagcttatcgccagattgtagctgcgttcggtccgggcattcttcgtgccgatggcgagatcgatcgcgccaaattgggtcgtatcgtgtttgctgacgaacaacaacgtaaggtgctgaatgcgattgtacaccctgcagtctataagaagatgctcgctgagaaagaagctcatatccgctcaggcgccaagacggttgtgctggatatcccgctgctgttcgaatccggattgacccattgggtcgacaaagtgctcgtggtgtacgtcgatgatgatgttcagttacgccgccttatggcacgtaacgggtttaccgaagaagaagctctggcccgcattcgttcacagtggcccagtgccgagaaagttaaacgtgcagacgctgtaatcgacaataatggcacgattgaagaaacccgccgccagctgctggccattttacaccagtgggatgcactgggtaagggtggctccggccaccatcatcaccatcactaatga

SEQ ID NO: 3164 - protein, 211 aa, synthetic construct
  REGION 1..211: note = Variant of 3'O-kinase
MAFTIGLTGGIAVGKSTVSAMMRELGLPVIDADEAARELMRPGEEAYRQIVAAFGPGILRADGEIDRAKLGRIVFADEQQRKVLNAIVHPAVYKKMLAEKEAHIRSGAKTVVLDIPLLFESGLTHWVDKVLVVYVDDDVQLRRLMARNGFTEEEALARIRSQWPSAEKVKRADAVIDNNGTIEETRRQLLAILHQWDALGKGGSGHHHHHH

SEQ ID NO: 3165 - DNA, 639 bp, synthetic construct
  misc_feature 1..639: note = Variant of 3'O-kinase
  source 1..639: mol_type = other DNA
atggcgtttaccattggtttaacaggagggatcgcatcgggcaaatcgactgtgagtgccatgatgcgtgaactgggtctgccggtcatcgatgctgacgaggcagcacgcgccgttgttcgtccaggcgaagaagcttatcgccagattgtagctgcgttcggtccgggcattcttcgtgccgatggcgagatcgatcgcgccaaattgggtgctatcaagtttaacgacgaacaacaacgtaaggtgctgaatgcgattgtactgcctgcagtctataagaagatgctcgctgagaaagaagctcatatccgctcaggcgccaagacggttgtgctggatatcccgctgctgttcgaatccggattgactcattgggtcgacaaagtgctcgtggtgtacgtcgatgatgatgttcagttacgccgccttatggcacgtaacgggtttaccgaagaagaagctatggcccgcattcgttcacagtggcccatggccgagaaagttaaacgtgcagacgctgtaatcgacaataatggcacgattgaagaaacccgccgccagctgctggccattttacaccagtgggatgcactgggtaagggtggctccggccaccatcatcaccatcactaatga

SEQ ID NO: 3166 - protein, 211 aa, synthetic construct
  REGION 1..211: note = Variant of 3'O-kinase
MAFTIGLTGGIASGKSTVSAMMRELGLPVIDADEAARAVVRPGEEAYRQIVAAFGPGILRADGEIDRAKLGAIKFNDEQQRKVLNAIVLPAVYKKMLAEKEAHIRSGAKTVVLDIPLLFESGLTHWVDKVLVVYVDDDVQLRRLMARNGFTEEEAMARIRSQWPMAEKVKRADAVIDNNGTIEETRRQLLAILHQWDALGKGGSGHHHHHH

SEQ ID NO: 3167 - DNA, 639 bp, synthetic construct
  misc_feature 1..639: note = Variant of 3'O-kinase
  source 1..639: mol_type = other DNA
atggcgtttaccattggtttaacaggagggatcgcagcgggcaaatcgactgtgagtgccatgatgcgtgaactgggtctgccggtcatcgatgctgacgaggcaacccgcgcagtgatgcgtccaggcgaagaagcttatcgccagattgtagctgcgttcggtccgggcattcttcgtgccgatggcgagatcgatcgcgccaaattgggtcgtatcaagtttgctgacgaacaacaacgtaaggtgctgaatgcgattgtacaccctgcagtctataagaagatgctcgctgagaaagaagctcatatccgctcaggcgccaagacggttgtgctggatatcccgctgctgttcgaatccggattgacccattgggtcgacaaagtgctcgtggtgtacgtcgatgatgatgttcagttacgccgccttatggcacgtaacgggtttaccgaagaagaagctctggcccgcattcgttcacagtggcccatggccgagaaagttaaacgtgcagacgctgtaatcgacaataatggcacgattgaagaaacccgccgccagctgctggccattttacaccagtgggatgcactgggtaagggtggctccggccaccatcatcaccatcactaatga

SEQ ID NO: 3168 - protein, 211 aa, synthetic construct
  REGION 1..211: note = Variant of 3'O-kinase
MAFTIGLTGGIAAGKSTVSAMMRELGLPVIDADEATRAVMRPGEEAYRQIVAAFGPGILRADGEIDRAKLGRIKFADEQQRKVLNAIVHPAVYKKMLAEKEAHIRSGAKTVVLDIPLLFESGLTHWVDKVLVVYVDDDVQLRRLMARNGFTEEEALARIRSQWPMAEKVKRADAVIDNNGTIEETRRQLLAILHQWDALGKGGSGHHHHHH

SEQ ID NO: 3169 - DNA, 639 bp, synthetic construct
  misc_feature 1..639: note = Variant of 3'O-kinase
  source 1..639: mol_type = other DNA
atggcgtttaccattggtttaacaggagggatcgcaagcggcaaatcgactgtgagtgccatgatgcgtgaactgggtctgccggtcatcgatgctgacgaggcagcacgcgccgttgttcgtccaggcgaagaagcttatcgccagattgtagctgcgttcggtccgggcattcttcgtgccgatggcgagatcgatcgcgccaaattgggtgctatcgtgtttgctgacgaacaacaacgtaaggtgctgaatgcgattgtaggtcctgcagtccgtaagaagatgctcgctgagaaagaagctcatatccgctcaggcgccaagacggttgtgctggatatcccgctgctgttcgaatccggattgacccattgggtcgacaaagtgctcgtggtgtacgtcgatgatgatgttcagttacgccgccttatggcacgtaacgggtttaccgaagaagaagctctggcccgcattcgttcacagtggcccagtgccgagaaagttaaacgtgcagacgctgtaatcgacaataatggcacgattgaagaaacccgccgccagctgctggccattttacaccagtgggatgcactgggtaagggtggctccggccaccatcatcaccatcactaatga

SEQ ID NO: 3170 - protein, 211 aa, synthetic construct
  REGION 1..211: note = Variant of 3'O-kinase
MAFTIGLTGGIASGKSTVSAMMRELGLPVIDADEAARAVVRPGEEAYRQIVAAFGPGILRADGEIDRAKLGAIVFADEQQRKVLNAIVGPAVRKKMLAEKEAHIRSGAKTVVLDIPLLFESGLTHWVDKVLVVYVDDDVQLRRLMARNGFTEEEALARIRSQWPSAEKVKRADAVIDNNGTIEETRRQLLAILHQWDALGKGGSGHHHHHH

SEQ ID NO: 3171 - DNA, 639 bp, synthetic construct
  misc_feature 1..639: note = Variant of 3'O-kinase
  source 1..639: mol_type = other DNA
atggcgtttaccattggtttaacaggagggatcgcagtaggcaaatcgactgtgagtgccatgatgcgtgaactgggtctgccggtcatcgatgctgacgaggcaacccgcgaagtgatgcgtccaggcgaagaagcttatcgccagattgtagctgcgttcggtccgggcattcttcgtgccgatggcgagatcgatcgcgccaaattgggtcgtatcaagtttaacgacgaacaacaacgtaaggtgctgaatgcgattgtacaccctgcagtctataagaagatgctcgctgagaaagaagctcatatccgctcaggcgccaagacggttgtgctggatatcccgctgctgttcgaatccggattgacccattgggtcgacaaagtgctcgtggtgtacgtcgatgatgatgttcagttacgccgccttatggcacgtaacgggtttaccgaagaagaagctatggcccgcattcgttcacagtggcccatggccgagaaagttaaacgtgcagacgctgtaatcgacaataatggcacgattgaagaaacccgccgccagctgctggccattttacaccagtgggatgcactgggtaagggtggctccggccaccatcatcaccatcactaatga

SEQ ID NO: 3172 - protein, 211 aa, synthetic construct
  REGION 1..211: note = Variant of 3'O-kinase
MAFTIGLTGGIAVGKSTVSAMMRELGLPVIDADEATREVMRPGEEAYRQIVAAFGPGILRADGEIDRAKLGRIKFNDEQQRKVLNAIVHPAVYKKMLAEKEAHIRSGAKTVVLDIPLLFESGLTHWVDKVLVVYVDDDVQLRRLMARNGFTEEEAMARIRSQWPMAEKVKRADAVIDNNGTIEETRRQLLAILHQWDALGKGGSGHHHHHH

SEQ ID NO: 3173 - DNA, 639 bp, synthetic construct
  misc_feature 1..639: note = Variant of 3'O-kinase
  source 1..639: mol_type = other DNA
atggcgtttaccattggtttaacaggagggatcgcagtaggcaaatcgactgtgagtgccatgatgcgtgaactgggtctgccggtcatcgatgctgacgaggcagcacgcgccgttgttcgtccaggcgaagaagcttatcgccagattgtagctgcgttcggtccgggcattcttcgtgccgatggcgagatcgatcgcgccaaattgggtcgtatcgtgtttgctgacgaacaacaacgtaaggtgctgaatgcgattgtaggtcctgcagtctataagaagatgctcgctgagaaagaagctcatatccgctcaggcgccaagacggttgtgctggatatcccgctgctgttcgaatccggattgactcattgggtcgacaaagtgctcgtggtgtacgtcgatgatgatgttcagttacgccgccttatggcacgtaacgggtttaccgaagaagaagctctggcccgcattcgttcacagtggcccatggccgagaaagttaaacgtgcagacgctgtaatcgacaataatggcacgattgaagaaacccgccgccagctgctggccattttacaccagtgggatgcactgggtaagggtggctccggccaccatcatcaccatcactaatga

SEQ ID NO: 3174 - protein, 211 aa, synthetic construct
  REGION 1..211: note = Variant of 3'O-kinase
MAFTIGLTGGIAVGKSTVSAMMRELGLPVIDADEAARAVVRPGEEAYRQIVAAFGPGILRADGEIDRAKLGRIVFADEQQRKVLNAIVGPAVYKKMLAEKEAHIRSGAKTVVLDIPLLFESGLTHWVDKVLVVYVDDDVQLRRLMARNGFTEEEALARIRSQWPMAEKVKRADAVIDNNGTIEETRRQLLAILHQWDALGKGGSGHHHHHH

SEQ ID NO: 3175 - DNA, 639 bp, synthetic construct
  misc_feature 1..639: note = Variant of 3'O-kinase
  source 1..639: mol_type = other DNA
atggcgtttaccattggtttaacaggagggatcgcagtaggcaaatcgactgtgagtgccatgatgcgtgaactgggtctgccggtcatcgatgctgacgaggcagcacgcgccgttgttcgtccaggcgaagaagcttatcgccagattgtagctgcgttcggtccgggcattcttcgtgccgatggcgagatcgatcgcgccaaattgggtcgtatcgtgtttaacgacgaacaacaacgtaaggtgctgaatgcgattgtactgcctgcagtccgtaagaagatgctcgctgagaaagaagctcatatccgctcaggcgccaagacggttgtgctggatatcccgctgctgttcgaatccggattgtggcattgggtcgacaaagtgctcgtggtgtacgtcgatgatgatgttcagttacgccgccttatggcacgtaacgggtttaccgaagaagaagctctggcccgcattcgttcacagtggcccatggccgagaaagttaaacgtgcagacgctgtaatcgacaataatggcacgattgaagaaacccgccgccagctgctggccattttacaccagtgggatgcactgggtaagggtggctccggccaccatcatcaccatcactaatga

SEQ ID NO: 3176 - protein, 211 aa, synthetic construct
  REGION 1..211: note = Variant of 3'O-kinase
MAFTIGLTGGIAVGKSTVSAMMRELGLPVIDADEAARAVVRPGEEAYRQIVAAFGPGILRADGEIDRAKLGRIVFNDEQQRKVLNAIVLPAVRKKMLAEKEAHIRSGAKTVVLDIPLLFESGLWHWVDKVLVVYVDDDVQLRRLMARNGFTEEEALARIRSQWPMAEKVKRADAVIDNNGTIEETRRQLLAILHQWDALGKGGSGHHHHHH

SEQ ID NO: 3177 - DNA, 639 bp, synthetic construct
  misc_feature 1..639: note = Variant of 3'O-kinase
  source 1..639: mol_type = other DNA
atggcgtttaccattggtttaacaggagggatcgcagcgggcaaatcgactgtgagtgccatgatgcgtgaactgggtctgccggtcatcgatgctgacgaggcagcacgcgccgttgttcgtccaggcgaagaagcttatcgccagattgtagctgcgttcggtccgggcattcttcgtgccgatggcgagatcgatcgcgccaaattgggtcgtatcgtgtttaacgacgaacaacaacgtaaggtgctgaatgcgattgtactgcctgcagtccgtaagaagatgctcgctgagaaagaagctcatatccgctcaggcgccaagacggttgtgctggatatcccgctgctgttcgaatccggattgtggcattgggtcgacaaagtgctcgtggtgtacgtcgatgatgatgttcagttacgccgccttatggcacgtaacgggtttaccgaagaagaagctctggcccgcattcgttcacagtggcccatggccgagaaagttaaacgtgcagacgctgtaatcgacaataatggcacgattgaagaaacccgccgccagctgctggccattttacaccagtgggatgcactgggtaagggtggctccggccaccatcatcaccatcactaatga

SEQ ID NO: 3178 - protein, 211 aa, synthetic construct
  REGION 1..211: note = Variant of 3'O-kinase
MAFTIGLTGGIAAGKSTVSAMMRELGLPVIDADEAARAVVRPGEEAYRQIVAAFGPGILRADGEIDRAKLGRIVFNDEQQRKVLNAIVLPAVRKKMLAEKEAHIRSGAKTVVLDIPLLFESGLWHWVDKVLVVYVDDDVQLRRLMARNGFTEEEALARIRSQWPMAEKVKRADAVIDNNGTIEETRRQLLAILHQWDALGKGGSGHHHHHH

SEQ ID NO: 3179 - DNA, 639 bp, synthetic construct
  misc_feature 1..639: note = Variant of 3'O-kinase
  source 1..639: mol_type = other DNA
atggcgtttaccattggtttaacaggagggatcgcagtaggcaaatcgactgtgagtgccatgatgcgtgaactgggtctgccggtcatcgatgctgacgaggcagcacgcgccgttgttcgtccaggcgaagaagcttatcgccagattgtagctgcgttcggtccgggcattcttcgtgccgatggcgagatcgatcgcgccaaattgggtcgtatcaagtttgctgacgaacaacaacgtaaggtgctgaatgcgattgtactgcctgcagtctataagaagatgctcgctgagaaagaagctcatatccgctcaggcgccaagacggttgtgctggatatcccgctgctgttcgaatccggattgacccattgggtcgacaaagtgctcgtggtgtacgtcgatgatgatgttcagttacgccgccttatggcacgtaacgggtttaccgaagaagaagctctggcccgcattcgttcacagtggcccatggccgagaaagttaaacgtgcagacgctgtaatcgacaataatggcacgattgaagaaacccgccgccagctgctggccattttacaccagtgggatgcactgggtaagggtggctccggccaccatcatcaccatcactaatga

SEQ ID NO: 3180 - protein, 211 aa, synthetic construct
  REGION 1..211: note = Variant of 3'O-kinase
MAFTIGLTGGIAVGKSTVSAMMRELGLPVIDADEAARAVVRPGEEAYRQIVAAFGPGILRADGEIDRAKLGRIKFADEQQRKVLNAIVLPAVYKKMLAEKEAHIRSGAKTVVLDIPLLFESGLTHWVDKVLVVYVDDDVQLRRLMARNGFTEEEALARIRSQWPMAEKVKRADAVIDNNGTIEETRRQLLAILHQWDALGKGGSGHHHHHH

SEQ ID NO: 3181 - DNA, 639 bp, synthetic construct
  misc_feature 1..639: note = Variant of 3'O-kinase
  source 1..639: mol_type = other DNA
atggcgtttaccattggtttaacaggagggatcgcagcgggcaaatcgactgtgagtgccatgatgcgtgaactgggtctgccggtcatcgatgctgacgaggcagcccgcgcagtgatgcgtccaggcgaagaagcttatcgccagattgtagctgcgttcggtccgggcattcttcgtgccgatggcgagatcgatcgcgccaaattgggtcgtatcgtgtttgctgacgaacaacaacgtaaggtgctgaatgcgattgtactgcctgcagtccgtaagaagatgctcgctgagaaagaagctcatatccgctcaggcgccaagacggttgtgctggatatcccgctgctgttcgaatccggattgacccattgggtcgacaaagtgctcgtggtgtacgtcgatgatgatgttcagttacgccgccttatggcacgtaacgggtttaccgaagaagaagctctggcccgcattcgttcacagtggcccatggccgagaaagttaaacgtgcagacgctgtaatcgacaataatggcacgattgaagaaacccgccgccagctgctggccattttacaccagtgggatgcactgggtaagggtggctccggccaccatcatcaccatcactaatga

SEQ ID NO: 3182 - protein, 211 aa, synthetic construct
  REGION 1..211: note = Variant of 3'O-kinase
MAFTIGLTGGIAAGKSTVSAMMRELGLPVIDADEAARAVMRPGEEAYRQIVAAFGPGILRADGEIDRAKLGRIVFADEQQRKVLNAIVLPAVRKKMLAEKEAHIRSGAKTVVLDIPLLFESGLTHWVDKVLVVYVDDDVQLRRLMARNGFTEEEALARIRSQWPMAEKVKRADAVIDNNGTIEETRRQLLAILHQWDALGKGGSGHHHHHH

SEQ ID NO: 3183 - DNA, 639 bp, synthetic construct
  misc_feature 1..639: note = Variant of 3'O-kinase
  source 1..639: mol_type = other DNA
atggcgtttaccattggtttaacaggagggatcgcaagcggcaaatcgactgtgagtgccatgatgcgtgaactgggtctgccggtcatcgatgctgacgaggcaacccgcgaactgatgcgtccaggcgaagaagcttatcgccagattgtagctgcgttcggtccgggcattcttcgtgccgatggcgagatcgatcgcgccaaattgggtgctatcaagtttgctgacgaacaacaacgtaaggtgctgaatgcgattgtactgcctgcagtctataagaagatgctcgctgagaaagaagctcatatccgctcaggcgccaagacggttgtgctggatatcccgctgctgttcgaatccggattggttcattgggtcgacaaagtgctcgtggtgtacgtcgatgatgatgttcagttacgccgccttatggcacgtaacgggtttaccgaagaagaagctctggcccgcattcgttcacagtggcccatggccgagaaagttaaacgtgcagacgctgtaatcgacaataatggcacgattgaagaaacccgccgccagctgctggccattttacaccagtgggatgcactgggtaagggtggctccggccaccatcatcaccatcactaatga

SEQ ID NO: 3184 - protein, 211 aa, synthetic construct
  REGION 1..211: note = Variant of 3'O-kinase
MAFTIGLTGGIASGKSTVSAMMRELGLPVIDADEATRELMRPGEEAYRQIVAAFGPGILRADGEIDRAKLGAIKFADEQQRKVLNAIVLPAVYKKMLAEKEAHIRSGAKTVVLDIPLLFESGLVHWVDKVLVVYVDDDVQLRRLMARNGFTEEEALARIRSQWPMAEKVKRADAVIDNNGTIEETRRQLLAILHQWDALGKGGSGHHHHHH

SEQ ID NO: 3185 - DNA, 639 bp, synthetic construct
  misc_feature 1..639: note = Variant of 3'O-kinase
  source 1..639: mol_type = other DNA
atggcgtttaccattggtttaacaggagggatcgcagtaggcaaatcgactgtgagtgccatgatgcgtgaactgggtctgccggtcatcgatgctgacgaggcagcccgcgaagtgatgcgtccaggcgaagaagcttatcgccagattgtagctgcgttcggtccgggcattcttcgtgccgatggcgagatcgatcgcgccaaattgggtgctatcgtgtttaacgacgaacaacaacgtaaggtgctgaatgcgattgtaggtcctgcagtccgtaagaagatgctcgctgagaaagaagctcatatccgctcaggcgccaagacggttgtgctggatatcccgctgctgttcgaatccggattgactcattgggtcgacaaagtgctcgtggtgtacgtcgatgatgatgttcagttacgccgccttatggcacgtaacgggtttaccgaagaagaagctctggcccgcattcgttcacagtggcccatggccgagaaagttaaacgtgcagacgctgtaatcgacaataatggcacgattgaagaaacccgccgccagctgctggccattttacaccagtgggatgcactgggtaagggtggctccggccaccatcatcaccatcactaatga

SEQ ID NO: 3186 - protein, 211 aa, synthetic construct
  REGION 1..211: note = Variant of 3'O-kinase
MAFTIGLTGGIAVGKSTVSAMMRELGLPVIDADEAAREVMRPGEEAYRQIVAAFGPGILRADGEIDRAKLGAIVFNDEQQRKVLNAIVGPAVRKKMLAEKEAHIRSGAKTVVLDIPLLFESGLTHWVDKVLVVYVDDDVQLRRLMARNGFTEEEALARIRSQWPMAEKVKRADAVIDNNGTIEETRRQLLAILHQWDALGKGGSGHHHHHH

SEQ ID NO: 3187 - DNA, 639 bp, synthetic construct
  misc_feature 1..639: note = Variant of 3'O-kinase
  source 1..639: mol_type = other DNA
atggcgtttaccattggtttaacaggagggatcgcagtaggcaaatcgactgtgagtgccatgatgcgtgaactgggtctgccggtcatcgatgctgacgaggcagcacgcgccgttgttcgtccaggcgaagaagcttatcgccagattgtagctgcgttcggtccgggcattcttcgtgccgatggcgagatcgatcgcgccaaattgggtagtatcaagtttaacgacgaacaacaacgtaaggtgctgaatgcgattgtactgcctgcagtctataagaagatgctcgctgagaaagaagctcatatccgctcaggcgccaagacggttgtgctggatatcccgctgctgttcgaatccggattgactcattgggtcgacaaagtgctcgtggtgtacgtcgatgatgatgttcagttacgccgccttatggcacgtaacgggtttaccgaagaagaagctctggcccgcattcgttcacagtggcccatggccgagaaagttaaacgtgcagacgctgtaatcgacaataatggcacgattgaagaaacccgccgccagctgctggccattttacaccagtgggatgcactgggtaagggtggctccggccaccatcatcaccatcactaatga

SEQ ID NO: 3188 - protein, 211 aa, synthetic construct
  REGION 1..211: note = Variant of 3'O-kinase
MAFTIGLTGGIAVGKSTVSAMMRELGLPVIDADEAARAVVRPGEEAYRQIVAAFGPGILRADGEIDRAKLGSIKFNDEQQRKVLNAIVLPAVYKKMLAEKEAHIRSGAKTVVLDIPLLFESGLTHWVDKVLVVYVDDDVQLRRLMARNGFTEEEALARIRSQWPMAEKVKRADAVIDNNGTIEETRRQLLAILHQWDALGKGGSGHHHHHH

SEQ ID NO: 3189 - DNA, 639 bp, synthetic construct
  misc_feature 1..639: note = Variant of 3'O-kinase
  source 1..639: mol_type = other DNA
atggcgtttaccattggtttaacaggagggatcgcagtaggcaaatcgactgtgagtgccatgatgcgtgaactgggtctgccggtcatcgatgctgacgaggcaacccgcgaagtgatgcgtccaggcgaagaagcttatcgccagattgtagctgcgttcggtccgggcattcttcgtgccgatggcgagatcgatcgcgccaaattgggtgctatcgtgtttaacgacgaacaacaacgtaaggtgctgaatgcgattgtaggtcctgcagtccgtaagaagatgctcgctgagaaagaagctcatatccgctcaggcgccaagacggttgtgctggatatcccgctgctgttcgaatccggattgacccattgggtcgacaaagtgctcgtggtgtacgtcgatgatgatgttcagttacgccgccttatggcacgtaacgggtttaccgaagaagaagctctggcccgcattcgttcacagtggcccatggccgagaaagttaaacgtgcagacgctgtaatcgacaataatggcacgattgaagaaacccgccgccagctgctggccattttacaccagtgggatgcactgggtaagggtggctccggccaccatcatcaccatcactaatga

SEQ ID NO: 3190 - protein, 211 aa, synthetic construct
  REGION 1..211: note = Variant of 3'O-kinase
MAFTIGLTGGIAVGKSTVSAMMRELGLPVIDADEATREVMRPGEEAYRQIVAAFGPGILRADGEIDRAKLGAIVFNDEQQRKVLNAIVGPAVRKKMLAEKEAHIRSGAKTVVLDIPLLFESGLTHWVDKVLVVYVDDDVQLRRLMARNGFTEEEALARIRSQWPMAEKVKRADAVIDNNGTIEETRRQLLAILHQWDALGKGGSGHHHHHH

SEQ ID NO: 3191 - DNA, 639 bp, synthetic construct
  misc_feature 1..639: note = Variant of 3'O-kinase
  source 1..639: mol_type = other DNA
atggcgtttaccattggtttaacaggagggatcgcagcgggcaaatcgactgtgagtgccatgatgcgtgaactgggtctgccggtcatcgatgctgacgaggcagcacgcgccgttgttcgtccaggcgaagaagcttatcgccagattgtagctgcgttcggtccgggcattcttcgtgccgatggcgagatcgatcgcgccaaattgggtcgtatcgtgtttaacgacgaacaacaacgtaaggtgctgaatgcgattgtaagtcctgcagtctataagaagatgctcgctgagaaagaagctcatatccgctcaggcgccaagacggttgtgctggatatcccgctgctgttcgaatccggattggttcattgggtcgacaaagtgctcgtggtgtacgtcgatgatgatgttcagttacgccgccttatggcacgtaacgggtttaccgaagaagaagctatggcccgcattcgttcacagtggcccatggccgagaaagttaaacgtgcagacgctgtaatcgacaataatggcacgattgaagaaacccgccgccagctgctggccattttacaccagtgggatgcactgggtaagggtggctccggccaccatcatcaccatcactaatga

SEQ ID NO: 3192 - protein, 211 aa, synthetic construct
  REGION 1..211: note = Variant of 3'O-kinase
MAFTIGLTGGIAAGKSTVSAMMRELGLPVIDADEAARAVVRPGEEAYRQIVAAFGPGILRADGEIDRAKLGRIVFNDEQQRKVLNAIVSPAVYKKMLAEKEAHIRSGAKTVVLDIPLLFESGLVHWVDKVLVVYVDDDVQLRRLMARNGFTEEEAMARIRSQWPMAEKVKRADAVIDNNGTIEETRRQLLAILHQWDALGKGGSGHHHHHH

SEQ ID NO: 3193 - DNA, 639 bp, synthetic construct
  misc_feature 1..639: note = Variant of 3'O-kinase
  source 1..639: mol_type = other DNA
atggcgtttaccattggtttaacaggagggatcgcagcgggcaaatcgactgtgagtgccatgatgcgtgaactgggtctgccggtcatcgatgctgacgaggcagcacgcgccgttgttcgtccaggcgaagaagcttatcgccagattgtagctgcgttcggtccgggcattcttcgtgccgatggcgagatcgatcgcgccaaattgggtgctatcgtgtttaacgacgaacaacaacgtaaggtgctgaatgcgattgtactgcctgcagtccgtaagaagatgctcgctgagaaagaagctcatatccgctcaggcgccaagacggttgtgctggatatcccgctgctgttcgaatccggattgacccattgggtcgacaaagtgctcgtggtgtacgtcgatgatgatgttcagttacgccgccttatggcacgtaacgggtttaccgaagaagaagctctggcccgcattcgttcacagtggcccagtgccgagaaagttaaacgtgcagacgctgtaatcgacaataatggcacgattgaagaaacccgccgccagctgctggccattttacaccagtgggatgcactgggtaagggtggctccggccaccatcatcaccatcactaatga

SEQ ID NO: 3194 - protein, 211 aa, synthetic construct
  REGION 1..211: note = Variant of 3'O-kinase
MAFTIGLTGGIAAGKSTVSAMMRELGLPVIDADEAARAVVRPGEEAYRQIVAAFGPGILRADGEIDRAKLGAIVFNDEQQRKVLNAIVLPAVRKKMLAEKEAHIRSGAKTVVLDIPLLFESGLTHWVDKVLVVYVDDDVQLRRLMARNGFTEEEALARIRSQWPSAEKVKRADAVIDNNGTIEETRRQLLAILHQWDALGKGGSGHHHHHH

SEQ ID NO: 3195 - DNA, 639 bp, synthetic construct
  misc_feature 1..639: note = Variant of 3'O-kinase
  source 1..639: mol_type = other DNA
atggcgtttaccattggtttaacaggagggatcgcagtaggcaaatcgactgtgagtgccatgatgcgtgaactgggtctgccggtcatcgatgctgacgaggcagcacgcgccgttgttcgtccaggcgaagaagcttatcgccagattgtagctgcgttcggtccgggcattcttcgtgccgatggcgagatcgatcgcgccaaattgggtcgtatcgtgtttgctgacgaacaacaacgtaaggtgctgaatgcgattgtactgcctgcagtccgtaagaagatgctcgctgagaaagaagctcatatccgctcaggcgccaagacggttgtgctggatatcccgctgctgttcgaatccggattggttcattgggtcgacaaagtgctcgtggtgtacgtcgatgatgatgttcagttacgccgccttatggcacgtaacgggtttaccgaagaagaagctctggcccgcattcgttcacagtggcccatggccgagaaagttaaacgtgcagacgctgtaatcgacaataatggcacgattgaagaaacccgccgccagctgctggccattttacaccagtgggatgcactgggtaagggtggctccggccaccatcatcaccatcactaatga

SEQ ID NO: 3196 - protein, 211 aa, synthetic construct
  REGION 1..211: note = Variant of 3'O-kinase
MAFTIGLTGGIAVGKSTVSAMMRELGLPVIDADEAARAVVRPGEEAYRQIVAAFGPGILRADGEIDRAKLGRIVFADEQQRKVLNAIVLPAVRKKMLAEKEAHIRSGAKTVVLDIPLLFESGLVHWVDKVLVVYVDDDVQLRRLMARNGFTEEEALARIRSQWPMAEKVKRADAVIDNNGTIEETRRQLLAILHQWDALGKGGSGHHHHHH

SEQ ID NO: 3197 - DNA, 639 bp, synthetic construct
  misc_feature 1..639: note = Variant of 3'O-kinase
  source 1..639: mol_type = other DNA
atggcgtttaccattggtttaacaggagggatcgcatcgggcaaatcgactgtgagtgccatgatgcgtgaactgggtctgccggtcatcgatgctgacgaggcagcacgcgccgttgttcgtccaggcgaagaagcttatcgccagattgtagctgcgttcggtccgggcattcttcgtgccgatggcgagatcgatcgcgccaaattgggtgctatcgtgtttaacgacgaacaacaacgtaaggtgctgaatgcgattgtactgcctgcagtctataagaagatgctcgctgagaaagaagctcatatccgctcaggcgccaagacggttgtgctggatatcccgctgctgttcgaatccggattgtggcattgggtcgacaaagtgctcgtggtgtacgtcgatgatgatgttcagttacgccgccttatggcacgtaacgggtttaccgaagaagaagctctggcccgcattcgttcacagtggcccatggccgagaaagttaaacgtgcagacgctgtaatcgacaataatggcacgattgaagaaacccgccgccagctgctggccattttacaccagtgggatgcactgggtaagggtggctccggccaccatcatcaccatcactaatga

SEQ ID NO: 3198 - protein, 211 aa, synthetic construct
  REGION 1..211: note = Variant of 3'O-kinase
MAFTIGLTGGIASGKSTVSAMMRELGLPVIDADEAARAVVRPGEEAYRQIVAAFGPGILRADGEIDRAKLGAIVFNDEQQRKVLNAIVLPAVYKKMLAEKEAHIRSGAKTVVLDIPLLFESGLWHWVDKVLVVYVDDDVQLRRLMARNGFTEEEALARIRSQWPMAEKVKRADAVIDNNGTIEETRRQLLAILHQWDALGKGGSGHHHHHH

SEQ ID NO: 3199 - DNA, 639 bp, synthetic construct
  misc_feature 1..639: note = Variant of 3'O-kinase
  source 1..639: mol_type = other DNA
atggcgtttaccattggtttaacaggagggatcgcaagcggcaaatcgactgtgagtgccatgatgcgtgaactgggtctgccggtcatcgatgctgacgaggcagcacgcgccgttgttcgtccaggcgaagaagcttatcgccagattgtagctgcgttcggtccgggcattcttcgtgccgatggcgagatcgatcgcgccaaattgggtgctatcaagtttgctgacgaacaacaacgtaaggtgctgaatgcgattgtactgcctgcagtctataagaagatgctcgctgagaaagaagctcatatccgctcaggcgccaagacggttgtgctggatatcccgctgctgttcgaatccggattggttcattgggtcgacaaagtgctcgtggtgtacgtcgatgatgatgttcagttacgccgccttatggcacgtaacgggtttaccgaagaagaagctctggcccgcattcgttcacagtggcccatggccgagaaagttaaacgtgcagacgctgtaatcgacaataatggcacgattgaagaaacccgccgccagctgctggccattttacaccagtgggatgcactgggtaagggtggctccggccaccatcatcaccatcactaatga

SEQ ID NO: 3200 - protein, 211 aa, synthetic construct
  REGION 1..211: note = Variant of 3'O-kinase
MAFTIGLTGGIASGKSTVSAMMRELGLPVIDADEAARAVVRPGEEAYRQIVAAFGPGILRADGEIDRAKLGAIKFADEQQRKVLNAIVLPAVYKKMLAEKEAHIRSGAKTVVLDIPLLFESGLVHWVDKVLVVYVDDDVQLRRLMARNGFTEEEALARIRSQWPMAEKVKRADAVIDNNGTIEETRRQLLAILHQWDALGKGGSGHHHHHH

SEQ ID NO: 3201 - DNA, 639 bp, synthetic construct
  misc_feature 1..639: note = Variant of 3'O-kinase
  source 1..639: mol_type = other DNA
atggcgtttaccattggtttaacaggagggatcgcagcgggcaaatcgactgtgagtgccatgatgcgtgaactgggtctgccggtcatcgatgctgacgaggcaacccgcgaagtgatgcgtccaggcgaagaagcttatcgccagattgtagctgcgttcggtccgggcattcttcgtgccgatggcgagatcgatcgcgccaaattgggtgctatcgtgtttgctgacgaacaacaacgtaaggtgctgaatgcgattgtaagtcctgcagtctataagaagatgctcgctgagaaagaagctcatatccgctcaggcgccaagacggttgtgctggatatcccgctgctgttcgaatccggattgactcattgggtcgacaaagtgctcgtggtgtacgtcgatgatgatgttcagttacgccgccttatggcacgtaacgggtttaccgaagaagaagctctggcccgcattcgttcacagtggcccatggccgagaaagttaaacgtgcagacgctgtaatcgacaataatggcacgattgaagaaacccgccgccagctgctggccattttacaccagtgggatgcactgggtaagggtggctccggccaccatcatcaccatcactaatga

SEQ ID NO: 3202 - protein, 211 aa, synthetic construct
  REGION 1..211: note = Variant of 3'O-kinase
MAFTIGLTGGIAAGKSTVSAMMRELGLPVIDADEATREVMRPGEEAYRQIVAAFGPGILRADGEIDRAKLGAIVFADEQQRKVLNAIVSPAVYKKMLAEKEAHIRSGAKTVVLDIPLLFESGLTHWVDKVLVVYVDDDVQLRRLMARNGFTEEEALARIRSQWPMAEKVKRADAVIDNNGTIEETRRQLLAILHQWDALGKGGSGHHHHHH

SEQ ID NO: 3203 - DNA, 639 bp, synthetic construct
  misc_feature 1..639: note = Variant of 3'O-kinase
  source 1..639: mol_type = other DNA
atggcgtttaccattggtttaacaggagggatcgcagcgggcaaatcgactgtgagtgccatgatgcgtgaactgggtctgccggtcatcgatgctgacgaggcaacccgcgcagtgatgcgtccaggcgaagaagcttatcgccagattgtagctgcgttcggtccgggcattcttcgtgccgatggcgagatcgatcgcgccaaattgggtgctatcgtgtttaacgacgaacaacaacgtaaggtgctgaatgcgattgtacaccctgcagtctataagaagatgctcgctgagaaagaagctcatatccgctcaggcgccaagacggttgtgctggatatcccgctgctgttcgaatccggattggttcattgggtcgacaaagtgctcgtggtgtacgtcgatgatgatgttcagttacgccgccttatggcacgtaacgggtttaccgaagaagaagctctggcccgcattcgttcacagtggcccatggccgagaaagttaaacgtgcagacgctgtaatcgacaataatggcacgattgaagaaacccgccgccagctgctggccattttacaccagtgggatgcactgggtaagggtggctccggccaccatcatcaccatcactaatga

SEQ ID NO: 3204 - protein, 211 aa, synthetic construct
  REGION 1..211: note = Variant of 3'O-kinase
MAFTIGLTGGIAAGKSTVSAMMRELGLPVIDADEATRAVMRPGEEAYRQIVAAFGPGILRADGEIDRAKLGAIVFNDEQQRKVLNAIVHPAVYKKMLAEKEAHIRSGAKTVVLDIPLLFESGLVHWVDKVLVVYVDDDVQLRRLMARNGFTEEEALARIRSQWPMAEKVKRADAVIDNNGTIEETRRQLLAILHQWDALGKGGSGHHHHHH

SEQ ID NO: 3205 - DNA, 639 bp, synthetic construct
  misc_feature 1..639: note = Variant of 3'O-kinase
  source 1..639: mol_type = other DNA
atggcgtttaccattggtttaacaggagggatcgcagtaggcaaatcgactgtgagtgccatgatgcgtgaactgggtctgccggtcatcgatgctgacgaggcagcacgcgccgttgttcgtccaggcgaagaagcttatcgccagattgtagctgcgttcggtccgggcattcttcgtgccgatggcgagatcgatcgcgccaaattgggtcgtatcgtgtttaacgacgaacaacaacgtaaggtgctgaatgcgattgtacaccctgcagtctataagaagatgctcgctgagaaagaagctcatatccgctcaggcgccaagacggttgtgctggatatcccgctgctgttcgaatccggattgtggcattgggtcgacaaagtgctcgtggtgtacgtcgatgatgatgttcagttacgccgccttatggcacgtaacgggtttaccgaagaagaagctctggcccgcattcgttcacagtggcccatggccgagaaagttaaacgtgcagacgctgtaatcgacaataatggcacgattgaagaaacccgccgccagctgctggccattttacaccagtgggatgcactgggtaagggtggctccggccaccatcatcaccatcactaatga

SEQ ID NO: 3206 - protein, 211 aa, synthetic construct
  REGION 1..211: note = Variant of 3'O-kinase
MAFTIGLTGGIAVGKSTVSAMMRELGLPVIDADEAARAVVRPGEEAYRQIVAAFGPGILRADGEIDRAKLGRIVFNDEQQRKVLNAIVHPAVYKKMLAEKEAHIRSGAKTVVLDIPLLFESGLWHWVDKVLVVYVDDDVQLRRLMARNGFTEEEALARIRSQWPMAEKVKRADAVIDNNGTIEETRRQLLAILHQWDALGKGGSGHHHHHH

SEQ ID NO: 3207 - DNA, 639 bp, synthetic construct
  misc_feature 1..639: note = Variant of 3'O-kinase
  source 1..639: mol_type = other DNA
atggcgtttaccattggtttaacaggagggatcgcatcgggcaaatcgactgtgagtgccatgatgcgtgaactgggtctgccggtcatcgatgctgacgaggcagcccgcgaagtgatgcgtccaggcgaagaagcttatcgccagattgtagctgcgttcggtccgggcattcttcgtgccgatggcgagatcgatcgcgccaaattgggtgctatcgtgtttgctgacgaacaacaacgtaaggtgctgaatgcgattgtactgcctgcagtccgtaagaagatgctcgctgagaaagaagctcatatccgctcaggcgccaagacggttgtgctggatatcccgctgctgttcgaatccggattgtggcattgggtcgacaaagtgctcgtggtgtacgtcgatgatgatgttcagttacgccgccttatggcacgtaacgggtttaccgaagaagaagctctggcccgcattcgttcacagtggcccatggccgagaaagttaaacgtgcagacgctgtaatcgacaataatggcacgattgaagaaacccgccgccagctgctggccattttacaccagtgggatgcactgggtaagggtggctccggccaccatcatcaccatcactaatga

SEQ ID NO: 3208 - protein, 211 aa, synthetic construct
  REGION 1..211: note = Variant of 3'O-kinase
MAFTIGLTGGIASGKSTVSAMMRELGLPVIDADEAAREVMRPGEEAYRQIVAAFGPGILRADGEIDRAKLGAIVFADEQQRKVLNAIVLPAVRKKMLAEKEAHIRSGAKTVVLDIPLLFESGLWHWVDKVLVVYVDDDVQLRRLMARNGFTEEEALARIRSQWPMAEKVKRADAVIDNNGTIEETRRQLLAILHQWDALGKGGSGHHHHHH

SEQ ID NO: 3209 - DNA, 639 bp, synthetic construct
  misc_feature 1..639: note = Variant of 3'O-kinase
  source 1..639: mol_type = other DNA
atggcgtttaccattggtttaacaggagggatcgcaagcggcaaatcgactgtgagtgccatgatgcgtgaactgggtctgccggtcatcgatgctgacgaggcagcacgcgccgttgttcgtccaggcgaagaagcttatcgccagattgtagctgcgttcggtccgggcattcttcgtgccgatggcgagatcgatcgcgccaaattgggtcgtatcaagtttaacgacgaacaacaacgtaaggtgctgaatgcgattgtactgcctgcagtctataagaagatgctcgctgagaaagaagctcatatccgctcaggcgccaagacggttgtgctggatatcccgctgctgttcgaatccggattggttcattgggtcgacaaagtgctcgtggtgtacgtcgatgatgatgttcagttacgccgccttatggcacgtaacgggtttaccgaagaagaagctctggcccgcattcgttcacagtggcccatggccgagaaagttaaacgtgcagacgctgtaatcgacaataatggcacgattgaagaaacccgccgccagctgctggccattttacaccagtgggatgcactgggtaagggtggctccggccaccatcatcaccatcactaatga

SEQ ID NO: 3210 - protein, 211 aa, synthetic construct
  REGION 1..211: note = Variant of 3'O-kinase
MAFTIGLTGGIASGKSTVSAMMRELGLPVIDADEAARAVVRPGEEAYRQIVAAFGPGILRADGEIDRAKLGRIKFNDEQQRKVLNAIVLPAVYKKMLAEKEAHIRSGAKTVVLDIPLLFESGLVHWVDKVLVVYVDDDVQLRRLMARNGFTEEEALARIRSQWPMAEKVKRADAVIDNNGTIEETRRQLLAILHQWDALGKGGSGHHHHHH

SEQ ID NO: 3211 - DNA, 639 bp, synthetic construct
  misc_feature 1..639: note = Variant of 3'O-kinase
  source 1..639: mol_type = other DNA
atggcgtttaccattggtttaacaggagggatcgcagtaggcaaatcgactgtgagtgccatgatgcgtgaactgggtctgccggtcatcgatgctgacgaggcagcacgcgcagtggtgcgtccaggcgaagaagcttatcgccagattgtagctgcgttcggtccgggcattcttcgtgccgatggcgagatcgatcgcgccaaattgggtcgtatcaagtttaacgacgaacaacaacgtaaggtgctgaatgcgattgtactgcctgcagtctataagaagatgctcgctgagaaagaagctcatatccgctcaggcgccaagacggttgtgctggatatcccgctgctgttcgaatccggattgacccattgggtcgacaaagtgctcgtggtgtacgtcgatgatgatgttcagttacgccgccttatggcacgtaacgggtttaccgaagaagaagctctggcccgcattcgttcacagtggcccatggccgagaaagttaaacgtgcagacgctgtaatcgacaataatggcacgattgaagaaacccgccgccagctgctggccattttacaccagtgggatgcactgggtaagggtggctccggccaccatcatcaccatcactaatga

SEQ ID NO: 3212 - protein, 211 aa, synthetic construct
  REGION 1..211: note = Variant of 3'O-kinase
MAFTIGLTGGIAVGKSTVSAMMRELGLPVIDADEAARAVVRPGEEAYRQIVAAFGPGILRADGEIDRAKLGRIKFNDEQQRKVLNAIVLPAVYKKMLAEKEAHIRSGAKTVVLDIPLLFESGLTHWVDKVLVVYVDDDVQLRRLMARNGFTEEEALARIRSQWPMAEKVKRADAVIDNNGTIEETRRQLLAILHQWDALGKGGSGHHHHHH

SEQ ID NO: 3213 - DNA, 639 bp, synthetic construct
  misc_feature 1..639: note = Variant of 3'O-kinase
  source 1..639: mol_type = other DNA
atggcgtttaccattggtttaacaggagggatcgcagtaggcaaatcgactgtgagtgccatgatgcgtgaactgggtctgccggtcatcgatgctgacgaggcagcacgcgccgttgttcgtccaggcgaagaagcttatcgccagattgtagctgcgttcggtccgggcattcttcgtgccgatggcgagatcgatcgcgccaaattgggtgctatcgtgtttgctgacgaacaacaacgtaaggtgctgaatgcgattgtactgcctgcagtctataagaagatgctcgctgagaaagaagctcatatccgctcaggcgccaagacggttgtgctggatatcccgctgctgttcgaatccggattgactcattgggtcgacaaagtgctcgtggtgtacgtcgatgatgatgttcagttacgccgccttatggcacgtaacgggtttaccgaagaagaagctatggcccgcattcgttcacagtggcccagtgccgagaaagttaaacgtgcagacgctgtaatcgacaataatggcacgattgaagaaacccgccgccagctgctggccattttacaccagtgggatgcactgggtaagggtggctccggccaccatcatcaccatcactaatga

SEQ ID NO: 3214 - protein, 211 aa, synthetic construct
  REGION 1..211: note = Variant of 3'O-kinase
MAFTIGLTGGIAVGKSTVSAMMRELGLPVIDADEAARAVVRPGEEAYRQIVAAFGPGILRADGEIDRAKLGAIVFADEQQRKVLNAIVLPAVYKKMLAEKEAHIRSGAKTVVLDIPLLFESGLTHWVDKVLVVYVDDDVQLRRLMARNGFTEEEAMARIRSQWPSAEKVKRADAVIDNNGTIEETRRQLLAILHQWDALGKGGSGHHHHHH

SEQ ID NO: 3215 - DNA, 639 bp, synthetic construct
  misc_feature 1..639: note = Variant of 3'O-kinase
  source 1..639: mol_type = other DNA
atggcgtttaccattggtttaacaggagggatcgcatcgggcaaatcgactgtgagtgccatgatgcgtgaactgggtctgccggtcatcgatgctgacgaggcagcccgcgaagtggtgcgtccaggcgaagaagcttatcgccagattgtagctgcgttcggtccgggcattcttcgtgccgatggcgagatcgatcgcgccaaattgggtcgtatcgtgtttaacgacgaacaacaacgtaaggtgctgaatgcgattgtactgcctgcagtctataagaagatgctcgctgagaaagaagctcatatccgctcaggcgccaagacggttgtgctggatatcccgctgctgttcgaatccggattggttcattgggtcgacaaagtgctcgtggtgtacgtcgatgatgatgttcagttacgccgccttatggcacgtaacgggtttaccgaagaagaagctctggcccgcattcgttcacagtggcccatggccgagaaagttaaacgtgcagacgctgtaatcgacaataatggcacgattgaagaaacccgccgccagctgctggccattttacaccagtgggatgcactgggtaagggtggctccggccaccatcatcaccatcactaatga

SEQ ID NO: 3216 - protein, 211 aa, synthetic construct
  REGION 1..211: note = Variant of 3'O-kinase
MAFTIGLTGGIASGKSTVSAMMRELGLPVIDADEAAREVVRPGEEAYRQIVAAFGPGILRADGEIDRAKLGRIVFNDEQQRKVLNAIVLPAVYKKMLAEKEAHIRSGAKTVVLDIPLLFESGLVHWVDKVLVVYVDDDVQLRRLMARNGFTEEEALARIRSQWPMAEKVKRADAVIDNNGTIEETRRQLLAILHQWDALGKGGSGHHHHHH

SEQ ID NO: 3217 - DNA, 639 bp, synthetic construct
  misc_feature 1..639: note = Variant of 3'O-kinase
  source 1..639: mol_type = other DNA
atggcgtttaccattggtttaacaggagggatcgcagtaggcaaatcgactgtgagtgccatgatgcgtgaactgggtctgccggtcatcgatgctgacgaggcagcacgcgccgttgttcgtccaggcgaagaagcttatcgccagattgtagctgcgttcggtccgggcattcttcgtgccgatggcgagatcgatcgcgccaaattgggtgctatcgtgtttgctgacgaacaacaacgtaaggtgctgaatgcgattgtaggtcctgcagtctataagaagatgctcgctgagaaagaagctcatatccgctcaggcgccaagacggttgtgctggatatcccgctgctgttcgaatccggattgtggcattgggtcgacaaagtgctcgtggtgtacgtcgatgatgatgttcagttacgccgccttatggcacgtaacgggtttaccgaagaagaagctctggcccgcattcgttcacagtggcccatggccgagaaagttaaacgtgcagacgctgtaatcgacaataatggcacgattgaagaaacccgccgccagctgctggccattttacaccagtgggatgcactgggtaagggtggctccggccaccatcatcaccatcactaatga

SEQ ID NO: 3218 - protein, 211 aa, synthetic construct
  REGION 1..211: note = Variant of 3'O-kinase
MAFTIGLTGGIAVGKSTVSAMMRELGLPVIDADEAARAVVRPGEEAYRQIVAAFGPGILRADGEIDRAKLGAIVFADEQQRKVLNAIVGPAVYKKMLAEKEAHIRSGAKTVVLDIPLLFESGLWHWVDKVLVVYVDDDVQLRRLMARNGFTEEEALARIRSQWPMAEKVKRADAVIDNNGTIEETRRQLLAILHQWDALGKGGSGHHHHHH

SEQ ID NO: 3219 - DNA, 639 bp, synthetic construct
  misc_feature 1..639: note = Variant of 3'O-kinase
  source 1..639: mol_type = other DNA
atggcgtttaccattggtttaacaggagggatcgcagtaggcaaatcgactgtgagtgccatgatgcgtgaactgggtctgccggtcatcgatgctgacgaggcagcccgcgcagtgatgcgtccaggcgaagaagcttatcgccagattgtagctgcgttcggtccgggcattcttcgtgccgatggcgagatcgatcgcgccaaattgggtgctatcgtgtttaacgacgaacaacaacgtaaggtgctgaatgcgattgtacatcctgcagtccgcaagaagatgctcgctgagaaagaagctcatatccgctcaggcgccaagacggttgtgctggatatcccgctgctgttcgaatccggattgacccattgggtcgacaaagtgctcgtggtgtacgtcgatgatgatgttcagttacgccgccttatggcacgtaacgggtttaccgaagaagaagctctggcccgcattcgttcacagtggcccatggccgagaaagttaaacgtgcagacgctgtaatcgacaataatggcacgattgaagaaacccgccgccagctgctggccattttacaccagtgggatgcactgggtaagggtggctccggccaccatcatcaccatcactaatga

SEQ ID NO: 3220 - protein, 211 aa, synthetic construct
  REGION 1..211: note = Variant of 3'O-kinase
MAFTIGLTGGIAVGKSTVSAMMRELGLPVIDADEAARAVMRPGEEAYRQIVAAFGPGILRADGEIDRAKLGAIVFNDEQQRKVLNAIVHPAVRKKMLAEKEAHIRSGAKTVVLDIPLLFESGLTHWVDKVLVVYVDDDVQLRRLMARNGFTEEEALARIRSQWPMAEKVKRADAVIDNNGTIEETRRQLLAILHQWDALGKGGSGHHHHHH

SEQ ID NO: 3221 - DNA, 639 bp, synthetic construct
  misc_feature 1..639: note = Variant of 3'O-kinase
  source 1..639: mol_type = other DNA
atggcgtttaccattggtttaacaggagggatcgcatcgggcaaatcgactgtgagtgccatgatgcgtgaactgggtctgccggtcatcgatgctgacgaggcagcccgcgccgttgttcgtccaggcgaagaagcttatcgccagattgtagctgcgttcggtccgggcattcttcgtgccgatggcgagatcgatcgcgccaaattgggtcgtatcaagtttaacgacgaacaacaacgtaaggtgctgaatgcgattgtaggtcctgcagtctataagaagatgctcgctgagaaagaagctcatatccgctcaggcgccaagacggttgtgctggatatcccgctgctgttcgaatccggattgacccattgggtcgacaaagtgctcgtggtgtacgtcgatgatgatgttcagttacgccgccttatggcacgtaacgggtttaccgaagaagaagctctggcccgcattcgttcacagtggcccatggccgagaaagttaaacgtgcagacgctgtaatcgacaataatggcacgattgaagaaacccgccgccagctgctggccattttacaccagtgggatgcactgggtaagggtggctccggccaccatcatcaccatcactaatga

SEQ ID NO: 3222 - protein, 211 aa, synthetic construct
  REGION 1..211: note = Variant of 3'O-kinase
MAFTIGLTGGIASGKSTVSAMMRELGLPVIDADEAARAVVRPGEEAYRQIVAAFGPGILRADGEIDRAKLGRIKFNDEQQRKVLNAIVGPAVYKKMLAEKEAHIRSGAKTVVLDIPLLFESGLTHWVDKVLVVYVDDDVQLRRLMARNGFTEEEALARIRSQWPMAEKVKRADAVIDNNGTIEETRRQLLAILHQWDALGKGGSGHHHHHH

SEQ ID NO: 3223 - DNA, 639 bp, synthetic construct
  misc_feature 1..639: note = Variant of 3'O-kinase
  source 1..639: mol_type = other DNA
atggcgtttaccattggtttaacaggagggatcgcagtaggcaaatcgactgtgagtgccatgatgcgtgaactgggtctgccggtcatcgatgctgacgaggcaacccgcgaactgatgcgtccaggcgaagaagcttatcgccagattgtagctgcgttcggtccgggcattcttcgtgccgatggcgagatcgatcgcgccaaattgggtgctatcgtgtttaacgacgaacaacaacgtaaggtgctgaatgcgattgtactgcctgcagtccgcaagaagatgctcgctgagaaagaagctcatatccgctcaggcgccaagacggttgtgctggatatcccgctgctgttcgaatccggattgactcattgggtcgacaaagtgctcgtggtgtacgtcgatgatgatgttcagttacgccgccttatggcacgtaacgggtttaccgaagaagaagctctggcccgcattcgttcacagtggcccatggccgagaaagttaaacgtgcagacgctgtaatcgacaataatggcacgattgaagaaacccgccgccagctgctggccattttacaccagtgggatgcactgggtaagggtggctccggccaccatcatcaccatcactaatga

SEQ ID NO: 3224 - protein, 211 aa, synthetic construct
  REGION 1..211: note = Variant of 3'O-kinase
MAFTIGLTGGIAVGKSTVSAMMRELGLPVIDADEATRELMRPGEEAYRQIVAAFGPGILRADGEIDRAKLGAIVFNDEQQRKVLNAIVLPAVRKKMLAEKEAHIRSGAKTVVLDIPLLFESGLTHWVDKVLVVYVDDDVQLRRLMARNGFTEEEALARIRSQWPMAEKVKRADAVIDNNGTIEETRRQLLAILHQWDALGKGGSGHHHHHH

SEQ ID NO: 3225 - DNA, 639 bp, synthetic construct
  misc_feature 1..639: note = Variant of 3'O-kinase
  source 1..639: mol_type = other DNA
atggcgtttaccattggtttaacaggagggatcgcatcgggcaaatcgactgtgagtgccatgatgcgtgaactgggtctgccggtcatcgatgctgacgaggcagcccgcgcactgatgcgtccaggcgaagaagcttatcgccagattgtagctgcgttcggtccgggcattcttcgtgccgatggcgagatcgatcgcgccaaattgggtcgtatcgtgtttgctgacgaacaacaacgtaaggtgctgaatgcgattgtacaccctgcagtccgtaagaagatgctcgctgagaaagaagctcatatccgctcaggcgccaagacggttgtgctggatatcccgctgctgttcgaatccggattgacccattgggtcgacaaagtgctcgtggtgtacgtcgatgatgatgttcagttacgccgccttatggcacgtaacgggtttaccgaagaagaagctctggcccgcattcgttcacagtggcccatggccgagaaagttaaacgtgcagacgctgtaatcgacaataatggcacgattgaagaaacccgccgccagctgctggccattttacaccagtgggatgcactgggtaagggtggctccggccaccatcatcaccatcactaatga

SEQ ID NO: 3226 - protein, 211 aa, synthetic construct
  REGION 1..211: note = Variant of 3'O-kinase
MAFTIGLTGGIASGKSTVSAMMRELGLPVIDADEAARALMRPGEEAYRQIVAAFGPGILRADGEIDRAKLGRIVFADEQQRKVLNAIVHPAVRKKMLAEKEAHIRSGAKTVVLDIPLLFESGLTHWVDKVLVVYVDDDVQLRRLMARNGFTEEEALARIRSQWPMAEKVKRADAVIDNNGTIEETRRQLLAILHQWDALGKGGSGHHHHHH

SEQ ID NO: 3227 - DNA, 639 bp, synthetic construct
  misc_feature 1..639: note = Variant of 3'O-kinase
  source 1..639: mol_type = other DNA
atggcgtttaccattggtttaacaggagggatcgcatcgggcaaatcgactgtgagtgccatgatgcgtgaactgggtctgccggtcatcgatgctgacgaggcagcacgcgccgttgttcgtccaggcgaagaagcttatcgccagattgtagctgcgttcggtccgggcattcttcgtgccgatggcgagatcgatcgcgccaaattgggtgctatcaagtttaacgacgaacaacaacgtaaggtgctgaatgcgattgtactgcctgcagtccgtaagaagatgctcgctgagaaagaagctcatatccgctcaggcgccaagacggttgtgctggatatcccgctgctgttcgaatccggattgtggcattgggtcgacaaagtgctcgtggtgtacgtcgatgatgatgttcagttacgccgccttatggcacgtaacgggtttaccgaagaagaagctctggcccgcattcgttcacagtggcccatggccgagaaagttaaacgtgcagacgctgtaatcgacaataatggcacgattgaagaaacccgccgccagctgctggccattttacaccagtgggatgcactgggtaagggtggctccggccaccatcatcaccatcactaatga

SEQ ID NO: 3228 - protein, 211 aa, synthetic construct
  REGION 1..211: note = Variant of 3'O-kinase
MAFTIGLTGGIASGKSTVSAMMRELGLPVIDADEAARAVVRPGEEAYRQIVAAFGPGILRADGEIDRAKLGAIKFNDEQQRKVLNAIVLPAVRKKMLAEKEAHIRSGAKTVVLDIPLLFESGLWHWVDKVLVVYVDDDVQLRRLMARNGFTEEEALARIRSQWPMAEKVKRADAVIDNNGTIEETRRQLLAILHQWDALGKGGSGHHHHHH

SEQ ID NO: 3229 - DNA, 639 bp, synthetic construct
  misc_feature 1..639: note = Variant of 3'O-kinase
  source 1..639: mol_type = other DNA
atggcgtttaccattggtttaacaggagggatcgcatcgggcaaatcgactgtgagtgccatgatgcgtgaactgggtctgccggtcatcgatgctgacgaggcaacccgcgaactgatgcgtccaggcgaagaagcttatcgccagattgtagctgcgttcggtccgggcattcttcgtgccgatggcgagatcgatcgcgccaaattgggtcgtatcaagtttaacgacgaacaacaacgtaaggtgctgaatgcgattgtactgcctgcagtccgtaagaagatgctcgctgagaaagaagctcatatccgctcaggcgccaagacggttgtgctggatatcccgctgctgttcgaatccggattgactcattgggtcgacaaagtgctcgtggtgtacgtcgatgatgatgttcagttacgccgccttatggcacgtaacgggtttaccgaagaagaagctctggcccgcattcgttcacagtggcccatggccgagaaagttaaacgtgcagacgctgtaatcgacaataatggcacgattgaagaaacccgccgccagctgctggccattttacaccagtgggatgcactgggtaagggtggctccggccaccatcatcaccatcactaatga

SEQ ID NO: 3230 - protein, 211 aa, synthetic construct
  REGION 1..211: note = Variant of 3'O-kinase
MAFTIGLTGGIASGKSTVSAMMRELGLPVIDADEATRELMRPGEEAYRQIVAAFGPGILRADGEIDRAKLGRIKFNDEQQRKVLNAIVLPAVRKKMLAEKEAHIRSGAKTVVLDIPLLFESGLTHWVDKVLVVYVDDDVQLRRLMARNGFTEEEALARIRSQWPMAEKVKRADAVIDNNGTIEETRRQLLAILHQWDALGKGGSGHHHHHH

SEQ ID NO: 3231 - DNA, 639 bp, synthetic construct
  misc_feature 1..639: note = Variant of 3'O-kinase
  source 1..639: mol_type = other DNA
atggcgtttaccattggtttaacaggagggatcgcagtaggcaaatcgactgtgagtgccatgatgcgtgaactgggtctgccggtcatcgatgctgacgaggcaacccgcgaagtgatgcgtccaggcgaagaagcttatcgccagattgtagctgcgttcggtccgggcattcttcgtgccgatggcgagatcgatcgcgccaaattgggtgctatcaagtttgctgacgaacaacaacgtaaggtgctgaatgcgattgtacatcctgcagtccgcaagaagatgctcgctgagaaagaagctcatatccgctcaggcgccaagacggttgtgctggatatcccgctgctgttcgaatccggattgacccattgggtcgacaaagtgctcgtggtgtacgtcgatgatgatgttcagttacgccgccttatggcacgtaacgggtttaccgaagaagaagctctggcccgcattcgttcacagtggcccatggccgagaaagttaaacgtgcagacgctgtaatcgacaataatggcacgattgaagaaacccgccgccagctgctggccattttacaccagtgggatgcactgggtaagggtggctccggccaccatcatcaccatcactaatga

SEQ ID NO: 3232 - protein, 211 aa, synthetic construct
  REGION 1..211: note = Variant of 3'O-kinase
MAFTIGLTGGIAVGKSTVSAMMRELGLPVIDADEATREVMRPGEEAYRQIVAAFGPGILRADGEIDRAKLGAIKFADEQQRKVLNAIVHPAVRKKMLAEKEAHIRSGAKTVVLDIPLLFESGLTHWVDKVLVVYVDDDVQLRRLMARNGFTEEEALARIRSQWPMAEKVKRADAVIDNNGTIEETRRQLLAILHQWDALGKGGSGHHHHHH

SEQ ID NO: 3233 - DNA, 639 bp, synthetic construct
  misc_feature 1..639: note = Variant of 3'O-kinase
  source 1..639: mol_type = other DNA
atggcgtttaccattggtttaacaggagggatcgcatcgggcaaatcgactgtgagtgccatgatgcgtgaactgggtctgccggtcatcgatgctgacgaggcagcccgcgaagtgatgcgtccaggcgaagaagcttatcgccagattgtagctgcgttcggtccgggcattcttcgtgccgatggcgagatcgatcgcgccaaattgggtgctatcgtgtttaacgacgaacaacaacgtaaggtgctgaatgcgattgtacaccctgcagtctataagaagatgctcgctgagaaagaagctcatatccgctcaggcgccaagacggttgtgctggatatcccgctgctgttcgaatccggattgacccattgggtcgacaaagtgctcgtggtgtacgtcgatgatgatgttcagttacgccgccttatggcacgtaacgggtttaccgaagaagaagctctggcccgcattcgttcacagtggcccatggccgagaaagttaaacgtgcagacgctgtaatcgacaataatggcacgattgaagaaacccgccgccagctgctggccattttacaccagtgggatgcactgggtaagggtggctccggccaccatcatcaccatcactaatga

SEQ ID NO: 3234 - protein, 211 aa, synthetic construct
  REGION 1..211: note = Variant of 3'O-kinase
MAFTIGLTGGIASGKSTVSAMMRELGLPVIDADEAAREVMRPGEEAYRQIVAAFGPGILRADGEIDRAKLGAIVFNDEQQRKVLNAIVHPAVYKKMLAEKEAHIRSGAKTVVLDIPLLFESGLTHWVDKVLVVYVDDDVQLRRLMARNGFTEEEALARIRSQWPMAEKVKRADAVIDNNGTIEETRRQLLAILHQWDALGKGGSGHHHHHH

SEQ ID NO: 3235 - DNA, 639 bp, synthetic construct
  misc_feature 1..639: note = Variant of 3'O-kinase
  source 1..639: mol_type = other DNA
atggcgtttaccattggtttaacaggagggatcgcagtaggcaaatcgactgtgagtgccatgatgcgtgaactgggtctgccggtcatcgatgctgacgaggcagcacgcgccgttgttcgtccaggcgaagaagcttatcgccagattgtagctgcgttcggtccgggcattcttcgtgccgatggcgagatcgatcgcgccaaattgggtgctatcgtgtttaacgacgaacaacaacgtaaggtgctgaatgcgattgtactgcctgcagtccgtaagaagatgctcgctgagaaagaagctcatatccgctcaggcgccaagacggttgtgctggatatcccgctgctgttcgaatccggattgacccattgggtcgacaaagtgctcgtggtgtacgtcgatgatgatgttcagttacgccgccttatggcacgtaacgggtttaccgaagaagaagctctggcccgcattcgttcacagtggcccatggccgagaaagttaaacgtgcagacgctgtaatcgacaataatggcacgattgaagaaacccgccgccagctgctggccattttacaccagtgggatgcactgggtaagggtggctccggccaccatcatcaccatcactaatga

SEQ ID NO: 3236 - protein, 211 aa, synthetic construct
  REGION 1..211: note = Variant of 3'O-kinase
MAFTIGLTGGIAVGKSTVSAMMRELGLPVIDADEAARAVVRPGEEAYRQIVAAFGPGILRADGEIDRAKLGAIVFNDEQQRKVLNAIVLPAVRKKMLAEKEAHIRSGAKTVVLDIPLLFESGLTHWVDKVLVVYVDDDVQLRRLMARNGFTEEEALARIRSQWPMAEKVKRADAVIDNNGTIEETRRQLLAILHQWDALGKGGSGHHHHHH

SEQ ID NO: 3237 - DNA, 639 bp, synthetic construct
  misc_feature 1..639: note = Variant of 3'O-kinase
  source 1..639: mol_type = other DNA
atggcgtttaccattggtttaacaggagggatcgcagcgggcaaatcgactgtgagtgccatgatgcgtgaactgggtctgccggtcatcgatgctgacgaggcagcacgcgccgttgttcgtccaggcgaagaagcttatcgccagattgtagctgcgttcggtccgggcattcttcgtgccgatggcgagatcgatcgcgccaaattgggtgctatcgtgtttaacgacgaacaacaacgtaaggtgctgaatgcgattgtactgcctgcagtccgtaagaagatgctcgctgagaaagaagctcatatccgctcaggcgccaagacggttgtgctggatatcccgctgctgttcgaatccggattggttcattgggtcgacaaagtgctcgtggtgtacgtcgatgatgatgttcagttacgccgccttatggcacgtaacgggtttaccgaagaagaagctctggcccgcattcgttcacagtggcccatggccgagaaagttaaacgtgcagacgctgtaatcgacaataatggcacgattgaagaaacccgccgccagctgctggccattttacaccagtgggatgcactgggtaagggtggctccggccaccatcatcaccatcactaatga

SEQ ID NO: 3238 - protein, 211 aa, synthetic construct
  REGION 1..211: note = Variant of 3'O-kinase
MAFTIGLTGGIAAGKSTVSAMMRELGLPVIDADEAARAVVRPGEEAYRQIVAAFGPGILRADGEIDRAKLGAIVFNDEQQRKVLNAIVLPAVRKKMLAEKEAHIRSGAKTVVLDIPLLFESGLVHWVDKVLVVYVDDDVQLRRLMARNGFTEEEALARIRSQWPMAEKVKRADAVIDNNGTIEETRRQLLAILHQWDALGKGGSGHHHHHH

SEQ ID NO: 3239 - DNA, 639 bp, synthetic construct
  misc_feature 1..639: note = Variant of 3'O-kinase
  source 1..639: mol_type = other DNA
atggcgtttaccattggtttaacaggagggatcgcagtaggcaaatcgactgtgagtgccatgatgcgtgaactgggtctgccggtcatcgatgctgacgaggcagcacgcgccgttgttcgtccaggcgaagaagcttatcgccagattgtagctgcgttcggtccgggcattcttcgtgccgatggcgagatcgatcgcgccaaattgggtcgtatcgtgtttgctgacgaacaacaacgtaaggtgctgaatgcgattgtacaccctgcagtccgtaagaagatgctcgctgagaaagaagctcatatccgctcaggcgccaagacggttgtgctggatatcccgctgctgttcgaatccggattgacccattgggtcgacaaagtgctcgtggtgtacgtcgatgatgatgttcagttacgccgccttatggcacgtaacgggtttaccgaagaagaagctctggcccgcattcgttcacagtggcccatggccgagaaagttaaacgtgcagacgctgtaatcgacaataatggcacgattgaagaaacccgccgccagctgctggccattttacaccagtgggatgcactgggtaagggtggctccggccaccatcatcaccatcactaatga

SEQ ID NO: 3240 - protein, 211 aa, synthetic construct
  REGION 1..211: note = Variant of 3'O-kinase
MAFTIGLTGGIAVGKSTVSAMMRELGLPVIDADEAARAVVRPGEEAYRQIVAAFGPGILRADGEIDRAKLGRIVFADEQQRKVLNAIVHPAVRKKMLAEKEAHIRSGAKTVVLDIPLLFESGLTHWVDKVLVVYVDDDVQLRRLMARNGFTEEEALARIRSQWPMAEKVKRADAVIDNNGTIEETRRQLLAILHQWDALGKGGSGHHHHHH

SEQ ID NO: 3241 - DNA, 639 bp, synthetic construct
  misc_feature 1..639: note = Variant of 3'O-kinase
  source 1..639: mol_type = other DNA
atggcgtttaccattggtttaacaggagggatcgcagtaggcaaatcgactgtgagtgccatgatgcgtgaactgggtctgccggtcatcgatgctgacgaggcagcccgcgccgttgttcgtccaggcgaagaagcttatcgccagattgtagctgcgttcggtccgggcattcttcgtgccgatggcgagatcgatcgcgccaaattgggtgctatcgtgtttgctgacgaacaacaacgtaaggtgctgaatgcgattgtaagtcctgcagtctataagaagatgctcgctgagaaagaagctcatatccgctcaggcgccaagacggttgtgctggatatcccgctgctgttcgaatccggattgacccattgggtcgacaaagtgctcgtggtgtacgtcgatgatgatgttcagttacgccgccttatggcacgtaacgggtttaccgaagaagaagctctggcccgcattcgttcacagtggcccatggccgagaaagttaaacgtgcagacgctgtaatcgacaataatggcacgattgaagaaacccgccgccagctgctggccattttacaccagtgggatgcactgggtaagggtggctccggccaccatcatcaccatcactaatga

SEQ ID NO: 3242 - protein, 211 aa, synthetic construct
  REGION 1..211: note = Variant of 3'O-kinase
MAFTIGLTGGIAVGKSTVSAMMRELGLPVIDADEAARAVVRPGEEAYRQIVAAFGPGILRADGEIDRAKLGAIVFADEQQRKVLNAIVSPAVYKKMLAEKEAHIRSGAKTVVLDIPLLFESGLTHWVDKVLVVYVDDDVQLRRLMARNGFTEEEALARIRSQWPMAEKVKRADAVIDNNGTIEETRRQLLAILHQWDALGKGGSGHHHHHH

SEQ ID NO: 3243 - DNA, 639 bp, synthetic construct
  misc_feature 1..639: note = Variant of 3'O-kinase
  source 1..639: mol_type = other DNA
atggcgtttaccattggtttaacaggagggatcgcatcgggcaaatcgactgtgagtgccatgatgcgtgaactgggtctgccggtcatcgatgctgacgaggcaacccgcgcactgatgcgtccaggcgaagaagcttatcgccagattgtagctgcgttcggtccgggcattcttcgtgccgatggcgagatcgatcgcgccaaattgggtcgtatcgtgtttgctgacgaacaacaacgtaaggtgctgaatgcgattgtactgcctgcagtctataagaagatgctcgctgagaaagaagctcatatccgctcaggcgccaagacggttgtgctggatatcccgctgctgttcgaatccggattgacccattgggtcgacaaagtgctcgtggtgtacgtcgatgatgatgttcagttacgccgccttatggcacgtaacgggtttaccgaagaagaagctctggcccgcattcgttcacagtggcccatggccgagaaagttaaacgtgcagacgctgtaatcgacaataatggcacgattgaagaaacccgccgccagctgctggccattttacaccagtgggatgcactgggtaagggtggctccggccaccatcatcaccatcactaatga

SEQ ID NO: 3244 - protein, 211 aa, synthetic construct
  REGION 1..211: note = Variant of 3'O-kinase
MAFTIGLTGGIASGKSTVSAMMRELGLPVIDADEATRALMRPGEEAYRQIVAAFGPGILRADGEIDRAKLGRIVFADEQQRKVLNAIVLPAVYKKMLAEKEAHIRSGAKTVVLDIPLLFESGLTHWVDKVLVVYVDDDVQLRRLMARNGFTEEEALARIRSQWPMAEKVKRADAVIDNNGTIEETRRQLLAILHQWDALGKGGSGHHHHHH

SEQ ID NO: 3245 - DNA, 639 bp, synthetic construct
  misc_feature 1..639: note = Variant of 3'O-kinase
  source 1..639: mol_type = other DNA
atggcgtttaccattggtttaacaggagggatcgcagtgggcaaatcgactgtgagtgccatgatgcgtgaactgggtctgccggtcatcgatgctgacgaggcagcccgcgccgttgttcgtccaggcgaagaagcttatcgccagattgtagctgcgttcggtccgggcattcttcgtgccgatggcgagatcgatcgcgccaaattgggtgctatcgtgtttgctgacgaacaacaacgtaaggtgctgaatgcgattgtacaccctgcagtctataagaagatgctcgctgagaaagaagctcatatccgctcaggcgccaagacggttgtgctggatatcccgctgctgttcgaatccggattgacccattgggtcgacaaagtgctcgtggtgtacgtcgatgatgatgttcagttacgccgccttatggcacgtaacgggtttaccgaagaagaagctctggcccgcattcgttcacagtggcccatggccgagaaagttaaacgtgcagacgctgtaatcgacaataatggcacgattgaagaaacccgccgccagctgctggccattttacaccagtgggatgcactgggtaagggtggctccggccaccatcatcaccatcactaatga

SEQ ID NO: 3246 - protein, 211 aa, synthetic construct
  REGION 1..211: note = Variant of 3'O-kinase
MAFTIGLTGGIAVGKSTVSAMMRELGLPVIDADEAARAVVRPGEEAYRQIVAAFGPGILRADGEIDRAKLGAIVFADEQQRKVLNAIVHPAVYKKMLAEKEAHIRSGAKTVVLDIPLLFESGLTHWVDKVLVVYVDDDVQLRRLMARNGFTEEEALARIRSQWPMAEKVKRADAVIDNNGTIEETRRQLLAILHQWDALGKGGSGHHHHHH

SEQ ID NO: 3247 - DNA, 639 bp, synthetic construct
  misc_feature 1..639: note = Variant of 3'O-kinase
  source 1..639: mol_type = other DNA
atggcgtttaccattggtttaacaggagggatcgcagtaggcaaatcgactgtgagtgccatgatgcgtgaactgggtctgccggtcatcgatgctgacgaggcagcacgcgccgttgttcgtccaggcgaagaagcttatcgccagattgtagctgcgttcggtccgggcattcttcgtgccgatggcgagatcgatcgcgccaaattgggtgctatcgtgtttgctgacgaacaacaacgtaaggtgctgaatgcgattgtacaccctgcagtctataagaagatgctcgctgagaaagaagctcatatccgctcaggcgccaagacggttgtgctggatatcccgctgctgttcgaatccggattggttcattgggtcgacaaagtgctcgtggtgtacgtcgatgatgatgttcagttacgccgccttatggcacgtaacgggtttaccgaagaagaagctctggcccgcattcgttcacagtggcccatggccgagaaagttaaacgtgcagacgctgtaatcgacaataatggcacgattgaagaaacccgccgccagctgctggccattttacaccagtgggatgcactgggtaagggtggctccggccaccatcatcaccatcactaatga

SEQ ID NO: 3248 - protein, 211 aa, synthetic construct
  REGION 1..211: note = Variant of 3'O-kinase
MAFTIGLTGGIAVGKSTVSAMMRELGLPVIDADEAARAVVRPGEEAYRQIVAAFGPGILRADGEIDRAKLGAIVFADEQQRKVLNAIVHPAVYKKMLAEKEAHIRSGAKTVVLDIPLLFESGLVHWVDKVLVVYVDDDVQLRRLMARNGFTEEEALARIRSQWPMAEKVKRADAVIDNNGTIEETRRQLLAILHQWDALGKGGSGHHHHHH

SEQ ID NO: 3249 - DNA, 639 bp, synthetic construct
  misc_feature 1..639: note = Variant of 3'O-kinase
  source 1..639: mol_type = other DNA
atggcgtttaccattggtttaacaggagggatcgcatcgggcaaatcgactgtgagtgccatgatgcgtgaactgggtctgccggtcatcgatgctgacgaggcaacccgcgaactgatgcgtccaggcgaagaagcttatcgccagattgtagctgcgttcggtccgggcattcttcgtgccgatggcgagatcgatcgcgccaaattgggtcgtatcaagtttgctgacgaacaacaacgtaaggtgctgaatgcgattgtacatcctgcagtccgcaagaagatgctcgctgagaaagaagctcatatccgctcaggcgccaagacggttgtgctggatatcccgctgctgttcgaatccggattgtggcattgggtcgacaaagtgctcgtggtgtacgtcgatgatgatgttcagttacgccgccttatggcacgtaacgggtttaccgaagaagaagctctggcccgcattcgttcacagtggcccatggccgagaaagttaaacgtgcagacgctgtaatcgacaataatggcacgattgaagaaacccgccgccagctgctggccattttacaccagtgggatgcactgggtaagggtggctccggccaccatcatcaccatcactaatga

SEQ ID NO: 3250 - protein, 211 aa, synthetic construct
  REGION 1..211: note = Variant of 3'O-kinase
MAFTIGLTGGIASGKSTVSAMMRELGLPVIDADEATRELMRPGEEAYRQIVAAFGPGILRADGEIDRAKLGRIKFADEQQRKVLNAIVHPAVRKKMLAEKEAHIRSGAKTVVLDIPLLFESGLWHWVDKVLVVYVDDDVQLRRLMARNGFTEEEALARIRSQWPMAEKVKRADAVIDNNGTIEETRRQLLAILHQWDALGKGGSGHHHHHH

SEQ ID NO: 3251 - DNA, 639 bp, synthetic construct
  misc_feature 1..639: note = Variant of 3'O-kinase
  source 1..639: mol_type = other DNA
atggcgtttaccattggtttaacaggagggatcgcagtaggcaaatcgactgtgagtgccatgatgcgtgaactgggtctgccggtcatcgatgctgacgaggcaacccgcgcactgatgcgtccaggcgaagaagcttatcgccagattgtagctgcgttcggtccgggcattcttcgtgccgatggcgagatcgatcgcgccaaattgggtcgtatcgtgtttgctgacgaacaacaacgtaaggtgctgaatgcgattgtactgcctgcagtccgtaagaagatgctcgctgagaaagaagctcatatccgctcaggcgccaagacggttgtgctggatatcccgctgctgttcgaatccggattggttcattgggtcgacaaagtgctcgtggtgtacgtcgatgatgatgttcagttacgccgccttatggcacgtaacgggtttaccgaagaagaagctctggcccgcattcgttcacagtggcccatggccgagaaagttaaacgtgcagacgctgtaatcgacaataatggcacgattgaagaaacccgccgccagctgctggccattttacaccagtgggatgcactgggtaagggtggctccggccaccatcatcaccatcactaatga

SEQ ID NO: 3252 - protein, 211 aa, synthetic construct
  REGION 1..211: note = Variant of 3'O-kinase
MAFTIGLTGGIAVGKSTVSAMMRELGLPVIDADEATRALMRPGEEAYRQIVAAFGPGILRADGEIDRAKLGRIVFADEQQRKVLNAIVLPAVRKKMLAEKEAHIRSGAKTVVLDIPLLFESGLVHWVDKVLVVYVDDDVQLRRLMARNGFTEEEALARIRSQWPMAEKVKRADAVIDNNGTIEETRRQLLAILHQWDALGKGGSGHHHHHH

SEQ ID NO: 3253 - DNA, 639 bp, synthetic construct
  misc_feature 1..639: note = Variant of 3'O-kinase
  source 1..639: mol_type = other DNA
atggcgtttaccattggtttaacaggagggatcgcagtaggcaaatcgactgtgagtgccatgatgcgtgaactgggtctgccggtcatcgatgctgacgaggcagcacgcgccgttgttcgtccaggcgaagaagcttatcgccagattgtagctgcgttcggtccgggcattcttcgtgccgatggcgagatcgatcgcgccaaattgggtgctatcgtgtttgctgacgaacaacaacgtaaggtgctgaatgcgattgtactgcctgcagtccgtaagaagatgctcgctgagaaagaagctcatatccgctcaggcgccaagacggttgtgctggatatcccgctgctgttcgaatccggattgtggcattgggtcgacaaagtgctcgtggtgtacgtcgatgatgatgttcagttacgccgccttatggcacgtaacgggtttaccgaagaagaagctatggcccgcattcgttcacagtggcccatggccgagaaagttaaacgtgcagacgctgtaatcgacaataatggcacgattgaagaaacccgccgccagctgctggccattttacaccagtgggatgcactgggtaagggtggctccggccaccatcatcaccatcactaatga

SEQ ID NO: 3254 - protein, 211 aa, synthetic construct
  REGION 1..211: note = Variant of 3'O-kinase
MAFTIGLTGGIAVGKSTVSAMMRELGLPVIDADEAARAVVRPGEEAYRQIVAAFGPGILRADGEIDRAKLGAIVFADEQQRKVLNAIVLPAVRKKMLAEKEAHIRSGAKTVVLDIPLLFESGLWHWVDKVLVVYVDDDVQLRRLMARNGFTEEEAMARIRSQWPMAEKVKRADAVIDNNGTIEETRRQLLAILHQWDALGKGGSGHHHHHH

SEQ ID NO: 3255 - DNA, 639 bp, synthetic construct
  misc_feature 1..639: note = Variant of 3'O-kinase
  source 1..639: mol_type = other DNA
atggcgtttaccattggtttaacaggagggatcgcagcgggcaaatcgactgtgagtgccatgatgcgtgaactgggtctgccggtcatcgatgctgacgaggcagcacgcgccgttgttcgtccaggcgaagaagcttatcgccagattgtagctgcgttcggtccgggcattcttcgtgccgatggcgagatcgatcgcgccaaattgggtcgtatcgtgtttaacgacgaacaacaacgtaaggtgctgaatgcgattgtaggtcctgcagtccgtaagaagatgctcgctgagaaagaagctcatatccgctcaggcgccaagacggttgtgctggatatcccgctgctgttcgaatccggattgacccattgggtcgacaaagtgctcgtggtgtacgtcgatgatgatgttcagttacgccgccttatggcacgtaacgggtttaccgaagaagaagctctggcccgcattcgttcacagtggcccatggccgagaaagttaaacgtgcagacgctgtaatcgacaataatggcacgattgaagaaacccgccgccagctgctggccattttacaccagtgggatgcactgggtaagggtggctccggccaccatcatcaccatcactaatga

SEQ ID NO: 3256 - protein, 211 aa, synthetic construct
  REGION 1..211: note = Variant of 3'O-kinase
MAFTIGLTGGIAAGKSTVSAMMRELGLPVIDADEAARAVVRPGEEAYRQIVAAFGPGILRADGEIDRAKLGRIVFNDEQQRKVLNAIVGPAVRKKMLAEKEAHIRSGAKTVVLDIPLLFESGLTHWVDKVLVVYVDDDVQLRRLMARNGFTEEEALARIRSQWPMAEKVKRADAVIDNNGTIEETRRQLLAILHQWDALGKGGSGHHHHHH

SEQ ID NO: 3257 - DNA, 639 bp, synthetic construct
  misc_feature 1..639: note = Variant of 3'O-kinase
  source 1..639: mol_type = other DNA
atggcgtttaccattggtttaacaggagggatcgcagtaggcaaatcgactgtgagtgccatgatgcgtgaactgggtctgccggtcatcgatgctgacgaggcagcacgcgccgttgttcgtccaggcgaagaagcttatcgccagattgtagctgcgttcggtccgggcattcttcgtgccgatggcgagatcgatcgcgccaaattgggtgctatcaagtttaacgacgaacaacaacgtaaggtgctgaatgcgattgtactgcctgcagtctataagaagatgctcgctgagaaagaagctcatatccgctcaggcgccaagacggttgtgctggatatcccgctgctgttcgaatccggattggttcattgggtcgacaaagtgctcgtggtgtacgtcgatgatgatgttcagttacgccgccttatggcacgtaacgggtttaccgaagaagaagctctggcccgcattcgttcacagtggcccatggccgagaaagttaaacgtgcagacgctgtaatcgacaataatggcacgattgaagaaacccgccgccagctgctggccattttacaccagtgggatgcactgggtaagggtggctccggccaccatcatcaccatcactaatga

SEQ ID NO: 3258 - protein, 211 aa, synthetic construct
  REGION 1..211: note = Variant of 3'O-kinase
MAFTIGLTGGIAVGKSTVSAMMRELGLPVIDADEAARAVVRPGEEAYRQIVAAFGPGILRADGEIDRAKLGAIKFNDEQQRKVLNAIVLPAVYKKMLAEKEAHIRSGAKTVVLDIPLLFESGLVHWVDKVLVVYVDDDVQLRRLMARNGFTEEEALARIRSQWPMAEKVKRADAVIDNNGTIEETRRQLLAILHQWDALGKGGSGHHHHHH

SEQ ID NO: 3259 - DNA, 639 bp, synthetic construct
  misc_feature 1..639: note = Variant of 3'O-kinase
  source 1..639: mol_type = other DNA
atggcgtttaccattggtttaacaggagggatcgcatcgggcaaatcgactgtgagtgccatgatgcgtgaactgggtctgccggtcatcgatgctgacgaggcagcacgcgccgttgttcgtccaggcgaagaagcttatcgccagattgtagctgcgttcggtccgggcattcttcgtgccgatggcgagatcgatcgcgccaaattgggtgctatcaagtttaacgacgaacaacaacgtaaggtgctgaatgcgattgtaagtcctgcagtctataagaagatgctcgctgagaaagaagctcatatccgctcaggcgccaagacggttgtgctggatatcccgctgctgttcgaatccggattgacccattgggtcgacaaagtgctcgtggtgtacgtcgatgatgatgttcagttacgccgccttatggcacgtaacgggtttaccgaagaagaagctctggcccgcattcgttcacagtggcccatggccgagaaagttaaacgtgcagacgctgtaatcgacaataatggcacgattgaagaaacccgccgccagctgctggccattttacaccagtgggatgcactgggtaagggtggctccggccaccatcatcaccatcactaatga

SEQ ID NO: 3260 - protein, 211 aa, synthetic construct
  REGION 1..211: note = Variant of 3'O-kinase
MAFTIGLTGGIASGKSTVSAMMRELGLPVIDADEAARAVVRPGEEAYRQIVAAFGPGILRADGEIDRAKLGAIKFNDEQQRKVLNAIVSPAVYKKMLAEKEAHIRSGAKTVVLDIPLLFESGLTHWVDKVLVVYVDDDVQLRRLMARNGFTEEEALARIRSQWPMAEKVKRADAVIDNNGTIEETRRQLLAILHQWDALGKGGSGHHHHHH

SEQ ID NO: 3261 - DNA, 639 bp, synthetic construct
  misc_feature 1..639: note = Variant of 3'O-kinase
  source 1..639: mol_type = other DNA
atggcgtttaccattggtttaacaggagggatcgcatcgggcaaatcgactgtgagtgccatgatgcgtgaactgggtctgccggtcatcgatgctgacgaggcagcacgcgccgttgttcgtccaggcgaagaagcttatcgccagattgtagctgcgttcggtccgggcattcttcgtgccgatggcgagatcgatcgcgccaaattgggtcgtatcgtgtttaacgacgaacaacaacgtaaggtgctgaatgcgattgtacaccctgcagtctataagaagatgctcgctgagaaagaagctcatatccgctcaggcgccaagacggttgtgctggatatcccgctgctgttcgaatccggattggttcattgggtcgacaaagtgctcgtggtgtacgtcgatgatgatgttcagttacgccgccttatggcacgtaacgggtttaccgaagaagaagctctggcccgcattcgttcacagtggcccatggccgagaaagttaaacgtgcagacgctgtaatcgacaataatggcacgattgaagaaacccgccgccagctgctggccattttacaccagtgggatgcactgggtaagggtggctccggccaccatcatcaccatcactaatga

SEQ ID NO: 3262 - protein, 211 aa, synthetic construct
  REGION 1..211: note = Variant of 3'O-kinase
MAFTIGLTGGIASGKSTVSAMMRELGLPVIDADEAARAVVRPGEEAYRQIVAAFGPGILRADGEIDRAKLGRIVFNDEQQRKVLNAIVHPAVYKKMLAEKEAHIRSGAKTVVLDIPLLFESGLVHWVDKVLVVYVDDDVQLRRLMARNGFTEEEALARIRSQWPMAEKVKRADAVIDNNGTIEETRRQLLAILHQWDALGKGGSGHHHHHH

SEQ ID NO: 3263 - DNA, 639 bp, synthetic construct
  misc_feature 1..639: note = Variant of 3'O-kinase
  source 1..639: mol_type = other DNA
atggcgtttaccattggtttaacaggagggatcgcagtaggcaaatcgactgtgagtgccatgatgcgtgaactgggtctgccggtcatcgatgctgacgaggcaacccgcgaactggtgcgtccaggcgaagaagcttatcgccagattgtagctgcgttcggtccgggcattcttcgtgccgatggcgagatcgatcgcgccaaattgggtcgtatcgtgtttgctgacgaacaacaacgtaaggtgctgaatgcgattgtactgcctgcagtctataagaagatgctcgctgagaaagaagctcatatccgctcaggcgccaagacggttgtgctggatatcccgctgctgttcgaatccggattgtggcattgggtcgacaaagtgctcgtggtgtacgtcgatgatgatgttcagttacgccgccttatggcacgtaacgggtttaccgaagaagaagctctggcccgcattcgttcacagtggcccatggccgagaaagttaaacgtgcagacgctgtaatcgacaataatggcacgattgaagaaacccgccgccagctgctggccattttacaccagtgggatgcactgggtaagggtggctccggccaccatcatcaccatcactaatga

SEQ ID NO: 3264 - protein, 211 aa, synthetic construct
  REGION 1..211: note = Variant of 3'O-kinase
MAFTIGLTGGIAVGKSTVSAMMRELGLPVIDADEATRELVRPGEEAYRQIVAAFGPGILRADGEIDRAKLGRIVFADEQQRKVLNAIVLPAVYKKMLAEKEAHIRSGAKTVVLDIPLLFESGLWHWVDKVLVVYVDDDVQLRRLMARNGFTEEEALARIRSQWPMAEKVKRADAVIDNNGTIEETRRQLLAILHQWDALGKGGSGHHHHHH

SEQ ID NO: 3265 - DNA, 639 bp, synthetic construct
  misc_feature 1..639: note = Variant of 3'O-kinase
  source 1..639: mol_type = other DNA
atggcgtttaccattggtttaacaggagggatcgcatcgggcaaatcgactgtgagtgccatgatgcgtgaactgggtctgccggtcatcgatgctgacgaggcagcacgcgccgttgttcgtccaggcgaagaagcttatcgccagattgtagctgcgttcggtccgggcattcttcgtgccgatggcgagatcgatcgcgccaaattgggtgctatcaagtttgctgacgaacaacaacgtaaggtgctgaatgcgattgtactgcctgcagtccgtaagaagatgctcgctgagaaagaagctcatatccgctcaggcgccaagacggttgtgctggatatcccgctgctgttcgaatccggattgacccattgggtcgacaaagtgctcgtggtgtacgtcgatgatgatgttcagttacgccgccttatggcacgtaacgggtttaccgaagaagaagctctggcccgcattcgttcacagtggcccatggccgagaaagttaaacgtgcagacgctgtaatcgacaataatggcacgattgaagaaacccgccgccagctgctggccattttacaccagtgggatgcactgggtaagggtggctccggccaccatcatcaccatcactaatga

SEQ ID NO: 3266 - protein, 211 aa, synthetic construct
  REGION 1..211: note = Variant of 3'O-kinase
MAFTIGLTGGIASGKSTVSAMMRELGLPVIDADEAARAVVRPGEEAYRQIVAAFGPGILRADGEIDRAKLGAIKFADEQQRKVLNAIVLPAVRKKMLAEKEAHIRSGAKTVVLDIPLLFESGLTHWVDKVLVVYVDDDVQLRRLMARNGFTEEEALARIRSQWPMAEKVKRADAVIDNNGTIEETRRQLLAILHQWDALGKGGSGHHHHHH

SEQ ID NO: 3267 - DNA, 639 bp, synthetic construct
  misc_feature 1..639: note = Variant of 3'O-kinase
  source 1..639: mol_type = other DNA
atggcgtttaccattggtttaacaggagggatcgcatcgggcaaatcgactgtgagtgccatgatgcgtgaactgggtctgccggtcatcgatgctgacgaggcagcacgcgccgttgttcgtccaggcgaagaagcttatcgccagattgtagctgcgttcggtccgggcattcttcgtgccgatggcgagatcgatcgcgccaaattgggtcgtatcgtgtttgctgacgaacaacaacgtaaggtgctgaatgcgattgtaggtcctgcagtctataagaagatgctcgctgagaaagaagctcatatccgctcaggcgccaagacggttgtgctggatatcccgctgctgttcgaatccggattgacccattgggtcgacaaagtgctcgtggtgtacgtcgatgatgatgttcagttacgccgccttatggcacgtaacgggtttaccgaagaagaagctctggcccgcattcgttcacagtggcccatggccgagaaagttaaacgtgcagacgctgtaatcgacaataatggcacgattgaagaaacccgccgccagctgctggccattttacaccagtgggatgcactgggtaagggtggctccggccaccatcatcaccatcactaatga

SEQ ID NO: 3268 - protein, 211 aa, synthetic construct
  REGION 1..211: note = Variant of 3'O-kinase
MAFTIGLTGGIASGKSTVSAMMRELGLPVIDADEAARAVVRPGEEAYRQIVAAFGPGILRADGEIDRAKLGRIVFADEQQRKVLNAIVGPAVYKKMLAEKEAHIRSGAKTVVLDIPLLFESGLTHWVDKVLVVYVDDDVQLRRLMARNGFTEEEALARIRSQWPMAEKVKRADAVIDNNGTIEETRRQLLAILHQWDALGKGGSGHHHHHH

SEQ ID NO: 3269 - DNA, 639 bp, synthetic construct
  misc_feature 1..639: note = Variant of 3'O-kinase
  source 1..639: mol_type = other DNA
atggcgtttaccattggtttaacaggagggatcgcatcgggtaaatcgactgtgagtgccatgatgcgtgaactgggtctgccggtcatcgatgctgacgaggcagcccgcgaagtgatgcgtccaggcgaagaagcttatcgccagattgtagctgcgttcggtccgggcattcttcgtgccgatggcgagatcgatcgcgccaaattgggtgctatcgtgtttaacgacgaacaacaacgtaaggtgctgaatgcgattgtaagtcctgcagtccgtaagaagatgctcgctgagaaagaagctcatatccgctcaggcgccaagacggttgtgctggatatcccgctgctgttcgaatccggattgtggcattgggtcgacaaagtgctcgtggtgtacgtcgatgatgatgttcagttacgccgccttatggcacgtaacgggtttaccgaagaagaagctctggcccgcattcgttcacagtggcccatggccgagaaagttaaacgtgcagacgctgtaatcgacaataatggcacgattgaagaaacccgccgccagctgctggccattttacaccagtgggatgcactgggtaagggtggctccggccaccatcatcaccatcactaatga

SEQ ID NO: 3270 - protein, 211 aa, synthetic construct
  REGION 1..211: note = Variant of 3'O-kinase
MAFTIGLTGGIASGKSTVSAMMRELGLPVIDADEAAREVMRPGEEAYRQIVAAFGPGILRADGEIDRAKLGAIVFNDEQQRKVLNAIVSPAVRKKMLAEKEAHIRSGAKTVVLDIPLLFESGLWHWVDKVLVVYVDDDVQLRRLMARNGFTEEEALARIRSQWPMAEKVKRADAVIDNNGTIEETRRQLLAILHQWDALGKGGSGHHHHHH

SEQ ID NO: 3271 - DNA, 639 bp, synthetic construct
  misc_feature 1..639: note = Variant of 3'O-kinase
  source 1..639: mol_type = other DNA
atggcgtttaccattggtttaacaggagggatcgcaagcggcaaatcgactgtgagtgccatgatgcgtgaactgggtctgccggtcatcgatgctgacgaggcagcacgcgccgttgttcgtccaggcgaagaagcttatcgccagattgtagctgcgttcggtccgggcattcttcgtgccgatggcgagatcgatcgcgccaaattgggtgccatcgtgtttaacgacgaacaacaacgtaaggtgctgaatgcgattgtactgcctgcagtctataagaagatgctcgctgagaaagaagctcatatccgctcaggcgccaagacggttgtgctggatatcccgctgctgttcgaatccggattgacccattgggtcgacaaagtgctcgtggtgtacgtcgatgatgatgttcagttacgccgccttatggcacgtaacgggtttaccgaagaagaagctctggcccgcattcgttcacagtggcccatggccgagaaagttaaacgtgcagacgctgtaatcgacaataatggcacgattgaagaaacccgccgccagctgctggccattttacaccagtgggatgcactgggtaagggtggctccggccaccatcatcaccatcactaatga

SEQ ID NO: 3272 - protein, 211 aa, synthetic construct
  REGION 1..211: note = Variant of 3'O-kinase
MAFTIGLTGGIASGKSTVSAMMRELGLPVIDADEAARAVVRPGEEAYRQIVAAFGPGILRADGEIDRAKLGAIVFNDEQQRKVLNAIVLPAVYKKMLAEKEAHIRSGAKTVVLDIPLLFESGLTHWVDKVLVVYVDDDVQLRRLMARNGFTEEEALARIRSQWPMAEKVKRADAVIDNNGTIEETRRQLLAILHQWDALGKGGSGHHHHHH

SEQ ID NO: 3273 - DNA, 639 bp, synthetic construct
  misc_feature 1..639: note = Variant of 3'O-kinase
  source 1..639: mol_type = other DNA
atggcgtttaccattggtttaacaggagggatcgcagcgggcaaatcgactgtgagtgccatgatgcgtgaactgggtctgccggtcatcgatgctgacgaggcagcacgcgccgttgttcgtccaggcgaagaagcttatcgccagattgtagctgcgttcggtccgggcattcttcgtgccgatggcgagatcgatcgcgccaaattgggtgctatcgtgtttaacgacgaacaacaacgtaaggtgctgaatgcgattgtacaccctgcagtccgtaagaagatgctcgctgagaaagaagctcatatccgctcaggcgccaagacggttgtgctggatatcccgctgctgttcgaatccggattggttcattgggtcgacaaagtgctcgtggtgtacgtcgatgatgatgttcagttacgccgccttatggcacgtaacgggtttaccgaagaagaagctctggcccgcattcgttcacagtggcccatggccgagaaagttaaacgtgcagacgctgtaatcgacaataatggcacgattgaagaaacccgccgccagctgctggccattttacaccagtgggatgcactgggtaagggtggctccggccaccatcatcaccatcactaatga

SEQ ID NO: 3274 - protein, 211 aa, synthetic construct
  REGION 1..211: note = Variant of 3'O-kinase
MAFTIGLTGGIAAGKSTVSAMMRELGLPVIDADEAARAVVRPGEEAYRQIVAAFGPGILRADGEIDRAKLGAIVFNDEQQRKVLNAIVHPAVRKKMLAEKEAHIRSGAKTVVLDIPLLFESGLVHWVDKVLVVYVDDDVQLRRLMARNGFTEEEALARIRSQWPMAEKVKRADAVIDNNGTIEETRRQLLAILHQWDALGKGGSGHHHHHH

SEQ ID NO: 3275 - DNA, 639 bp, synthetic construct
  misc_feature 1..639: note = Variant of 3'O-kinase
  source 1..639: mol_type = other DNA
atggcgtttaccattggtttaacaggagggatcgcatcgggcaaatcgactgtgagtgccatgatgcgtgaactgggtctgccggtcatcgatgctgacgaggcagcacgcgccgttgttcgtccaggcgaagaagcttatcgccagattgtagctgcgttcggtccgggcattcttcgtgccgatggcgagatcgatcgcgccaaattgggtgctatcgtgtttaacgacgaacaacaacgtaaggtgctgaatgcgattgtactgcctgcagtccgtaagaagatgctcgctgagaaagaagctcatatccgctcaggcgccaagacggttgtgctggatatcccgctgctgttcgaatccggattgtggcattgggtcgacaaagtgctcgtggtgtacgtcgatgatgatgttcagttacgccgccttatggcacgtaacgggtttaccgaagaagaagctctggcccgcattcgttcacagtggcccatggccgagaaagttaaacgtgcagacgctgtaatcgacaataatggcacgattgaagaaacccgccgccagctgctggccattttacaccagtgggatgcactgggtaagggtggctccggccaccatcatcaccatcactaatga

SEQ ID NO: 3276 - protein, 211 aa, synthetic construct
  REGION 1..211: note = Variant of 3'O-kinase
MAFTIGLTGGIASGKSTVSAMMRELGLPVIDADEAARAVVRPGEEAYRQIVAAFGPGILRADGEIDRAKLGAIVFNDEQQRKVLNAIVLPAVRKKMLAEKEAHIRSGAKTVVLDIPLLFESGLWHWVDKVLVVYVDDDVQLRRLMARNGFTEEEALARIRSQWPMAEKVKRADAVIDNNGTIEETRRQLLAILHQWDALGKGGSGHHHHHH

SEQ ID NO: 3277 - DNA, 639 bp, synthetic construct
  misc_feature 1..639: note = Variant of 3'O-kinase
  source 1..639: mol_type = other DNA
atggcgtttaccattggtttaacaggagggatcgcatcgggcaaatcgactgtgagtgccatgatgcgtgaactgggtctgccggtcatcgatgctgacgaggcagcacgcgccgttgttcgtccaggcgaagaagcttatcgccagattgtagctgcgttcggtccgggcattcttcgtgccgatggcgagatcgatcgcgccaaattgggtgctatcgtgtttgctgacgaacaacaacgtaaggtgctgaatgcgattgtaggtcctgcagtctataagaagatgctcgctgagaaagaagctcatatccgctcaggcgccaagacggttgtgctggatatcccgctgctgttcgaatccggattggttcattgggtcgacaaagtgctcgtggtgtacgtcgatgatgatgttcagttacgccgccttatggcacgtaacgggtttaccgaagaagaagctctggcccgcattcgttcacagtggcccatggccgagaaagttaaacgtgcagacgctgtaatcgacaataatggcacgattgaagaaacccgccgccagctgctggccattttacaccagtgggatgcactgggtaagggtggctccggccaccatcatcaccatcactaatga

SEQ ID NO: 3278 - protein, 211 aa, synthetic construct
  REGION 1..211: note = Variant of 3'O-kinase
MAFTIGLTGGIASGKSTVSAMMRELGLPVIDADEAARAVVRPGEEAYRQIVAAFGPGILRADGEIDRAKLGAIVFADEQQRKVLNAIVGPAVYKKMLAEKEAHIRSGAKTVVLDIPLLFESGLVHWVDKVLVVYVDDDVQLRRLMARNGFTEEEALARIRSQWPMAEKVKRADAVIDNNGTIEETRRQLLAILHQWDALGKGGSGHHHHHH

SEQ ID NO: 3279 - DNA, 639 bp, synthetic construct
  misc_feature 1..639: note = Variant of 3'O-kinase
  source 1..639: mol_type = other DNA
atggcgtttaccattggtttaacaggagggatcgcagtaggcaaatcgactgtgagtgccatgatgcgtgaactgggtctgccggtcatcgatgctgacgaggcagcacgcgccgttgttcgtccaggcgaagaagcttatcgccagattgtagctgcgttcggtccgggcattcttcgtgccgatggcgagatcgatcgcgccaaattgggtcgtatcgtgtttaacgacgaacaacaacgtaaggtgctgaatgcgattgtaggtcctgcagtccgtaagaagatgctcgctgagaaagaagctcatatccgctcaggcgccaagacggttgtgctggatatcccgctgctgttcgaatccggattgactcattgggtcgacaaagtgctcgtggtgtacgtcgatgatgatgttcagttacgccgccttatggcacgtaacgggtttaccgaagaagaagctctggcccgcattcgttcacagtggcccatggccgagaaagttaaacgtgcagacgctgtaatcgacaataatggcacgattgaagaaacccgccgccagctgctggccattttacaccagtgggatgcactgggtaagggtggctccggccaccatcatcaccatcactaatga

SEQ ID NO: 3280 - protein, 211 aa, synthetic construct
  REGION 1..211: note = Variant of 3'O-kinase
MAFTIGLTGGIAVGKSTVSAMMRELGLPVIDADEAARAVVRPGEEAYRQIVAAFGPGILRADGEIDRAKLGRIVFNDEQQRKVLNAIVGPAVRKKMLAEKEAHIRSGAKTVVLDIPLLFESGLTHWVDKVLVVYVDDDVQLRRLMARNGFTEEEALARIRSQWPMAEKVKRADAVIDNNGTIEETRRQLLAILHQWDALGKGGSGHHHHHH

SEQ ID NO: 3281 - DNA, 639 bp, synthetic construct
  misc_feature 1..639: note = Variant of 3'O-kinase
  source 1..639: mol_type = other DNA
atggcgtttaccattggtttaacaggagggatcgcaagcggcaaatcgactgtgagtgccatgatgcgtgaactgggtctgccggtcatcgatgctgacgaggcagcacgcgccgttgttcgtccaggcgaagaagcttatcgccagattgtagctgcgttcggtccgggcattcttcgtgccgatggcgagatcgatcgcgccaaattgggtcgtatcaagtttaacgacgaacaacaacgtaaggtgctgaatgcgattgtacaccctgcagtctataagaagatgctcgctgagaaagaagctcatatccgctcaggcgccaagacggttgtgctggatatcccgctgctgttcgaatccggattgactcattgggtcgacaaagtgctcgtggtgtacgtcgatgatgatgttcagttacgccgccttatggcacgtaacgggtttaccgaagaagaagctctggcccgcattcgttcacagtggcccatggccgagaaagttaaacgtgcagacgctgtaatcgacaataatggcacgattgaagaaacccgccgccagctgctggccattttacaccagtgggatgcactgggtaagggtggctccggccaccatcatcaccatcactaatga

SEQ ID NO: 3282 - protein, 211 aa, synthetic construct
  REGION 1..211: note = Variant of 3'O-kinase
MAFTIGLTGGIASGKSTVSAMMRELGLPVIDADEAARAVVRPGEEAYRQIVAAFGPGILRADGEIDRAKLGRIKFNDEQQRKVLNAIVHPAVYKKMLAEKEAHIRSGAKTVVLDIPLLFESGLTHWVDKVLVVYVDDDVQLRRLMARNGFTEEEALARIRSQWPMAEKVKRADAVIDNNGTIEETRRQLLAILHQWDALGKGGSGHHHHHH

SEQ ID NO: 3283 - DNA, 639 bp, synthetic construct
  misc_feature 1..639: note = Variant of 3'O-kinase
  source 1..639: mol_type = other DNA
atggcgtttaccattggtttaacaggagggatcgcagcgggcaaatcgactgtgagtgccatgatgcgtgaactgggtctgccggtcatcgatgctgacgaggcagcacgcgccgttgttcgtccaggcgaagaagcttatcgccagattgtagctgcgttcggtccgggcattcttcgtgccgatggcgagatcgatcgcgccaaattgggtcgtatcgtgtttgctgacgaacaacaacgtaaggtgctgaatgcgattgtacatcctgcagtccgcaagaagatgctcgctgagaaagaagctcatatccgctcaggcgccaagacggttgtgctggatatcccgctgctgttcgaatccggattgactcattgggtcgacaaagtgctcgtggtgtacgtcgatgatgatgttcagttacgccgccttatggcacgtaacgggtttaccgaagaagaagctctggcccgcattcgttcacagtggcccatggccgagaaagttaaacgtgcagacgctgtaatcgacaataatggcacgattgaagaaacccgccgccagctgctggccattttacaccagtgggatgcactgggtaagggtggctccggccaccatcatcaccatcactaatga

SEQ ID NO: 3284 - protein, 211 aa, synthetic construct
  REGION 1..211: note = Variant of 3'O-kinase
MAFTIGLTGGIAAGKSTVSAMMRELGLPVIDADEAARAVVRPGEEAYRQIVAAFGPGILRADGEIDRAKLGRIVFADEQQRKVLNAIVHPAVRKKMLAEKEAHIRSGAKTVVLDIPLLFESGLTHWVDKVLVVYVDDDVQLRRLMARNGFTEEEALARIRSQWPMAEKVKRADAVIDNNGTIEETRRQLLAILHQWDALGKGGSGHHHHHH

SEQ ID NO: 3285 - DNA, 639 bp, synthetic construct
  misc_feature 1..639: note = Variant of 3'O-kinase
  source 1..639: mol_type = other DNA
atggcgtttaccattggtttaacaggagggatcgcaagcggcaaatcgactgtgagtgccatgatgcgtgaactgggtctgccggtcatcgatgctgacgaggcagcccgcgaactggtgcgtccaggcgaagaagcttatcgccagattgtagctgcgttcggtccgggcattcttcgtgccgatggcgagatcgatcgcgccaaattgggtgccatcgtgtttaacgacgaacaacaacgtaaggtgctgaatgcgattgtacatcctgcagtccgcaagaagatgctcgctgagaaagaagctcatatccgctcaggcgccaagacggttgtgctggatatcccgctgctgttcgaatccggattgacccattgggtcgacaaagtgctcgtggtgtacgtcgatgatgatgttcagttacgccgccttatggcacgtaacgggtttaccgaagaagaagctctggcccgcattcgttcacagtggcccatggccgagaaagttaaacgtgcagacgctgtaatcgacaataatggcacgattgaagaaacccgccgccagctgctggccattttacaccagtgggatgcactgggtaagggtggctccggccaccatcatcaccatcactaatga

SEQ ID NO: 3286 - protein, 211 aa, synthetic construct
  REGION 1..211: note = Variant of 3'O-kinase
MAFTIGLTGGIASGKSTVSAMMRELGLPVIDADEAARELVRPGEEAYRQIVAAFGPGILRADGEIDRAKLGAIVFNDEQQRKVLNAIVHPAVRKKMLAEKEAHIRSGAKTVVLDIPLLFESGLTHWVDKVLVVYVDDDVQLRRLMARNGFTEEEALARIRSQWPMAEKVKRADAVIDNNGTIEETRRQLLAILHQWDALGKGGSGHHHHHH

SEQ ID NO: 3287 - DNA, 639 bp, synthetic construct
  misc_feature 1..639: note = Variant of 3'O-kinase
  source 1..639: mol_type = other DNA
atggcgtttaccattggtttaacaggagggatcgcatcgggcaaatcgactgtgagtgccatgatgcgtgaactgggtctgccggtcatcgatgctgacgaggcaacccgcgcactgatgcgtccaggcgaagaagcttatcgccagattgtagctgcgttcggtccgggcattcttcgtgccgatggcgagatcgatcgcgccaaattgggtgctatcgtgtttgctgacgaacaacaacgtaaggtgctgaatgcgattgtacaccctgcagtctataagaagatgctcgctgagaaagaagctcatatccgctcaggcgccaagacggttgtgctggatatcccgctgctgttcgaatccggattgactcattgggtcgacaaagtgctcgtggtgtacgtcgatgatgatgttcagttacgccgccttatggcacgtaacgggtttaccgaagaagaagctatggcccgcattcgttcacagtggcccatggccgagaaagttaaacgtgcagacgctgtaatcgacaataatggcacgattgaagaaacccgccgccagctgctggccattttacaccagtgggatgcactgggtaagggtggctccggccaccatcatcaccatcactaatga

SEQ ID NO: 3288 - protein, 211 aa, synthetic construct
  REGION 1..211: note = Variant of 3'O-kinase
MAFTIGLTGGIASGKSTVSAMMRELGLPVIDADEATRALMRPGEEAYRQIVAAFGPGILRADGEIDRAKLGAIVFADEQQRKVLNAIVHPAVYKKMLAEKEAHIRSGAKTVVLDIPLLFESGLTHWVDKVLVVYVDDDVQLRRLMARNGFTEEEAMARIRSQWPMAEKVKRADAVIDNNGTIEETRRQLLAILHQWDALGKGGSGHHHHHH

SEQ ID NO: 3289 - DNA, 639 bp, synthetic construct
  misc_feature 1..639: note = Variant of 3'O-kinase
  source 1..639: mol_type = other DNA
atggcgtttaccattggtttaacaggagggatcgcagtaggcaaatcgactgtgagtgccatgatgcgtgaactgggtctgccggtcatcgatgctgacgaggcagcacgcgccgttgttcgtccaggcgaagaagcttatcgccagattgtagctgcgttcggtccgggcattcttcgtgccgatggcgagatcgatcgcgccaaattgggtgctatcgtgtttaacgacgaacaacaacgtaaggtgctgaatgcgattgtacaccctgcagtccgtaagaagatgctcgctgagaaagaagctcatatccgctcaggcgccaagacggttgtgctggatatcccgctgctgttcgaatccggattggttcattgggtcgacaaagtgctcgtggtgtacgtcgatgatgatgttcagttacgccgccttatggcacgtaacgggtttaccgaagaagaagctctggcccgcattcgttcacagtggcccatggccgagaaagttaaacgtgcagacgctgtaatcgacaataatggcacgattgaagaaacccgccgccagctgctggccattttacaccagtgggatgcactgggtaagggtggctccggccaccatcatcaccatcactaatga

SEQ ID NO: 3290 - protein, 211 aa, synthetic construct
  REGION 1..211: note = Variant of 3'O-kinase
MAFTIGLTGGIAVGKSTVSAMMRELGLPVIDADEAARAVVRPGEEAYRQIVAAFGPGILRADGEIDRAKLGAIVFNDEQQRKVLNAIVHPAVRKKMLAEKEAHIRSGAKTVVLDIPLLFESGLVHWVDKVLVVYVDDDVQLRRLMARNGFTEEEALARIRSQWPMAEKVKRADAVIDNNGTIEETRRQLLAILHQWDALGKGGSGHHHHHH

SEQ ID NO: 3291 - DNA, 639 bp, synthetic construct
  misc_feature 1..639: note = Variant of 3'O-kinase
  source 1..639: mol_type = other DNA
atggcgtttaccattggtttaacaggagggatcgcagtaggcaaatcgactgtgagtgccatgatgcgtgaactgggtctgccggtcatcgatgctgacgaggcagcacgcgccgttgttcgtccaggcgaagaagcttatcgccagattgtagctgcgttcggtccgggcattcttcgtgccgatggcgagatcgatcgcgccaaattgggtcgtatcaagtttgctgacgaacaacaacgtaaggtgctgaatgcgattgtactgcctgcagtctataagaagatgctcgctgagaaagaagctcatatccgctcaggcgccaagacggttgtgctggatatcccgctgctgttcgaatccggattggttcattgggtcgacaaagtgctcgtggtgtacgtcgatgatgatgttcagttacgccgccttatggcacgtaacgggtttaccgaagaagaagctctggcccgcattcgttcacagtggcccatggccgagaaagttaaacgtgcagacgctgtaatcgacaataatggcacgattgaagaaacccgccgccagctgctggccattttacaccagtgggatgcactgggtaagggtggctccggccaccatcatcaccatcactaatga

SEQ ID NO: 3292 - protein, 211 aa, synthetic construct
  REGION 1..211: note = Variant of 3'O-kinase
MAFTIGLTGGIAVGKSTVSAMMRELGLPVIDADEAARAVVRPGEEAYRQIVAAFGPGILRADGEIDRAKLGRIKFADEQQRKVLNAIVLPAVYKKMLAEKEAHIRSGAKTVVLDIPLLFESGLVHWVDKVLVVYVDDDVQLRRLMARNGFTEEEALARIRSQWPMAEKVKRADAVIDNNGTIEETRRQLLAILHQWDALGKGGSGHHHHHH

SEQ ID NO: 3293 - DNA, 639 bp, synthetic construct
  misc_feature 1..639: note = Variant of 3'O-kinase
  source 1..639: mol_type = other DNA
atggcgtttaccattggtttaacaggagggatcgcagtaggcaaatcgactgtgagtgccatgatgcgtgaactgggtctgccggtcatcgatgctgacgaggcagcacgcgccgttgttcgtccaggcgaagaagcttatcgccagattgtagctgcgttcggtccgggcattcttcgtgccgatggcgagatcgatcgcgccaaattgggtcgtatcgtgtttaacgacgaacaacaacgtaaggtgctgaatgcgattgtacatcctgcagtccgcaagaagatgctcgctgagaaagaagctcatatccgctcaggcgccaagacggttgtgctggatatcccgctgctgttcgaatccggattgtggcattgggtcgacaaagtgctcgtggtgtacgtcgatgatgatgttcagttacgccgccttatggcacgtaacgggtttaccgaagaagaagctctggcccgcattcgttcacagtggcccatggccgagaaagttaaacgtgcagacgctgtaatcgacaataatggcacgattgaagaaacccgccgccagctgctggccattttacaccagtgggatgcactgggtaagggtggctccggccaccatcatcaccatcactaatga

SEQ ID NO: 3294 - protein, 211 aa, synthetic construct
  REGION 1..211: note = Variant of 3'O-kinase
MAFTIGLTGGIAVGKSTVSAMMRELGLPVIDADEAARAVVRPGEEAYRQIVAAFGPGILRADGEIDRAKLGRIVFNDEQQRKVLNAIVHPAVRKKMLAEKEAHIRSGAKTVVLDIPLLFESGLWHWVDKVLVVYVDDDVQLRRLMARNGFTEEEALARIRSQWPMAEKVKRADAVIDNNGTIEETRRQLLAILHQWDALGKGGSGHHHHHH

SEQ ID NO: 3295 - DNA, 639 bp, synthetic construct
  misc_feature 1..639: note = Variant of 3'O-kinase
  source 1..639: mol_type = other DNA
atggcgtttaccattggtttaacaggagggatcgcagtaggcaaatcgactgtgagtgccatgatgcgtgaactgggtctgccggtcatcgatgctgacgaggcaacccgcgcagtgatgcgtccaggcgaagaagcttatcgccagattgtagctgcgttcggtccgggcattcttcgtgccgatggcgagatcgatcgcgccaaattgggtcgtatcgtgtttaacgacgaacaacaacgtaaggtgctgaatgcgattgtacatcctgcagtccgtaagaagatgctcgctgagaaagaagctcatatccgctcaggcgccaagacggttgtgctggatatcccgctgctgttcgaatccggattgacccattgggtcgacaaagtgctcgtggtgtacgtcgatgatgatgttcagttacgccgccttatggcacgtaacgggtttaccgaagaagaagctatggcccgcattcgttcacagtggcccatggccgagaaagttaaacgtgcagacgctgtaatcgacaataatggcacgattgaagaaacccgccgccagctgctggccattttacaccagtgggatgcactgggtaagggtggctccggccaccatcatcaccatcactaatga

SEQ ID NO: 3296 - protein, 211 aa, synthetic construct
  REGION 1..211: note = Variant of 3'O-kinase
MAFTIGLTGGIAVGKSTVSAMMRELGLPVIDADEATRAVMRPGEEAYRQIVAAFGPGILRADGEIDRAKLGRIVFNDEQQRKVLNAIVHPAVRKKMLAEKEAHIRSGAKTVVLDIPLLFESGLTHWVDKVLVVYVDDDVQLRRLMARNGFTEEEAMARIRSQWPMAEKVKRADAVIDNNGTIEETRRQLLAILHQWDALGKGGSGHHHHHH

SEQ ID NO: 3297 - DNA, 639 bp, synthetic construct
  misc_feature 1..639: note = Variant of 3'O-kinase
  source 1..639: mol_type = other DNA
atggcgtttaccattggtttaacaggagggatcgcatcgggcaaatcgactgtgagtgccatgatgcgtgaactgggtctgccggtcatcgatgctgacgaggcagcacgcgccgttgtgcgtccaggcgaagaagcttatcgccagattgtagctgcgttcggtccgggcattcttcgtgccgatggcgagatcgatcgcgccaaattgggtcgtatcaagtttgctgacgaacaacaacgtaaggtgctgaatgcgattgtaggtcctgcagtccgtaagaagatgctcgctgagaaagaagctcatatccgctcaggcgccaagacggttgtgctggatatcccgctgctgttcgaatccggattggttcattgggtcgacaaagtgctcgtggtgtacgtcgatgatgatgttcagttacgccgccttatggcacgtaacgggtttaccgaagaagaagctctggcccgcattcgttcacagtggcccatggccgagaaagttaaacgtgcagacgctgtaatcgacaataatggcacgattgaagaaacccgccgccagctgctggccattttacaccagtgggatgcactgggtaagggtggctccggccaccatcatcaccatcactaatga

SEQ ID NO: 3298 - protein, 211 aa, synthetic construct
  REGION 1..211: note = Variant of 3'O-kinase
MAFTIGLTGGIASGKSTVSAMMRELGLPVIDADEAARAVVRPGEEAYRQIVAAFGPGILRADGEIDRAKLGRIKFADEQQRKVLNAIVGPAVRKKMLAEKEAHIRSGAKTVVLDIPLLFESGLVHWVDKVLVVYVDDDVQLRRLMARNGFTEEEALARIRSQWPMAEKVKRADAVIDNNGTIEETRRQLLAILHQWDALGKGGSGHHHHHH

SEQ ID NO: 3299 - DNA, 639 bp, synthetic construct
  misc_feature 1..639: note = Variant of 3'O-kinase
  source 1..639: mol_type = other DNA
atggcgtttaccattggtttaacaggagggatcgcagcgggcaaatcgactgtgagtgccatgatgcgtgaactgggtctgccggtcatcgatgctgacgaggcaacccgcgaagtgatgcgtccaggcgaagaagcttatcgccagattgtagctgcgttcggtccgggcattcttcgtgccgatggcgagatcgatcgcgccaaattgggtgctatcgtgtttaacgacgaacaacaacgtaaggtgctgaatgcgattgtacatcctgcagtccgcaagaagatgctcgctgagaaagaagctcatatccgctcaggcgccaagacggttgtgctggatatcccgctgctgttcgaatccggattgacccattgggtcgacaaagtgctcgtggtgtacgtcgatgatgatgttcagttacgccgccttatggcacgtaacgggtttaccgaagaagaagctctggcccgcattcgttcacagtggcccatggccgagaaagttaaacgtgcagacgctgtaatcgacaataatggcacgattgaagaaacccgccgccagctgctggccattttacaccagtgggatgcactgggtaagggtggctccggccaccatcatcaccatcactaatga

SEQ ID NO: 3300 - protein, 211 aa, synthetic construct
  REGION 1..211: note = Variant of 3'O-kinase
MAFTIGLTGGIAAGKSTVSAMMRELGLPVIDADEATREVMRPGEEAYRQIVAAFGPGILRADGEIDRAKLGAIVFNDEQQRKVLNAIVHPAVRKKMLAEKEAHIRSGAKTVVLDIPLLFESGLTHWVDKVLVVYVDDDVQLRRLMARNGFTEEEALARIRSQWPMAEKVKRADAVIDNNGTIEETRRQLLAILHQWDALGKGGSGHHHHHH

SEQ ID NO: 3301 - DNA, 639 bp, synthetic construct
  misc_feature 1..639: note = Variant of 3'O-kinase
  source 1..639: mol_type = other DNA
atggcgtttaccattggtttaacaggagggatcgcagtaggcaaatcgactgtgagtgccatgatgcgtgaactgggtctgccggtcatcgatgctgacgaggcagcacgcgccgttgttcgtccaggcgaagaagcttatcgccagattgtagctgcgttcggtccgggcattcttcgtgccgatggcgagatcgatcgcgccaaattgggtcgtatcgtgtttaacgacgaacaacaacgtaaggtgctgaatgcgattgtacatcctgcagtccgcaagaagatgctcgctgagaaagaagctcatatccgctcaggcgccaagacggttgtgctggatatcccgctgctgttcgaatccggattgacccattgggtcgacaaagtgctcgtggtgtacgtcgatgatgatgttcagttacgccgccttatggcacgtaacgggtttaccgaagaagaagctctggcccgcattcgttcacagtggcccatggccgagaaagttaaacgtgcagacgctgtaatcgacaataatggcacgattgaagaaacccgccgccagctgctggccattttacaccagtgggatgcactgggtaagggtggctccggccaccatcatcaccatcactaatga

SEQ ID NO: 3302 - protein, 211 aa, synthetic construct
  REGION 1..211: note = Variant of 3'O-kinase
MAFTIGLTGGIAVGKSTVSAMMRELGLPVIDADEAARAVVRPGEEAYRQIVAAFGPGILRADGEIDRAKLGRIVFNDEQQRKVLNAIVHPAVRKKMLAEKEAHIRSGAKTVVLDIPLLFESGLTHWVDKVLVVYVDDDVQLRRLMARNGFTEEEALARIRSQWPMAEKVKRADAVIDNNGTIEETRRQLLAILHQWDALGKGGSGHHHHHH

SEQ ID NO: 3303 - DNA, 639 bp, synthetic construct
  misc_feature 1..639: note = Variant of 3'O-kinase
  source 1..639: mol_type = other DNA
atggcgtttaccattggtttaacaggagggatcgcatcgggcaaatcgactgtgagtgccatgatgcgtgaactgggtctgccggtcatcgatgctgacgaggcagcacgcgccgttgttcgtccaggcgaagaagcttatcgccagattgtagctgcgttcggtccgggcattcttcgtgccgatggcgagatcgatcgcgccaaattgggtgctatcgtgtttgctgacgaacaacaacgtaaggtgctgaatgcgattgtacaccctgcagtctataagaagatgctcgctgagaaagaagctcatatccgctcaggcgccaagacggttgtgctggatatcccgctgctgttcgaatccggattgactcattgggtcgacaaagtgctcgtggtgtacgtcgatgatgatgttcagttacgccgccttatggcacgtaacgggtttaccgaagaagaagctctggcccgcattcgttcacagtggcccatggccgagaaagttaaacgtgcagacgctgtaatcgacaataatggcacgattgaagaaacccgccgccagctgctggccattttacaccagtgggatgcactgggtaagggtggctccggccaccatcatcaccatcactaatga

SEQ ID NO: 3304 - protein, 211 aa, synthetic construct
  REGION 1..211: note = Variant of 3'O-kinase
MAFTIGLTGGIASGKSTVSAMMRELGLPVIDADEAARAVVRPGEEAYRQIVAAFGPGILRADGEIDRAKLGAIVFADEQQRKVLNAIVHPAVYKKMLAEKEAHIRSGAKTVVLDIPLLFESGLTHWVDKVLVVYVDDDVQLRRLMARNGFTEEEALARIRSQWPMAEKVKRADAVIDNNGTIEETRRQLLAILHQWDALGKGGSGHHHHHH

SEQ ID NO: 3305 - DNA, 639 bp, synthetic construct
  misc_feature 1..639: note = Variant of 3'O-kinase
  source 1..639: mol_type = other DNA
atggcgtttaccattggtttaacaggagggatcgcagcgggcaaatcgactgtgagtgccatgatgcgtgaactgggtctgccggtcatcgatgctgacgaggcagcacgcgccgttgttcgtccaggcgaagaagcttatcgccagattgtagctgcgttcggtccgggcattcttcgtgccgatggcgagatcgatcgcgccaaattgggtgctatcaagtttaacgacgaacaacaacgtaaggtgctgaatgcgattgtaggtcctgcagtccgtaagaagatgctcgctgagaaagaagctcatatccgctcaggcgccaagacggttgtgctggatatcccgctgctgttcgaatccggattgactcattgggtcgacaaagtgctcgtggtgtacgtcgatgatgatgttcagttacgccgccttatggcacgtaacgggtttaccgaagaagaagctatggcccgcattcgttcacagtggcccatggccgagaaagttaaacgtgcagacgctgtaatcgacaataatggcacgattgaagaaacccgccgccagctgctggccattttacaccagtgggatgcactgggtaagggtggctccggccaccatcatcaccatcactaatga

SEQ ID NO: 3306 - protein, 211 aa, synthetic construct
  REGION 1..211: note = Variant of 3'O-kinase
MAFTIGLTGGIAAGKSTVSAMMRELGLPVIDADEAARAVVRPGEEAYRQIVAAFGPGILRADGEIDRAKLGAIKFNDEQQRKVLNAIVGPAVRKKMLAEKEAHIRSGAKTVVLDIPLLFESGLTHWVDKVLVVYVDDDVQLRRLMARNGFTEEEAMARIRSQWPMAEKVKRADAVIDNNGTIEETRRQLLAILHQWDALGKGGSGHHHHHH

SEQ ID NO: 3307 - DNA, 639 bp, synthetic construct
  misc_feature 1..639: note = Variant of 3'O-kinase
  source 1..639: mol_type = other DNA
atggcgtttaccattggtttaacaggagggatcgcagtaggcaaatcgactgtgagtgccatgatgcgtgaactgggtctgccggtcatcgatgctgacgaggcagcacgcgccgttgttcgtccaggcgaagaagcttatcgccagattgtagctgcgttcggtccgggcattcttcgtgccgatggcgagatcgatcgcgccaaattgggtgctatcgtgtttaacgacgaacaacaacgtaaggtgctgaatgcgattgtacaccctgcagtccgtaagaagatgctcgctgagaaagaagctcatatccgctcaggcgccaagacggttgtgctggatatcccgctgctgttcgaatccggattgactcattgggtcgacaaagtgctcgtggtgtacgtcgatgatgatgttcagttacgccgccttatggcacgtaacgggtttaccgaagaagaagctatggcccgcattcgttcacagtggcccatggccgagaaagttaaacgtgcagacgctgtaatcgacaataatggcacgattgaagaaacccgccgccagctgctggccattttacaccagtgggatgcactgggtaagggtggctccggccaccatcatcaccatcactaatga

SEQ ID NO: 3308 - protein, 211 aa, synthetic construct
  REGION 1..211: note = Variant of 3'O-kinase
MAFTIGLTGGIAVGKSTVSAMMRELGLPVIDADEAARAVVRPGEEAYRQIVAAFGPGILRADGEIDRAKLGAIVFNDEQQRKVLNAIVHPAVRKKMLAEKEAHIRSGAKTVVLDIPLLFESGLTHWVDKVLVVYVDDDVQLRRLMARNGFTEEEAMARIRSQWPMAEKVKRADAVIDNNGTIEETRRQLLAILHQWDALGKGGSGHHHHHH

SEQ ID NO: 3309 - DNA, 639 bp, synthetic construct
  misc_feature 1..639: note = Variant of 3'O-kinase
  source 1..639: mol_type = other DNA
atggcgtttaccattggtttaacaggagggatcgcagtaggcaaatcgactgtgagtgccatgatgcgtgaactgggtctgccggtcatcgatgctgacgaggcagcacgcgccgttgtgcgtccaggcgaagaagcttatcgccagattgtagctgcgttcggtccgggcattcttcgtgccgatggcgagatcgatcgcgccaaattgggtcgtatcgtgtttgctgacgaacaacaacgtaaggtgctgaatgcgattgtacatcctgcagtccgtaagaagatgctcgctgagaaagaagctcatatccgctcaggcgccaagacggttgtgctggatatcccgctgctgttcgaatccggattggttcattgggtcgacaaagtgctcgtggtgtacgtcgatgatgatgttcagttacgccgccttatggcacgtaacgggtttaccgaagaagaagctatggcccgcattcgttcacagtggcccatggccgagaaagttaaacgtgcagacgctgtaatcgacaataatggcacgattgaagaaacccgccgccagctgctggccattttacaccagtgggatgcactgggtaagggtggctccggccaccatcatcaccatcactaatga

SEQ ID NO: 3310 - protein, 211 aa, synthetic construct
  REGION 1..211: note = Variant of 3'O-kinase
MAFTIGLTGGIAVGKSTVSAMMRELGLPVIDADEAARAVVRPGEEAYRQIVAAFGPGILRADGEIDRAKLGRIVFADEQQRKVLNAIVHPAVRKKMLAEKEAHIRSGAKTVVLDIPLLFESGLVHWVDKVLVVYVDDDVQLRRLMARNGFTEEEAMARIRSQWPMAEKVKRADAVIDNNGTIEETRRQLLAILHQWDALGKGGSGHHHHHH

SEQ ID NO: 3311 - DNA, 639 bp, synthetic construct
  misc_feature 1..639: note = Variant of 3'O-kinase
  source 1..639: mol_type = other DNA
atggcgtttaccattggtttaacaggagggatcgcatcgggcaaatcgactgtgagtgccatgatgcgtgaactgggtctgccggtcatcgatgctgacgaggcagcacgcgttgttgttcgtccaggcgaagaagcttatcgccagattgtagctgcgttcggtccgggcattcttcgtgccgatggcgagatcgatcgcgccaaattgggtcgtatcgtgtttgctgacgaacaacaacgtaaggtgctgaatgcgattgtaggtcctgcagtccgtaagaagatgctcgctgagaaagaagctcatatccgctcaggcgccaagacggttgtgctggatatcccgctgctgttcgaatccggattgacccattgggtcgacaaagtgctcgtggtgtacgtcgatgatgatgttcagttacgccgccttatggcacgtaacgggtttaccgaagaagaagctctggcccgcattcgttcacagtggcccatggccgagaaagttaaacgtgcagacgctgtaatcgacaataatggcacgattgaagaaacccgccgccagctgctggccattttacaccagtgggatgcactgggtaagggtggctccggccaccatcatcaccatcactaatga

SEQ ID NO: 3312 - protein, 211 aa, synthetic construct
  REGION 1..211: note = Variant of 3'O-kinase
MAFTIGLTGGIASGKSTVSAMMRELGLPVIDADEAARVVVRPGEEAYRQIVAAFGPGILRADGEIDRAKLGRIVFADEQQRKVLNAIVGPAVRKKMLAEKEAHIRSGAKTVVLDIPLLFESGLTHWVDKVLVVYVDDDVQLRRLMARNGFTEEEALARIRSQWPMAEKVKRADAVIDNNGTIEETRRQLLAILHQWDALGKGGSGHHHHHH

SEQ ID NO: 3313 - DNA, 639 bp, synthetic construct
  misc_feature 1..639: note = Variant of 3'O-kinase
  source 1..639: mol_type = other DNA
atggcgtttaccattggtttaacaggagggatcgcatcgggcaaatcgactgtgagtgccatgatgcgtgaactgggtctgccggtcatcgatgctgacgaggcagcacgcgccgttgttcgtccaggcgaagaagcttatcgccagattgtagctgcgttcggtccgggcattcttcgtgccgatggcgagatcgatcgcgccaaattgggtcgtatcgtgtttgctgacgaacaacaacgtaaggtgctgaatgcgattgtacatcctgcagtccgtaagaagatgctcgctgagaaagaagctcatatccgctcaggcgccaagacggttgtgctggatatcccgctgctgttcgaatccggattggttcattgggtcgacaaagtgctcgtggtgtacgtcgatgatgatgttcagttacgccgccttatggcacgtaacgggtttaccgaagaagaagctctggcccgcattcgttcacagtggcccatggccgagaaagttaaacgtgcagacgctgtaatcgacaataatggcacgattgaagaaacccgccgccagctgctggccattttacaccagtgggatgcactgggtaagggtggctccggccaccatcatcaccatcactaatga

SEQ ID NO: 3314 - protein, 211 aa, synthetic construct
  REGION 1..211: note = Variant of 3'O-kinase
MAFTIGLTGGIASGKSTVSAMMRELGLPVIDADEAARAVVRPGEEAYRQIVAAFGPGILRADGEIDRAKLGRIVFADEQQRKVLNAIVHPAVRKKMLAEKEAHIRSGAKTVVLDIPLLFESGLVHWVDKVLVVYVDDDVQLRRLMARNGFTEEEALARIRSQWPMAEKVKRADAVIDNNGTIEETRRQLLAILHQWDALGKGGSGHHHHHH

SEQ ID NO: 3315 - DNA, 639 bp, synthetic construct
  misc_feature 1..639: note = Variant of 3'O-kinase
  source 1..639: mol_type = other DNA
atggcgtttaccattggtttaacaggagggatcgcatcgggcaaatcgactgtgagtgccatgatgcgtgaactgggtctgccggtcatcgatgctgacgaggcagcacgcgaagtgatgcgtccaggcgaagaagcttatcgccagattgtagctgcgttcggtccgggcattcttcgtgccgatggcgagatcgatcgcgccaaattgggtcgtatcgtgtttaacgacgaacaacaacgtaaggtgctgaatgcgattgtacatcctgcagtccgcaagaagatgctcgctgagaaagaagctcatatccgctcaggcgccaagacggttgtgctggatatcccgctgctgttcgaatccggattgacccattgggtcgacaaagtgctcgtggtgtacgtcgatgatgatgttcagttacgccgccttatggcacgtaacgggtttaccgaagaagaagctctggcccgcattcgttcacagtggcccatggccgagaaagttaaacgtgcagacgctgtaatcgacaataatggcacgattgaagaaacccgccgccagctgctggccattttacaccagtgggatgcactgggtaagggtggctccggccaccatcatcaccatcactaatga

SEQ ID NO: 3316 - protein, 211 aa, synthetic construct
  REGION 1..211: note = Variant of 3'O-kinase
MAFTIGLTGGIASGKSTVSAMMRELGLPVIDADEAAREVMRPGEEAYRQIVAAFGPGILRADGEIDRAKLGRIVFNDEQQRKVLNAIVHPAVRKKMLAEKEAHIRSGAKTVVLDIPLLFESGLTHWVDKVLVVYVDDDVQLRRLMARNGFTEEEALARIRSQWPMAEKVKRADAVIDNNGTIEETRRQLLAILHQWDALGKGGSGHHHHHH

SEQ ID NO: 3317 - DNA, 639 bp, synthetic construct
  misc_feature 1..639: note = Variant of 3'O-kinase
  source 1..639: mol_type = other DNA
atggcgtttaccattggtttaacaggagggatcgcaagcggcaaatcgactgtgagtgccatgatgcgtgaactgggtctgccggtcatcgatgctgacgaggcagcacgcgccgttgttcgtccaggcgaagaagcttatcgccagattgtagctgcgttcggtccgggcattcttcgtgccgatggcgagatcgatcgcgccaaattgggtcgtatcgtgtttgctgacgaacaacaacgtaaggtgctgaatgcgattgtacatcctgcagtccgcaagaagatgctcgctgagaaagaagctcatatccgctcaggcgccaagacggttgtgctggatatcccgctgctgttcgaatccggattgtggcattgggtcgacaaagtgctcgtggtgtacgtcgatgatgatgttcagttacgccgccttatggcacgtaacgggtttaccgaagaagaagctctggcccgcattcgttcacagtggcccatggccgagaaagttaaacgtgcagacgctgtaatcgacaataatggcacgattgaagaaacccgccgccagctgctggccattttacaccagtgggatgcactgggtaagggtggctccggccaccatcatcaccatcactaatga

SEQ ID NO: 3318 - protein, 211 aa, synthetic construct
  REGION 1..211: note = Variant of 3'O-kinase
MAFTIGLTGGIASGKSTVSAMMRELGLPVIDADEAARAVVRPGEEAYRQIVAAFGPGILRADGEIDRAKLGRIVFADEQQRKVLNAIVHPAVRKKMLAEKEAHIRSGAKTVVLDIPLLFESGLWHWVDKVLVVYVDDDVQLRRLMARNGFTEEEALARIRSQWPMAEKVKRADAVIDNNGTIEETRRQLLAILHQWDALGKGGSGHHHHHH

SEQ ID NO: 3319 - DNA, 639 bp, synthetic construct
  misc_feature 1..639: note = Variant of 3'O-kinase
  source 1..639: mol_type = other DNA
atggcgtttaccattggtttaacaggagggatcgcagcgggcaaatcgactgtgagtgccatgatgcgtgaactgggtctgccggtcatcgatgctgacgaggcagcacgcgccgttgttcgtccaggcgaagaagcttatcgccagattgtagctgcgttcggtccgggcattcttcgtgccgatggcgagatcgatcgcgccaaattgggtgctatcgtgtttgctgacgaacaacaacgtaaggtgctgaatgcgattgtacatcctgcagtccgcaagaagatgctcgctgagaaagaagctcatatccgctcaggcgccaagacggttgtgctggatatcccgctgctgttcgaatccggattgacccattgggtcgacaaagtgctcgtggtgtacgtcgatgatgatgttcagttacgccgccttatggcacgtaacgggtttaccgaagaagaagctctggcccgcattcgttcacagtggcccatggccgagaaagttaaacgtgcagacgctgtaatcgacaataatggcacgattgaagaaacccgccgccagctgctggccattttacaccagtgggatgcactgggtaagggtggctccggccaccatcatcaccatcactaatga

SEQ ID NO: 3320 - protein, 211 aa, synthetic construct
  REGION 1..211: note = Variant of 3'O-kinase
MAFTIGLTGGIAAGKSTVSAMMRELGLPVIDADEAARAVVRPGEEAYRQIVAAFGPGILRADGEIDRAKLGAIVFADEQQRKVLNAIVHPAVRKKMLAEKEAHIRSGAKTVVLDIPLLFESGLTHWVDKVLVVYVDDDVQLRRLMARNGFTEEEALARIRSQWPMAEKVKRADAVIDNNGTIEETRRQLLAILHQWDALGKGGSGHHHHHH

SEQ ID NO: 3321 - DNA, 639 bp, synthetic construct
  misc_feature 1..639: note = Variant of 3'O-kinase
  source 1..639: mol_type = other DNA
atggcgtttaccattggtttaacaggagggatcgcaagcggcaaatcgactgtgagtgccatgatgcgtgaactgggtctgccggtcatcgatgctgacgaggcagcacgcgccgttgttcgtccaggcgaagaagcttatcgccagattgtagctgcgttcggtccgggcattcttcgtgccgatggcgagatcgatcgcgccaaattgggtgctatcgtgtttaacgacgaacaacaacgtaaggtgctgaatgcgattgtacatcctgcagtccgcaagaagatgctcgctgagaaagaagctcatatccgctcaggcgccaagacggttgtgctggatatcccgctgctgttcgaatccggattgtggcattgggtcgacaaagtgctcgtggtgtacgtcgatgatgatgttcagttacgccgccttatggcacgtaacgggtttaccgaagaagaagctatggcccgcattcgttcacagtggcccatggccgagaaagttaaacgtgcagacgctgtaatcgacaataatggcacgattgaagaaacccgccgccagctgctggccattttacaccagtgggatgcactgggtaagggtggctccggccaccatcatcaccatcactaatga

SEQ ID NO: 3322 - protein, 211 aa, synthetic construct
  REGION 1..211: note = Variant of 3'O-kinase
MAFTIGLTGGIASGKSTVSAMMRELGLPVIDADEAARAVVRPGEEAYRQIVAAFGPGILRADGEIDRAKLGAIVFNDEQQRKVLNAIVHPAVRKKMLAEKEAHIRSGAKTVVLDIPLLFESGLWHWVDKVLVVYVDDDVQLRRLMARNGFTEEEAMARIRSQWPMAEKVKRADAVIDNNGTIEETRRQLLAILHQWDALGKGGSGHHHHHH

SEQ ID NO: 3323 - DNA, 639 bp, synthetic construct
  misc_feature 1..639: note = Variant of 3'O-kinase
  source 1..639: mol_type = other DNA
atggcgtttaccattggtttaacaggagggatcgcagcgggcaaatcgactgtgagtgccatgatgcgtgaactgggtctgccggtcatcgatgctgacgaggcagcccgcgaagtggtgcgtccaggcgaagaagcttatcgccagattgtagctgcgttcggtccgggcattcttcgtgccgatggcgagatcgatcgcgccaaattgggtcgtatcgtgtttaacgacgaacaacaacgtaaggtgctgaatgcgattgtacatcctgcagtccgcaagaagatgctcgctgagaaagaagctcatatccgctcaggcgccaagacggttgtgctggatatcccgctgctgttcgaatccggattgacccattgggtcgacaaagtgctcgtggtgtacgtcgatgatgatgttcagttacgccgccttatggcacgtaacgggtttaccgaagaagaagctatggcccgcattcgttcacagtggcccatggccgagaaagttaaacgtgcagacgctgtaatcgacaataatggcacgattgaagaaacccgccgccagctgctggccattttacaccagtgggatgcactgggtaagggtggctccggccaccatcatcaccatcactaatga

SEQ ID NO: 3324 - protein, 211 aa, synthetic construct
  REGION 1..211: note = Variant of 3'O-kinase
MAFTIGLTGGIAAGKSTVSAMMRELGLPVIDADEAAREVVRPGEEAYRQIVAAFGPGILRADGEIDRAKLGRIVFNDEQQRKVLNAIVHPAVRKKMLAEKEAHIRSGAKTVVLDIPLLFESGLTHWVDKVLVVYVDDDVQLRRLMARNGFTEEEAMARIRSQWPMAEKVKRADAVIDNNGTIEETRRQLLAILHQWDALGKGGSGHHHHHH

SEQ ID NO: 3325 - DNA, 639 bp, synthetic construct
  misc_feature 1..639: note = Variant of 3'O-kinase
  source 1..639: mol_type = other DNA
atggcgtttaccattggtttaacaggagggatcgcatcgggcaaatcgactgtgagtgccatgatgcgtgaactgggtctgccggtcatcgatgctgacgaggcagcacgcgccgttgttcgtccaggcgaagaagcttatcgccagattgtagctgcgttcggtccgggcattcttcgtgccgatggcgagatcgatcgcgccaaattgggtgctatcaagtttaacgacgaacaacaacgtaaggtgctgaatgcgattgtactgcctgcagtccgtaagaagatgctcgctgagaaagaagctcatatccgctcaggcgccaagacggttgtgctggatatcccgctgctgttcgaatccggattgacccattgggtcgacaaagtgctcgtggtgtacgtcgatgatgatgttcagttacgccgccttatggcacgtaacgggtttaccgaagaagaagctctggcccgcattcgttcacagtggcccatggccgagaaagttaaacgtgcagacgctgtaatcgacaataatggcacgattgaagaaacccgccgccagctgctggccattttacaccagtgggatgcactgggtaagggtggctccggccaccatcatcaccatcactaatga

SEQ ID NO: 3326 - protein, 211 aa, synthetic construct
  REGION 1..211: note = Variant of 3'O-kinase
MAFTIGLTGGIASGKSTVSAMMRELGLPVIDADEAARAVVRPGEEAYRQIVAAFGPGILRADGEIDRAKLGAIKFNDEQQRKVLNAIVLPAVRKKMLAEKEAHIRSGAKTVVLDIPLLFESGLTHWVDKVLVVYVDDDVQLRRLMARNGFTEEEALARIRSQWPMAEKVKRADAVIDNNGTIEETRRQLLAILHQWDALGKGGSGHHHHHH

SEQ ID NO: 3327 - DNA, 639 bp, synthetic construct
  misc_feature 1..639: note = Variant of 3'O-kinase
  source 1..639: mol_type = other DNA
atggcgtttaccattggtttaacaggagggatcgcatcgggcaaatcgactgtgagtgccatgatgcgtgaactgggtctgccggtcatcgatgctgacgaggcagcacgcgccgttgttcgtccaggcgaagaagcttatcgccagattgtagctgcgttcggtccgggcattcttcgtgccgatggcgagatcgatcgcgccaaattgggtcgtatcaagtttgctgacgaacaacaacgtaaggtgctgaatgcgattgtacaccctgcagtccgtaagaagatgctcgctgagaaagaagctcatatccgctcaggcgccaagacggttgtgctggatatcccgctgctgttcgaatccggattggttcattgggtcgacaaagtgctcgtggtgtacgtcgatgatgatgttcagttacgccgccttatggcacgtaacgggtttaccgaagaagaagctctggcccgcattcgttcacagtggcccatggccgagaaagttaaacgtgcagacgctgtaatcgacaataatggcacgattgaagaaacccgccgccagctgctggccattttacaccagtgggatgcactgggtaagggtggctccggccaccatcatcaccatcactaatga

SEQ ID NO: 3328 - protein, 211 aa, synthetic construct
  REGION 1..211: note = Variant of 3'O-kinase
MAFTIGLTGGIASGKSTVSAMMRELGLPVIDADEAARAVVRPGEEAYRQIVAAFGPGILRADGEIDRAKLGRIKFADEQQRKVLNAIVHPAVRKKMLAEKEAHIRSGAKTVVLDIPLLFESGLVHWVDKVLVVYVDDDVQLRRLMARNGFTEEEALARIRSQWPMAEKVKRADAVIDNNGTIEETRRQLLAILHQWDALGKGGSGHHHHHH

SEQ ID NO: 3329 - DNA, 639 bp, synthetic construct
  misc_feature 1..639: note = Variant of 3'O-kinase
  source 1..639: mol_type = other DNA
atggcgtttaccattggtttaacaggagggatcgcatcgggcaaatcgactgtgagtgccatgatgcgtgaactgggtctgccggtcatcgatgctgacgaggcagcccgcgaagtgatgcgtccaggcgaagaagcttatcgccagattgtagctgcgttcggtccgggcattcttcgtgccgatggcgagatcgatcgcgccaaattgggtgctatcgtgtttaacgacgaacaacaacgtaaggtgctgaatgcgattgtacaccctgcagtccgtaagaagatgctcgctgagaaagaagctcatatccgctcaggcgccaagacggttgtgctggatatcccgctgctgttcgaatccggattgactcattgggtcgacaaagtgctcgtggtgtacgtcgatgatgatgttcagttacgccgccttatggcacgtaacgggtttaccgaagaagaagctatggcccgcattcgttcacagtggcccatggccgagaaagttaaacgtgcagacgctgtaatcgacaataatggcacgattgaagaaacccgccgccagctgctggccattttacaccagtgggatgcactgggtaagggtggctccggccaccatcatcaccatcactaatga

SEQ ID NO: 3330 - protein, 211 aa, synthetic construct
  REGION 1..211: note = Variant of 3'O-kinase
MAFTIGLTGGIASGKSTVSAMMRELGLPVIDADEAAREVMRPGEEAYRQIVAAFGPGILRADGEIDRAKLGAIVFNDEQQRKVLNAIVHPAVRKKMLAEKEAHIRSGAKTVVLDIPLLFESGLTHWVDKVLVVYVDDDVQLRRLMARNGFTEEEAMARIRSQWPMAEKVKRADAVIDNNGTIEETRRQLLAILHQWDALGKGGSGHHHHHH

SEQ ID NO: 3331 - DNA, 639 bp, synthetic construct
  misc_feature 1..639: note = Variant of 3'O-kinase
  source 1..639: mol_type = other DNA
atggcgtttaccattggtttaacaggagggatcgcatcgggcaaatcgactgtgagtgccatgatgcgtgaactgggtctgccggtcatcgatgctgacgaggcagcacgcgccgttgttcgtccaggcgaagaagcttatcgccagattgtagctgcgttcggtccgggcattcttcgtgccgatggcgagatcgatcgcgccaaattgggtcgtatcaagtttaacgacgaacaacaacgtaaggtgctgaatgcgattgtacaccctgcagtctataagaagatgctcgctgagaaagaagctcatatccgctcaggcgccaagacggttgtgctggatatcccgctgctgttcgaatccggattggttcattgggtcgacaaagtgctcgtggtgtacgtcgatgatgatgttcagttacgccgccttatggcacgtaacgggtttaccgaagaagaagctctggcccgcattcgttcacagtggcccatggccgagaaagttaaacgtgcagacgctgtaatcgacaataatggcacgattgaagaaacccgccgccagctgctggccattttacaccagtgggatgcactgggtaagggtggctccggccaccatcatcaccatcactaatga

SEQ ID NO: 3332 - protein, 211 aa, synthetic construct
  REGION 1..211: note = Variant of 3'O-kinase
MAFTIGLTGGIASGKSTVSAMMRELGLPVIDADEAARAVVRPGEEAYRQIVAAFGPGILRADGEIDRAKLGRIKFNDEQQRKVLNAIVHPAVYKKMLAEKEAHIRSGAKTVVLDIPLLFESGLVHWVDKVLVVYVDDDVQLRRLMARNGFTEEEALARIRSQWPMAEKVKRADAVIDNNGTIEETRRQLLAILHQWDALGKGGSGHHHHHH

SEQ ID NO: 3333 - DNA, 639 bp, synthetic construct
  misc_feature 1..639: note = Variant of 3'O-kinase
  source 1..639: mol_type = other DNA
atggcgtttaccattggtttaacaggagggatcgcatcgggcaaatcgactgtgagtgccatgatgcgtgaactgggtctgccggtcatcgatgctgacgaggcagcacgcgccgttgttcgtccaggcgaagaagcttatcgccagattgtagctgcgttcggtccgggcattcttcgtgccgatggcgagatcgatcgcgccaaattgggtcgtatcgtgtttgctgacgaacaacaacgtaaggtgctgaatgcgattgtacatcctgcagtccgcaagaagatgctcgctgagaaagaagctcatatccgctcaggcgccaagacggttgtgctggatatcccgctgctgttcgaatccggattgacccattgggtcgacaaagtgctcgtggtgtacgtcgatgatgatgttcagttacgccgccttatggcacgtaacgggtttaccgaagaagaagctctggcccgcattcgttcacagtggcccatggccgagaaagttaaacgtgcagacgctgtaatcgacaataatggcacgattgaagaaacccgccgccagctgctggccattttacaccagtgggatgcactgggtaagggtggctccggccaccatcatcaccatcactaatga

SEQ ID NO: 3334 - protein, 211 aa, synthetic construct
  REGION 1..211: note = Variant of 3'O-kinase
MAFTIGLTGGIASGKSTVSAMMRELGLPVIDADEAARAVVRPGEEAYRQIVAAFGPGILRADGEIDRAKLGRIVFADEQQRKVLNAIVHPAVRKKMLAEKEAHIRSGAKTVVLDIPLLFESGLTHWVDKVLVVYVDDDVQLRRLMARNGFTEEEALARIRSQWPMAEKVKRADAVIDNNGTIEETRRQLLAILHQWDALGKGGSGHHHHHH

SEQ ID NO: 3335 - DNA, 639 bp, synthetic construct
  misc_feature 1..639: note = Variant of 3'O-kinase
  source 1..639: mol_type = other DNA
atggcgtttaccattggtttaacaggagggatcgcagcgggcaaatcgactgtgagtgccatgatgcgtgaactgggtctgccggtcatcgatgctgacgaggcagcacgcgccgttgttcgtccaggcgaagaagcttatcgccagattgtagctgcgttcggtccgggcattcttcgtgccgatggcgagatcgatcgcgccaaattgggtgctatcgtgtttaacgacgaacaacaacgtaaggtgctgaatgcgattgtaagtcctgcagtccgtaagaagatgctcgctgagaaagaagctcatatccgctcaggcgccaagacggttgtgctggatatcccgctgctgttcgaatccggattgactcattgggtcgacaaagtgctcgtggtgtacgtcgatgatgatgttcagttacgccgccttatggcacgtaacgggtttaccgaagaagaagctctggcccgcattcgttcacagtggcccagtgccgagaaagttaaacgtgcagacgctgtaatcgacaataatggcacgattgaagaaacccgccgccagctgctggccattttacaccagtgggatgcactgggtaagggtggctccggccaccatcatcaccatcactaatga

SEQ ID NO: 3336 - protein, 211 aa, synthetic construct
  REGION 1..211: note = Variant of 3'O-kinase
MAFTIGLTGGIAAGKSTVSAMMRELGLPVIDADEAARAVVRPGEEAYRQIVAAFGPGILRADGEIDRAKLGAIVFNDEQQRKVLNAIVSPAVRKKMLAEKEAHIRSGAKTVVLDIPLLFESGLTHWVDKVLVVYVDDDVQLRRLMARNGFTEEEALARIRSQWPSAEKVKRADAVIDNNGTIEETRRQLLAILHQWDALGKGGSGHHHHHH

SEQ ID NO: 3337 - DNA, 639 bp, synthetic construct
  misc_feature 1..639: note = Variant of 3'O-kinase
  source 1..639: mol_type = other DNA
atggcgtttaccattggtttaacaggagggatcgcagtaggcaaatcgactgtgagtgccatgatgcgtgaactgggtctgccggtcatcgatgctgacgaggcagcacgcgccgttgttcgtccaggcgaagaagcttatcgccagattgtagctgcgttcggtccgggcattcttcgtgccgatggcgagatcgatcgcgccaaattgggtgctatcgtgtttgctgacgaacaacaacgtaaggtgctgaatgcgattgtacatcctgcagtccgcaagaagatgctcgctgagaaagaagctcatatccgctcaggcgccaagacggttgtgctggatatcccgctgctgttcgaatccggattgactcattgggtcgacaaagtgctcgtggtgtacgtcgatgatgatgttcagttacgccgccttatggcacgtaacgggtttaccgaagaagaagctctggcccgcattcgttcacagtggcccatggccgagaaagttaaacgtgcagacgctgtaatcgacaataatggcacgattgaagaaacccgccgccagctgctggccattttacaccagtgggatgcactgggtaagggtggctccggccaccatcatcaccatcactaatga

SEQ ID NO: 3338 - protein, 211 aa, synthetic construct
  REGION 1..211: note = Variant of 3'O-kinase
MAFTIGLTGGIAVGKSTVSAMMRELGLPVIDADEAARAVVRPGEEAYRQIVAAFGPGILRADGEIDRAKLGAIVFADEQQRKVLNAIVHPAVRKKMLAEKEAHIRSGAKTVVLDIPLLFESGLTHWVDKVLVVYVDDDVQLRRLMARNGFTEEEALARIRSQWPMAEKVKRADAVIDNNGTIEETRRQLLAILHQWDALGKGGSGHHHHHH

SEQ ID NO: 3339 - DNA, 639 bp, synthetic construct
  misc_feature 1..639: note = Variant of 3'O-kinase
  source 1..639: mol_type = other DNA
atggcgtttaccattggtttaacaggagggatcgcagtaggcaaatcgactgtgagtgccatgatgcgtgaactgggtctgccggtcatcgatgctgacgaggcagcacgcgccgttgttcgtccaggcgaagaagcttatcgccagattgtagctgcgttcggtccgggcattcttcgtgccgatggcgagatcgatcgcgccaaattgggtgctatcgtgtttaacgacgaacaacaacgtaaggtgctgaatgcgattgtaggtcctgcagtccgtaagaagatgctcgctgagaaagaagctcatatccgctcaggcgccaagacggttgtgctggatatcccgctgctgttcgaatccggattgacccattgggtcgacaaagtgctcgtggtgtacgtcgatgatgatgttcagttacgccgccttatggcacgtaacgggtttaccgaagaagaagctctggcccgcattcgttcacagtggcccatggccgagaaagttaaacgtgcagacgctgtaatcgacaataatggcacgattgaagaaacccgccgccagctgctggccattttacaccagtgggatgcactgggtaagggtggctccggccaccatcatcaccatcactaatga

SEQ ID NO: 3340 - protein, 211 aa, synthetic construct
  REGION 1..211: note = Variant of 3'O-kinase
MAFTIGLTGGIAVGKSTVSAMMRELGLPVIDADEAARAVVRPGEEAYRQIVAAFGPGILRADGEIDRAKLGAIVFNDEQQRKVLNAIVGPAVRKKMLAEKEAHIRSGAKTVVLDIPLLFESGLTHWVDKVLVVYVDDDVQLRRLMARNGFTEEEALARIRSQWPMAEKVKRADAVIDNNGTIEETRRQLLAILHQWDALGKGGSGHHHHHH

SEQ ID NO: 3341 - DNA, 639 bp, synthetic construct
  misc_feature 1..639: note = Variant of 3'O-kinase
  source 1..639: mol_type = other DNA
atggcgtttaccattggtttaacaggagggatcgcatcgggcaaatcgactgtgagtgccatgatgcgtgaactgggtctgccggtcatcgatgctgacgaggcagcccgcgaactggtgcgtccaggcgaagaagcttatcgccagattgtagctgcgttcggtccgggcattcttcgtgccgatggcgagatcgatcgcgccaaattgggtgctatcgtgtttgctgacgaacaacaacgtaaggtgctgaatgcgattgtacatcctgcagtccgcaagaagatgctcgctgagaaagaagctcatatccgctcaggcgccaagacggttgtgctggatatcccgctgctgttcgaatccggattgactcattgggtcgacaaagtgctcgtggtgtacgtcgatgatgatgttcagttacgccgccttatggcacgtaacgggtttaccgaagaagaagctctggcccgcattcgttcacagtggcccatggccgagaaagttaaacgtgcagacgctgtaatcgacaataatggcacgattgaagaaacccgccgccagctgctggccattttacaccagtgggatgcactgggtaagggtggctccggccaccatcatcaccatcactaatga

SEQ ID NO: 3342 - protein, 211 aa, synthetic construct
  REGION 1..211: note = Variant of 3'O-kinase
MAFTIGLTGGIASGKSTVSAMMRELGLPVIDADEAARELVRPGEEAYRQIVAAFGPGILRADGEIDRAKLGAIVFADEQQRKVLNAIVHPAVRKKMLAEKEAHIRSGAKTVVLDIPLLFESGLTHWVDKVLVVYVDDDVQLRRLMARNGFTEEEALARIRSQWPMAEKVKRADAVIDNNGTIEETRRQLLAILHQWDALGKGGSGHHHHHH

SEQ ID NO: 3343 - DNA, 639 bp, synthetic construct
  misc_feature 1..639: note = Variant of 3'O-kinase
  source 1..639: mol_type = other DNA
atggcgtttaccattggtttaacaggagggatcgcagtaggcaaatcgactgtgagtgccatgatgcgtgaactgggtctgccggtcatcgatgctgacgaggcagcacgcgccgttgttcgtccaggcgaagaagcttatcgccagattgtagctgcgttcggtccgggcattcttcgtgccgatggcgagatcgatcgcgccaaattgggtgctatcgtgtttaacgacgaacaacaacgtaaggtgctgaatgcgattgtacatcctgcagtccgcaagaagatgctcgctgagaaagaagctcatatccgctcaggcgccaagacggttgtgctggatatcccgctgctgttcgaatccggattgtggcattgggtcgacaaagtgctcgtggtgtacgtcgatgatgatgttcagttacgccgccttatggcacgtaacgggtttaccgaagaagaagctctggcccgcattcgttcacagtggcccatggccgagaaagttaaacgtgcagacgctgtaatcgacaataatggcacgattgaagaaacccgccgccagctgctggccattttacaccagtgggatgcactgggtaagggtggctccggccaccatcatcaccatcactaatga

SEQ ID NO: 3344 - protein, 211 aa, synthetic construct
  REGION 1..211: note = Variant of 3'O-kinase
MAFTIGLTGGIAVGKSTVSAMMRELGLPVIDADEAARAVVRPGEEAYRQIVAAFGPGILRADGEIDRAKLGAIVFNDEQQRKVLNAIVHPAVRKKMLAEKEAHIRSGAKTVVLDIPLLFESGLWHWVDKVLVVYVDDDVQLRRLMARNGFTEEEALARIRSQWPMAEKVKRADAVIDNNGTIEETRRQLLAILHQWDALGKGGSGHHHHHH

SEQ ID NO: 3345 - DNA, 639 bp, synthetic construct
  misc_feature 1..639: note = Variant of 3'O-kinase
  source 1..639: mol_type = other DNA
atggcgtttaccattggtttaacaggagggatcgcagtaggcaaatcgactgtgagtgccatgatgcgtgaactgggtctgccggtcatcgatgctgacgaggcaacccgcgaagtgatgcgtccaggcgaagaagcttatcgccagattgtagctgcgttcggtccgggcattcttcgtgccgatggcgagatcgatcgcgccaaattgggtcgtatcaagtttaacgacgaacaacaacgtaaggtgctgaatgcgattgtacaccctgcagtccgtaagaagatgctcgctgagaaagaagctcatatccgctcaggcgccaagacggttgtgctggatatcccgctgctgttcgaatccggattgacccattgggtcgacaaagtgctcgtggtgtacgtcgatgatgatgttcagttacgccgccttatggcacgtaacgggtttaccgaagaagaagctctggcccgcattcgttcacagtggcccatggccgagaaagttaaacgtgcagacgctgtaatcgacaataatggcacgattgaagaaacccgccgccagctgctggccattttacaccagtgggatgcactgggtaagggtggctccggccaccatcatcaccatcactaatga

SEQ ID NO: 3346 - protein, 211 aa, synthetic construct
  REGION 1..211: note = Variant of 3'O-kinase
MAFTIGLTGGIAVGKSTVSAMMRELGLPVIDADEATREVMRPGEEAYRQIVAAFGPGILRADGEIDRAKLGRIKFNDEQQRKVLNAIVHPAVRKKMLAEKEAHIRSGAKTVVLDIPLLFESGLTHWVDKVLVVYVDDDVQLRRLMARNGFTEEEALARIRSQWPMAEKVKRADAVIDNNGTIEETRRQLLAILHQWDALGKGGSGHHHHHH

SEQ ID NO: 3347 - DNA, 639 bp, synthetic construct
  misc_feature 1..639: note = Variant of 3'O-kinase
  source 1..639: mol_type = other DNA
atggcgtttaccattggtttaacaggagggatcgcatcgggcaaatcgactgtgagtgccatgatgcgtgaactgggtctgccggtcatcgatgctgacgaggcagcacgcgccgttgttcgtccaggcgaagaagcttatcgccagattgtagctgcgttcggtccgggcattcttcgtgccgatggcgagatcgatcgcgccaaattgggtcgtatcaagtttaacgacgaacaacaacgtaaggtgctgaatgcgattgtaggtcctgcagtccgtaagaagatgctcgctgagaaagaagctcatatccgctcaggcgccaagacggttgtgctggatatcccgctgctgttcgaatccggattgactcattgggtcgacaaagtgctcgtggtgtacgtcgatgatgatgttcagttacgccgccttatggcacgtaacgggtttaccgaagaagaagctctggcccgcattcgttcacagtggcccatggccgagaaagttaaacgtgcagacgctgtaatcgacaataatggcacgattgaagaaacccgccgccagctgctggccattttacaccagtgggatgcactgggtaagggtggctccggccaccatcatcaccatcactaatga

SEQ ID NO: 3348 - protein, 211 aa, synthetic construct
  REGION 1..211: note = Variant of 3'O-kinase
MAFTIGLTGGIASGKSTVSAMMRELGLPVIDADEAARAVVRPGEEAYRQIVAAFGPGILRADGEIDRAKLGRIKFNDEQQRKVLNAIVGPAVRKKMLAEKEAHIRSGAKTVVLDIPLLFESGLTHWVDKVLVVYVDDDVQLRRLMARNGFTEEEALARIRSQWPMAEKVKRADAVIDNNGTIEETRRQLLAILHQWDALGKGGSGHHHHHH

SEQ ID NO: 3349 - DNA, 639 bp, synthetic construct
  misc_feature 1..639: note = Variant of 3'O-kinase
  source 1..639: mol_type = other DNA
atggcgtttaccattggtttaacaggagggatcgcatcgggcaaatcgactgtgagtgccatgatgcgtgaactgggtctgccggtcatcgatgctgacgaggcagcccgcgaactgatgcgtccaggcgaagaagcttatcgccagattgtagctgcgttcggtccgggcattcttcgtgccgatggcgagatcgatcgcgccaaattgggtcgtatcaagtttgctgacgaacaacaacgtaaggtgctgaatgcgattgtaagtcctgcagtccgtaagaagatgctcgctgagaaagaagctcatatccgctcaggcgccaagacggttgtgctggatatcccgctgctgttcgaatccggattgactcattgggtcgacaaagtgctcgtggtgtacgtcgatgatgatgttcagttacgccgccttatggcacgtaacgggtttaccgaagaagaagctctggcccgcattcgttcacagtggcccatggccgagaaagttaaacgtgcagacgctgtaatcgacaataatggcacgattgaagaaacccgccgccagctgctggccattttacaccagtgggatgcactgggtaagggtggctccggccaccatcatcaccatcactaatga

SEQ ID NO: 3350 - protein, 211 aa, synthetic construct
  REGION 1..211: note = Variant of 3'O-kinase
MAFTIGLTGGIASGKSTVSAMMRELGLPVIDADEAARELMRPGEEAYRQIVAAFGPGILRADGEIDRAKLGRIKFADEQQRKVLNAIVSPAVRKKMLAEKEAHIRSGAKTVVLDIPLLFESGLTHWVDKVLVVYVDDDVQLRRLMARNGFTEEEALARIRSQWPMAEKVKRADAVIDNNGTIEETRRQLLAILHQWDALGKGGSGHHHHHH

SEQ ID NO: 3351 - DNA, 639 bp, synthetic construct
  misc_feature 1..639: note = Variant of 3'O-kinase
  source 1..639: mol_type = other DNA
atggcgtttaccattggtttaacaggagggatcgcagtaggcaaatcgactgtgagtgccatgatgcgtgaactgggtctgccggtcatcgatgctgacgaggcagcacgcgccgttgttcgtccaggcgaagaagcttatcgccagattgtagctgcgttcggtccgggcattcttcgtgccgatggcgagatcgatcgcgccaaattgggtcgtatcgtgtttaacgacgaacaacaacgtaaggtgctgaatgcgattgtactgcctgcagtccgtaagaagatgctcgctgagaaagaagctcatatccgctcaggcgccaagacggttgtgctggatatcccgctgctgttcgaatccggattggttcattgggtcgacaaagtgctcgtggtgtacgtcgatgatgatgttcagttacgccgccttatggcacgtaacgggtttaccgaagaagaagctctggcccgcattcgttcacagtggcccagtgccgagaaagttaaacgtgcagacgctgtaatcgacaataatggcacgattgaagaaacccgccgccagctgctggccattttacaccagtgggatgcactgggtaagggtggctccggccaccatcatcaccatcactaatga

SEQ ID NO: 3352 - protein, 211 aa, synthetic construct
  REGION 1..211: note = Variant of 3'O-kinase
MAFTIGLTGGIAVGKSTVSAMMRELGLPVIDADEAARAVVRPGEEAYRQIVAAFGPGILRADGEIDRAKLGRIVFNDEQQRKVLNAIVLPAVRKKMLAEKEAHIRSGAKTVVLDIPLLFESGLVHWVDKVLVVYVDDDVQLRRLMARNGFTEEEALARIRSQWPSAEKVKRADAVIDNNGTIEETRRQLLAILHQWDALGKGGSGHHHHHH

SEQ ID NO: 3353 - DNA, 639 bp, synthetic construct
  misc_feature 1..639: note = Variant of 3'O-kinase
  source 1..639: mol_type = other DNA
atggcgtttaccattggtttaacaggagggatcgcagcgggcaaatcgactgtgagtgccatgatgcgtgaactgggtctgccggtcatcgatgctgacgaggcagcacgcgccgttgttcgtccaggcgaagaagcttatcgccagattgtagctgcgttcggtccgggcattcttcgtgccgatggcgagatcgatcgcgccaaattgggtgctatcgtgtttgctgacgaacaacaacgtaaggtgctgaatgcgattgtacatcctgcagtccgcaagaagatgctcgctgagaaagaagctcatatccgctcaggcgccaagacggttgtgctggatatcccgctgctgttcgaatccggattgtggcattgggtcgacaaagtgctcgtggtgtacgtcgatgatgatgttcagttacgccgccttatggcacgtaacgggtttaccgaagaagaagctctggcccgcattcgttcacagtggcccatggccgagaaagttaaacgtgcagacgctgtaatcgacaataatggcacgattgaagaaacccgccgccagctgctggccattttacaccagtgggatgcactgggtaagggtggctccggccaccatcatcaccatcactaatga

SEQ ID NO: 3354 - protein, 211 aa, synthetic construct
  REGION 1..211: note = Variant of 3'O-kinase
MAFTIGLTGGIAAGKSTVSAMMRELGLPVIDADEAARAVVRPGEEAYRQIVAAFGPGILRADGEIDRAKLGAIVFADEQQRKVLNAIVHPAVRKKMLAEKEAHIRSGAKTVVLDIPLLFESGLWHWVDKVLVVYVDDDVQLRRLMARNGFTEEEALARIRSQWPMAEKVKRADAVIDNNGTIEETRRQLLAILHQWDALGKGGSGHHHHHH

SEQ ID NO: 3355 - DNA, 639 bp, synthetic construct
  misc_feature 1..639: note = Variant of 3'O-kinase
  source 1..639: mol_type = other DNA
atggcgtttaccattggtttaacaggagggatcgcagtaggcaaatcgactgtgagtgccatgatgcgtgaactgggtctgccggtcatcgatgctgacgaggcagcacgcgccgttgttcgtccaggcgaagaagcttatcgccagattgtagctgcgttcggtccgggcattcttcgtgccgatggcgagatcgatcgcgccaaattgggtcgtatcaagtttaacgacgaacaacaacgtaaggtgctgaatgcgattgtactgcctgcagtctataagaagatgctcgctgagaaagaagctcatatccgctcaggcgccaagacggttgtgctggatatcccgctgctgttcgaatccggattgtggcattgggtcgacaaagtgctcgtggtgtacgtcgatgatgatgttcagttacgccgccttatggcacgtaacgggtttaccgaagaagaagctctggcccgcattcgttcacagtggcccatggccgagaaagttaaacgtgcagacgctgtaatcgacaataatggcacgattgaagaaacccgccgccagctgctggccattttacaccagtgggatgcactgggtaagggtggctccggccaccatcatcaccatcactaatga

SEQ ID NO: 3356 - protein, 211 aa, synthetic construct
  REGION 1..211: note = Variant of 3'O-kinase
MAFTIGLTGGIAVGKSTVSAMMRELGLPVIDADEAARAVVRPGEEAYRQIVAAFGPGILRADGEIDRAKLGRIKFNDEQQRKVLNAIVLPAVYKKMLAEKEAHIRSGAKTVVLDIPLLFESGLWHWVDKVLVVYVDDDVQLRRLMARNGFTEEEALARIRSQWPMAEKVKRADAVIDNNGTIEETRRQLLAILHQWDALGKGGSGHHHHHH

SEQ ID NO: 3357 - DNA, 639 bp, synthetic construct
  misc_feature 1..639: note = Variant of 3'O-kinase
  source 1..639: mol_type = other DNA
atggcgtttaccattggtttaacaggagggatcgcatcgggcaaatcgactgtgagtgccatgatgcgtgaactgggtctgccggtcatcgatgctgacgaggcagcacgcgccgttgttcgtccaggcgaagaagcttatcgccagattgtagctgcgttcggtccgggcattcttcgtgccgatggcgagatcgatcgcgccaaattgggtgctatcaagtttgctgacgaacaacaacgtaaggtgctgaatgcgattgtaggtcctgcagtccgtaagaagatgctcgctgagaaagaagctcatatccgctcaggcgccaagacggttgtgctggatatcccgctgctgttcgaatccggattggttcattgggtcgacaaagtgctcgtggtgtacgtcgatgatgatgttcagttacgccgccttatggcacgtaacgggtttaccgaagaagaagctctggcccgcattcgttcacagtggcccatggccgagaaagttaaacgtgcagacgctgtaatcgacaataatggcacgattgaagaaacccgccgccagctgctggccattttacaccagtgggatgcactgggtaagggtggctccggccaccatcatcaccatcactaatga

SEQ ID NO: 3358 - protein, 211 aa, synthetic construct
  REGION 1..211: note = Variant of 3'O-kinase
MAFTIGLTGGIASGKSTVSAMMRELGLPVIDADEAARAVVRPGEEAYRQIVAAFGPGILRADGEIDRAKLGAIKFADEQQRKVLNAIVGPAVRKKMLAEKEAHIRSGAKTVVLDIPLLFESGLVHWVDKVLVVYVDDDVQLRRLMARNGFTEEEALARIRSQWPMAEKVKRADAVIDNNGTIEETRRQLLAILHQWDALGKGGSGHHHHHH

SEQ ID NO: 3359 - DNA, 639 bp, synthetic construct
  misc_feature 1..639: note = Variant of 3'O-kinase
  source 1..639: mol_type = other DNA
atggcgtttaccattggtttaacaggagggatcgcagtaggcaaatcgactgtgagtgccatgatgcgtgaactgggtctgccggtcatcgatgctgacgaggcagcacgcgccgttgttcgtccaggcgaagaagcttatcgccagattgtagctgcgttcggtccgggcattcttcgtgccgatggcgagatcgatcgcgccaaattgggtgctatcgtgtttaacgacgaacaacaacgtaaggtgctgaatgcgattgtaagtcctgcagtccgtaagaagatgctcgctgagaaagaagctcatatccgctcaggcgccaagacggttgtgctggatatcccgctgctgttcgaatccggattgacccattgggtcgacaaagtgctcgtggtgtacgtcgatgatgatgttcagttacgccgccttatggcacgtaacgggtttaccgaagaagaagctctggcccgcattcgttcacagtggcccatggccgagaaagttaaacgtgcagacgctgtaatcgacaataatggcacgattgaagaaacccgccgccagctgctggccattttacaccagtgggatgcactgggtaagggtggctccggccaccatcatcaccatcactaatga

SEQ ID NO: 3360 - protein, 211 aa, synthetic construct
  REGION 1..211: note = Variant of 3'O-kinase
MAFTIGLTGGIAVGKSTVSAMMRELGLPVIDADEAARAVVRPGEEAYRQIVAAFGPGILRADGEIDRAKLGAIVFNDEQQRKVLNAIVSPAVRKKMLAEKEAHIRSGAKTVVLDIPLLFESGLTHWVDKVLVVYVDDDVQLRRLMARNGFTEEEALARIRSQWPMAEKVKRADAVIDNNGTIEETRRQLLAILHQWDALGKGGSGHHHHHH

SEQ ID NO: 3361 - DNA, 639 bp, synthetic construct
  misc_feature 1..639: note = Variant of 3'O-kinase
  source 1..639: mol_type = other DNA
atggcgtttaccattggtttaacaggagggatcgcagtaggcaaatcgactgtgagtgccatgatgcgtgaactgggtctgccggtcatcgatgctgacgaggcagcacgcgccgttgtgcgtccaggcgaagaagcttatcgccagattgtagctgcgttcggtccgggcattcttcgtgccgatggcgagatcgatcgcgccaaattgggtgctatcgtgtttgctgacgaacaacaacgtaaggtgctgaatgcgattgtaggtcctgcagtccgtaagaagatgctcgctgagaaagaagctcatatccgctcaggcgccaagacggttgtgctggatatcccgctgctgttcgaatccggattgactcattgggtcgacaaagtgctcgtggtgtacgtcgatgatgatgttcagttacgccgccttatggcacgtaacgggtttaccgaagaagaagctatggcccgcattcgttcacagtggcccagtgccgagaaagttaaacgtgcagacgctgtaatcgacaataatggcacgattgaagaaacccgccgccagctgctggccattttacaccagtgggatgcactgggtaagggtggctccggccaccatcatcaccatcactaatga

SEQ ID NO: 3362 - protein, 211 aa, synthetic construct
  REGION 1..211: note = Variant of 3'O-kinase
MAFTIGLTGGIAVGKSTVSAMMRELGLPVIDADEAARAVVRPGEEAYRQIVAAFGPGILRADGEIDRAKLGAIVFADEQQRKVLNAIVGPAVRKKMLAEKEAHIRSGAKTVVLDIPLLFESGLTHWVDKVLVVYVDDDVQLRRLMARNGFTEEEAMARIRSQWPSAEKVKRADAVIDNNGTIEETRRQLLAILHQWDALGKGGSGHHHHHH

SEQ ID NO: 3363 - DNA, 639 bp, synthetic construct
  misc_feature 1..639: note = Variant of 3'O-kinase
  source 1..639: mol_type = other DNA
atggcgtttaccattggtttaacaggagggatcgcagtaggcaaatcgactgtgagtgccatgatgcgtgaactgggtctgccggtcatcgatgctgacgaggcagcacgcgccgttgttcgtccaggcgaagaagcttatcgccagattgtagctgcgttcggtccgggcattcttcgtgccgatggcgagatcgatcgcgccaaattgggtgctatcaagtttaacgacgaacaacaacgtaaggtgctgaatgcgattgtaagtcctgcagtctataagaagatgctcgctgagaaagaagctcatatccgctcaggcgccaagacggttgtgctggatatcccgctgctgttcgaatccggattgactcattgggtcgacaaagtgctcgtggtgtacgtcgatgatgatgttcagttacgccgccttatggcacgtaacgggtttaccgaagaagaagctctggcccgcattcgttcacagtggcccatggccgagaaagttaaacgtgcagacgctgtaatcgacaataatggcacgattgaagaaacccgccgccagctgctggccattttacaccagtgggatgcactgggtaagggtggctccggccaccatcatcaccatcactaatga

SEQ ID NO: 3364 - protein, 211 aa, synthetic construct
  REGION 1..211: note = Variant of 3'O-kinase
MAFTIGLTGGIAVGKSTVSAMMRELGLPVIDADEAARAVVRPGEEAYRQIVAAFGPGILRADGEIDRAKLGAIKFNDEQQRKVLNAIVSPAVYKKMLAEKEAHIRSGAKTVVLDIPLLFESGLTHWVDKVLVVYVDDDVQLRRLMARNGFTEEEALARIRSQWPMAEKVKRADAVIDNNGTIEETRRQLLAILHQWDALGKGGSGHHHHHH

SEQ ID NO: 3365 - DNA, 639 bp, synthetic construct
  misc_feature 1..639: note = Variant of 3'O-kinase
  source 1..639: mol_type = other DNA
atggcgtttaccattggtttaacaggagggatcgcatcgggcaaatcgactgtgagtgccatgatgcgtgaactgggtctgccggtcatcgatgctgacgaggcagcccgcgaagtggtgcgtccaggcgaagaagcttatcgccagattgtagctgcgttcggtccgggcattcttcgtgccgatggcgagatcgatcgcgccaaattgggtgctatcgtgtttgctgacgaacaacaacgtaaggtgctgaatgcgattgtacatcctgcagtccgcaagaagatgctcgctgagaaagaagctcatatccgctcaggcgccaagacggttgtgctggatatcccgctgctgttcgaatccggattgacccattgggtcgacaaagtgctcgtggtgtacgtcgatgatgatgttcagttacgccgccttatggcacgtaacgggtttaccgaagaagaagctatggcccgcattcgttcacagtggcccatggccgagaaagttaaacgtgcagacgctgtaatcgacaataatggcacgattgaagaaacccgccgccagctgctggccattttacaccagtgggatgcactgggtaagggtggctccggccaccatcatcaccatcactaatga

SEQ ID NO: 3366 - protein, 211 aa, synthetic construct
  REGION 1..211: note = Variant of 3'O-kinase
MAFTIGLTGGIASGKSTVSAMMRELGLPVIDADEAAREVVRPGEEAYRQIVAAFGPGILRADGEIDRAKLGAIVFADEQQRKVLNAIVHPAVRKKMLAEKEAHIRSGAKTVVLDIPLLFESGLTHWVDKVLVVYVDDDVQLRRLMARNGFTEEEAMARIRSQWPMAEKVKRADAVIDNNGTIEETRRQLLAILHQWDALGKGGSGHHHHHH

SEQ ID NO: 3367 - DNA, 639 bp, synthetic construct
  misc_feature 1..639: note = Variant of 3'O-kinase
  source 1..639: mol_type = other DNA
atggcgtttaccattggtttaacaggagggatcgcagtaggcaaatcgactgtgagtgccatgatgcgtgaactgggtctgccggtcatcgatgctgacgaggcaacccgcgaagtgatgcgtccaggcgaagaagcttatcgccagattgtagctgcgttcggtccgggcattcttcgtgccgatggcgagatcgatcgcgccaaattgggtcgtatcaagtttaacgacgaacaacaacgtaaggtgctgaatgcgattgtacaccctgcagtccgtaagaagatgctcgctgagaaagaagctcatatccgctcaggcgccaagacggttgtgctggatatcccgctgctgttcgaatccggattggttcattgggtcgacaaagtgctcgtggtgtacgtcgatgatgatgttcagttacgccgccttatggcacgtaacgggtttaccgaagaagaagctctggcccgcattcgttcacagtggcccatggccgagaaagttaaacgtgcagacgctgtaatcgacaataatggcacgattgaagaaacccgccgccagctgctggccattttacaccagtgggatgcactgggtaagggtggctccggccaccatcatcaccatcactaatga

SEQ ID NO: 3368 - protein, 211 aa, synthetic construct
  REGION 1..211: note = Variant of 3'O-kinase
MAFTIGLTGGIAVGKSTVSAMMRELGLPVIDADEATREVMRPGEEAYRQIVAAFGPGILRADGEIDRAKLGRIKFNDEQQRKVLNAIVHPAVRKKMLAEKEAHIRSGAKTVVLDIPLLFESGLVHWVDKVLVVYVDDDVQLRRLMARNGFTEEEALARIRSQWPMAEKVKRADAVIDNNGTIEETRRQLLAILHQWDALGKGGSGHHHHHH

SEQ ID NO: 3369 - DNA, 639 bp, synthetic construct
  misc_feature 1..639: note = Variant of 3'O-kinase
  source 1..639: mol_type = other DNA
atggcgtttaccattggtttaacaggagggatcgcagtaggcaaatcgactgtgagtgccatgatgcgtgaactgggtctgccggtcatcgatgctgacgaggcaacccgcgaactgatgcgtccaggcgaagaagcttatcgccagattgtagctgcgttcggtccgggcattcttcgtgccgatggcgagatcgatcgcgccaaattgggtgctatcaagtttaacgacgaacaacaacgtaaggtgctgaatgcgattgtaggtcctgcagtccgtaagaagatgctcgctgagaaagaagctcatatccgctcaggcgccaagacggttgtgctggatatcccgctgctgttcgaatccggattgacccattgggtcgacaaagtgctcgtggtgtacgtcgatgatgatgttcagttacgccgccttatggcacgtaacgggtttaccgaagaagaagctctggcccgcattcgttcacagtggcccatggccgagaaagttaaacgtgcagacgctgtaatcgacaataatggcacgattgaagaaacccgccgccagctgctggccattttacaccagtgggatgcactgggtaagggtggctccggccaccatcatcaccatcactaatga

SEQ ID NO: 3370 - protein, 211 aa, synthetic construct
  REGION 1..211: note = Variant of 3'O-kinase
MAFTIGLTGGIAVGKSTVSAMMRELGLPVIDADEATRELMRPGEEAYRQIVAAFGPGILRADGEIDRAKLGAIKFNDEQQRKVLNAIVGPAVRKKMLAEKEAHIRSGAKTVVLDIPLLFESGLTHWVDKVLVVYVDDDVQLRRLMARNGFTEEEALARIRSQWPMAEKVKRADAVIDNNGTIEETRRQLLAILHQWDALGKGGSGHHHHHH

SEQ ID NO: 3371 - DNA, 1587 bp, synthetic construct
  misc_feature 1..1587: note = Variant of terminal deoxynucleotidyltransferase
  source 1..1587: mol_type = other DNA
atgcaccatcatcatcatcatggcggtagcggcagccacggcattcgtaccatcgattcggacttcgggaagaaacagcagaaaaaaggcgataaccacgatagttccgccacttatgaaatcaaatttcacgagtttgtgctgttcattctcgaagaaaaaatgggtgcgacgcgtcgtacttttctgacagatttagcccgcaagaaagggttccgcgtcgagaatgaactgaccgacgaagttacccacatcgtggcagaaaatctgtcacgctctgaagtattggcttggctgaaagaacacaagatggagaagaccaagcaattcgaactgctggatattagctggcttatcgaaagcatgaaagttggtaaaccggtggacaccaaggggaaataccagttggcggaatcggttgaggtgagtgcgaacccagatccgacagaaggtcgtgtaaacgagctgcctcctactatgaaaaccgtttctccgtatgcgtgtcaacgccgcaccaccctgaacaaccgtaatcaacgttttacggactcgctggaaattcttcgtgaaaattacgagttcaaacgcaacgatgatactgcgctggaatttcgtcgtgctatctccgtgctgaaaagccttccgtttgaggtacgtagcctgaaagacacggaaggattgccctggatcggtgatgaagtcaaagggattatggaagaaatcatcgaggtcggggagtcgcgtgaagtgcaggccgtgctcaatgatgagtggtatcaaagcttccaccgctttaagagtgtctttggagtgggggtgaagacagcagacaagtggtaccgtatgggtctgcgcaccctcgaggatgttcgttccagcaagaccctgaagttgaccccgatgcagaaagtaggtctgctgtattatgaagatcttgctcgcggcgttacgcgtgccgaagctgacgcgatttggctgctggttcaggatgcagtcgcaactttcgacccggatgcgatcgtggagattgtcggtggatttcgtcgtgggaaacctcagggtcacgacgttgatctgcttatcagttctccgggagctgagaaagagcaagaagaccaactcctgcagaaagtgatgaatctgtggaagaaacaagggttgttgctgtacggtcgtctggaatggacccagtgggaagatgggggttcgccttccggtaaggctgacgagggtgacgcgggtgcgaaatgctttctgatcctcaaactttatgatcatctggtgcgtaaaagcaaatggaacatgccgacgggttcgaacgtgggcgagtccaaaccgtggaaagcaattcgcgtagatctgctgcgttgcccctatggcagttttgcgtttgcgatgttgcagtggaccggaagccgcatgttccgtcgtgatctgcgttggtacgccactgacgagaagaacatgatgctggacaatcattcgctgtatgacctgaccaagggtatcttcctccctgctaaatcggaagaggaaattttcgcacatctggggcttgaatacctggaaccgttcgaacgtaacgca

SEQ ID NO: 3372 - protein, 529 aa, synthetic construct
  REGION 1..529: note = Variant of terminal deoxynucleotidyltransferase
MHHHHHHGGSGSHGIRTIDSDFGKKQQKKGDNHDSSATYEIKFHEFVLFILEEKMGATRRTFLTDLARKKGFRVENELTDEVTHIVAENLSRSEVLAWLKEHKMEKTKQFELLDISWLIESMKVGKPVDTKGKYQLAESVEVSANPDPTEGRVNELPPTMKTVSPYACQRRTTLNNRNQRFTDSLEILRENYEFKRNDDTALEFRRAISVLKSLPFEVRSLKDTEGLPWIGDEVKGIMEEIIEVGESREVQAVLNDEWYQSFHRFKSVFGVGVKTADKWYRMGLRTLEDVRSSKTLKLTPMQKVGLLYYEDLARGVTRAEADAIWLLVQDAVATFDPDAIVEIVGGFRRGKPQGHDVDLLISSPGAEKEQEDQLLQKVMNLWKKQGLLLYGRLEWTQWEDGGSPSGKADEGDAGAKCFLILKLYDHLVRKSKWNMPTGSNVGESKPWKAIRVDLLRCPYGSFAFAMLQWTGSRMFRRDLRWYATDEKNMMLDNHSLYDLTKGIFLPAKSEEEIFAHLGLEYLEPFERNA

SEQ ID NO: 3373 - DNA, 1587 bp, synthetic construct
  misc_feature 1..1587: note = Variant of terminal deoxynucleotidyltransferase
  source 1..1587: mol_type = other DNA
atgcaccatcatcatcatcatggcggtagcggcagccacggcattcgtaccatcgattcggacttcgggaagaaacagcagaaaaaaggcgataaccacgatagttccgccacttatgaaatcaaatttcacgagtttgtgctgttcattctcgaagaaaaaatgggtgcgacgcgtcgtacttttctgacagatttagcccgcaagaaagggttccgcgtcgagaatgaactgaccgacgaagttacccacatcgtggcagaaaatctgtcacgctctgaagtattggcttggctgaaagaacacaagatggagaagaccaagcaattcgaactgctggatattagctggcttatcgaaagcatgaaagttggtaaaccggtggacaccaaggggaaataccagttggcggaatcggttgaggtgagtgcgaacccagatccgacagaaggtcgtgtaaacgagctgcctcctactatgaaaaccgtttctccgtatgcgtgtcaacgccgcaccaccctgaacaaccgtaatcaacgttttacggactcgctggagattcttcgtgaaaattacgagctgaaaggcaacgacgatactgcgctggaatttcgtcgtgctatctccgtgctgaaaagccttccgtttgaggtacgtagcctgaaagacacggaaggattgccctggatcagtgatgaagtcaaagggattatggaagaaatcatcgaagtcggggagtcgcgtgaagtgcaggccgtgctcaatgatgagtggtatcaaagcttccacgcatttacgcgtgtctttggagtgggggtgaagacagcagacaagtggtaccgcatgggtctgcgcaccctcgaggatgttcgttccagcaagaccctgaagttgaccccgtggcagaaagtaggtctgctgtattatgaagatcttgctcgcggcgttacgcgtgcggaagctgacgcgatttggctgctggttcaggatgcagtcgcaactttcgacccggatgcgatcgtggagattgtcggtggacagcgtcgtgggaaacctcagggtcacgacgttgatctgcttatcagttctccgggagctgaaaaagagcaagaagaccaactcctgcagaaagtgatgaatctgtggaagaaacaagggttgttgctgtgtggtcgtctggaatggagtcagtgggaatgggggggtctgccgtccggtaaggctgatgagggtgacgcggaggcgtcgtgctttctgatcctcaaactttatgatcatctggtgcgtaaaagtaaacgcaatatgccgactggttcgaacatgggcgagtccaaaccgtggaaagcaattaaagtagatctgctgcgttgcccccgcggcagttttgcgtttgcgatgttgcagtggaccggaagccgcatgttccgtcgtgatctgcgcgattacgcccgcgaagagaagaacatgatgctggacaatcattcgctgtatgacatgactcgtggtatccaactccctgctaaatcggaagaggaaattttcgaacatctggggcttgaatacctggaaccgttcgaacgtaacgca

SEQ ID NO: 3374 - protein, 529 aa, synthetic construct
  REGION 1..529: note = Variant of terminal deoxynucleotidyltransferase
MHHHHHHGGSGSHGIRTIDSDFGKKQQKKGDNHDSSATYEIKFHEFVLFILEEKMGATRRTFLTDLARKKGFRVENELTDEVTHIVAENLSRSEVLAWLKEHKMEKTKQFELLDISWLIESMKVGKPVDTKGKYQLAESVEVSANPDPTEGRVNELPPTMKTVSPYACQRRTTLNNRNQRFTDSLEILRENYELKGNDDTALEFRRAISVLKSLPFEVRSLKDTEGLPWISDEVKGIMEEIIEVGESREVQAVLNDEWYQSFHAFTRVFGVGVKTADKWYRMGLRTLEDVRSSKTLKLTPWQKVGLLYYEDLARGVTRAEADAIWLLVQDAVATFDPDAIVEIVGGQRRGKPQGHDVDLLISSPGAEKEQEDQLLQKVMNLWKKQGLLLCGRLEWSQWEWGGLPSGKADEGDAEASCFLILKLYDHLVRKSKRNMPTGSNMGESKPWKAIKVDLLRCPRGSFAFAMLQWTGSRMFRRDLRDYAREEKNMMLDNHSLYDMTRGIQLPAKSEEEIFEHLGLEYLEPFERNA

SEQ ID NO: 3375 - DNA, 639 bp, synthetic construct
  misc_feature 1..639: note = Variant of 3'O-kinase
  source 1..639: mol_type = other DNA
atggcgtttaccattggtttaacaggagggatcgcagagggcaaatcgactgtgagtgccatgatgcgtgaactgggtctgccggtcatcgatgctgacgaggcagcacgcgccgttgttcgtccaggcgaagaagcttatcgccagattgtagctgcgttcggtccgggcattcttcgtgccgatggcgagatcgatcgcgccaaattgggtgctatcgtgttttcggacgaacaacaacgtaaggtgctgaatgcgattgtaggtcctgcagtccagaagaagatgctcgctgagaaagaagctcatatccgctcaggcgccaagacggttgtgctggatatcccgctgctgttcgaatccggattgacccattgggtcgacaaagtgctcgtggtgtacgtcgatgatgatgttcagttacgccgccttatggcacgtaacgggtttactgaagaagaagctctggcccgcattcgttcacagtggcccagtgcggagaaagttaaacgtgcagacgctgtaatcgacaataatggcacgattgaagaaacccgccgccagctgctggccattttacaccagtgggatctgctgggtaagggtggctccggccaccatcatcaccatcactaatga

SEQ ID NO: 3376 - protein, 211 aa, synthetic construct
  REGION 1..211: note = Variant of 3'O-kinase
MAFTIGLTGGIAEGKSTVSAMMRELGLPVIDADEAARAVVRPGEEAYRQIVAAFGPGILRADGEIDRAKLGAIVFSDEQQRKVLNAIVGPAVQKKMLAEKEAHIRSGAKTVVLDIPLLFESGLTHWVDKVLVVYVDDDVQLRRLMARNGFTEEEALARIRSQWPSAEKVKRADAVIDNNGTIEETRRQLLAILHQWDLLGKGGSGHHHHHH

SEQ ID NO: 3377 - DNA, 639 bp, synthetic construct
  misc_feature 1..639: note = Variant of 3'O-kinase
  source 1..639: mol_type = other DNA
atggcgtttaccattggtttaacaggagggatcgcatcgggcaaatcgactgtgagtgccatgatgcgtgaactgggtctgccggtcatcgatgctgacgaggcagcacgcgccgttgttcgtccaggcgaagaagcttatcgccagattgtagctgcgttcggtccgggcattcttcgtgccgatggcgagatcgatcgcgccaaattgggtgctatcgtgtttgctgacgaacaacaacgtaaggtgctgaatgcgattgtaggtcctgcagtctataagaagatgctcgctgagaaagaagctcatatccgctcaggcgccaagacggttgtgctggatatcccgctgctgttcgaatccggattgacccattgggtcgacaaagtgctcgtggtgtacgtcgatgatgatgttcagttacgccgccttatggcacgtaacgggtttaccgaagaagaagctctggcccgcattcgttcacagtggcccagtgccgagaaagttaaacgtgcagacgctgtaatcgacaataatggcaatatcgaagaaacccgccgccagctgctggccattttacaccagtgggatgcactgggtaagggtggctccggccaccatcatcaccatcactaatga

SEQ ID NO: 3378 - protein, 211 aa, synthetic construct
  REGION 1..211: note = Variant of 3'O-kinase
MAFTIGLTGGIASGKSTVSAMMRELGLPVIDADEAARAVVRPGEEAYRQIVAAFGPGILRADGEIDRAKLGAIVFADEQQRKVLNAIVGPAVYKKMLAEKEAHIRSGAKTVVLDIPLLFESGLTHWVDKVLVVYVDDDVQLRRLMARNGFTEEEALARIRSQWPSAEKVKRADAVIDNNGNIEETRRQLLAILHQWDALGKGGSGHHHHHH

SEQ ID NO: 3379 - DNA, 639 bp, synthetic construct
  misc_feature 1..639: note = Variant of 3'O-kinase
  source 1..639: mol_type = other DNA
atggcgtttaccattggtttaacaggagggatcgcatcgggcaaatcgactgtgagtgccatgatgcgtgaactgggtctgccggtcatcgatgctgacgaggcagcacgcgccgttgttcgtccaggcgaagaagcttatcgccagattgtagctgcgttcggtccgggcattcttcgtgccgatggcgagatcgatcgcgggaaattgggtgctatcgtgtttgctgacgaacaacaacgtaaggtgctgaatgcgattgtaggtcctgcagtctataagaagatgctcgctgagaaagaagctgttatccgctcaggcgccaagacggttgtgctggatatcccgctgctgttcgaatccggattgacccattgggtcgacaaagtgctcgtggtgtacgtcgatgatgatgttcagttacgccgccttatggcacgtaacgggtttaccgaagaagaagctctggcccgcattcgttcacagtggcccagtgccgagaaagttaaacgtgcagacgctgtaatcgacaataatggcaatgaggaagaaacccgccgccagctgctggccattttacaccagtgggatgcactgggtaagggtggctccggccaccatcatcaccatcactaatga

SEQ ID NO: 3380 - protein, 211 aa, synthetic construct
  REGION 1..211: note = Variant of 3'O-kinase
MAFTIGLTGGIASGKSTVSAMMRELGLPVIDADEAARAVVRPGEEAYRQIVAAFGPGILRADGEIDRGKLGAIVFADEQQRKVLNAIVGPAVYKKMLAEKEAVIRSGAKTVVLDIPLLFESGLTHWVDKVLVVYVDDDVQLRRLMARNGFTEEEALARIRSQWPSAEKVKRADAVIDNNGNEEETRRQLLAILHQWDALGKGGSGHHHHHH

SEQ ID NO: 3381 - DNA, 639 bp, synthetic construct
  misc_feature 1..639: note = Variant of 3'O-kinase
  source 1..639: mol_type = other DNA
atggcgtttaccattggtttaacaggagggatcgcatcgggcaaatcgactgtgagtgccatgatgcgtgaactgggtctgccggtcatcgatgctgacgaggcagcacgcgccgttgttcgtccaggcgaagaagcttatcgccagattgtagctgcgttcggtccgggcattcttcgtgccgatggcgagatcgatcgcgccaaattgggtgctatcgtgtttgctgacgaacaacaacgtaaggtgctgaatgcgattgtaggtcctgcagtctataagaagatgctcgctgagaaagaagctcatatccgctcaggcgccaagacggttgtgctggatatcccgctgctgttcgaatccggattgacccattgggtcgacaaagtgctcgtggtgtacgtcgatgatgatgttcagttacgccgccttatggcacgtaacgggtttaccgaagaagaagctctggcccgcattcgttcacagtggcccagtgccgagaaagttaaacgtgcagacgctgtaatcgacaataatggcactgaggaagaaacccgccgccagctgctggccattttacaccagtgggatgcactgggtaagggtggctccggccaccatcatcaccatcactaatga

SEQ ID NO: 3382 - protein, 211 aa, synthetic construct
  REGION 1..211: note = Variant of 3'O-kinase
MAFTIGLTGGIASGKSTVSAMMRELGLPVIDADEAARAVVRPGEEAYRQIVAAFGPGILRADGEIDRAKLGAIVFADEQQRKVLNAIVGPAVYKKMLAEKEAHIRSGAKTVVLDIPLLFESGLTHWVDKVLVVYVDDDVQLRRLMARNGFTEEEALARIRSQWPSAEKVKRADAVIDNNGTEEETRRQLLAILHQWDALGKGGSGHHHHHH

SEQ ID NO: 3383 - DNA, 639 bp, synthetic construct
  misc_feature 1..639: note = Variant of 3'O-kinase
  source 1..639: mol_type = other DNA
atggcgtttaccattggtttaacaggagggatcgcaagtggcaaatcgactgtgagtgccatgatgcgtgaactgggtctgccggtcatcgatgctgacgaggcagcacgcgccgttgttcgtccaggcgaagaagcttatcgccagattgtagctgcgttcggtccgggcattcttcgtgccgatggcgagatcgatcgcgccaaattgggtgctatcgtgtttgctgacgaacaacaacgtaaggtgctgaatgcgattgtaggtcctgcagtcctgaagaagatgctcgctgagaaagaagctcatatccgctcaggcgccaagacggttgtgctggatatcccgctgctgttcgaatccggattgacccattgggtcgacaaagtgctcgtggtgtacgtcgatgatgatgttcagttacgccgccttatggcacgtaacgggtttaccgaagaagaagctctggcccgcattcgttcacagtggcccagtgccgagaaagttaaacgtgcagacgctgtaatcgacaataatggcacgattgaagaaacccgccgccagctgctggccattttacaccagtgggatctgctgggtaagggtggctccggccaccatcatcaccatcactaatga

SEQ ID NO: 3384 - protein, 211 aa, synthetic construct
  REGION 1..211: note = Variant of 3'O-kinase
MAFTIGLTGGIASGKSTVSAMMRELGLPVIDADEAARAVVRPGEEAYRQIVAAFGPGILRADGEIDRAKLGAIVFADEQQRKVLNAIVGPAVLKKMLAEKEAHIRSGAKTVVLDIPLLFESGLTHWVDKVLVVYVDDDVQLRRLMARNGFTEEEALARIRSQWPSAEKVKRADAVIDNNGTIEETRRQLLAILHQWDLLGKGGSGHHHHHH

SEQ ID NO: 3385 - DNA, 639 bp, synthetic construct
  misc_feature 1..639: note = Variant of 3'O-kinase
  source 1..639: mol_type = other DNA
atggcgtttaccattggtttaacaggagggatcgcagagggcaaatcgactgtgagtgccatgatgcgtgaactgggtctgccggtcatcgatgctgacgaggcagcacgcgccgttgttcgtccaggcgaagaagcttatcgccagattgtagctgcgttcggtccgggcattcttcgtgccgatggcgagatcgatcgcgccaaattgggtgctatcgtgttttcggacgaacaacaacgtaaggtgctgaatgcgattgtaggtcctgcagtccagaagaagatgctcgctgagaaagaagctcatatccgctcaggcgccaagacggttgtgctggatatcccgctgctgttcgaatccggattgacccattgggtcgacaaagtgctcgtggtgtacgtcgatgatgatgttcagttacgccgccttatggcacgtaacgggtttaccgaagaagaagctctggcccgcattcgttcacagtggcccagtgccgagaaagttaaacgtgcagacgctgtaatcgacaataatggcacgattgaagaaacccgccgccagctgctggccattttacaccagtgggatgcactgggtaagggtggctccggccaccatcatcaccatcactaatga

SEQ ID NO: 3386 - protein, 211 aa, synthetic construct
  REGION 1..211: note = Variant of 3'O-kinase
MAFTIGLTGGIAEGKSTVSAMMRELGLPVIDADEAARAVVRPGEEAYRQIVAAFGPGILRADGEIDRAKLGAIVFSDEQQRKVLNAIVGPAVQKKMLAEKEAHIRSGAKTVVLDIPLLFESGLTHWVDKVLVVYVDDDVQLRRLMARNGFTEEEALARIRSQWPSAEKVKRADAVIDNNGTIEETRRQLLAILHQWDALGKGGSGHHHHHH

SEQ ID NO: 3387 - DNA, 639 bp, synthetic construct
  misc_feature 1..639: note = Variant of 3'O-kinase
  source 1..639: mol_type = other DNA
atggcgtttaccattggtttaacaggagggatcgcaagtggcaaatcgactgtgagtgccatgatgcgtgaactgggtctgccggtcatcgatgctgacgaggcagcacgcgccgttgttcgtccaggcgaagaagcttatcgccagattgtagctgcgttcggtccgggcattcttcgtgccgatggcgagatcgatcgcgccaaattgggtgctatcgtgtttgctgacgaacaacaacgtacggtgctgaatgcgattgtaggtcctgcagtctataagaagatgctcgctgagaaagaagctcatatccgctcaggcgccaagacggttgtgctggatatcccgctgctgttcgaatccggattgacccattgggtcgacaaagtgctcgtggtgtacgtcgatgatgatgttcagttacgccgccttatggcacgtaacgggtttaccgaagaagaagctctggcccgcattcgttcacagtggcccagtgccgagaaagttaaacgtgcagacgctgtaatcgacaataatggcacgattgaagaaacccgccgccagctgctggccattttacaccagtgggatattctgggtaagggtggctccggccaccatcatcaccatcactaatga

SEQ ID NO: 3388 - protein, 211 aa, synthetic construct
  REGION 1..211: note = Variant of 3'O-kinase
MAFTIGLTGGIASGKSTVSAMMRELGLPVIDADEAARAVVRPGEEAYRQIVAAFGPGILRADGEIDRAKLGAIVFADEQQRTVLNAIVGPAVYKKMLAEKEAHIRSGAKTVVLDIPLLFESGLTHWVDKVLVVYVDDDVQLRRLMARNGFTEEEALARIRSQWPSAEKVKRADAVIDNNGTIEETRRQLLAILHQWDILGKGGSGHHHHHH

SEQ ID NO: 3389 - DNA, 639 bp, synthetic construct
  misc_feature 1..639: note = Variant of 3'O-kinase
  source 1..639: mol_type = other DNA
atggcgtttaccattggtttaacaggagggatcgcagagggcaaatcgactgtgagtgccatgatgcgtgaactgggtctgccggtcatcgatgctgacgaggcagcacgcgccgttgttcgtccaggcgaagaagcttatcgccagattgtagctgcgttcggtccgggcattcttcgtgccgatggcgagatcgatcgcgccaaattgggtgctatcgtgttttcggacgaacaacaacgtaaggtgctgaatgcgattgtaggtcctgcagtctacaagaagatgctcgctgagaaagaagctcatatccgctcaggagccaagacggttgtgctggatatcccgctgctgttcgaatccggattgacccattgggtcgacaaagtgctcgtggtgtacgtcgatgatgatgttcagttacgccgccttatggcacgtaacgggtttactgaagaagaagctctggcccgcattcgttcacagtggcccagtgcggagaaagttaaacgtgcagacgctgtaatcgacaataatggcacgattgaagaaacccgccgccagctgctggccattttacaccagtgggatctgctgggtaagggtggctccggccaccatcatcaccatcactaatga

SEQ ID NO: 3390 - protein, 211 aa, synthetic construct
  REGION 1..211: note = Variant of 3'O-kinase
MAFTIGLTGGIAEGKSTVSAMMRELGLPVIDADEAARAVVRPGEEAYRQIVAAFGPGILRADGEIDRAKLGAIVFSDEQQRKVLNAIVGPAVYKKMLAEKEAHIRSGAKTVVLDIPLLFESGLTHWVDKVLVVYVDDDVQLRRLMARNGFTEEEALARIRSQWPSAEKVKRADAVIDNNGTIEETRRQLLAILHQWDLLGKGGSGHHHHHH

SEQ ID NO: 3391 - DNA, 639 bp, synthetic construct
  misc_feature 1..639: note = Variant of 3'O-kinase
  source 1..639: mol_type = other DNA
atggcgtttaccattggtttaacaggagggatcgcatcgggcaaatcgactgtgagtgccatgatgcgtgaactgggtctgccggtcatcgatgctgacgaggcagcacgcgccgttgttcgtccaggcgaagaagcttatcgccagattgtagctgcgttcggtccgggcattcttcgtgccgatggcgagatcgatcgcgccaaattgggtgctatcgtgtttgctgacgaacaacaacgtaaggtgctgaatgcgattgtaggtcctgcagtctataagaagatgctcgctgagaaagaagctcatatccgctcaggcgccaagacggttgtgctggatatcccgctgctgttcgaatccggattgacccattgggtcgacaaagtgctcgtggtgtacgtcgatgatgatgttcagttacgccgccttatggcacgtaacgggtttaccgaagaagaagctctggcccgcattcgttcacagtggcccagtgccgagaaagttaaacgtgcagacgctgtaatcgacaataatggcacgattgaagaaacccgccgccagctgctggccattttacaccagtgggatgcactgtgtaagggtggctccggccaccatcatcaccatcactaatga

SEQ ID NO: 3392 - protein, 211 aa, synthetic construct
  REGION 1..211: note = Variant of 3'O-kinase
MAFTIGLTGGIASGKSTVSAMMRELGLPVIDADEAARAVVRPGEEAYRQIVAAFGPGILRADGEIDRAKLGAIVFADEQQRKVLNAIVGPAVYKKMLAEKEAHIRSGAKTVVLDIPLLFESGLTHWVDKVLVVYVDDDVQLRRLMARNGFTEEEALARIRSQWPSAEKVKRADAVIDNNGTIEETRRQLLAILHQWDALCKGGSGHHHHHH

SEQ ID NO: 3393 - DNA, 639 bp, synthetic construct
  misc_feature 1..639: note = Variant of 3'O-kinase
  source 1..639: mol_type = other DNA
atggcgtttaccattggtttaacaggagggatcgcatcgggcaaatcgactgtgagtgccatgatgcgtgaactgggtctgccggtcatcgatgctgacgaggcagcacgcgccgttgttcgtccaggcgaagaagcttatcgccagattgtagctgcgttcggtccgggcattcttcgtgccgatggcgagatcgatcgcgccaaattgggtgctatcgtgtttgctgacgaacaacaacgtaaggtgctgaatgcgattgtaggtcctgcagtccttaagaagatgctcgctgagaaagaagctcatatccgctcaggcgccaagacggttgtgctggatatcccgctgctgttcgaatccggattgacccattgggtcgacaaagtgctcgtggtgtacgtcgatgatgatgttcagttacgccgccttatggcacgtaacgggtttaccgaagaagaagctctggcccgcattcgttcacagtggcccagtgccgagaaagttaaacgtgcagacgctgtaatcgacaataatggcacgattgaagaaacccgccgccagctgctggccattttacaccagtgggatgcactgggtaagggtggctccggccaccatcatcaccatcactaatga

SEQ ID NO: 3394 - protein, 211 aa, synthetic construct
  REGION 1..211: note = Variant of 3'O-kinase
MAFTIGLTGGIASGKSTVSAMMRELGLPVIDADEAARAVVRPGEEAYRQIVAAFGPGILRADGEIDRAKLGAIVFADEQQRKVLNAIVGPAVLKKMLAEKEAHIRSGAKTVVLDIPLLFESGLTHWVDKVLVVYVDDDVQLRRLMARNGFTEEEALARIRSQWPSAEKVKRADAVIDNNGTIEETRRQLLAILHQWDALGKGGSGHHHHHH

SEQ ID NO: 3395 - DNA, 639 bp, synthetic construct
  misc_feature 1..639: note = Variant of 3'O-kinase
  source 1..639: mol_type = other DNA
atggcgtttaccattggtttaacaggagggatcgcatcgggcaaatcgactgtgagtgccatgatgcgtgaactgggtctgccggtcatcgatgctgacgaggcagcacgcgccgttgttcgtccaggcgaagaagcttatcgccagattgtagctgcgttcggtccgggcattcttcgtgccgatggcgagatcgatcgcgccaaattgggtgctatcgtgtttgctgacgaacaacaacgtaaggtgctgaatgcgattgtaggtcctgcagtctataagaagatgctcgctgagaaagaagctctgatccgctcaggcgccaagacggttgtgctggatatcccgctgctgttcgaatccggattgacccattgggtcgacaaagtgctcgtggtgtacgtcgatgatgatgttcagttacgccgccttatggcacgtaacgggtttaccgaagaagaagctctggcccgcattcgttcacagtggcccagtgccgagaaagttaaacgtgcagacgctgtaatcgacaataatggcacgattgaagaaacccgccgccagctgctggccattttacaccagtgggatgcactgggtaagggtggctccggccaccatcatcaccatcactaatga

SEQ ID NO: 3396 - protein, 211 aa, synthetic construct
  REGION 1..211: note = Variant of 3'O-kinase
MAFTIGLTGGIASGKSTVSAMMRELGLPVIDADEAARAVVRPGEEAYRQIVAAFGPGILRADGEIDRAKLGAIVFADEQQRKVLNAIVGPAVYKKMLAEKEALIRSGAKTVVLDIPLLFESGLTHWVDKVLVVYVDDDVQLRRLMARNGFTEEEALARIRSQWPSAEKVKRADAVIDNNGTIEETRRQLLAILHQWDALGKGGSGHHHHHH

SEQ ID NO: 3397 - DNA, 639 bp, synthetic construct
  misc_feature 1..639: note = Variant of 3'O-kinase
  source 1..639: mol_type = other DNA
atggcgtttaccattggtttaacaggagggatcgcatcgggcaaatcgactgtgagtgccatgatgcgtgaactgggtctgccggtcatcgatgctgacgaggcagcacgcgccgttgttcgtccaggcgaagaagcttatcgccagattgtagctgcgttcggtccgggcattcttcgtgccgatggcgagatcgatcgcgccaaattgggtgctatcgtgtttgctgacgaacaacaacgtaaggtgctgaatgcgattgtaggtcctgcagtcatgaagaagatgctcgctgagaaagaagctcatatccgctcaggcgccaagacggttgtgctggatatcccgctgctgttcgaatccggattgacccattgggtcgacaaagtgctcgtggtgtacgtcgatgatgatgttcagttacgccgccttatggcacgtaacgggtttaccgaagaagaagctctggcccgcattcgttcacagtggcccagtgccgagaaagttaaacgtgcagacgctgtaatcgacaataatggcacgattgaagaaacccgccgccagctgctggccattttacaccagtgggatgcactgggtaagggtggctccggccaccatcatcaccatcactaatga

SEQ ID NO: 3398 - protein, 211 aa, synthetic construct
  REGION 1..211: note = Variant of 3'O-kinase
MAFTIGLTGGIASGKSTVSAMMRELGLPVIDADEAARAVVRPGEEAYRQIVAAFGPGILRADGEIDRAKLGAIVFADEQQRKVLNAIVGPAVMKKMLAEKEAHIRSGAKTVVLDIPLLFESGLTHWVDKVLVVYVDDDVQLRRLMARNGFTEEEALARIRSQWPSAEKVKRADAVIDNNGTIEETRRQLLAILHQWDALGKGGSGHHHHHH

SEQ ID NO: 3399 - DNA, 639 bp, synthetic construct
  misc_feature 1..639: note = Variant of 3'O-kinase
  source 1..639: mol_type = other DNA
atggcgtttaccattggtttaacaggagggatcgcatcgggcaaatcgactgtgagtgccatgatgcgtgaactgggtctgccggtcatcgatgctgacgaggcagcacgcgccgttgttcgtccaggcgaagaagcttatcgccagattgtagctgcgttcggtccgggcattcttcgtgccgatggcgagatcgatcgcgccaaattgggtgctatcgtgtttgctgacgaacaacaacgtaaggtgctgaatgcgattgtaggtcctgcagtcgagaagaagatgctcgctgagaaagaagctcatatccgctcaggcgccaagacggttgtgctggatatcccgctgctgttcgaatccggattgacccattgggtcgacaaagtgctcgtggtgtacgtcgatgatgatgttcagttacgccgccttatggcacgtaacgggtttaccgaagaagaagctctggcccgcattcgttcacagtggcccagtgccgagaaagttaaacgtgcagacgctgtaatcgacaataatggcacgattgaagaaacccgccgccagctgctggccattttacaccagtgggatgcactgggtaagggtggctccggccaccatcatcaccatcactaatga

SEQ ID NO: 3400 - protein, 211 aa, synthetic construct
  REGION 1..211: note = Variant of 3'O-kinase
MAFTIGLTGGIASGKSTVSAMMRELGLPVIDADEAARAVVRPGEEAYRQIVAAFGPGILRADGEIDRAKLGAIVFADEQQRKVLNAIVGPAVEKKMLAEKEAHIRSGAKTVVLDIPLLFESGLTHWVDKVLVVYVDDDVQLRRLMARNGFTEEEALARIRSQWPSAEKVKRADAVIDNNGTIEETRRQLLAILHQWDALGKGGSGHHHHHH

SEQ ID NO: 3401 - DNA, 639 bp, synthetic construct
  misc_feature 1..639: note = Variant of 3'O-kinase
  source 1..639: mol_type = other DNA
atggcgtttaccattggtttaacaggagggatcgcatcgggcaaatcgactgtgagtgccatgatgcgtgaactgggtctgccggtcatcgatgctgacgaggcagcacgcgccgttgttcgtccaggcgaagaagcttatcgccagattgtagctgcgttcggtccgggcattcttcgtgccgatggcgagatcgatcgcgccaaattgggtgctatcgtgtttgctgacgaacaacaacgtaaggtgctgaatgcgattgtaggtcctgcagtccagaagaagatgctcgctgagaaagaagctcatatccgctcaggcgccaagacggttgtgctggatatcccgctgctgttcgaatccggattgacccattgggtcgacaaagtgctcgtggtgtacgtcgatgatgatgttcagttacgccgccttatggcacgtaacgggtttaccgaagaagaagctctggcccgcattcgttcacagtggcccagtgccgagaaagttaaacgtgcagacgctgtaatcgacaataatggcacgattgaagaaacccgccgccagctgctggccattttacaccagtgggatgcactgggtaagggtggctccggccaccatcatcaccatcactaatga

SEQ ID NO: 3402 - protein, 211 aa, synthetic construct
  REGION 1..211: note = Variant of 3'O-kinase
MAFTIGLTGGIASGKSTVSAMMRELGLPVIDADEAARAVVRPGEEAYRQIVAAFGPGILRADGEIDRAKLGAIVFADEQQRKVLNAIVGPAVQKKMLAEKEAHIRSGAKTVVLDIPLLFESGLTHWVDKVLVVYVDDDVQLRRLMARNGFTEEEALARIRSQWPSAEKVKRADAVIDNNGTIEETRRQLLAILHQWDALGKGGSGHHHHHH

SEQ ID NO: 3403 - DNA, 639 bp, synthetic construct
  misc_feature 1..639: note = Variant of 3'O-kinase
  source 1..639: mol_type = other DNA
atggcgtttaccattggtttaacaggagggatcgcatcgggcaaatcgactgtgagtgccatgatgcgtgaactgggtctgccggtcatcgatgctgacgaggcagcacgcgccgttgttcgtccaggcgaagaagcttatcgccagattgtagctgcgttcggtccgggcattcttcgtgccgatggcgagatcgatcgcgccaaattgggtgctatcgtgtttgctgacgaacaacaacgtaaggtgctgaatgcgattgtaggtcctgcagtctataagaagatgctcgctgagaaagaagctcatatccgctcaggcgccaagacgattgtgctggatatcccgctgctgttcgaatccggattgacccattgggtcgacaaagtgctcgtggtgtacgtcgatgatgatgttcagttacgccgccttatggcacgtaacgggtttaccgaagaagaagctctggcccgcattcgttcacagtggcccagtgccgagaaagttaaacgtgcagacgctgtaatcgacaataatggcacgattgaagaaacccgccgccagctgctggccattttacaccagtgggatgcactgggtaagggtggctccggccaccatcatcaccatcactaatga

SEQ ID NO: 3404 - protein, 211 aa, synthetic construct
  REGION 1..211: note = Variant of 3'O-kinase
MAFTIGLTGGIASGKSTVSAMMRELGLPVIDADEAARAVVRPGEEAYRQIVAAFGPGILRADGEIDRAKLGAIVFADEQQRKVLNAIVGPAVYKKMLAEKEAHIRSGAKTIVLDIPLLFESGLTHWVDKVLVVYVDDDVQLRRLMARNGFTEEEALARIRSQWPSAEKVKRADAVIDNNGTIEETRRQLLAILHQWDALGKGGSGHHHHHH

SEQ ID NO: 3405 - DNA, 639 bp, synthetic construct
  misc_feature 1..639: note = Variant of 3'O-kinase
  source 1..639: mol_type = other DNA
atggcgtttaccattggtttaacaggagggatcgcatcgggcaaatcgactgtgagtgccatgatgcgtgaactgggtctgccggtcatcgatgctgacgaggcagcacgcgccgttgttcgtccaggcgaagaagcttatcgccagattgtagctgcgttcggtccgggcattcttcgtgccgatggcgagatcgatcgcgccaaattgggtgctatcgtgtttgctgacgaacaacaacgtaaggtgctgaatgcgattgtaggtcctgcagtctataagaagatgctcgctgagaaagaagctcatatccgctcaggcgccaagacggttgtgctggatatcccgctgctgttcgaatccggattgacccattgggtcgacaaagtgctcgtggtgtacgtcgatgatgatgttcagttacgccgccttatggcacgtaacgggtttaccgaagaagaagctctggcccgcattcgttcacagtggcccagtgccgagaaagttaaacgtgcagacgctgtaatcgacaataatggcacgattgaagaaacccgccgccagctgctggccattttacaccagtgggatgcactgggtaagggtggctccggccaccatcatcacagtcactaatga

SEQ ID NO: 3406 - protein, 211 aa, synthetic construct
  REGION 1..211: note = Variant of 3'O-kinase
MAFTIGLTGGIASGKSTVSAMMRELGLPVIDADEAARAVVRPGEEAYRQIVAAFGPGILRADGEIDRAKLGAIVFADEQQRKVLNAIVGPAVYKKMLAEKEAHIRSGAKTVVLDIPLLFESGLTHWVDKVLVVYVDDDVQLRRLMARNGFTEEEALARIRSQWPSAEKVKRADAVIDNNGTIEETRRQLLAILHQWDALGKGGSGHHHHSH

SEQ ID NO: 3407 - DNA, 639 bp, synthetic construct
  misc_feature 1..639: note = Variant of 3'O-kinase
  source 1..639: mol_type = other DNA
atggcgtttaccattggtttaacaggagggatcgcatcgggcaaatcgactgtgagtgccatgatgcgtgaactgggtctgccggtcatcgatgctgacgaggcagcacgcgccgttgttcgtccaggcgaagaagcttatcgccagattgtagctgcgttcggtccgggcattcttcgtgccgatggcgagatcgatcgcgccaaattgggtgctatcgtgtttgctgacgaacaacaacgtaaggtgctgaatgcgattgtaggtcctgcagtctataagaagatgctcgctgagaaagaagctcatatccgctcaggcgccaagacggttgtgctggatatcccgctgctgttcgaatccggattgacccattgggtcgacaaagtgctcgtggtgtacgtcgatgatgatgttcagttacgccgccttatggcacgtaacgggtttaccgaagaagaagctctggcccgcattcgttcacagtggcccagtgccgagaaagttaaacgtgcagacgctgtaatcgacaataatggcacgattgaagaaacccgccgccagctgctggatattttacaccagtgggatgcactgggtaagggtggctccggccaccatcatcaccatcactaatga

SEQ ID NO: 3408 - protein, 211 aa, synthetic construct
  REGION 1..211: note = Variant of 3'O-kinase
MAFTIGLTGGIASGKSTVSAMMRELGLPVIDADEAARAVVRPGEEAYRQIVAAFGPGILRADGEIDRAKLGAIVFADEQQRKVLNAIVGPAVYKKMLAEKEAHIRSGAKTVVLDIPLLFESGLTHWVDKVLVVYVDDDVQLRRLMARNGFTEEEALARIRSQWPSAEKVKRADAVIDNNGTIEETRRQLLDILHQWDALGKGGSGHHHHHH

SEQ ID NO: 3409 - DNA, 639 bp, synthetic construct
  misc_feature 1..639: note = Variant of 3'O-kinase
  source 1..639: mol_type = other DNA
atggcgtttaccattggtttaacaggagggatcgcatcgggcaaatcgactgtgagtgccatgatgcgtgaactgggtctgccggtcatcgatgctgacgaggcagcacgcgccgttgttcgtccaggcgaagaagcttatcgccagattgtagctgcgttcggtccgggcattcttcgtgccgatggcgagatcgatcgcgccaaattgggtgctatcgtgtttgctgacgaacaacaacgtaaggtgctgaatgcgattgtaggtcctgcagtctataagaagatgctcgctgagaaagaagctcatatccgctcaggcgccaagacggttgtgctggatatcccgctgctgttcgaatccggattgacccattgggtcgacaaagtgctcgtggtgtacgtcgatgatgatgttcagttacgccgccttatggcacgtaacgggtttaccgaagaagaagctctggcccgcattcgttcacagtggcccagtgccgagaaagttaaacgtgcagacgctgtaatcgacaataatggcacgattgaagaaacccgccgccagctgctggccattttacaccagtgggatgcactgggtaagggtggctccggccaccatcatcacgagcactaatga

SEQ ID NO: 3410 - protein, 211 aa, synthetic construct
  REGION 1..211: note = Variant of 3'O-kinase
MAFTIGLTGGIASGKSTVSAMMRELGLPVIDADEAARAVVRPGEEAYRQIVAAFGPGILRADGEIDRAKLGAIVFADEQQRKVLNAIVGPAVYKKMLAEKEAHIRSGAKTVVLDIPLLFESGLTHWVDKVLVVYVDDDVQLRRLMARNGFTEEEALARIRSQWPSAEKVKRADAVIDNNGTIEETRRQLLAILHQWDALGKGGSGHHHHEH

SEQ ID NO: 3411 - DNA, 639 bp, synthetic construct
  misc_feature 1..639: note = Variant of 3'O-kinase
  source 1..639: mol_type = other DNA
atggcgtttaccattggtttaacaggagggatcgcatcgggcaaatcgactgtgagtgccatgatgcgtgaactgggtctgccggtcatcgatgctgacgaggcagcacgcgccgttgttcgtccaggcgaagaagcttatcgccagattgtagctgcgttcggtccgggcattcttcgtgccgatggcgagatcgatcgcgccaaattgggtgctatcgtgtttgctgacgaacaacaacgtgaggtgctgaatgcgattgtaggtcctgcagtctataagaagatgctcgctgagaaagaagctcatatccgctcaggcgccaagacggttgtgctggatatcccgctgctgttcgaatccggattgacccattgggtcgacaaagtgctcgtggtgtacgtcgatgatgatgttcagttacgccgccttatggcacgtaacgggtttaccgaagaagaagctctggcccgcattcgttcacagtggcccagtgccgagaaagttaaacgtgcagacgctgtaatcgacaataatggcacgattgaagaaacccgccgccagctgctggccattttacaccagtgggatgcactgggtaagggtggctccggccaccatcatcaccatcactaatga

SEQ ID NO: 3412 - protein, 211 aa, synthetic construct
  REGION 1..211: note = Variant of 3'O-kinase
MAFTIGLTGGIASGKSTVSAMMRELGLPVIDADEAARAVVRPGEEAYRQIVAAFGPGILRADGEIDRAKLGAIVFADEQQREVLNAIVGPAVYKKMLAEKEAHIRSGAKTVVLDIPLLFESGLTHWVDKVLVVYVDDDVQLRRLMARNGFTEEEALARIRSQWPSAEKVKRADAVIDNNGTIEETRRQLLAILHQWDALGKGGSGHHHHHH

SEQ ID NO: 3413 - DNA, 639 bp, synthetic construct
  misc_feature 1..639: note = Variant of 3'O-kinase
  source 1..639: mol_type = other DNA
atggcgtttaccattggtttaacaggagggatcgcatcgggcaaatcgactgtgagtgccatgatgcgtgaactgggtctgccggtcatcgatgctgacgaggcagcacgcgccgttgttcgtccaggcgaagaagcttatcgccagattgtagctgcgttcggtccgggcattcttcgtgccgatggcgagatcgatcgcgccaaattgggtgctatcgtgtttgctgacgaacaacaacgtaaggtgctgaatgcgattgtaggtcctgcagtctgtaagaagatgctcgctgagaaagaagctcatatccgctcaggcgccaagacggttgtgctggatatcccgctgctgttcgaatccggattgacccattgggtcgacaaagtgctcgtggtgtacgtcgatgatgatgttcagttacgccgccttatggcacgtaacgggtttaccgaagaagaagctctggcccgcattcgttcacagtggcccagtgccgagaaagttaaacgtgcagacgctgtaatcgacaataatggcacgattgaagaaacccgccgccagctgctggccattttacaccagtgggatgcactgggtaagggtggctccggccaccatcatcaccatcactaatga

SEQ ID NO: 3414 - protein, 211 aa, synthetic construct
  REGION 1..211: note = Variant of 3'O-kinase
MAFTIGLTGGIASGKSTVSAMMRELGLPVIDADEAARAVVRPGEEAYRQIVAAFGPGILRADGEIDRAKLGAIVFADEQQRKVLNAIVGPAVCKKMLAEKEAHIRSGAKTVVLDIPLLFESGLTHWVDKVLVVYVDDDVQLRRLMARNGFTEEEALARIRSQWPSAEKVKRADAVIDNNGTIEETRRQLLAILHQWDALGKGGSGHHHHHH

SEQ ID NO: 3415 - DNA, 639 bp, synthetic construct
  misc_feature 1..639: note = Variant of 3'O-kinase
  source 1..639: mol_type = other DNA
atggcgtttaccattggtttaacaggagggatcgcatcgggcaaatcgactgtgagtgccatgatgcgtgaactgggtctgccggtcatcgatgctgacgaggcagcacgcgccgttgttcgtccaggcgaagaagcttatcgccagattgtagctgcgttcggtccgggcattcttcgtgccgatggcgagatcgatcgcgccaaattgggtgctatcgtgtttgctgacgaacaacaacgtaaggtgctgaatgcgattgtaggtcctgcagtcgtgaagaagatgctcgctgagaaagaagctcatatccgctcaggcgccaagacggttgtgctggatatcccgctgctgttcgaatccggattgacccattgggtcgacaaagtgctcgtggtgtacgtcgatgatgatgttcagttacgccgccttatggcacgtaacgggtttaccgaagaagaagctctggcccgcattcgttcacagtggcccagtgccgagaaagttaaacgtgcagacgctgtaatcgacaataatggcacgattgaagaaacccgccgccagctgctggccattttacaccagtgggatgcactgggtaagggtggctccggccaccatcatcaccatcactaatga

SEQ ID NO: 3416 - protein, 211 aa, synthetic construct
  REGION 1..211: note = Variant of 3'O-kinase
MAFTIGLTGGIASGKSTVSAMMRELGLPVIDADEAARAVVRPGEEAYRQIVAAFGPGILRADGEIDRAKLGAIVFADEQQRKVLNAIVGPAVVKKMLAEKEAHIRSGAKTVVLDIPLLFESGLTHWVDKVLVVYVDDDVQLRRLMARNGFTEEEALARIRSQWPSAEKVKRADAVIDNNGTIEETRRQLLAILHQWDALGKGGSGHHHHHH

SEQ ID NO: 3417 - DNA, 639 bp, synthetic construct
  misc_feature 1..639: note = Variant of 3'O-kinase
  source 1..639: mol_type = other DNA
atggcgtttaccattggtttaacaggagggatcgcatcgggcaaatcgactgtgagtgccatgatgcgtgaactgggtctgccggtcatcgatgctgacgaggcagcacgcgccgttgttcgtccaggcgaagaagcttatcgccagattgtagctgcgttcggtccgggcattcttcgtgccgatggcgagatcgatcgcgccaaattgggtgctatcgtgttttcggacgaacaacaacgtaaggtgctgaatgcgattgtaggtcctgcagtctataagaagatgctcgctgagaaagaagctcatatccgctcaggcgccaagacggttgtgctggatatcccgctgctgttcgaatccggattgacccattgggtcgacaaagtgctcgtggtgtacgtcgatgatgatgttcagttacgccgccttatggcacgtaacgggtttaccgaagaagaagctctggcccgcattcgttcacagtggcccagtgccgagaaagttaaacgtgcagacgctgtaatcgacaataatggcacgattgaagaaacccgccgccagctgctggccattttacaccagtgggatgcactgggtaagggtggctccggccaccatcatcaccatcactaatga

SEQ ID NO: 3418 - protein, 211 aa, synthetic construct
  REGION 1..211: note = Variant of 3'O-kinase
MAFTIGLTGGIASGKSTVSAMMRELGLPVIDADEAARAVVRPGEEAYRQIVAAFGPGILRADGEIDRAKLGAIVFSDEQQRKVLNAIVGPAVYKKMLAEKEAHIRSGAKTVVLDIPLLFESGLTHWVDKVLVVYVDDDVQLRRLMARNGFTEEEALARIRSQWPSAEKVKRADAVIDNNGTIEETRRQLLAILHQWDALGKGGSGHHHHHH

SEQ ID NO: 3419 - DNA, 639 bp, synthetic construct
  misc_feature 1..639: note = Variant of 3'O-kinase
  source 1..639: mol_type = other DNA
atggcgtttaccattggtttaacaggagggatcgcatcgggcaaatcgactgtgagtgccatgatgcgtgaactgggtctgccggtcatcgatgctgacgaggcagcacgcgccgttgttcgtccaggcgaagaagcttatcgccagattgtagctgcgttcggtccgggcattcttcgtgccgatggcgagatcgatcgcgccaaattgggtgctatcgtgtttgctgacgaacaacaacgtaaggtgctgaatgcgattgtaggtcctgcagtctataagaagatgctcgctgagaaagaagctcatatccgctcaggcgccaagacggttgtgctggatatcccgctgctgttcgaatccggattgacccattgggtcgacaaagtgctcgtggtgtacgtcgatgatgatgttcagttacgccgccttatggcacgtaacgggtttaccgaagaagaagctctggcccgcattcgttcacagtggcccagtgccgagaaagttaaacgtgcagacgctgtaatcgacaataatggcacgattgaagaaacccgccgccagctgctggccattttacaccagtgggatgcactgggtaagggtggctccggccaccatcatcacccgcactaatga

SEQ ID NO: 3420 - protein, 211 aa, synthetic construct
  REGION 1..211: note = Variant of 3'O-kinase
MAFTIGLTGGIASGKSTVSAMMRELGLPVIDADEAARAVVRPGEEAYRQIVAAFGPGILRADGEIDRAKLGAIVFADEQQRKVLNAIVGPAVYKKMLAEKEAHIRSGAKTVVLDIPLLFESGLTHWVDKVLVVYVDDDVQLRRLMARNGFTEEEALARIRSQWPSAEKVKRADAVIDNNGTIEETRRQLLAILHQWDALGKGGSGHHHHPH

SEQ ID NO: 3421 - DNA, 639 bp, synthetic construct
  misc_feature 1..639: note = Variant of 3'O-kinase
  source 1..639: mol_type = other DNA
atggcgtttaccattggtttaacaggagggatcgcatcgggcaaatcgactgtgagtgccatgatgcgtgaactgggtctgccggtcatcgatgctgacgaggcagcacgcgccgttgttcgtccaggcgaagaagcttatcgccagattgtagctgcgttcggtccgggcattcttcgtgccgatggcgagatcgatcgcgccaaattgggtgctatcgtgtttgctgacgaacaacaacgtaaggtgctgaatgcgattgtaggtcctgcagtctataagaagatgctcgctgagaaagaagctcatatccgctcaggcgccaagacggttgtgctggatatcccgctgctgttcgaatccggattgacccattgggtcgacaaagtgctcgtggtgtacgtcgatgatgatgttcagttacgccgccttatggcacgtaacgggtttaccgaagaagaagctctggcccgcattcgttcacagtggcccagtgccgagaaagttaaacgtgcagacgctgtaatcgacaataatggcacgattgaagaaacccgccgccagctgctggccattttacaccagtgggatgcactgggtaagggtggctccggccaccatcatcaccataaataatga

SEQ ID NO: 3422 - protein, 211 aa, synthetic construct
  REGION 1..211: note = Variant of 3'O-kinase
MAFTIGLTGGIASGKSTVSAMMRELGLPVIDADEAARAVVRPGEEAYRQIVAAFGPGILRADGEIDRAKLGAIVFADEQQRKVLNAIVGPAVYKKMLAEKEAHIRSGAKTVVLDIPLLFESGLTHWVDKVLVVYVDDDVQLRRLMARNGFTEEEALARIRSQWPSAEKVKRADAVIDNNGTIEETRRQLLAILHQWDALGKGGSGHHHHHK

SEQ ID NO: 3423 - DNA, 639 bp, synthetic construct
  misc_feature 1..639: note = Variant of 3'O-kinase
  source 1..639: mol_type = other DNA
atggcgtttaccattggtttaacaggagggatcgcatcgggcaaatcgactgtgagtgccatgatgcgtgaactgggtctgccggtcatcgatgctgacgaggcagcacgcgccgttgttcgtccaggcgaagaagcttatcgccagattgtagctgcgttcggtccgggcattcttcgtgccgatggcgagatcgatcgcgccaaattgggtgctatcgtgtttgctgacgaacaacaacgtaaggtgctgaatgcgattgtaggtcctgcagtctataagaagatgctcgctgagaaagaagctcatatccgctcaggcgccaagacggttgtgctggatatcccgctgctgttcgaatccggattgacccattgggtcgacaaagtgctcgtggtgtacgtcgatgatgatgttcagttacgccgccttatggcacgtaacgggtttaccgaagaagaagctctggcccgcattcgttcacagtggcccagtgccgagaaagttaaacgtgcagacgctgtaatcgacaataatggcacgattgaagaaacccgccgccagctgctggccattttacaccagtgggatgcactggataagggtggctccggccaccatcatcaccatcactaatga

SEQ ID NO: 3424 - protein, 211 aa, synthetic construct
  REGION 1..211: note = Variant of 3'O-kinase
MAFTIGLTGGIASGKSTVSAMMRELGLPVIDADEAARAVVRPGEEAYRQIVAAFGPGILRADGEIDRAKLGAIVFADEQQRKVLNAIVGPAVYKKMLAEKEAHIRSGAKTVVLDIPLLFESGLTHWVDKVLVVYVDDDVQLRRLMARNGFTEEEALARIRSQWPSAEKVKRADAVIDNNGTIEETRRQLLAILHQWDALDKGGSGHHHHHH

SEQ ID NO: 3425 - DNA, 639 bp, synthetic construct
  misc_feature 1..639: note = Variant of 3'O-kinase
  source 1..639: mol_type = other DNA
atggcgtttaccattggtttaacaggagggatcgcatcgggcaaatcgactgtgagtgccatgatgcgtgaactgggtctgccggtcatcgatgctgacgaggcagcacgcgccgttgttcgtccaggcgaagaagcttatcgccagattgtagctgcgttcggtccgggcattcttcgtgccgatggcgagatcgatcgcgccaaattgggtgctatcgtgtttgctgacgaacaacaacgtaaggtgctgaatgcgattgtaggtcctgcagtctataagaagatgctcgctgagaaagaagctcatatccgctcaggcgccaagacggttgtgctggatatcccgctgctgttcgaatccggattgacccattgggtcgacaaagtgctcgtggtgtacgtcgatgatgatgttcagttacgccgccttatggcacgtaacgggtttaccgaagaagaagctctggcccgcattcgttcacagtggcccagtgccgagaaagttaaacgtgcagacgctgtaatcgacaataatggcacgattgaagaaacccgccgccagctgctggccattttacaccagtgggatgcactgggtaagggtggctccggccaccatcatcaccagcactaatga

SEQ ID NO: 3426 - protein, 211 aa, synthetic construct
  REGION 1..211: note = Variant of 3'O-kinase
MAFTIGLTGGIASGKSTVSAMMRELGLPVIDADEAARAVVRPGEEAYRQIVAAFGPGILRADGEIDRAKLGAIVFADEQQRKVLNAIVGPAVYKKMLAEKEAHIRSGAKTVVLDIPLLFESGLTHWVDKVLVVYVDDDVQLRRLMARNGFTEEEALARIRSQWPSAEKVKRADAVIDNNGTIEETRRQLLAILHQWDALGKGGSGHHHHQH

SEQ ID NO: 3427 - DNA, 639 bp, synthetic construct
  misc_feature 1..639: note = Variant of 3'O-kinase
  source 1..639: mol_type = other DNA
atggcgtttaccattggtttaacaggagggatcgcatcgggcaaatcgactgtgagtgccatgatgcgtgaactgggtctgccggtcatcgatgctgacgaggcagcacgcgccgttgttcgtccaggcgaagaagcttatcgccagattgtagctgcgttcggtccgggcattcttcgtgccgatggcgagatcgatcgcgccaaattgggtgctatcgtgtttgctgacgaacaacaacgtaaggtgctgaatgcgattgtaggtcctgcagtcattaagaagatgctcgctgagaaagaagctcatatccgctcaggcgccaagacggttgtgctggatatcccgctgctgttcgaatccggattgacccattgggtcgacaaagtgctcgtggtgtacgtcgatgatgatgttcagttacgccgccttatggcacgtaacgggtttaccgaagaagaagctctggcccgcattcgttcacagtggcccagtgccgagaaagttaaacgtgcagacgctgtaatcgacaataatggcacgattgaagaaacccgccgccagctgctggccattttacaccagtgggatgcactgggtaagggtggctccggccaccatcatcaccatcactaatga

SEQ ID NO: 3428 - protein, 211 aa, synthetic construct
  REGION 1..211: note = Variant of 3'O-kinase
MAFTIGLTGGIASGKSTVSAMMRELGLPVIDADEAARAVVRPGEEAYRQIVAAFGPGILRADGEIDRAKLGAIVFADEQQRKVLNAIVGPAVIKKMLAEKEAHIRSGAKTVVLDIPLLFESGLTHWVDKVLVVYVDDDVQLRRLMARNGFTEEEALARIRSQWPSAEKVKRADAVIDNNGTIEETRRQLLAILHQWDALGKGGSGHHHHHH

SEQ ID NO: 3429 - DNA, 639 bp, synthetic construct
  misc_feature 1..639: note = Variant of 3'O-kinase
  source 1..639: mol_type = other DNA
atggcgtttaccattggtttaacaggagggatcgcatcgggcaaatcgactgtgagtgccatgatgcgtgaactgggtctgccggtcatcgatgctgacgaggcagcacgcgccgttgttcgtccaggcgaagaagcttatcgccagattgtagctgcgttcggtccgggcattcttcgtgccgatggcgagatcgatcgcgccaaattgggtgctatcgtgtttgctgacgaacaacaacgtaaggtgctgaatagtattgtaggtcctgcagtctataagaagatgctcgctgagaaagaagctcatatccgctcaggcgccaagacggttgtgctggatatcccgctgctgttcgaatccggattgacccattgggtcgacaaagtgctcgtggtgtacgtcgatgatgatgttcagttacgccgccttatggcacgtaacgggtttaccgaagaagaagctctggcccgcattcgttcacagtggcccagtgccgagaaagttaaacgtgcagacgctgtaatcgacaataatggcacgattgaagaaacccgccgccagctgctggccattttacaccagtgggatgcactgggtaagggtggctccggccaccatcatcaccatcactaatga

SEQ ID NO: 3430 - protein, 211 aa, synthetic construct
  REGION 1..211: note = Variant of 3'O-kinase
MAFTIGLTGGIASGKSTVSAMMRELGLPVIDADEAARAVVRPGEEAYRQIVAAFGPGILRADGEIDRAKLGAIVFADEQQRKVLNSIVGPAVYKKMLAEKEAHIRSGAKTVVLDIPLLFESGLTHWVDKVLVVYVDDDVQLRRLMARNGFTEEEALARIRSQWPSAEKVKRADAVIDNNGTIEETRRQLLAILHQWDALGKGGSGHHHHHH

SEQ ID NO: 3431 - DNA, 639 bp, synthetic construct
  misc_feature 1..639: note = Variant of 3'O-kinase
  source 1..639: mol_type = other DNA
atggcgtttaccattggtttaacaggagggatcgcatcgggcaaatcgactgtgagtgccatgatgcgtgaactgggtctgccggtcatcgatgctgacgaggcagcacgcgccgttgttcgtccaggcgaagaagcttatcgccagattgtagctgcgttcggtccgggcattcttcgtgccgatggcgagatcgatcgccagaaattgggtgctatcgtgtttgctgacgaacaacaacgtaaggtgctgaatgcgattgtaggtcctgcagtctataagaagatgctcgctgagaaagaagctcatatccgctcaggcgccaagacggttgtgctggatatcccgctgctgttcgaatccggattgacccattgggtcgacaaagtgctcgtggtgtacgtcgatgatgatgttcagttacgccgccttatggcacgtaacgggtttaccgaagaagaagctctggcccgcattcgttcacagtggcccagtgccgagaaagttaaacgtgcagacgctgtaatcgacaataatggcacgattgaagaaacccgccgccagctgctggccattttacaccagtgggatgcactgggtaagggtggctccggccaccatcatcaccatcactaatga

SEQ ID NO: 3432 - protein, 211 aa, synthetic construct
  REGION 1..211: note = Variant of 3'O-kinase
MAFTIGLTGGIASGKSTVSAMMRELGLPVIDADEAARAVVRPGEEAYRQIVAAFGPGILRADGEIDRQKLGAIVFADEQQRKVLNAIVGPAVYKKMLAEKEAHIRSGAKTVVLDIPLLFESGLTHWVDKVLVVYVDDDVQLRRLMARNGFTEEEALARIRSQWPSAEKVKRADAVIDNNGTIEETRRQLLAILHQWDALGKGGSGHHHHHH

SEQ ID NO: 3433 - DNA, 639 bp, synthetic construct
  misc_feature 1..639: note = Variant of 3'O-kinase
  source 1..639: mol_type = other DNA
atggcgtttaccattggtttaacaggagggatcgcatcgggcaaatcgactgtgagtgccatgatgcgtgaactgggtctgccggtcatcgatgctgacgaggcagcacgcgccgttgttcgtccaggcgaagaagcttatcgccagattgtagctgcgttcggtccgggcattcttcgtgccgatggcgagatcgatcgcgccaaattgggtgctatcgtgtttgctgacgaacaacaacgtaaggtgctgaatgcgattcttggtcctgcagtctataagaagatgctcgctgagaaagaagctcatatccgctcaggcgccaagacggttgtgctggatatcccgctgctgttcgaatccggattgacccattgggtcgacaaagtgctcgtggtgtacgtcgatgatgatgttcagttacgccgccttatggcacgtaacgggtttaccgaagaagaagctctggcccgcattcgttcacagtggcccagtgccgagaaagttaaacgtgcagacgctgtaatcgacaataatggcacgattgaagaaacccgccgccagctgctggccattttacaccagtgggatgcactgggtaagggtggctccggccaccatcatcaccatcactaatga

SEQ ID NO: 3434 - protein, 211 aa, synthetic construct
  REGION 1..211: note = Variant of 3'O-kinase
MAFTIGLTGGIASGKSTVSAMMRELGLPVIDADEAARAVVRPGEEAYRQIVAAFGPGILRADGEIDRAKLGAIVFADEQQRKVLNAILGPAVYKKMLAEKEAHIRSGAKTVVLDIPLLFESGLTHWVDKVLVVYVDDDVQLRRLMARNGFTEEEALARIRSQWPSAEKVKRADAVIDNNGTIEETRRQLLAILHQWDALGKGGSGHHHHHH

SEQ ID NO: 3435 - DNA, 639 bp, synthetic construct
  misc_feature 1..639: note = Variant of 3'O-kinase
  source 1..639: mol_type = other DNA
atggcgtttaccattggtttaacaggagggatcgcatcgggcaaatcgactgtgagtgccatgatgcgtgaactgggtctgccggtcatcgatgctgacgaggcagcacgcgccgttgttcgtccaggcgaagaagcttatcgccagattgtagctgcgttcggtccgggcattcttcgtgccgatggcgagatcgatcgcgccaaattgggtgctatcgtgtttgctgacgaacaacaacgtaaggtgctgaatgcgattgtaggtcctgcagtctttaagaagatgctcgctgagaaagaagctcatatccgctcaggcgccaagacggttgtgctggatatcccgctgctgttcgaatccggattgacccattgggtcgacaaagtgctcgtggtgtacgtcgatgatgatgttcagttacgccgccttatggcacgtaacgggtttaccgaagaagaagctctggcccgcattcgttcacagtggcccagtgccgagaaagttaaacgtgcagacgctgtaatcgacaataatggcacgattgaagaaacccgccgccagctgctggccattttacaccagtgggatgcactgggtaagggtggctccggccaccatcatcaccatcactaatga

SEQ ID NO: 3436 - protein, 211 aa, synthetic construct
  REGION 1..211: note = Variant of 3'O-kinase
MAFTIGLTGGIASGKSTVSAMMRELGLPVIDADEAARAVVRPGEEAYRQIVAAFGPGILRADGEIDRAKLGAIVFADEQQRKVLNAIVGPAVFKKMLAEKEAHIRSGAKTVVLDIPLLFESGLTHWVDKVLVVYVDDDVQLRRLMARNGFTEEEALARIRSQWPSAEKVKRADAVIDNNGTIEETRRQLLAILHQWDALGKGGSGHHHHHH

SEQ ID NO: 3437 - DNA, 639 bp, synthetic construct
  misc_feature 1..639: note = Variant of 3'O-kinase
  source 1..639: mol_type = other DNA
atggcgtttaccattggtttaacaggagggatcgcatcgggcaaatcgactgtgagtgccatgatgcgtgaactgggtctgccggtcatcgatgctgacgaggcagcacgcgccgttgttcgtccaggcgaagaagcttatcgccagattgtagctgcgttcggtccgggcattcttcgtgccgatggcgagatcgatcgcgccaaattgggtgctatcgtgtttgctgacgaacaacaacgtaaggtgctgaatgcgattgtaggtcctgcagtctataagaagatgctcgctgagaaagaagctcatatccgctcaggcgccaagacggttgtgctggatatcccgctgctgttcgaatccggattgacccattgggtcgacaaagtgctcgtggtgtacgtcgatgatgatgttcagttacgccgccttatggcacgtaacgggtttaccgaagaagaagctctggcccgcattcgttcacagtggcccagtgccgagaaagttaaacgtgcagacgctgtaatcgacaataatggcacgattgaagaaacccgccgccagctgctggccattttacaccagtgggatgcactggagaagggtggctccggccaccatcatcaccatcactaatga

SEQ ID NO: 3438 - protein, 211 aa, synthetic construct
  REGION 1..211: note = Variant of 3'O-kinase
MAFTIGLTGGIASGKSTVSAMMRELGLPVIDADEAARAVVRPGEEAYRQIVAAFGPGILRADGEIDRAKLGAIVFADEQQRKVLNAIVGPAVYKKMLAEKEAHIRSGAKTVVLDIPLLFESGLTHWVDKVLVVYVDDDVQLRRLMARNGFTEEEALARIRSQWPSAEKVKRADAVIDNNGTIEETRRQLLAILHQWDALEKGGSGHHHHHH

SEQ ID NO: 3439 - DNA, 639 bp, synthetic construct
  misc_feature 1..639: note = Variant of 3'O-kinase
  source 1..639: mol_type = other DNA
atggcgtttaccattggtttaacaggagggatcgcatcgggcaaatcgactgtgagtgccatgatgcgtgaactgggtctgccggtcatcgatgctgacgaggcagcacgcgccgttgttcgtccaggcgaagaagcttatcgccagattgtagctgcgttcggtccgggcattcttcgtgccgatggcgagatcgatcgcgccaaattgggtgctatcgtgtttgctgacgaacaacaacgtaaggtgctgaatgcgattgtaggtcctgcagtctataagaagatgctcgctgagaaagaagctcatatccgctcaggcgccaagacggttgtgctggatatcccgctgctgttcgaatccggattgacccattgggtcgacaaagtgctcgtggtgtacgtcgatgatgatgttcagttacgccgccttatggcacgtaacgggtttaccgaagaagaagctctggcccgcattcgttcacagtggcccagtgccgagaaagttaaacgtgcagacgctgtaatcgacaataatggcacgattgaagaaacccgccgccagctgctggccattttacaccagtgggatgcactgggtaagggtggctccggccaccatcatcacgttcactaatga

SEQ ID NO: 3440 - protein, 211 aa, synthetic construct
  REGION 1..211: note = Variant of 3'O-kinase
MAFTIGLTGGIASGKSTVSAMMRELGLPVIDADEAARAVVRPGEEAYRQIVAAFGPGILRADGEIDRAKLGAIVFADEQQRKVLNAIVGPAVYKKMLAEKEAHIRSGAKTVVLDIPLLFESGLTHWVDKVLVVYVDDDVQLRRLMARNGFTEEEALARIRSQWPSAEKVKRADAVIDNNGTIEETRRQLLAILHQWDALGKGGSGHHHHVH

SEQ ID NO: 3441 - DNA, 639 bp, synthetic construct
  misc_feature 1..639: note = Variant of 3'O-kinase
  source 1..639: mol_type = other DNA
atggcgtttaccattggtttaacaggagggatcgcatcgggcaaatcgactgtgagtgccatgatgcgtgaactgggtctgccggtcatcgatgctgacgaggcagcacgcgccgttgttcgtccaggcgaagaagcttatcgccagattgtagctgcgttcggtccgggcattcttcgtgccgatggcgagatcgatcgcgccaaattgggtgctatcgtgtttgctgacgaacaacaacgtaagatgctgaatgcgattgtaggtcctgcagtctataagaagatgctcgctgagaaagaagctcatatccgctcaggcgccaagacggttgtgctggatatcccgctgctgttcgaatccggattgacccattgggtcgacaaagtgctcgtggtgtacgtcgatgatgatgttcagttacgccgccttatggcacgtaacgggtttaccgaagaagaagctctggcccgcattcgttcacagtggcccagtgccgagaaagttaaacgtgcagacgctgtaatcgacaataatggcacgattgaagaaacccgccgccagctgctggccattttacaccagtgggatgcactgggtaagggtggctccggccaccatcatcaccatcactaatga

SEQ ID NO: 3442 - protein, 211 aa, synthetic construct
  REGION 1..211: note = Variant of 3'O-kinase
MAFTIGLTGGIASGKSTVSAMMRELGLPVIDADEAARAVVRPGEEAYRQIVAAFGPGILRADGEIDRAKLGAIVFADEQQRKMLNAIVGPAVYKKMLAEKEAHIRSGAKTVVLDIPLLFESGLTHWVDKVLVVYVDDDVQLRRLMARNGFTEEEALARIRSQWPSAEKVKRADAVIDNNGTIEETRRQLLAILHQWDALGKGGSGHHHHHH

SEQ ID NO: 3443 - DNA, 639 bp, synthetic construct
  misc_feature 1..639: note = Variant of 3'O-kinase
  source 1..639: mol_type = other DNA
atggcgtttaccattggtttaacaggagggatcgcatcgggcaaatcgactgtgagtgccatgatgcgtgaactgggtctgccggtcatcgatgctgacgaggcagcacgcgccgttgttcgtccaggcgaagaagcttatcgccagattgtagctgcgttcggtccgggcattcttcgtgccgatggcgagatcgatcgcgccaaattgggtgctatcgtgtttgctgacgaacaacaacgtaaggtgctgaatgcgattgtaggtcctgcagtctataagaagatgctcgctgagaaagaagcttatatccgctcaggcgccaagacggttgtgctggatatcccgctgctgttcgaatccggattgacccattgggtcgacaaagtgctcgtggtgtacgtcgatgatgatgttcagttacgccgccttatggcacgtaacgggtttaccgaagaagaagctctggcccgcattcgttcacagtggcccagtgccgagaaagttaaacgtgcagacgctgtaatcgacaataatggcacgattgaagaaacccgccgccagctgctggccattttacaccagtgggatgcactgggtaagggtggctccggccaccatcatcaccatcactaatga

SEQ ID NO: 3444 - protein, 211 aa, synthetic construct
  REGION 1..211: note = Variant of 3'O-kinase
MAFTIGLTGGIASGKSTVSAMMRELGLPVIDADEAARAVVRPGEEAYRQIVAAFGPGILRADGEIDRAKLGAIVFADEQQRKVLNAIVGPAVYKKMLAEKEAYIRSGAKTVVLDIPLLFESGLTHWVDKVLVVYVDDDVQLRRLMARNGFTEEEALARIRSQWPSAEKVKRADAVIDNNGTIEETRRQLLAILHQWDALGKGGSGHHHHHH

SEQ ID NO: 3445 - DNA, 639 bp, synthetic construct
  misc_feature 1..639: note = Variant of 3'O-kinase
  source 1..639: mol_type = other DNA
atggcgtttaccattggtttaacaggagggatcgcatcgggcaaatcgactgtgagtgccatgatgcgtgaactgggtctgccggtcatcgatgctgacgaggcagcacgcgccgttgttcgtccaggcgaagaagcttatcgccagattgtagctgcgttcggtccgggcattcttcgtgccgatggcgagatcgatcgcgccaaattgggtgctatcgtgtttgctgacgaacaacaacgtaaggtgctgaatgcgattgtaggtcctgcagtctataagaagatgctcgctgagaaagaagctcatatccgctcaggcgccaagacggttgtgctggatatcccgctgctgttcgaatccggattgacccattgggtcgacaaagtgctcgtggtgtacgtcgatgatgatgttcagttacgccgccttatggcacgtaacgggtttaccgaagaagaagctctggcccgcattcgttcacagtggcccagtgccgagaaagttaaacgtgcagacgctgtaatcgacaataatggcacgattgaagaaacccgccgccagctgctggccattttacaccagtgggatgcactgggtaagggtggctccggccaccatcatcacactcactaatga

SEQ ID NO: 3446 - protein, 211 aa, synthetic construct
  REGION 1..211: note = Variant of 3'O-kinase
MAFTIGLTGGIASGKSTVSAMMRELGLPVIDADEAARAVVRPGEEAYRQIVAAFGPGILRADGEIDRAKLGAIVFADEQQRKVLNAIVGPAVYKKMLAEKEAHIRSGAKTVVLDIPLLFESGLTHWVDKVLVVYVDDDVQLRRLMARNGFTEEEALARIRSQWPSAEKVKRADAVIDNNGTIEETRRQLLAILHQWDALGKGGSGHHHHTH

SEQ ID NO: 3447 - DNA, 639 bp, synthetic construct
  misc_feature 1..639: note = Variant of 3'O-kinase
  source 1..639: mol_type = other DNA
atggcgtttaccattggtttaacaggagggatcgcatcgggcaaatcgactgtgagtgccatgatgcgtgaactgggtctgccggtcatcgatgctgacgaggcagcacgcgccgttgttcgtccaggcgaagaagcttatcgccagattgtagctgcgttcggtccgggcattcttcgtgccgatggcgagatcgatcgcaggaaattgggtgctatcgtgtttgctgacgaacaacaacgtaaggtgctgaatgcgattgtaggtcctgcagtctataagaagatgctcgctgagaaagaagctcatatccgctcaggcgccaagacggttgtgctggatatcccgctgctgttcgaatccggattgacccattgggtcgacaaagtgctcgtggtgtacgtcgatgatgatgttcagttacgccgccttatggcacgtaacgggtttaccgaagaagaagctctggcccgcattcgttcacagtggcccagtgccgagaaagttaaacgtgcagacgctgtaatcgacaataatggcacgattgaagaaacccgccgccagctgctggccattttacaccagtgggatgcactgggtaagggtggctccggccaccatcatcaccatcactaatga

SEQ ID NO: 3448 - protein, 211 aa, synthetic construct
  REGION 1..211: note = Variant of 3'O-kinase
MAFTIGLTGGIASGKSTVSAMMRELGLPVIDADEAARAVVRPGEEAYRQIVAAFGPGILRADGEIDRRKLGAIVFADEQQRKVLNAIVGPAVYKKMLAEKEAHIRSGAKTVVLDIPLLFESGLTHWVDKVLVVYVDDDVQLRRLMARNGFTEEEALARIRSQWPSAEKVKRADAVIDNNGTIEETRRQLLAILHQWDALGKGGSGHHHHHH

SEQ ID NO: 3449 - DNA, 639 bp, synthetic construct
  misc_feature 1..639: note = Variant of 3'O-kinase
  source 1..639: mol_type = other DNA
atggcgtttaccattggtttaacaggagggatcgcatcgggcaaatcgactgtgagtgccatgatgcgtgaactgggtctgccggtcatcgatgctgacgaggcagcacgcgccgttgttcgtccaggcgaagaagcttatcgccagattgtagctgcgttcggtccgggcattcttcgtgccgatggcgagatcgatcgcgccaaattgggtgctatcgtgtttgctgacgaacaacaacgtaaggtgctgaatgcgattgtaggtcctgaggtctataagaagatgctcgctgagaaagaagctcatatccgctcaggcgccaagacggttgtgctggatatcccgctgctgttcgaatccggattgacccattgggtcgacaaagtgctcgtggtgtacgtcgatgatgatgttcagttacgccgccttatggcacgtaacgggtttaccgaagaagaagctctggcccgcattcgttcacagtggcccagtgccgagaaagttaaacgtgcagacgctgtaatcgacaataatggcacgattgaagaaacccgccgccagctgctggccattttacaccagtgggatgcactgggtaagggtggctccggccaccatcatcaccatcactaatga

SEQ ID NO: 3450 - protein, 211 aa, synthetic construct
  REGION 1..211: note = Variant of 3'O-kinase
MAFTIGLTGGIASGKSTVSAMMRELGLPVIDADEAARAVVRPGEEAYRQIVAAFGPGILRADGEIDRAKLGAIVFADEQQRKVLNAIVGPEVYKKMLAEKEAHIRSGAKTVVLDIPLLFESGLTHWVDKVLVVYVDDDVQLRRLMARNGFTEEEALARIRSQWPSAEKVKRADAVIDNNGTIEETRRQLLAILHQWDALGKGGSGHHHHHH

SEQ ID NO: 3451 - DNA, 639 bp, synthetic construct
  misc_feature 1..639: note = Variant of 3'O-kinase
  source 1..639: mol_type = other DNA
atggcgtttaccattggtttaacaggagggatcgcatcgggcaaatcgactgtgagtgccatgatgcgtgaactgggtctgccggtcatcgatgctgacgaggcagcacgcgccgttgttcgtccaggcgaagaagcttatcgccagattgtagctgcgttcggtccgggcattcttcgtgccgatggcgagatcgatcgcgccaaattgggtgctatcgtgtttgctgacgaacaacaacgtaaggtgctgaatgcgattgtaggtcctgcagtctataagaagatgctcgctgagaaagaagctcatatccgctcaggcgccaagacggttgtgctggatatcccgctgctgttcgaatccggattgacccattgggtcgacaaagtgctcgtggtgtacgtcgatgatgatgttcagttacgccgccttatggcacgtaacgggtttaccgaagaagaagctctggcccgcattcgttcacagtggcccagtgccgagaaaattaaacgtgcagacgctgtaatcgacaataatggcacgattgaagaaacccgccgccagctgctggccattttacaccagtgggatgcactgggtaagggtggctccggccaccatcatcaccatcactaatga

SEQ ID NO: 3452 - protein, 211 aa, synthetic construct
  REGION 1..211: note = Variant of 3'O-kinase
MAFTIGLTGGIASGKSTVSAMMRELGLPVIDADEAARAVVRPGEEAYRQIVAAFGPGILRADGEIDRAKLGAIVFADEQQRKVLNAIVGPAVYKKMLAEKEAHIRSGAKTVVLDIPLLFESGLTHWVDKVLVVYVDDDVQLRRLMARNGFTEEEALARIRSQWPSAEKIKRADAVIDNNGTIEETRRQLLAILHQWDALGKGGSGHHHHHH

SEQ ID NO: 3453 - DNA, 639 bp, synthetic construct
  misc_feature 1..639: note = Variant of 3'O-kinase
  source 1..639: mol_type = other DNA
atggcgtttaccattggtttaacaggagggatcgcagcgggcaaatcgactgtgagtgccatgatgcgtgaactgggtctgccggtcatcgatgctgacgaggcagcacgcgccgttatgcgtccaggcgaagaagcttatcgccagattgtagctgcgttcggtccgggcattcttcgtgccgatggcgagatcgatcgccagaaactgggtgctatccgcttttcggacgaacaacaacgtaaggtgctgaatgcgattgtaggtcctgcagtcctgaagaagatgctcgctgagaaagaagctcatatccgctcaggcgccaagacggttgtgctggatatcccgctgctgttcgaatccggattgacccattgggtcgacaaagtgctcgtggtgtacgtcgatgatgatgttcagttacgccgccttatggcacgtaacgggtttactgaagaagaagctctgaagcgcattcgttcacagtggcccagtgcggagaaagttaaacgtgcagacgctgtcatcgacaataatggcacgattgaagaaacccgccgccagctgctggccattttacaccagtgggatctgctgggtaagggtggctccggccaccatcatcaccatcactaatga

SEQ ID NO: 3454 - protein, 211 aa, synthetic construct
  REGION 1..211: note = Variant of 3'O-kinase
MAFTIGLTGGIAAGKSTVSAMMRELGLPVIDADEAARAVMRPGEEAYRQIVAAFGPGILRADGEIDRQKLGAIRFSDEQQRKVLNAIVGPAVLKKMLAEKEAHIRSGAKTVVLDIPLLFESGLTHWVDKVLVVYVDDDVQLRRLMARNGFTEEEALKRIRSQWPSAEKVKRADAVIDNNGTIEETRRQLLAILHQWDLLGKGGSGHHHHHH

SEQ ID NO: 3455 - DNA, 639 bp, synthetic construct
  misc_feature 1..639: note = Variant of 3'O-kinase
  source 1..639: mol_type = other DNA
atggcgtttaccattggtttaacaggagggatcgcagcgggcaaatcgactgtgagtgccatgatgcgtgaactgggtctgccggtcatcgatgctgacgaggcagcacgcgccgttatgcgtccaggcgaagaagcttatcgccagattgtagctgcgttcggtccgggcattcttcgtgccgatggcgagatcgatcgccgtaaactgggtgctatcgttttttcggacgaacaacaacgtaaggtgctgaatgcgattgtaggtcctgcagtccagaagaagatgctcgctgagaaagaagctcatatccgctcaggcgccaagacggttgtgctggatatcccgctgctgttcgaatccggattgacccattgggtcgacaaagtgctcgtggtgtacgtcgatgatgatgttcagttacgccgccttatggcacgtaacgggtttactgaagaagaagctctgaagcgcattcgttcacagtggcccagtgcggagaaagttaaacgtgcagacgctgtaatcgacaataatggcacgattgaagaaacccgccgccagctgctggccattttacaccagtgggatctgctgggtaagggtggctccggccaccatcatcaccatcactaatga

SEQ ID NO: 3456 - protein, 211 aa, synthetic construct
  REGION 1..211: note = Variant of 3'O-kinase
MAFTIGLTGGIAAGKSTVSAMMRELGLPVIDADEAARAVMRPGEEAYRQIVAAFGPGILRADGEIDRRKLGAIVFSDEQQRKVLNAIVGPAVQKKMLAEKEAHIRSGAKTVVLDIPLLFESGLTHWVDKVLVVYVDDDVQLRRLMARNGFTEEEALKRIRSQWPSAEKVKRADAVIDNNGTIEETRRQLLAILHQWDLLGKGGSGHHHHHH

SEQ ID NO: 3457 - DNA, 639 bp, synthetic construct
  misc_feature 1..639: note = Variant of 3'O-kinase
  source 1..639: mol_type = other DNA
atggcgtttaccattggtttaacaggagggatcgcagagggcaaatcgactgtgagtgccatgatgcgtgaactgggtctgccggtcatcgatgctgacgaggcagcacgcgccgttatgcgtccaggcgaagaagcttatcgccagattgtagctgcgttcggtccgggcattcttcgtgccgatggcgagatcgatcgccgtaaactgggtgctatcgtgtttagtgacgaacaacaactgaaggtgctgaatgcgattgtaggtcctgcagtccagaagaagatgctcgctgagaaagaagctcatatccgctcaggcgccaagacggttgtgctggatatcccgctgctgttcgaatccggattgacccattgggtcgacaaagtgctcgtggtgtacgtcgatgatgatgttcagttacgccgccttatggcacgtaacgggtttactgaagaagaagctctggcgcgcattcgttcacagtggcccagtgcggagaaagttaaacgtgcagacgctgtaatcgacaataatggcacgattgaagaaacccgccgccagctgctggccattttacaccagtgggatctgctgggtaagggtggctccggccaccatcatcaccatcactaatga

SEQ ID NO: 3458 - protein, 211 aa, synthetic construct
  REGION 1..211: note = Variant of 3'O-kinase
MAFTIGLTGGIAEGKSTVSAMMRELGLPVIDADEAARAVMRPGEEAYRQIVAAFGPGILRADGEIDRRKLGAIVFSDEQQLKVLNAIVGPAVQKKMLAEKEAHIRSGAKTVVLDIPLLFESGLTHWVDKVLVVYVDDDVQLRRLMARNGFTEEEALARIRSQWPSAEKVKRADAVIDNNGTIEETRRQLLAILHQWDLLGKGGSGHHHHHH

SEQ ID NO: 3459 - DNA, 639 bp, synthetic construct
  misc_feature 1..639: note = Variant of 3'O-kinase
  source 1..639: mol_type = other DNA
atggcgtttaccattggtttaacaggagggatcgcagcgggcaaatcgactgtgagtgccatgatgcgtgaactgggtctgccggtcatcgatgctgacgaggcagcacgcgccgttatgcgtccaggcgaagaagcttatcgccagattgtagctgcgttcggtccgggcattcttcgtgccgatggcgagatcgatcgccagaaactgggtcagatccgcttttcggacgaacaacaacgtgaggtgctgaatgcgattgtaggtcctgaagtcctgaagaagatgctcgctgagaaagaagctcatatccgctcaggcgccaagacggttgtgctggatatcccgctgctgttcgaatccggattgagccattgggtcgacaaagtgctcgtggtgtacgtcgatgatgatgttcagttacgccgccttatggcacgtaacgggtttactgaagaagaagctctgaagcgcattcgttcacagtggcccagtgaagagaaagttaaacgtgcagacgctgtcatcgacaataatggcacggaggaagaaacccgccgccagctgctggccattttacaccagtgggatctgctgggtaagggtggctccggccaccatcatcaccatcactaatga

SEQ ID NO: 3460 - protein, 211 aa, synthetic construct
  REGION 1..211: note = Variant of 3'O-kinase
MAFTIGLTGGIAAGKSTVSAMMRELGLPVIDADEAARAVMRPGEEAYRQIVAAFGPGILRADGEIDRQKLGQIRFSDEQQREVLNAIVGPEVLKKMLAEKEAHIRSGAKTVVLDIPLLFESGLSHWVDKVLVVYVDDDVQLRRLMARNGFTEEEALKRIRSQWPSEEKVKRADAVIDNNGTEEETRRQLLAILHQWDLLGKGGSGHHHHHH

SEQ ID NO: 3461 - DNA, 639 bp, synthetic construct
  misc_feature 1..639: note = Variant of 3'O-kinase
  source 1..639: mol_type = other DNA
atggcgtttaccattggtttaacaggagggatcgcagcgggcaaatcgactgtgagtgccatgatgcgtgaactgggtctgccggtcatcgatgctgacgaggcagcacgcgccgttatgcgtccaggcgaagaagcttatcatcagattgtagctgcgttcggtccgggcattcttcgtgccgatggcgagatcgatcgccagaaactgggtgctatccgcttttcggacgaacaacaacgcaaggtgctgaatgcgattgtaggtcctgcagtcctgaagaagatgctcgctgagaaagaagctcacatccgctcaggcgccaagacggttgtgctggatatcccgctgctgttcgaatccggattgacccattgggtcgacaaagtgctcgtggtgtacgatgatgatgatgttcagttacgccgccttatggcacgtaacgggtttactgaagaagaagctctgaagcgcattcgttcacagtggcccagtgcggagaaagttaaacgtgcagacgctgtgatcgacaataatggcacgattgaagaaacccgccgccagctgctggccattttacaccagtgggatctgctggagaagggtggctccggccaccatcatcaccatcactaatga

SEQ ID NO: 3462 - protein, 211 aa, synthetic construct
  REGION 1..211: note = Variant of 3'O-kinase
MAFTIGLTGGIAAGKSTVSAMMRELGLPVIDADEAARAVMRPGEEAYHQIVAAFGPGILRADGEIDRQKLGAIRFSDEQQRKVLNAIVGPAVLKKMLAEKEAHIRSGAKTVVLDIPLLFESGLTHWVDKVLVVYDDDDVQLRRLMARNGFTEEEALKRIRSQWPSAEKVKRADAVIDNNGTIEETRRQLLAILHQWDLLEKGGSGHHHHHH

SEQ ID NO: 3463 - DNA, 639 bp, synthetic construct
  misc_feature 1..639: note = Variant of 3'O-kinase
  source 1..639: mol_type = other DNA
atggcgtttaccattggtttaacaggagggatcgcagcgggcaaatcgactgtgagtgccatgatgcgtgaactgggtctgccggtcatcgatgctgacgaggcagcacgcgccgttatgcgtccaggcgaagaagcttatcgccagattgtagctgcgttcggtccgggcattcttcgtgccgatggcgagatcgatcgccagaaactgggtgcgatccgcttttcggacgaacaacaacgtaaggtgctgaatgcgattgtgggtcctgaagtcctgaagaagatgctcgctgagaaagaagctcatatccgctcaggcgccaagacggttgtgctggatatcccgctgctgttcgaatccggattgcagcattgggtcgacaaagtgctcgtggtgtacgtcgatgatgatgttcagttacgccgccttatggcacgtaacgggtttactgaagaagaagctctgaagcgcattcgttcacagtggcccagtgaagagaaagttaaacgtgcagacgctgtcatcgacaataatggcacggaggaagaaacccgccgccagctgctggccattttacaccagtgggatctgctgggtaatggtggctccggccaccatcatcaccatcactaatga

SEQ ID NO: 3464 - protein, 211 aa, synthetic construct
  REGION 1..211: note = Variant of 3'O-kinase
MAFTIGLTGGIAAGKSTVSAMMRELGLPVIDADEAARAVMRPGEEAYRQIVAAFGPGILRADGEIDRQKLGAIRFSDEQQRKVLNAIVGPEVLKKMLAEKEAHIRSGAKTVVLDIPLLFESGLQHWVDKVLVVYVDDDVQLRRLMARNGFTEEEALKRIRSQWPSEEKVKRADAVIDNNGTEEETRRQLLAILHQWDLLGNGGSGHHHHHH

SEQ ID NO: 3465 - DNA, 639 bp, synthetic construct
  misc_feature 1..639: note = Variant of 3'O-kinase
  source 1..639: mol_type = other DNA
atggcgtttaccattggtttaacaggagggatcgcagcgggcaaatcgactgtgagtgccatgatgcgtgaactgggtctgccggtcatcgatgctgacgaggcagcacgcgccgttatgcgtccaggcgaagaagcttatcgccagattgtagctgcgttcggtccgggcattcttcgtgccgatggcgagatcgatcgccagaaactgggtgcgatccgcttttcggacgaacaacaacgtgaggtgctgaatgcgattctgggtcctgaagtcctgaagaagatgctcgctgagaaagaagctcatatccgctcaggcgccaagacggttgtgctggatatcccgctgctgttcgaatccggattgacccattgggtcgacaaagtgctcgtggtgtacgtcgatgatgatgttcagttacgccgccttatggcacgtaacgggtttactgaagaagaagctctgaagcgcattcgttcacagtggcccagtgcagagaaagttaaacgtgcagacgctgtcatcgacaataatggcacggaggaagaaacccgccgccagctgctggccattttacaccagtgggatctgctgggtaagggtggctccggccaccatcatcaccatcactaatga

SEQ ID NO: 3466 - protein, 211 aa, synthetic construct
  REGION 1..211: note = Variant of 3'O-kinase
MAFTIGLTGGIAAGKSTVSAMMRELGLPVIDADEAARAVMRPGEEAYRQIVAAFGPGILRADGEIDRQKLGAIRFSDEQQREVLNAILGPEVLKKMLAEKEAHIRSGAKTVVLDIPLLFESGLTHWVDKVLVVYVDDDVQLRRLMARNGFTEEEALKRIRSQWPSAEKVKRADAVIDNNGTEEETRRQLLAILHQWDLLGKGGSGHHHHHH

SEQ ID NO: 3467 - DNA, 639 bp, synthetic construct
  misc_feature 1..639: note = Variant of 3'O-kinase
  source 1..639: mol_type = other DNA
atggcgtttaccattggtttaacaggagggatcgcagcgggcaaatcgactgtgagtgccatgatgcgtgaactgggtctgccggtcatcgatgctgacgaggcagcacgcgccgttatgcgtccaggcgaagaagcttatcgccagattgtagctgcgttcggtccgggcattcttcgtgccgatggcgagatcgatcgccagaaactgggtgcgatccgcttttcggacgaacaacaacgtacggtgctgaatgcgattgtaggtcctgcagtcctgaagaagatgctcgctgagaaagaagctcatatccgctcaggcgccaagacggttgtgctggatatcccgctgctgttcgaatccggattgacccattgggtcgacaaagtgctcgtggtgtacgtcgatgatgatgttcagttacgccgccttatggcacgtaacgggtttactgaagaagaagctctgaagcgcattcgttcacagtggcccagtgcggagaaagttaaacgtgcagacgctgtcatcgacaataatggcacgattgaagaaacccgccgccagctgctggccattttacaccagtgggatctgctgggtaagggtggctccggccaccatcatcaccatcactaatga

SEQ ID NO: 3468 - protein, 211 aa, synthetic construct
  REGION 1..211: note = Variant of 3'O-kinase
MAFTIGLTGGIAAGKSTVSAMMRELGLPVIDADEAARAVMRPGEEAYRQIVAAFGPGILRADGEIDRQKLGAIRFSDEQQRTVLNAIVGPAVLKKMLAEKEAHIRSGAKTVVLDIPLLFESGLTHWVDKVLVVYVDDDVQLRRLMARNGFTEEEALKRIRSQWPSAEKVKRADAVIDNNGTIEETRRQLLAILHQWDLLGKGGSGHHHHHH

SEQ ID NO: 3469 - DNA, 639 bp, synthetic construct
  misc_feature 1..639: note = Variant of 3'O-kinase
  source 1..639: mol_type = other DNA
atggcgtttaccattggtttaacaggagggatcgcagcgggcaaatcgactgtgagtgccatgatgcgtgaactgggtctgccggtcatcgatgctgacgaggcagcacgcgccgttatgcgtccaggcgaagaagcttatcgtcagattgtagctgcgttcggtccgggcattcttcgtgccgatggcgagatcgatcgccagaaactgggtgctatccgcttttcggacgaacaacaacgcaaggtgctgaatgcgattgtaggtcctgcagtcctgaagaagatgctcgctgagaaagaagctcatatccgctcaggcgccaagacggttgtgctggatatcccgctgctgttcgaatccggattgacccattgggtcgacaaagtgctcgtggtgtacgatgatgatgatgttcagttacgccgccttatggcacgtaacgggtttactgaagaagaagctctgaagcgcattcgttcacagtggcccagtgcggagaaagttaaacgtgcagacgctgtcatcgacaataatggcacgattgaagaaacccgccgccagctgctggccattttacaccagtgggatctgctggagaagggtggctccggccaccatcatcaccatcactaatga

SEQ ID NO: 3470 - protein, 211 aa, synthetic construct
  REGION 1..211: note = Variant of 3'O-kinase
MAFTIGLTGGIAAGKSTVSAMMRELGLPVIDADEAARAVMRPGEEAYRQIVAAFGPGILRADGEIDRQKLGAIRFSDEQQRKVLNAIVGPAVLKKMLAEKEAHIRSGAKTVVLDIPLLFESGLTHWVDKVLVVYDDDDVQLRRLMARNGFTEEEALKRIRSQWPSAEKVKRADAVIDNNGTIEETRRQLLAILHQWDLLEKGGSGHHHHHH

SEQ ID NO: 3471 - DNA, 639 bp, synthetic construct
  misc_feature 1..639: note = Variant of 3'O-kinase
  source 1..639: mol_type = other DNA
atggcgtttaccattggtttaacaggagggatcgcagcgggcaaatcgactgtgagtgccatgatgcgtgaactgggtctgccggtcatcgatgctgacgaggcagcacgcgccgttatgcgtccaggcgaagaagcttatcatcagattgtagctgcgttcggtccgggcattcttcgtgccgatggcgagatcgatcgccagaaactgggtgctatccgcttttcggacgaacaacaacgcaaggtgctgaatgcgattgtaggtcctgcagtcctgaagaagatgctcgctgagaaagaagctcatatccgctcaggcgccaagacggttgtgctggatatcccgctgctgttcgaatccggattgacccattgggtcgacaaagtgctcgtggtgtacgatgatgatgatgttcagttacgccgccttatggcacgtaacgggtttactgaagaagaagctctgaagcgcattcgttcacagtggcccagtgcggagaaagttaaacgtgcagacgctgtgatcgacaataatggcacgattgaagaaacccgccgccagctgctggccattttacaccagtgggatctgctgggtaagggtggctccggccaccatcatcaccatcactaatga

SEQ ID NO: 3472 - protein, 211 aa, synthetic construct
  REGION 1..211: note = Variant of 3'O-kinase
MAFTIGLTGGIAAGKSTVSAMMRELGLPVIDADEAARAVMRPGEEAYHQIVAAFGPGILRADGEIDRQKLGAIRFSDEQQRKVLNAIVGPAVLKKMLAEKEAHIRSGAKTVVLDIPLLFESGLTHWVDKVLVVYDDDDVQLRRLMARNGFTEEEALKRIRSQWPSAEKVKRADAVIDNNGTIEETRRQLLAILHQWDLLGKGGSGHHHHHH

SEQ ID NO: 3473 - DNA, 639 bp, synthetic construct
  misc_feature 1..639: note = Variant of 3'O-kinase
  source 1..639: mol_type = other DNA
atggcgtttaccattggtttaacaggagggatcgcagcgggcaaatcgactgtgagtgccatgatgcgtgaactgggtctgccggtcatcgatgctgacgaggcagcacgcgccgttatgcgtccaggcgaagaagcttatcgccagattgtagctgcgttcggtccgggcattcttcgtgccgatggcgagatcgatcgccagaaactgggtgcgatccgcttttcggacgaacaacaacgtgaggtgctgaatgcgattgtaggtcctgcagtcctgaagaagatgctcgctgagaaagaagctcatatccgctcaggcgccaagacggttgtgctggatatcccgctgctgttcgaatccggattgacccattgggtcgacaaagtgctcgtggtgtacgtcgatgatgatgttcagttacgccgccttatggcacgtaacgggtttactgaagaagaagctctgaagcgcattcgttcacagtggcccagtgaagagaaagttaaacgtgcagacgctgtcatcgacaataatggcacggaggaagaaacccgccgccagctgctggccattttacaccagtgggatctgctgggtaagggtggctccggccaccatcatcaccatcactaatga

SEQ ID NO: 3474 - protein, 211 aa, synthetic construct
  REGION 1..211: note = Variant of 3'O-kinase
MAFTIGLTGGIAAGKSTVSAMMRELGLPVIDADEAARAVMRPGEEAYRQIVAAFGPGILRADGEIDRQKLGAIRFSDEQQREVLNAIVGPAVLKKMLAEKEAHIRSGAKTVVLDIPLLFESGLTHWVDKVLVVYVDDDVQLRRLMARNGFTEEEALKRIRSQWPSEEKVKRADAVIDNNGTEEETRRQLLAILHQWDLLGKGGSGHHHHHH

SEQ ID NO: 3475 - DNA, 639 bp, synthetic construct
  misc_feature 1..639: note = Variant of 3'O-kinase
  source 1..639: mol_type = other DNA
atggcgtttaccattggtttaacaggagggatcgcagcgggcaaatcgactgtgagtgccatgatgcgtgaactgggtctgccggtcatcgatgctgacgaggcagcacgcgccgttatgcgtccaggcgaagaagcttatcgccagattgtagctgcgttcggtccgggcattcttcgtgccgatggcgagatcgatcgccagaaactgggtgctatccgcttttcggacgaacaacaactgaaggtgctgaatgcgattgtaggtcctgcagtcctgaagaagatgctcgctgagaaagaagctcatatccgctcaggcgccaagacggttgtgctggatatcccgctgctgttcgaatccggattgacccattgggtcgacaaagtgctcgtggtgtacgatgatgatgatgttcagttacgccgccttatggcacgtaacgggtttactgaagaagaagctctgaagcgcattcgttcacagtggcccagtgcggagaaagttaaacgtgcagacgctgtgatcgacaataatggcacgattgaagaaacccgccgccagctgctggccattttacaccagtgggatctgctggataagggtggctccggccaccatcatcaccatcactaatga

SEQ ID NO: 3476 - protein, 211 aa, synthetic construct
  REGION 1..211: note = Variant of 3'O-kinase
MAFTIGLTGGIAAGKSTVSAMMRELGLPVIDADEAARAVMRPGEEAYRQIVAAFGPGILRADGEIDRQKLGAIRFSDEQQLKVLNAIVGPAVLKKMLAEKEAHIRSGAKTVVLDIPLLFESGLTHWVDKVLVVYDDDDVQLRRLMARNGFTEEEALKRIRSQWPSAEKVKRADAVIDNNGTIEETRRQLLAILHQWDLLDKGGSGHHHHHH

SEQ ID NO: 3477 - DNA, 639 bp, synthetic construct
  misc_feature 1..639: note = Variant of 3'O-kinase
  source 1..639: mol_type = other DNA
atggcgtttaccattggtttaacaggagggatcgcagcgggcaaatcgactgtgagtgccatgatgcgtgaactgggtctgccggtcatcgatgctgacgaggcagcacgcgccgttatgcgtccaggcgaagaagcttatcgtcagattgtagctgcgttcggtccgggcattcttcgtgccgatggcgagatcgatcgccagaaactgggtgctatccgcttttcggacgaacaacaacgtaaggtgctgaatgcgattgtaggtcctgcagtcctgaagaagatgctcgctgagaaagaagctatcatccgctcaggcgccaagacggttgtgctggatatcccgctgctgttcgaatccggattgacccattgggtcgacaaagtgctcgtggtgtacgatgatgatgatgttcagttacgccgccttatggcacgtaacgggtttactgaagaagaagctctgaagcgcattcgttcacagtggcccagtgcggagaaagttaaacgtgcagacgctgtcatcgacaataatggcacgattgaagaaacccgccgccagctgctggccattttacaccagtgggatctgctgggtaagggtggctccggccaccatcatcaccatcactaatga

SEQ ID NO: 3478 - protein, 211 aa, synthetic construct
  REGION 1..211: note = Variant of 3'O-kinase
MAFTIGLTGGIAAGKSTVSAMMRELGLPVIDADEAARAVMRPGEEAYRQIVAAFGPGILRADGEIDRQKLGAIRFSDEQQRKVLNAIVGPAVLKKMLAEKEAIIRSGAKTVVLDIPLLFESGLTHWVDKVLVVYDDDDVQLRRLMARNGFTEEEALKRIRSQWPSAEKVKRADAVIDNNGTIEETRRQLLAILHQWDLLGKGGSGHHHHHH

SEQ ID NO: 3479 - DNA, 639 bp, synthetic construct
  misc_feature 1..639: note = Variant of 3'O-kinase
  source 1..639: mol_type = other DNA
atggcgtttaccattggtttaacaggagggatcgcagcgggcaaatcgactgtgagtgccatgatgcgtgaactgggtctgccggtcatcgatgctgacgaggcagcacgcgccgttatgcgtccaggcgaagaagcttatcgccagattgtagctgcgttcggtccgggcattcttcgtgccgatggcgagatcgatcgccagaaactgggtgcgatccgcttttcggacgaacaacaacgtacggtgctgaatgcgattctgggtcctgcagtcctgaagaagatgctcgctgagaaagaagctcatatccgctcaggcgccaagacggttgtgctggatatcccgctgctgttcgaatccggattgcagcattgggtcgacaaagtgctcgtggtgtacgtcgatgatgatgttcagttacgccgccttatggcacgtaacgggtttactgaagaagaagctctgaagcgcattcgttcacagtggcccagtgaagagaaagttaaacgtgcagacgctgtcatcgacaataatggcacgatcgaagaaacccgccgccagctgctggccattttacaccagtgggatctgctgggtaagggtggctccggccaccatcatcaccatcactaatga

SEQ ID NO: 3480 - protein, 211 aa, synthetic construct
  REGION 1..211: note = Variant of 3'O-kinase
MAFTIGLTGGIAAGKSTVSAMMRELGLPVIDADEAARAVMRPGEEAYRQIVAAFGPGILRADGEIDRQKLGAIRFSDEQQRTVLNAILGPAVLKKMLAEKEAHIRSGAKTVVLDIPLLFESGLQHWVDKVLVVYVDDDVQLRRLMARNGFTEEEALKRIRSQWPSEEKVKRADAVIDNNGTIEETRRQLLAILHQWDLLGKGGSGHHHHHH

SEQ ID NO: 3481 - DNA, 639 bp, synthetic construct
  misc_feature 1..639: note = Variant of 3'O-kinase
  source 1..639: mol_type = other DNA
atggcgtttaccattggtttaacaggagggatcgcagcgggcaaatcgactgtgagtgccatgatgcgtgaactgggtctgccggtcatcgatgctgacgaggcagcacgcgccgttatgcgtccaggcgaagaagcttatcgtcagattgtagctgcgttcggtccgggcattcttcgtgccgatggcgagatcgatcgccagaaactgggtgctatccgcttttcggacgaacaacaacgcaaggtgctgaatgcgattgtaggtcctgcagtcctgaagaagatgctcgctgagaaagaagctatgatccgctcaggcgccaagacggttgtgctggatatcccgctgctgttcgaatccggattgacccattgggtcgacaaagtgctcgtggtgtacgtcgatgatgatgttcagttacgccgccttatggcacgtaacgggtttactgaagaagaagctctgaagcgcattcgttcacagtggcccagtgcggagaaagttaaacgtgcagacgctgtcatcgacaataatggcacgattgaagaaacccgccgccagctgctggccattttacaccagtgggatctgctgggtaagggtggctccggccaccatcatcaccatcactaatga

SEQ ID NO: 3482 - protein, 211 aa, synthetic construct
  REGION 1..211: note = Variant of 3'O-kinase
MAFTIGLTGGIAAGKSTVSAMMRELGLPVIDADEAARAVMRPGEEAYRQIVAAFGPGILRADGEIDRQKLGAIRFSDEQQRKVLNAIVGPAVLKKMLAEKEAMIRSGAKTVVLDIPLLFESGLTHWVDKVLVVYVDDDVQLRRLMARNGFTEEEALKRIRSQWPSAEKVKRADAVIDNNGTIEETRRQLLAILHQWDLLGKGGSGHHHHHH

SEQ ID NO: 3483 - DNA, 639 bp, synthetic construct
  misc_feature 1..639: note = Variant of 3'O-kinase
  source 1..639: mol_type = other DNA
atggcgtttaccattggtttaacaggagggatcgcagcgggcaaatcgactgtgagtgccatgatgcgtgaactgggtctgccggtcatcgatgctgacgaggcagcacgcgccgttatgcgtccaggcgaagaagcttatcatcagattgtagctgcgttcggtccgggcattcttcgtgccgatggcgagatcgatcgccagaaactgggtgctatccgcttttcggacgaacaacaacgcaaggtgctgaatgcgattgtaggtcctgcagtcctgaagaagatgctcgctgagaaagaagctcacatccgctcaggcgccaagacggttgtgctggatatcccgctgctgttcgaatccggattgacccattgggtcgacaaagtgctcgtggtgtacgatgatgatgatgttcagttacgccgccttatggcacgtaacgggtttactgaagaagaagctctgaagcgcattcgttcacagtggcccagtgcggagaaagttaaacgtgcagacgcttggatcgacaataatggcacgattgaagaaacccgccgccagctgctggccattttacaccagtgggatctgctgggtaagggtggctccggccaccatcatcaccatcactaatga

SEQ ID NO: 3484 - protein, 211 aa, synthetic construct
  REGION 1..211: note = Variant of 3'O-kinase
MAFTIGLTGGIAAGKSTVSAMMRELGLPVIDADEAARAVMRPGEEAYHQIVAAFGPGILRADGEIDRQKLGAIRFSDEQQRKVLNAIVGPAVLKKMLAEKEAHIRSGAKTVVLDIPLLFESGLTHWVDKVLVVYDDDDVQLRRLMARNGFTEEEALKRIRSQWPSAEKVKRADAWIDNNGTIEETRRQLLAILHQWDLLGKGGSGHHHHHH

SEQ ID NO: 3485 - DNA, 639 bp, synthetic construct
  misc_feature 1..639: note = Variant of 3'O-kinase
  source 1..639: mol_type = other DNA
atggcgtttaccattggtttaacaggagggatcgcagcgggcaaatcgactgtgagtgccatgatgcgtgaactgggtctgccggtcatcgatgctgacgaggcagcacgcgccgttatgcgtccaggcgaagaagcttatcgtcagattgtagctgcgttcggtccgggcattcttcgtgccgatggcgagatcgatcgccagaaactgggtgctatccgcttttcggacgaacaacaacgtaaggtgctgaatgcgattgtaggtcctgcagtcctgaagaagatgctcgctgagaaagaagctcatatccgctcaggcgccaagacggttgtgctggatatcccgctgctgttcgaatccggattgacccattgggtcgacaaagtgctcgtggtgtacgatgatgatgatgttcagttacgccgccttatggcacgtaacgggtttactgaagaagaagctctgaagcgcattcgttcacagtggcccagtgcggagaaagttaaacgtgcagacgctgtgatcgacaataatggcacgattgaagaaacccgccgccagctgctggccattttacaccagtgggatctgctgggtaagggtggctccggccaccatcatcaccatcactaatga

SEQ ID NO: 3486 - protein, 211 aa, synthetic construct
  REGION 1..211: note = Variant of 3'O-kinase
MAFTIGLTGGIAAGKSTVSAMMRELGLPVIDADEAARAVMRPGEEAYRQIVAAFGPGILRADGEIDRQKLGAIRFSDEQQRKVLNAIVGPAVLKKMLAEKEAHIRSGAKTVVLDIPLLFESGLTHWVDKVLVVYDDDDVQLRRLMARNGFTEEEALKRIRSQWPSAEKVKRADAVIDNNGTIEETRRQLLAILHQWDLLGKGGSGHHHHHH

SEQ ID NO: 3487 - DNA, 639 bp, synthetic construct
  misc_feature 1..639: note = Variant of 3'O-kinase
  source 1..639: mol_type = other DNA
atggcgtttaccattggtttaacaggagggatcgcagcgggcaaatcgactgtgagtgccatgatgcgtgaactgggtctgccggtcatcgatgctgacgaggcagcacgcgccgttatgcgtccaggcgaagaagcttatcgtcagattgtagctgcgttcggtccgggcattcttcgtgccgatggcgagatcgatcgccagaaactgggtgctatccgcttttcggacgaacaacaacgcaaggtgctgaatgcgattgtaggtcctgcagtcctgaagaagatgctcgctgagaaagaagctctgatccgctcaggcgccaagacggttgtgctggatatcccgctgctgttcgaatccggattgacccattgggtcgacaaagtgctcgtggtgtacgatgatgatgatgttcagttacgccgccttatggcacgtaacgggtttactgaagaagaagctctgaagcgcattcgttcacagtggcccagtgcggagaaagttaaacgtgcagacgctgtgatcgacaataatggcacgattgaagaaacccgccgccagctgctggccattttacaccagtgggatctgctgtgtaagggtggctccggccaccatcatcaccatcactaatga

SEQ ID NO: 3488 - protein, 211 aa, synthetic construct
  REGION 1..211: note = Variant of 3'O-kinase
MAFTIGLTGGIAAGKSTVSAMMRELGLPVIDADEAARAVMRPGEEAYRQIVAAFGPGILRADGEIDRQKLGAIRFSDEQQRKVLNAIVGPAVLKKMLAEKEALIRSGAKTVVLDIPLLFESGLTHWVDKVLVVYDDDDVQLRRLMARNGFTEEEALKRIRSQWPSAEKVKRADAVIDNNGTIEETRRQLLAILHQWDLLCKGGSGHHHHHH

SEQ ID NO: 3489 - DNA, 639 bp, synthetic construct
  misc_feature 1..639: note = Variant of 3'O-kinase
  source 1..639: mol_type = other DNA
atggcgtttaccattggtttaacaggagggatcgcagcgggcaaatcgactgtgagtgccatgatgcgtgaactgggtctgccggtcatcgatgctgacgaggcagcacgcgccgttatgcgtccaggcgaagaagcttatcatcagattgtagctgcgttcggtccgggcattcttcgtgccgatggcgagatcgatcgccagaaactgggtgctatccgcttttcggacgaacaacaacgtaaggtgctgaatgcgattgtaggtcctgcagtcctgaagaagatgctcgctgagaaagaagctctgatccgctcaggcgccaagacggttgtgctggatatcccgctgctgttcgaatccggattgacccattgggtcgacaaagtgctcgtggtgtacgtcgatgatgatgttcagttacgccgccttatggcacgtaacgggtttactgaagaagaagctctgaagcgcattcgttcacagtggcccagtgcggagaaagttaaacgtgcagacgctgtgatcgacaataatggcacgattgaagaaacccgccgccagctgctggccattttacaccagtgggatctgctggagaagggtggctccggccaccatcatcaccatcactaatga

SEQ ID NO: 3490 - protein, 211 aa, synthetic construct
  REGION 1..211: note = Variant of 3'O-kinase
MAFTIGLTGGIAAGKSTVSAMMRELGLPVIDADEAARAVMRPGEEAYHQIVAAFGPGILRADGEIDRQKLGAIRFSDEQQRKVLNAIVGPAVLKKMLAEKEALIRSGAKTVVLDIPLLFESGLTHWVDKVLVVYVDDDVQLRRLMARNGFTEEEALKRIRSQWPSAEKVKRADAVIDNNGTIEETRRQLLAILHQWDLLEKGGSGHHHHHH

SEQ ID NO: 3491 - DNA, 639 bp, synthetic construct
  misc_feature 1..639: note = Variant of 3'O-kinase
  source 1..639: mol_type = other DNA
atggcgtttaccattggtttaacaggagggatcgcagcgggcaaatcgactgtgagtgccatgatgcgtgaactgggtctgccggtcatcgatgctgacgaggcagcacgcgccgttatgcgtccaggcgaagaagcttatcatcagattgtagctgcgttcggtccgggcattcttcgtgccgatggcgagatcgatcgccagaaactgggtgctatccgcttttcggacgaacaacaactgaaggtgctgaatgcgattgtaggtcctgcagtcctgaagaagatgctcgctgagaaagaagctcacatccgctcaggcgccaagacggttgtgctggatatcccgctgctgttcgaatccggattgacccattgggtcgacaaagtgctcgtggtgtacgttgatgatgatgttcagttacgccgccttatggcacgtaacgggtttactgaagaagaagctctgaagcgcattcgttcacagtggcccagtgcggagaaagttaaacgtgcagacgctgtgatcgacaataatggcacgattgaagaaacccgccgccagctgctggccattttacaccagtgggatctgctgggtaagggtggctccggccaccatcatcaccatcactaatga

SEQ ID NO: 3492 - protein, 211 aa, synthetic construct
  REGION 1..211: note = Variant of 3'O-kinase
MAFTIGLTGGIAAGKSTVSAMMRELGLPVIDADEAARAVMRPGEEAYHQIVAAFGPGILRADGEIDRQKLGAIRFSDEQQLKVLNAIVGPAVLKKMLAEKEAHIRSGAKTVVLDIPLLFESGLTHWVDKVLVVYVDDDVQLRRLMARNGFTEEEALKRIRSQWPSAEKVKRADAVIDNNGTIEETRRQLLAILHQWDLLGKGGSGHHHHHH

SEQ ID NO: 3493 - DNA, 639 bp, synthetic construct
  misc_feature 1..639: note = Variant of 3'O-kinase
  source 1..639: mol_type = other DNA
atggcgtttaccattggtttaacaggagggatcgcagcgggcaaatcgactgtgagtgccatgatgcgtgaactgggtctgccggtcatcgatgctgacgaggcagcacgcgccgttatgcgtccaggcgaagaagcttatcgtcagattgtagctgcgttcggtccgggcattcttcgtgccgatggcgagatcgatcgccagaaactgggtgctatccgcttttcggacgaacaacaactgaaggtgctgaatgcgattgtaggtcctgcagtcctgaagaagatgctcgctgagaaagaagctcatatccgctcaggcgccaagacggttgtgctggatatcccgctgctgttcgaatccggattgacccattgggtcgacaaagtgctcgtggtgtacgatgatgatgatgttcagttacgccgccttatggcacgtaacgggtttactgaagaagaagctctgaagcgcattcgttcacagtggcccagtgcggagaaagttaaacgtgcagacgctgtcatcgacaataatggcacgattgaagaaacccgccgccagctgctggccattttacaccagtgggatctgctgggtaagggtggctccggccaccatcatcaccatcactaatga

SEQ ID NO: 3494 - protein, 211 aa, synthetic construct
  REGION 1..211: note = Variant of 3'O-kinase
MAFTIGLTGGIAAGKSTVSAMMRELGLPVIDADEAARAVMRPGEEAYRQIVAAFGPGILRADGEIDRQKLGAIRFSDEQQLKVLNAIVGPAVLKKMLAEKEAHIRSGAKTVVLDIPLLFESGLTHWVDKVLVVYDDDDVQLRRLMARNGFTEEEALKRIRSQWPSAEKVKRADAVIDNNGTIEETRRQLLAILHQWDLLGKGGSGHHHHHH

SEQ ID NO: 3495 - DNA, 639 bp, synthetic construct
  misc_feature 1..639: note = Variant of 3'O-kinase
  source 1..639: mol_type = other DNA
atggcgtttaccattggtttaacaggagggatcgcagcgggcaaatcgactgtgagtgccatgatgcgtgaactgggtctgccggtcatcgatgctgacgaggcagcacgcgccgttatgcgtccaggcgaagaagcttatcatcagattgtagctgcgttcggtccgggcattcttcgtgccgatggcgagatcgatcgccagaaactgggtgctatccgcttttcggacgaacaacaacgcaaggtgctgaatgcgattgtaggtcctgcagtcctgaagaagatgctcgctgagaaagaagctatcatccgctcaggcgccaagacggttgtgctggatatcccgctgctgttcgaatccggattgacccattgggtcgacaaagtgctcgtggtgtacgttgatgatgatgttcagttacgccgccttatggcacgtaacgggtttactgaagaagaagctctgaagcgcattcgttcacagtggcccagtgcggagaaagttaaacgtgcagacgctgtgatcgacaataatggcacgattgaagaaacccgccgccagctgctggccattttacaccagtgggatctgctgaataagggtggctccggccaccatcatcaccatcactaatga

SEQ ID NO: 3496 - protein, 211 aa, synthetic construct
  REGION 1..211: note = Variant of 3'O-kinase
MAFTIGLTGGIAAGKSTVSAMMRELGLPVIDADEAARAVMRPGEEAYHQIVAAFGPGILRADGEIDRQKLGAIRFSDEQQRKVLNAIVGPAVLKKMLAEKEAIIRSGAKTVVLDIPLLFESGLTHWVDKVLVVYVDDDVQLRRLMARNGFTEEEALKRIRSQWPSAEKVKRADAVIDNNGTIEETRRQLLAILHQWDLLNKGGSGHHHHHH

SEQ ID NO: 3497 - DNA, 639 bp, synthetic construct
  misc_feature 1..639: note = Variant of 3'O-kinase
  source 1..639: mol_type = other DNA
atggcgtttaccattggtttaacaggagggatcgcagcgggcaaatcgactgtgagtgccatgatgcgtgaactgggtctgccggtcatcgatgctgacgaggcagcacgcgccgttatgcgtccaggcgaagaagcttatcgtcagattgtagctgcgttcggtccgggcattcttcgtgccgatggcgagatcgatcgccagaaactgggtgctatccgcttttcggacgaacaacaacgcaaggtgctgaatgcgattgtaggtcctgcagtcctgaagaagatgctcgctgagaaagaagctctgatccgctcaggcgccaagacggttgtgctggatatcccgctgctgttcgaatccggattgacccattgggtcgacaaagtgctcgtggtgtacgtcgatgatgatgttcagttacgccgccttatggcacgtaacgggtttactgaagaagaagctctgaagcgcattcgttcacagtggcccagtgcggagaaagttaaacgtgcagacgctgtgatcgacaataatggcacgattgaagaaacccgccgccagctgctggccattttacaccagtgggatctgctgggtaagggtggctccggccaccatcatcaccatcactaatga

SEQ ID NO: 3498 - protein, 211 aa, synthetic construct
  REGION 1..211: note = Variant of 3'O-kinase
MAFTIGLTGGIAAGKSTVSAMMRELGLPVIDADEAARAVMRPGEEAYRQIVAAFGPGILRADGEIDRQKLGAIRFSDEQQRKVLNAIVGPAVLKKMLAEKEALIRSGAKTVVLDIPLLFESGLTHWVDKVLVVYVDDDVQLRRLMARNGFTEEEALKRIRSQWPSAEKVKRADAVIDNNGTIEETRRQLLAILHQWDLLGKGGSGHHHHHH

SEQ ID NO: 3499 - DNA, 639 bp, synthetic construct
  misc_feature 1..639: note = Variant of 3'O-kinase
  source 1..639: mol_type = other DNA
atggcgtttaccattggtttaacaggagggatcgcagcgggcaaatcgactgtgagtgccatgatgcgtgaactgggtctgccggtcatcgatgctgacgaggcagcacgcgccgttatgaagccaggcgaagaagcgtatcgccagattgtagctgcgttcggtccgggcattcttcgtgccgatggcgagatcgatcgccagaaactgggtgctatccgcttttcggacgaacaacaacgtaaggtgctgaattcgattgtaggtcctgcagtcctgaagaagatgctcgctgagaaagaagctcatatccgctcaggcgccaagacggttgtgctggatatcccgctgctgttcgaatccggattgacccattgggtcgacaaagtgctcgtggtgtacgtcgatgatgatgttcagttacgccgccttatggcacgtaacgggtttactgaagaagaagctctgaagcgcattcgttcacagtggcccagtgcggagaaagttaaacgtgcagacgctgtcatcgacaataatggcaatattgaagaaacccgccgccagctgctggacattttacaccagtgggatctgctgggtaagggtggctccggccaccatcatcaccatcactaatga

SEQ ID NO: 3500 - protein, 211 aa, synthetic construct
  REGION 1..211: note = Variant of 3'O-kinase
MAFTIGLTGGIAAGKSTVSAMMRELGLPVIDADEAARAVMKPGEEAYRQIVAAFGPGILRADGEIDRQKLGAIRFSDEQQRKVLNSIVGPAVLKKMLAEKEAHIRSGAKTVVLDIPLLFESGLTHWVDKVLVVYVDDDVQLRRLMARNGFTEEEALKRIRSQWPSAEKVKRADAVIDNNGNIEETRRQLLDILHQWDLLGKGGSGHHHHHH

SEQ ID NO: 3501 - DNA, 639 bp, synthetic construct
  misc_feature 1..639: note = Variant of 3'O-kinase
  source 1..639: mol_type = other DNA
atggcgtttaccattggtttaacaggagggatcgcagcgggcaaatcgactgtgagtgccatgatgcgtgaactgggtctgccggtcatcgatgctgacgaggcagcacgcgccgttatgcgtccaggcgaagaagcttatcgtcagattgtagctgcgttcggtccgggcattcttcgtgccgatggcgagatcgatcgccagaaactgggtgctatccgcttttcggacgaacaacaacgcaaggtgctgaatgcgattgtaggtcctgcagtcctgaagaagatgctcgctgagaaagaagctttcatccgctcaggcgccaagacggttgtgctggatatcccgctgctgttcgaatccggattgacccattgggtcgacaaagtgctcgtggtgtacgttgatgatgatgttcagttacgccgccttatggcacgtaacgggtttactgaagaagaagctctgaagcgcattcgttcacagtggcccagtgcggagaaagttaaacgtgcagacgctgtgatcgacaataatggcacgattgaagaaacccgccgccagctgctggccattttacaccagtgggatctgctgaataagggtggctccggccaccatcatcaccatcactaatga

SEQ ID NO: 3502 - protein, 211 aa, synthetic construct
  REGION 1..211: note = Variant of 3'O-kinase
MAFTIGLTGGIAAGKSTVSAMMRELGLPVIDADEAARAVMRPGEEAYRQIVAAFGPGILRADGEIDRQKLGAIRFSDEQQRKVLNAIVGPAVLKKMLAEKEAFIRSGAKTVVLDIPLLFESGLTHWVDKVLVVYVDDDVQLRRLMARNGFTEEEALKRIRSQWPSAEKVKRADAVIDNNGTIEETRRQLLAILHQWDLLNKGGSGHHHHHH

SEQ ID NO: 3503 - DNA, 639 bp, synthetic construct
  misc_feature 1..639: note = Variant of 3'O-kinase
  source 1..639: mol_type = other DNA
atggcgtttaccattggtttaacaggagggatcgcagcgggcaaatcgactgtgagtgccatgatgcgtgaactgggtctgccggtcatcgatgctgacgaggcagcacgcgccgttatgcgtccaggcgaagaagcttatcgccagattgtagctgcgttcggtccgggcattcttcgtgccgatggcgagatcgatcgccagaaactgggtgctatccgcttttcggacgaacaacaacgtaaggtgctgaatgcgattgtaggtcctgcagtcctgaagaagatgctcgctgagaaagaagctcatatccgctcaggcgccaagacggttgtgctggatatcccgctgctgttcgaatccggattgacccattgggtcgacaaagtgctcgtggtgtacgtcgatgatgatgttcagttacgccgccttatggcacgtaacgggtttactgaagaagaagctctgaagcgcattcgttcacagtggcccagtgcggagaaagttaaacgtgcagacgctgtcatcgacaataatggcacggaggaagaaacccgccgccagctgctggccattttacaccagtgggatctgctgggtaagggtggctccggccaccatcatcaccatcactaatga

SEQ ID NO: 3504 - protein, 211 aa, synthetic construct
  REGION 1..211: note = Variant of 3'O-kinase
MAFTIGLTGGIAAGKSTVSAMMRELGLPVIDADEAARAVMRPGEEAYRQIVAAFGPGILRADGEIDRQKLGAIRFSDEQQRKVLNAIVGPAVLKKMLAEKEAHIRSGAKTVVLDIPLLFESGLTHWVDKVLVVYVDDDVQLRRLMARNGFTEEEALKRIRSQWPSAEKVKRADAVIDNNGTEEETRRQLLAILHQWDLLGKGGSGHHHHHH

SEQ ID NO: 3505 - DNA, 639 bp, synthetic construct
  misc_feature 1..639: note = Variant of 3'O-kinase
  source 1..639: mol_type = other DNA
atggcgtttaccattggtttaacaggagggatcgcagcgggcaaatcgactgtgagtgccatgatgcgtgaactgggtctgccggtcatcgatgctgacgaggcagcacgcgccgttatgcgtccaggcgaagaagcttatcgccagattgtagctgcgttcggtccgggcattcttcgtgccgatggcgagatcgatcgccagaaactgggtgctatccgcttttcggacgaacaacaactgaaggtgctgaatgcgattgtaggtcctgcagtcctgaagaagatgctcgctgagaaagaagctatgatccgctcaggcgccaagacggttgtgctggatatcccgctgctgttcgaatccggattgacccattgggtcgacaaagtgctcgtggtgtacgtcgatgatgatgttcagttacgccgccttatggcacgtaacgggtttactgaagaagaagctctgaagcgcattcgttcacagtggcccagtgcggagaaagttaaacgtgcagacgctgtcatcgacaataatggcacgattgaagaaacccgccgccagctgctggccattttacaccagtgggatctgctgggtaagggtggctccggccaccatcatcaccatcactaatga

SEQ ID NO: 3506 - protein, 211 aa, synthetic construct
  REGION 1..211: note = Variant of 3'O-kinase
MAFTIGLTGGIAAGKSTVSAMMRELGLPVIDADEAARAVMRPGEEAYRQIVAAFGPGILRADGEIDRQKLGAIRFSDEQQLKVLNAIVGPAVLKKMLAEKEAMIRSGAKTVVLDIPLLFESGLTHWVDKVLVVYVDDDVQLRRLMARNGFTEEEALKRIRSQWPSAEKVKRADAVIDNNGTIEETRRQLLAILHQWDLLGKGGSGHHHHHH

SEQ ID NO: 3507 - DNA, 639 bp, synthetic construct
  misc_feature 1..639: note = Variant of 3'O-kinase
  source 1..639: mol_type = other DNA
atggcgtttaccattggtttaacaggagggatcgcagcgggcaaatcgactgtgagtgccatgatgcgtgaactgggtctgccggtcatcgatgctgacgaggcagcacgcgccgttatggtcccaggcgaagaaacgtatcgccagattgtagctgcgttcggtccgggcattcttcgtgccgatggcgagatcgatcgccagaaactgggtgctatccgcttttcggacgaacaacaacgtaaggtgctgaatgcgattgtaggtcctgcagtcctgaagaaaatgctcgctgagaaagaagctcatatccgctcaggcgccaagacggttgtgctggatatcccgctgctgttcgaatccggattgacccattgggtcgacaaagtgctcgtggtgtacgtcgatgatgatgttcagttacgccgccttatggcacgtaacgggtttactgaagaagaagctctgaagcgcattcgttcacagtggcccagtgcggagaaagttaaacgtgcagacgctgtcatcgacaataatggcactattgaagaaacccgccgccagctggtggacattttacaccagtgggatctgctgggtaagggtggctccggccaccatcatcaccatcactaatga

SEQ ID NO: 3508 - protein, 211 aa, synthetic construct
  REGION 1..211: note = Variant of 3'O-kinase
MAFTIGLTGGIAAGKSTVSAMMRELGLPVIDADEAARAVMVPGEETYRQIVAAFGPGILRADGEIDRQKLGAIRFSDEQQRKVLNAIVGPAVLKKMLAEKEAHIRSGAKTVVLDIPLLFESGLTHWVDKVLVVYVDDDVQLRRLMARNGFTEEEALKRIRSQWPSAEKVKRADAVIDNNGTIEETRRQLVDILHQWDLLGKGGSGHHHHHH

SEQ ID NO: 3509 - DNA, 639 bp, synthetic construct
  misc_feature 1..639: note = Variant of 3'O-kinase
  source 1..639: mol_type = other DNA
atggcgtttaccattggtttaacaggagggatcgcagcgggcaaatcgactgtgagtgccatgatgcgtgaactgggtctgccggtcatcgatgctgacgaggcagcacgcgccgttatgcgtccaggcgaagaagcttatcgtcagattgtagctgcgttcggtccgggcattcttcgtgccgatggcgagatcgatcgccagaaactgggtgctatccgcttttcggacgaacaacaacgcaaggtgctgaatgcgattgtaggtcctgcagtcctgaagaagatgctcgctgagaaagaagctcatatccgctcaggcgccaagacggttgtgctggatatcccgctgctgttcgaatccggattgacccattgggtcgacaaagtgctcgtggtgtacgtcgatgatgatgttcagttacgccgccttatggcacgtaacgggtttactgaagaagaagctctgaagcgcattcgttcacagtggcccagtgcggagaaagttaaacgtgcagacgcttggatcgacaataatggcacgattgaagaaacccgccgccagctgctggccattttacaccagtgggatctgctggataagggtggctccggccaccatcatcaccatcactaatga

SEQ ID NO: 3510 - protein, 211 aa, synthetic construct
  REGION 1..211: note = Variant of 3'O-kinase
MAFTIGLTGGIAAGKSTVSAMMRELGLPVIDADEAARAVMRPGEEAYRQIVAAFGPGILRADGEIDRQKLGAIRFSDEQQRKVLNAIVGPAVLKKMLAEKEAHIRSGAKTVVLDIPLLFESGLTHWVDKVLVVYVDDDVQLRRLMARNGFTEEEALKRIRSQWPSAEKVKRADAWIDNNGTIEETRRQLLAILHQWDLLDKGGSGHHHHHH

SEQ ID NO: 3511 - DNA, 639 bp, synthetic construct
  misc_feature 1..639: note = Variant of 3'O-kinase
  source 1..639: mol_type = other DNA
atggcgtttaccattggtttaacaggagggatcgcagcgggcaaatcgactgtgagtgccatgatgcgtgaactgggtctgccggtcatcgatgctgacgaggcagcacgcgccgttatgcgtccaggcgaagaagcttatcgccagattgtagctgcgttcggtccgggcattcttcgtgccgatggcgagatcgatcgccagaaactgggtgctatccgcttttcggacgaacaacaactgaaggtgctgaatgcgattgtaggtcctgcagtcctgaagaagatgctcgctgagaaagaagctcacatccgctcaggcgccaagacggttgtgctggatatcccgctgctgttcgaatccggattgacccattgggtcgacaaagtgctcgtggtgtacgttgatgatgatgttcagttacgccgccttatggcacgtaacgggtttactgaagaagaagctctgaagcgcattcgttcacagtggcccagtgcggagaaagttaaacgtgcagacgctgtgatcgacaataatggcacgattgaagaaacccgccgccagctgctggccattttacaccagtgggatctgctgtgtaagggtggctccggccaccatcatcaccatcactaatga

SEQ ID NO: 3512 - protein, 211 aa, synthetic construct
  REGION 1..211: note = Variant of 3'O-kinase
MAFTIGLTGGIAAGKSTVSAMMRELGLPVIDADEAARAVMRPGEEAYRQIVAAFGPGILRADGEIDRQKLGAIRFSDEQQLKVLNAIVGPAVLKKMLAEKEAHIRSGAKTVVLDIPLLFESGLTHWVDKVLVVYVDDDVQLRRLMARNGFTEEEALKRIRSQWPSAEKVKRADAVIDNNGTIEETRRQLLAILHQWDLLCKGGSGHHHHHH

SEQ ID NO: 3513 - DNA, 639 bp, synthetic construct
  misc_feature 1..639: note = Variant of 3'O-kinase
  source 1..639: mol_type = other DNA
atggcgtttaccattggtttaacaggagggatcgcagcgggcaaatcgactgtgagtgccatgatgcgtgaactgggtctgccggtcatcgatgctgacgaggcagcacgcgccgttatgcgtccaggcgaagaagcttatcgtcagattgtagctgcgttcggtccgggcattcttcgtgccgatggcgagatcgatcgccagaaactgggtgctatccgcttttcggacgaacaacaacgcaaggtgctgaatgcgattgtaggtcctgcagtcctgaagaagatgctcgctgagaaagaagctcacatccgctcaggcgccaagacggttgtgctggatatcccgctgctgttcgaatccggattgacccattgggtcgacaaagtgctcgtggtgtacgttgatgatgatgttcagttacgccgccttatggcacgtaacgggtttactgaagaagaagctctgaagcgcattcgttcacagtggcccagtgcggagaaagttaaacgtgcagacgctgtgatcgacaataatggcacgattgaagaaacccgccgccagctgctggccattttacaccagtgggatctgctggataagggtggctccggccaccatcatcaccatcactaatga

SEQ ID NO: 3514 - protein, 211 aa, synthetic construct
  REGION 1..211: note = Variant of 3'O-kinase
MAFTIGLTGGIAAGKSTVSAMMRELGLPVIDADEAARAVMRPGEEAYRQIVAAFGPGILRADGEIDRQKLGAIRFSDEQQRKVLNAIVGPAVLKKMLAEKEAHIRSGAKTVVLDIPLLFESGLTHWVDKVLVVYVDDDVQLRRLMARNGFTEEEALKRIRSQWPSAEKVKRADAVIDNNGTIEETRRQLLAILHQWDLLDKGGSGHHHHHH

SEQ ID NO: 3515 - DNA, 639 bp, synthetic construct
  misc_feature 1..639: note = Variant of 3'O-kinase
  source 1..639: mol_type = other DNA
atggcgtttaccattggtttaacaggagggatcgcagcgggcaaatcgactgtgagtgccatgatgcgtgaactgggtctgccggtcatcgatgctgacgaggcagcacgcgccgttatgcgtccaggcgaagaagcttatcgccagattgtagctgcgttcggtccgggcattcttcgtgccgatggcgagatcgatcgccagaaactgggtgctatccgcttttcggacgaacaacaactgaaggtgctgaatgcgattgtaggtcctgcagtcctgaagaagatgctcgctgagaaagaagctctgatccgctcaggcgccaagacggttgtgctggatatcccgctgctgttcgaatccggattgacccattgggtcgacaaagtgctcgtggtgtacgtcgatgatgatgttcagttacgccgccttatggcacgtaacgggtttactgaagaagaagctctgaagcgcattcgttcacagtggcccagtgcggagaaagttaaacgtgcagacgctgtcatcgacaataatggcacgattgaagaaacccgccgccagctgctggccattttacaccagtgggatctgctgggtaagggtggctccggccaccatcatcaccatcactaatga

SEQ ID NO: 3516 - protein, 211 aa, synthetic construct
  REGION 1..211: note = Variant of 3'O-kinase
MAFTIGLTGGIAAGKSTVSAMMRELGLPVIDADEAARAVMRPGEEAYRQIVAAFGPGILRADGEIDRQKLGAIRFSDEQQLKVLNAIVGPAVLKKMLAEKEALIRSGAKTVVLDIPLLFESGLTHWVDKVLVVYVDDDVQLRRLMARNGFTEEEALKRIRSQWPSAEKVKRADAVIDNNGTIEETRRQLLAILHQWDLLGKGGSGHHHHHH

SEQ ID NO: 3517 - DNA, 639 bp, synthetic construct
  misc_feature 1..639: note = Variant of 3'O-kinase
  source 1..639: mol_type = other DNA
atggcgtttaccattggtttaacaggagggatcgcagcgggcaaatcgactgtgagtgccatgatgcgtgaactgggtctgccggtcatcgatgctgacgaggcagcacgcgccgttatgcgtccaggcgaagaagcttatcatcagattgtagctgcgttcggtccgggcattcttcgtgccgatggcgagatcgatcgccagaaactgggtgctatccgcttttcggacgaacaacaacgcaaggtgctgaatgcgattgtaggtcctgcagtcctgaagaagatgctcgctgagaaagaagctgtcatccgctcaggcgccaagacggttgtgctggatatcccgctgctgttcgaatccggattgacccattgggtcgacaaagtgctcgtggtgtacgtcgatgatgatgttcagttacgccgccttatggcacgtaacgggtttactgaagaagaagctctgaagcgcattcgttcacagtggcccagtgcggagaaagttaaacgtgcagacgcttggatcgacaataatggcacgattgaagaaacccgccgccagctgctggccattttacaccagtgggatctgctgtgtaagggtggctccggccaccatcatcaccatcactaatga

SEQ ID NO: 3518 - protein, 211 aa, synthetic construct
  REGION 1..211: note = Variant of 3'O-kinase
MAFTIGLTGGIAAGKSTVSAMMRELGLPVIDADEAARAVMRPGEEAYHQIVAAFGPGILRADGEIDRQKLGAIRFSDEQQRKVLNAIVGPAVLKKMLAEKEAVIRSGAKTVVLDIPLLFESGLTHWVDKVLVVYVDDDVQLRRLMARNGFTEEEALKRIRSQWPSAEKVKRADAWIDNNGTIEETRRQLLAILHQWDLLCKGGSGHHHHHH

SEQ ID NO: 3519 - DNA, 639 bp, synthetic construct
  misc_feature 1..639: note = Variant of 3'O-kinase
  source 1..639: mol_type = other DNA
atggcgtttaccattggtttaacaggagggatcgcagcgggcaaatcgactgtgagtgccatgatgcgtgaactgggtctgccggtcatcgatgctgacgaggcagcacgcgccgttatgcgtccaggcgaagaagcttatcgccagattgtagctgcgttcggtccgggcattcttcgtgccgatggcgagatcgatcgccagaaactgggtgcgatccgcttttcggacgaacaacaacgtctggtgctgaatgcgattatgggtcctgaagtcctgaagaagatgctcgctgagaaagaagctcatatccgctcaggcgccaagacggttgtgctggatatcccgctgctgttcgaatccggattgcagcattgggtcgacaaagtgctcgtggtgtacgtcgatgatgatgttcagttacgccgccttatggcacgtaacgggtttactgaagaagaagctctgaagcgcattcgttcacagtggcccagtgaagagaaagttaaacgtgcagacgctgtcatcgacaataatggcacggaggaagaaacccgccgccagctgctggccattttacaccagtgggatctgctgggtaagggtggctccggccaccatcatcaccatcactaatga

SEQ ID NO: 3520 - protein, 211 aa, synthetic construct
  REGION 1..211: note = Variant of 3'O-kinase
MAFTIGLTGGIAAGKSTVSAMMRELGLPVIDADEAARAVMRPGEEAYRQIVAAFGPGILRADGEIDRQKLGAIRFSDEQQRLVLNAIMGPEVLKKMLAEKEAHIRSGAKTVVLDIPLLFESGLQHWVDKVLVVYVDDDVQLRRLMARNGFTEEEALKRIRSQWPSEEKVKRADAVIDNNGTEEETRRQLLAILHQWDLLGKGGSGHHHHHH

SEQ ID NO: 3521 - DNA, 639 bp, synthetic construct
  misc_feature 1..639: note = Variant of 3'O-kinase
  source 1..639: mol_type = other DNA
atggcgtttaccattggtttaacaggagggatcgcagcgggcaaatcgactgtgagtgccatgatgcgtgaactgggtctgccggtcatcgatgctgacgaggcagcacgcgccgttatgcgtccaggcgaagaagcttatcgccagattgtagctgcgttcggtccgggcattcttcgtgccgatggcgagatcgatcgccagaaactgggtgcgatccgcttttcggacgaacaacaacgtatggtgctgaatgcgattgtaggtcctgcagtcctgaagaagatgctcgctgagaaagaagctcatatccgctcaggcgccaagacggttgtgctggatatcccgctgctgttcgaatccggattgcagcattgggtcgacaaagtgctcgtggtgtacgtcgatgatgatgttcagttacgccgccttatggcacgtaacgggtttactgaagaagaagctctgaagcgcattcgttcacagtggcccagtgaagagaaagttaaacgtgcagacgctgtcatcgacaataatggcacgattgaagaaacccgccgccagctgctggccattttacaccagtgggatctgctgggtaagggtggctccggccaccatcatcaccatcactaatga

SEQ ID NO: 3522 - protein, 211 aa, synthetic construct
  REGION 1..211: note = Variant of 3'O-kinase
MAFTIGLTGGIAAGKSTVSAMMRELGLPVIDADEAARAVMRPGEEAYRQIVAAFGPGILRADGEIDRQKLGAIRFSDEQQRMVLNAIVGPAVLKKMLAEKEAHIRSGAKTVVLDIPLLFESGLQHWVDKVLVVYVDDDVQLRRLMARNGFTEEEALKRIRSQWPSEEKVKRADAVIDNNGTIEETRRQLLAILHQWDLLGKGGSGHHHHHH

SEQ ID NO: 3523 - DNA, 639 bp, synthetic construct
  misc_feature 1..639: note = Variant of 3'O-kinase
  source 1..639: mol_type = other DNA
atggcgtttaccattggtttaacaggagggatcgcagcgggcaaatcgactgtgagtgccatgatgcgtgaactgggtctgccggtcatcgatgctgacgaggcagcacgcgccgttatgcgtccaggcgaagaagcttatcgccagattgtagctgcgttcggtccgggcattcttcgtgccgatggcgagatcgatcgccagaaactgggtgcgatccgcttttcggacgaacaacaacgtaaggtgctgaatgcgattgtaggtcctgcagtcctgaagaagatgctcgctgagaaagaagctcatatccgctcaggcgccaagacggttgtgctggatatcccgctgctgttcgaatccggattgcagcattgggtcgacaaagtgctcgtggtgtacgtcgatgatgatgttcagttacgccgccttatggcacgtaacgggtttactgaagaagaagctctgaagcgcattcgttcacagtggcccagtgaagagaaagttaaacgtgcagacgctgtcatcgacaataatggcacggaggaagaaacccgccgccagctgctggccattttacaccagtgggatctgctgggtaagggtggctccggccaccatcatcaccatcactaatga

SEQ ID NO: 3524 - protein, 211 aa, synthetic construct
  REGION 1..211: note = Variant of 3'O-kinase
MAFTIGLTGGIAAGKSTVSAMMRELGLPVIDADEAARAVMRPGEEAYRQIVAAFGPGILRADGEIDRQKLGAIRFSDEQQRKVLNAIVGPAVLKKMLAEKEAHIRSGAKTVVLDIPLLFESGLQHWVDKVLVVYVDDDVQLRRLMARNGFTEEEALKRIRSQWPSEEKVKRADAVIDNNGTEEETRRQLLAILHQWDLLGKGGSGHHHHHH

SEQ ID NO: 3525 - DNA, 639 bp, synthetic construct
  misc_feature 1..639: note = Variant of 3'O-kinase
  source 1..639: mol_type = other DNA
atggcgtttaccattggtttaacaggagggatcgcagcgggcaaatcgactgtgagtgccatgatgcgtgaactgggtctgccggtcatcgatgctgacgaggcagcacgcgccgttatgcgtccaggcgaagaagcttatcatcagattgtagctgcgttcggtccgggcattcttcgtgccgatggcgagatcgatcgccagaaactgggtgctatccgcttttcggacgaacaacaacgtaaggtgctgaatgcgattgtaggtcctgcagtcctgaagaagatgctcgctgagaaagaagctcacatccgctcaggcgccaagacggttgtgctggatatcccgctgctgttcgaatccggattgacccattgggtcgacaaagtgctcgtggtgtacgtcgatgatgatgttcagttacgccgccttatggcacgtaacgggtttactgaagaagaagctctgaagcgcattcgttcacagtggcccagtgcggagaaagttaaacgtgcagacgctgtgatcgacaataatggcacgattgaagaaacccgccgccagctgctggccattttacaccagtgggatctgctgggtaagggtggctccggccaccatcatcaccatcactaatga

SEQ ID NO: 3526 - protein, 211 aa, synthetic construct
  REGION 1..211: note = Variant of 3'O-kinase
MAFTIGLTGGIAAGKSTVSAMMRELGLPVIDADEAARAVMRPGEEAYHQIVAAFGPGILRADGEIDRQKLGAIRFSDEQQRKVLNAIVGPAVLKKMLAEKEAHIRSGAKTVVLDIPLLFESGLTHWVDKVLVVYVDDDVQLRRLMARNGFTEEEALKRIRSQWPSAEKVKRADAVIDNNGTIEETRRQLLAILHQWDLLGKGGSGHHHHHH

SEQ ID NO: 3527 - DNA, 639 bp, synthetic construct
  misc_feature 1..639: note = Variant of 3'O-kinase
  source 1..639: mol_type = other DNA
atggcgtttaccattggtttaacaggagggatcgcagcgggcaaatcgactgtgagtgccatgatgcgtgaactgggtctgccggtcatcgatgctgacgaggcagcacgcgccgttatgcgtccaggcgaagaagcttatcgccagattgtagctgcgttcggtccgggcattcttcgtgccgatggcgagatcgatcgccagaaactgggtgcgatccgcttttcggacgaacaacaacgtaaggtgctgaatgcgattgtaggtcctgcagtcctgaagaagatgctcgctgagaaagaagctcatatccgctcaggcgccaagacggttgtgctggatatcccgctgctgttcgaatccggattgacccattgggtcgacaaagtgctcgtggtgtacgtcgatgatgatgttcagttacgccgccttatggcacgtaacgggtttactgaagaagaagctctgaagcgcattcgttcacagtggcccagtgaagagaaagttaaacgtgcagacgctgtcatcgacaataatggcacggaggaagaaacccgccgccagctgctggccattttacaccagtgggatctgctgggtaagggtggctccggccaccatcatcaccatcactaatga

SEQ ID NO: 3528 - protein, 211 aa, synthetic construct
  REGION 1..211: note = Variant of 3'O-kinase
MAFTIGLTGGIAAGKSTVSAMMRELGLPVIDADEAARAVMRPGEEAYRQIVAAFGPGILRADGEIDRQKLGAIRFSDEQQRKVLNAIVGPAVLKKMLAEKEAHIRSGAKTVVLDIPLLFESGLTHWVDKVLVVYVDDDVQLRRLMARNGFTEEEALKRIRSQWPSEEKVKRADAVIDNNGTEEETRRQLLAILHQWDLLGKGGSGHHHHHH

SEQ ID NO: 3529 - DNA, 639 bp, synthetic construct
  misc_feature 1..639: note = Variant of 3'O-kinase
  source 1..639: mol_type = other DNA
atggcgtttaccattggtttaacaggagggatcgcagcgggcaaatcgactgtgagtgccatgatgcgtgaactgggtctgccggtcatcgatgctgacgaggcagcacgcgccgttatgcgtccaggcgaagaagcttatcatcagattgtagctgcgttcggtccgggcattcttcgtgccgatggcgagatcgatcgccagaaactgggtgctatccgcttttcggacgaacaacaacgcaaggtgctgaatgcgattgtaggtcctgcagtcctgaagaagatgctcgctgagaaagaagctctgatccgctcaggcgccaagacggttgtgctggatatcccgctgctgttcgaatccggattgacccattgggtcgacaaagtgctcgtggtgtacgttgatgatgatgttcagttacgccgccttatggcacgtaacgggtttactgaagaagaagctctgaagcgcattcgttcacagtggcccagtgcggagaaagttaaacgtgcagacgctgtcatcgacaataatggcacgattgaagaaacccgccgccagctgctggccattttacaccagtgggatctgctgtgtaagggtggctccggccaccatcatcaccatcactaatga

SEQ ID NO: 3530 - protein, 211 aa, synthetic construct
  REGION 1..211: note = Variant of 3'O-kinase
MAFTIGLTGGIAAGKSTVSAMMRELGLPVIDADEAARAVMRPGEEAYHQIVAAFGPGILRADGEIDRQKLGAIRFSDEQQRKVLNAIVGPAVLKKMLAEKEALIRSGAKTVVLDIPLLFESGLTHWVDKVLVVYVDDDVQLRRLMARNGFTEEEALKRIRSQWPSAEKVKRADAVIDNNGTIEETRRQLLAILHQWDLLCKGGSGHHHHHH

SEQ ID NO: 3531 - DNA, 639 bp, synthetic construct
  misc_feature 1..639: note = Variant of 3'O-kinase
  source 1..639: mol_type = other DNA
atggcgtttaccattggtttaacaggagggatcgcagcgggcaaatcgactgtgagtgccatgatgcgtgaactgggtctgccggtcatcgatgctgacgaggcagcacgcgccgttatgcgtccaggcgaagaagcttatcgccagattgtagctgcgttcggtccgggcattcttcgtgccgatggcgagatcgatcgccagaaactgggtgctatccgcttttcggacgaacaacaactgaaggtgctgaatgcgattgtaggtcctgcagtcctgaagaagatgctcgctgagaaagaagctatcatccgctcaggcgccaagacggttgtgctggatatcccgctgctgttcgaatccggattgacccattgggtcgacaaagtgctcgtggtgtacgtcgatgatgatgttcagttacgccgccttatggcacgtaacgggtttactgaagaagaagctctgaagcgcattcgttcacagtggcccagtgcggagaaagttaaacgtgcagacgctgtcatcgacaataatggcacgattgaagaaacccgccgccagctgctggccattttacaccagtgggatctgctgggtaagggtggctccggccaccatcatcaccatcactaatga

SEQ ID NO: 3532 - protein, 211 aa, synthetic construct
  REGION 1..211: note = Variant of 3'O-kinase
MAFTIGLTGGIAAGKSTVSAMMRELGLPVIDADEAARAVMRPGEEAYRQIVAAFGPGILRADGEIDRQKLGAIRFSDEQQLKVLNAIVGPAVLKKMLAEKEAIIRSGAKTVVLDIPLLFESGLTHWVDKVLVVYVDDDVQLRRLMARNGFTEEEALKRIRSQWPSAEKVKRADAVIDNNGTIEETRRQLLAILHQWDLLGKGGSGHHHHHH

SEQ ID NO: 3533 - DNA, 639 bp, synthetic construct
  misc_feature 1..639: note = Variant of 3'O-kinase
  source 1..639: mol_type = other DNA
atggcgtttaccattggtttaacaggagggatcgcagcgggcaaatcgactgtgagtgccatgatgcgtgaactgggtctgccggtcatcgatgctgacgaggcagcacgcgccgttatgcgtccaggcgaagaagcttatcgtcagattgtagctgcgttcggtccgggcattcttcgtgccgatggcgagatcgatcgccagaaactgggtgctatccgcttttcggacgaacaacaacgtaaggtgctgaatgcgattgtaggtcctgcagtcctgaagaagatgctcgctgagaaagaagctcatatccgctcaggcgccaagacggttgtgctggatatcccgctgctgttcgaatccggattgacccattgggtcgacaaagtgctcgtggtgtacgatgatgatgatgttcagttacgccgccttatggcacgtaacgggtttactgaagaagaagctctgaagcgcattcgttcacagtggcccagtgcggagaaagttaaacgtgcagacgcttggatcgacaataatggcacgattgaagaaacccgccgccagctgctggccattttacaccagtgggatctgctgaataagggtggctccggccaccatcatcaccatcactaatga

SEQ ID NO: 3534 - protein, 211 aa, synthetic construct
  REGION 1..211: note = Variant of 3'O-kinase
MAFTIGLTGGIAAGKSTVSAMMRELGLPVIDADEAARAVMRPGEEAYRQIVAAFGPGILRADGEIDRQKLGAIRFSDEQQRKVLNAIVGPAVLKKMLAEKEAHIRSGAKTVVLDIPLLFESGLTHWVDKVLVVYDDDDVQLRRLMARNGFTEEEALKRIRSQWPSAEKVKRADAWIDNNGTIEETRRQLLAILHQWDLLNKGGSGHHHHHH

SEQ ID NO: 3535 - DNA, 639 bp, synthetic construct
  misc_feature 1..639: note = Variant of 3'O-kinase
  source 1..639: mol_type = other DNA
atggcgtttaccattggtttaacaggagggatcgcagcgggcaaatcgactgtgagtgccatgatgcgtgaactgggtctgccggtcatcgatgctgacgaggcagcacgcgccgttatgcgtccaggcgaagaagcttatcgtcagattgtagctgcgttcggtccgggcattcttcgtgccgatggcgagatcgatcgccagaaactgggtgctatccgcttttcggacgaacaacaactgaaggtgctgaatgcgattgtaggtcctgcagtcctgaagaagatgctcgctgagaaagaagctcatatccgctcaggcgccaagacggttgtgctggatatcccgctgctgttcgaatccggattgacccattgggtcgacaaagtgctcgtggtgtacgtcgatgatgatgttcagttacgccgccttatggcacgtaacgggtttactgaagaagaagctctgaagcgcattcgttcacagtggcccagtgcggagaaagttaaacgtgcagacgctgtgatcgacaataatggcacgattgaagaaacccgccgccagctgctggccattttacaccagtgggatctgctggataagggtggctccggccaccatcatcaccatcactaatga

SEQ ID NO: 3536 - protein, 211 aa, synthetic construct
  REGION 1..211: note = Variant of 3'O-kinase
MAFTIGLTGGIAAGKSTVSAMMRELGLPVIDADEAARAVMRPGEEAYRQIVAAFGPGILRADGEIDRQKLGAIRFSDEQQLKVLNAIVGPAVLKKMLAEKEAHIRSGAKTVVLDIPLLFESGLTHWVDKVLVVYVDDDVQLRRLMARNGFTEEEALKRIRSQWPSAEKVKRADAVIDNNGTIEETRRQLLAILHQWDLLDKGGSGHHHHHH

SEQ ID NO: 3537 - DNA, 639 bp, synthetic construct
  misc_feature 1..639: note = Variant of 3'O-kinase
  source 1..639: mol_type = other DNA
atggcgtttaccattggtttaacaggagggatcgcagcgggcaaatcgactgtgagtgccatgatgcgtgaactgggtctgccggtcatcgatgctgacgaggcagcacgcgccgttatgcgtccaggcgaagaagcttatcgccagattgtagctgcgttcggtccgggcattcttcgtgccgatggcgagatcgatcgccagaaactgggtgcgatccgcttttcggacgaacaacaacgtctggtgctgaatgcgattgtaggtcctgcagtcctgaagaagatgctcgctgagaaagaagctcatatccgctcaggcgccaagacggttgtgctggatatcccgctgctgttcgaatccggattgacccattgggtcgacaaagtgctcgtggtgtacgtcgatgatgatgttcagttacgccgccttatggcacgtaacgggtttactgaagaagaagctctgaagcgcattcgttcacagtggcccagtgaagagaaagttaaacgtgcagacgctgtcatcgacaataatggcacggaggaagaaacccgccgccagctgctggccattttacaccagtgggatctgctgggtaagggtggctccggccaccatcatcaccatcactaatga

SEQ ID NO: 3538 - protein, 211 aa, synthetic construct
  REGION 1..211: note = Variant of 3'O-kinase
MAFTIGLTGGIAAGKSTVSAMMRELGLPVIDADEAARAVMRPGEEAYRQIVAAFGPGILRADGEIDRQKLGAIRFSDEQQRLVLNAIVGPAVLKKMLAEKEAHIRSGAKTVVLDIPLLFESGLTHWVDKVLVVYVDDDVQLRRLMARNGFTEEEALKRIRSQWPSEEKVKRADAVIDNNGTEEETRRQLLAILHQWDLLGKGGSGHHHHHH

SEQ ID NO: 3539 - DNA, 639 bp, synthetic construct
  misc_feature 1..639: note = Variant of 3'O-kinase
  source 1..639: mol_type = other DNA
atggcgtttaccattggtttaacaggagggatcgcagcgggcaaatcgactgtgagtgccatgatgcgtgaactgggtctgccggtcatcgatgctgacgaggcagcacgcgccgttatgcgtccaggcgaagaagcttatcatcagattgtagctgcgttcggtccgggcattcttcgtgccgatggcgagatcgatcgccagaaactgggtgctatccgcttttcggacgaacaacaactgaaggtgctgaatgcgattgtaggtcctgcagtcctgaagaagatgctcgctgagaaagaagctctgatccgctcaggcgccaagacggttgtgctggatatcccgctgctgttcgaatccggattgacccattgggtcgacaaagtgctcgtggtgtacgttgatgatgatgttcagttacgccgccttatggcacgtaacgggtttactgaagaagaagctctgaagcgcattcgttcacagtggcccagtgcggagaaagttaaacgtgcagacgctgtgatcgacaataatggcacgattgaagaaacccgccgccagctgctggccattttacaccagtgggatctgctgggtaagggtggctccggccaccatcatcaccatcactaatga

SEQ ID NO: 3540 - protein, 211 aa, synthetic construct
  REGION 1..211: note = Variant of 3'O-kinase
MAFTIGLTGGIAAGKSTVSAMMRELGLPVIDADEAARAVMRPGEEAYHQIVAAFGPGILRADGEIDRQKLGAIRFSDEQQLKVLNAIVGPAVLKKMLAEKEALIRSGAKTVVLDIPLLFESGLTHWVDKVLVVYVDDDVQLRRLMARNGFTEEEALKRIRSQWPSAEKVKRADAVIDNNGTIEETRRQLLAILHQWDLLGKGGSGHHHHHH

SEQ ID NO: 3541 - DNA, 639 bp, synthetic construct
  misc_feature 1..639: note = Variant of 3'O-kinase
  source 1..639: mol_type = other DNA
atggcgtttaccattggtttaacaggagggatcgcagcgggcaaatcgactgtgagtgccatgatgcgtgaactgggtctgccggtcatcgatgctgacgaggcagcacgcgccgttatgcgtccaggcgaagaagcttatcgtcagattgtagctgcgttcggtccgggcattcttcgtgccgatggcgagatcgatcgccagaaactgggtgctatccgcttttcggacgaacaacaacgcaaggtgctgaatgcgattgtaggtcctgcagtcctgaagaagatgctcgctgagaaagaagctcatatccgctcaggcgccaagacggttgtgctggatatcccgctgctgttcgaatccggattgacccattgggtcgacaaagtgctcgtggtgtacgtcgatgatgatgttcagttacgccgccttatggcacgtaacgggtttactgaagaagaagctctgaagcgcattcgttcacagtggcccagtgcggagaaagttaaacgtgcagacgctgtgatcgacaataatggcacgattgaagaaacccgccgccagctgctggccattttacaccagtgggatctgctgtgtaagggtggctccggccaccatcatcaccatcactaatga

SEQ ID NO: 3542 - protein, 211 aa, synthetic construct
  REGION 1..211: note = Variant of 3'O-kinase
MAFTIGLTGGIAAGKSTVSAMMRELGLPVIDADEAARAVMRPGEEAYRQIVAAFGPGILRADGEIDRQKLGAIRFSDEQQRKVLNAIVGPAVLKKMLAEKEAHIRSGAKTVVLDIPLLFESGLTHWVDKVLVVYVDDDVQLRRLMARNGFTEEEALKRIRSQWPSAEKVKRADAVIDNNGTIEETRRQLLAILHQWDLLCKGGSGHHHHHH

SEQ ID NO: 3543 - DNA, 639 bp, synthetic construct
  misc_feature 1..639: note = Variant of 3'O-kinase
  source 1..639: mol_type = other DNA
atggcgtttaccattggtttaacaggagggatcgcagcgggcaaatcgactgtgagtgccatgatgcgtgaactgggtctgccggtcatcgatgctgacgaggcagcacgcgccgttatgcgtccaggcgaagaagcttatcgccagattgtagctgcgttcggtccgggcattcttcgtgccgatggcgagatcgatcgccagaaactgggtgctatccgcttttcggacgaacaacaacgcaaggtgctgaatgcgattgtaggtcctgcagtcctgaagaagatgctcgctgagaaagaagctatcatccgctcaggcgccaagacggttgtgctggatatcccgctgctgttcgaatccggattgacccattgggtcgacaaagtgctcgtggtgtacgttgatgatgatgttcagttacgccgccttatggcacgtaacgggtttactgaagaagaagctctgaagcgcattcgttcacagtggcccagtgcggagaaagttaaacgtgcagacgcttggatcgacaataatggcacgattgaagaaacccgccgccagctgctggccattttacaccagtgggatctgctgggtaagggtggctccggccaccatcatcaccatcactaatga

SEQ ID NO: 3544 - protein, 211 aa, synthetic construct
  REGION 1..211: note = Variant of 3'O-kinase
MAFTIGLTGGIAAGKSTVSAMMRELGLPVIDADEAARAVMRPGEEAYRQIVAAFGPGILRADGEIDRQKLGAIRFSDEQQRKVLNAIVGPAVLKKMLAEKEAIIRSGAKTVVLDIPLLFESGLTHWVDKVLVVYVDDDVQLRRLMARNGFTEEEALKRIRSQWPSAEKVKRADAWIDNNGTIEETRRQLLAILHQWDLLGKGGSGHHHHHH

SEQ ID NO: 3545 - DNA, 639 bp, synthetic construct
  misc_feature 1..639: note = Variant of 3'O-kinase
  source 1..639: mol_type = other DNA
atggcgtttaccattggtttaacaggagggatcgcagcgggcaaatcgactgtgagtgccatgatgcgtgaactgggtctgccggtcatcgatgctgacgaggcagcacgcgccgttatgcgtccaggcgaagaagcttatcgccagattgtagctgcgttcggtccgggcattcttcgtgccgatggcgagatcgatcgccagaaactgggtgcgatccgcttttcggacgaacaacaacgtaaggtgctgaatgcgattgtaggtcctgcagtcctgaagaagatgctcgctgagaaagaagctcatatccgctcaggcgccaagacggttgtgctggatatcccgctgctgttcgaatccggattgcagcattgggtcgacaaagtgctcgtggtgtacgtcgatgatgatgttcagttacgccgccttatggcacgtaacgggtttactgaagaagaagctctgaagcgcattcgttcacagtggcccagtatcgagaaagttaaacgtgcagacgctgtcatcgacaataatggcacgatcgaagaaacccgccgccagctgctggccattttacaccagtgggatctgctgggtaagggtggctccggccaccatcatcaccatcactaatga

SEQ ID NO: 3546 - protein, 211 aa, synthetic construct
  REGION 1..211: note = Variant of 3'O-kinase
MAFTIGLTGGIAAGKSTVSAMMRELGLPVIDADEAARAVMRPGEEAYRQIVAAFGPGILRADGEIDRQKLGAIRFSDEQQRKVLNAIVGPAVLKKMLAEKEAHIRSGAKTVVLDIPLLFESGLQHWVDKVLVVYVDDDVQLRRLMARNGFTEEEALKRIRSQWPSIEKVKRADAVIDNNGTIEETRRQLLAILHQWDLLGKGGSGHHHHHH

SEQ ID NO: 3547 - DNA, 639 bp, synthetic construct
  misc_feature 1..639: note = Variant of 3'O-kinase
  source 1..639: mol_type = other DNA
atggcgtttaccattggtttaacaggagggatcgcagcgggcaaatcgactgtgagtgccatgatgcgtgaactgggtctgccggtcatcgatgctgacgaggcagcacgcgccgttatgcgtccaggcgaagaagcttatcgccagattgtagctgcgttcggtccgggcattcttcgtgccgatggcgagatcgatcgccagaaactgggtgctatccgcttttcggacgaacaacaacgtaaggtgctgaatgcgattgtaggtcctgcagtcctgaagaagatgctcgctgagaaagaagctcatatccgctcaggcgccaagacggttgtgctggatatcccgctgctgttcgaatccggattgacccattgggtcgacaaagtgctcgtggtgtacgttgatgatgatgttcagttacgccgccttatggcacgtaacgggtttactgaagaagaagctctgaagcgcattcgttcacagtggcccagtgcggagaaagttaaacgtgcagacgctgtgatcgacaataatggcacgattgaagaaacccgccgccagctgctggccattttacaccagtgggatctgctgaataagggtggctccggccaccatcatcaccatcactaatga

SEQ ID NO: 3548 - protein, 211 aa, synthetic construct
  REGION 1..211: note = Variant of 3'O-kinase
MAFTIGLTGGIAAGKSTVSAMMRELGLPVIDADEAARAVMRPGEEAYRQIVAAFGPGILRADGEIDRQKLGAIRFSDEQQRKVLNAIVGPAVLKKMLAEKEAHIRSGAKTVVLDIPLLFESGLTHWVDKVLVVYVDDDVQLRRLMARNGFTEEEALKRIRSQWPSAEKVKRADAVIDNNGTIEETRRQLLAILHQWDLLNKGGSGHHHHHH

SEQ ID NO: 3549 - DNA, 639 bp, synthetic construct
  misc_feature 1..639: note = Variant of 3'O-kinase
  source 1..639: mol_type = other DNA
atggcgtttaccattggtttaacaggagggatcgcagcgggcaaatcgactgtgagtgccatgatgcgtgaactgggtctgccggtcatcgatgctgacgaggcagcacgcgccgttatgcgtccaggcgaagaagcttatcgccagattgtagctgcgttcggtccgggcattcttcgtgccgatggcgagatcgatcgccagaaactgggtcatatccgcttttcggacgaacaacaacgtaaggtgctgaatgcgattgtaggtcctgcagtcctgaagaagatgctcgctgagaaagaagctcatatccgctcaggcgccaagacggttgtgctggatatcccgctgctgttcgaatccggattgacccattgggtcgacaaagtgctcgtggtgtacgtcgatgatgatgttcagttacgccgccttatggcacgtaacgggtttactgaagaagaagctctgaagcgcattcgttcacagtggcccagtatcgagaaagttaaacgtgcagacgctgtcatcgacaataatggcacggaggaagaaacccgccgccagctgctggccattttacaccagtgggatctgctgggtaagggtggctccggccaccatcatcaccatcactaatga

SEQ ID NO: 3550 - protein, 211 aa, synthetic construct
  REGION 1..211: note = Variant of 3'O-kinase
MAFTIGLTGGIAAGKSTVSAMMRELGLPVIDADEAARAVMRPGEEAYRQIVAAFGPGILRADGEIDRQKLGHIRFSDEQQRKVLNAIVGPAVLKKMLAEKEAHIRSGAKTVVLDIPLLFESGLTHWVDKVLVVYVDDDVQLRRLMARNGFTEEEALKRIRSQWPSIEKVKRADAVIDNNGTEEETRRQLLAILHQWDLLGKGGSGHHHHHH

SEQ ID NO: 3551 - DNA, 639 bp, synthetic construct
  misc_feature 1..639: note = Variant of 3'O-kinase
  source 1..639: mol_type = other DNA
atggcgtttaccattggtttaacaggagggatcgcagcgggcaaatcgactgtgagtgccatgatgcgtgaactgggtctgccggtcatcgatgctgacgaggcagcacgcgccgttatgcgtccaggcgaagaagcttatcgtcagattgtagctgcgttcggtccgggcattcttcgtgccgatggcgagatcgatcgccagaaactgggtgctatccgcttttcggacgaacaacaacgcaaggtgctgaatgcgattgtaggtcctgcagtcctgaagaagatgctcgctgagaaagaagctatcatccgctcaggcgccaagacggttgtgctggatatcccgctgctgttcgaatccggattgacccattgggtcgacaaagtgctcgtggtgtacgtcgatgatgatgttcagttacgccgccttatggcacgtaacgggtttactgaagaagaagctctgaagcgcattcgttcacagtggcccagtgcggagaaagttaaacgtgcagacgctgtgatcgacaataatggcacgattgaagaaacccgccgccagctgctggccattttacaccagtgggatctgctgggtaagggtggctccggccaccatcatcaccatcactaatga

SEQ ID NO: 3552 - protein, 211 aa, synthetic construct
  REGION 1..211: note = Variant of 3'O-kinase
MAFTIGLTGGIAAGKSTVSAMMRELGLPVIDADEAARAVMRPGEEAYRQIVAAFGPGILRADGEIDRQKLGAIRFSDEQQRKVLNAIVGPAVLKKMLAEKEAIIRSGAKTVVLDIPLLFESGLTHWVDKVLVVYVDDDVQLRRLMARNGFTEEEALKRIRSQWPSAEKVKRADAVIDNNGTIEETRRQLLAILHQWDLLGKGGSGHHHHHH

SEQ ID NO: 3553 - DNA, 639 bp, synthetic construct
  misc_feature 1..639: note = Variant of 3'O-kinase
  source 1..639: mol_type = other DNA
atggcgtttaccattggtttaacaggagggatcgcagcgggcaaatcgactgtgagtgccatgatgcgtgaactgggtctgccggtcatcgatgctgacgaggcagcacgcgccgttatgcgtccaggcgaagaagcttatcgccagattgtagctgcgttcggtccgggcattcttcgtgccgatggcgagatcgatcgccagaaactgggtgcgatccgcttttcggacgaacaacaacgtctggtgctgaatgcgattgtaggtcctgcagtcctgaagaagatgctcgctgagaaagaagctcatatccgctcaggcgccaagacggttgtgctggatatcccgctgctgttcgaatccggattgagccattgggtcgacaaagtgctcgtggtgtacgtcgatgatgatgttcagttacgccgccttatggcacgtaacgggtttactgaagaagaagctctgaagcgcattcgttcacagtggcccagtatcgagaaagttaaacgtgcagacgctgtcatcgacaataatggcacggaggaagaaacccgccgccagctgctggccattttacaccagtgggatctgctgggtaagggtggctccggccaccatcatcaccatcactaatga

SEQ ID NO: 3554 - protein, 211 aa, synthetic construct
  REGION 1..211: note = Variant of 3'O-kinase
MAFTIGLTGGIAAGKSTVSAMMRELGLPVIDADEAARAVMRPGEEAYRQIVAAFGPGILRADGEIDRQKLGAIRFSDEQQRLVLNAIVGPAVLKKMLAEKEAHIRSGAKTVVLDIPLLFESGLSHWVDKVLVVYVDDDVQLRRLMARNGFTEEEALKRIRSQWPSIEKVKRADAVIDNNGTEEETRRQLLAILHQWDLLGKGGSGHHHHHH

SEQ ID NO: 3555 - DNA, 639 bp, synthetic construct
  misc_feature 1..639: note = Variant of 3'O-kinase
  source 1..639: mol_type = other DNA
atggcgtttaccattggtttaacaggagggatcgcagcgggcaaatcgactgtgagtgccatgatgcgtgaactgggtctgccggtcatcgatgctgacgaggcagcacgcgccgttatggtcccaggcgaagaagcgtatcgccagattgtagctgcgttcggtccgggcattcttcgtgccgatggcgagatcgatcgccagaaactgggtgctatccgcttttcggacgaacaacaacgtaagatgctgaattcgattgtaggtcctgcagtcctgaagaagatgctcgctgagaaagaagctcatatccgctcaggcgccaagacggttgtgctggatatcccgctgctgttcgaatccggattgacccattgggtcgacaaagtgctcgtggtgtacgtcgatgatgatgttcagttacgccgccttatggcacgtaacgggtttactgaagaagaagctctgaagcgcattcgttcacagtggcccagtgcggagaaagttaaacgtgcagacgctgtcatcgacaataatggcaatattgaagaaacccgccgccagctggtggacattttacaccagtgggatctgctgggtaagggtggctccggccaccatcatcaccatcactaatga

SEQ ID NO: 3556 - protein, 211 aa, synthetic construct
  REGION 1..211: note = Variant of 3'O-kinase
MAFTIGLTGGIAAGKSTVSAMMRELGLPVIDADEAARAVMVPGEEAYRQIVAAFGPGILRADGEIDRQKLGAIRFSDEQQRKMLNSIVGPAVLKKMLAEKEAHIRSGAKTVVLDIPLLFESGLTHWVDKVLVVYVDDDVQLRRLMARNGFTEEEALKRIRSQWPSAEKVKRADAVIDNNGNIEETRRQLVDILHQWDLLGKGGSGHHHHHH

SEQ ID NO: 3557 - DNA, 639 bp, synthetic construct
  misc_feature 1..639: note = Variant of 3'O-kinase
  source 1..639: mol_type = other DNA
atggcgtttaccattggtttaacaggagggatcgcagcgggcaaatcgactgtgagtgccatgatgcgtgaactgggtctgccggtcatcgatgctgacgaggcagcacgcgccgttatggtcccaggcgaagaagcgtatcgccagattgtagctgcgttcggtccgggcattcttcgtgccgatggcgagatcgatcgccagaaactgggtgctatccgcttttcggacgaacaacaacgtaaggtgctgaatgcgattgtaggtcctgcagtcctgaagaaaatgctcgctgagaaagaagctcatatccgctcaggcgccaagacggttgtgctggatatcccactgctgttcgaatccggattgacccattgggtcgacaaagtgctcgtggtgtacgtcgatgatgatgttcagttacgccgccttatggcacgtaacgggtttactgaagaagaagctctgaagcgcattcgttcacagtggcccagtgcggagaaagttaaacgtgcagacgctgtcatcgacaataatggcaatattgaagaaacccgccgccagctgctggacattttacaccagtgggatctgctgggtaagggtggctccggccaccatcatcaccatcactaatga

SEQ ID NO: 3558 - protein, 211 aa, synthetic construct
  REGION 1..211: note = Variant of 3'O-kinase
MAFTIGLTGGIAAGKSTVSAMMRELGLPVIDADEAARAVMVPGEEAYRQIVAAFGPGILRADGEIDRQKLGAIRFSDEQQRKVLNAIVGPAVLKKMLAEKEAHIRSGAKTVVLDIPLLFESGLTHWVDKVLVVYVDDDVQLRRLMARNGFTEEEALKRIRSQWPSAEKVKRADAVIDNNGNIEETRRQLLDILHQWDLLGKGGSGHHHHHH

SEQ ID NO: 3559 - DNA, 639 bp, synthetic construct
  misc_feature 1..639: note = Variant of 3'O-kinase
  source 1..639: mol_type = other DNA
atggcgtttaccattggtttaacaggagggatcgcagcgggcaaatcgactgtgagtgccatgatgcgtgaactgggtctgccggtcatcgatgctgacgaggcagcacgcgccgttatgcgtccaggcgaagaagcgtatcgccagattgtagctgcgttcggtccgggcattcttcgtgccgatggcgagatcgatcgccagaaactgggtgctatccgcttttcggacgaacaacaacgtaaggtgctgaattcgattgtaggtcctgcagtcctgaagaagatgctcgctgagaaagaagctcatatccgctcaggcgccaagacggttgtgctggatatcccgctgctgttcgaatccggattgacccattgggtcgacaaagtgctcgtggtgtacgtcgatgatgatgttcagttacgccgccttatggcacgtaacgggtttactgaagaagaagctctgaagcgcattcgttcacagtggcccagtgcggagaaagttaaacgtgcagacgctgtcatcgacaataatggcacgattgaagaaacccgccgccagctgctggccattttacaccagtgggatctgctgggtaagggtggctccggccaccatcatcaccatcactaatga

SEQ ID NO: 3560 - protein, 211 aa, synthetic construct
  REGION 1..211: note = Variant of 3'O-kinase
MAFTIGLTGGIAAGKSTVSAMMRELGLPVIDADEAARAVMRPGEEAYRQIVAAFGPGILRADGEIDRQKLGAIRFSDEQQRKVLNSIVGPAVLKKMLAEKEAHIRSGAKTVVLDIPLLFESGLTHWVDKVLVVYVDDDVQLRRLMARNGFTEEEALKRIRSQWPSAEKVKRADAVIDNNGTIEETRRQLLAILHQWDLLGKGGSGHHHHHH

SEQ ID NO: 3561 - DNA, 639 bp, synthetic construct
  misc_feature 1..639: note = Variant of 3'O-kinase
  source 1..639: mol_type = other DNA
atggcgtttaccattggtttaacaggagggatcgcagcgggcaaatcgactgtgagtgccatgatgcgtgaactgggtctgccggtcatcgatgctgacgaggcagcacgcgccgttatgcgtccaggcgaagaagcttatcgccagattgtagctgcgttcggtccgggcattcttcgtgccgatggcgagatcgatcgccagaaactgggtgcgatccgcttttcggacgaacaacaacgtaaggtgctgaatgcgattgtgggtcctgaagtcctgaagaagatgctcgctgagaaagaagctcatatccgctcaggcgccaagacggttgtgctggatatcccgctgctgttcgaatccggattgacccattgggtcgacaaagtgctcgtggtgtacgtcgatgatgatgttcagttacgccgccttatggcacgtaacgggtttactgaagaagaagctctgaagcgcattcgttcacagtggcccagtgcggagaaagttaaacgtgcagacgctgtcatcgacaataatggcacgattgaagaaacccgccgccagctgctggccattttacaccagtgggatctgctgggtaagggtggctccggccaccatcatcaccatcactaatga

SEQ ID NO: 3562 - protein, 211 aa, synthetic construct
  REGION 1..211: note = Variant of 3'O-kinase
MAFTIGLTGGIAAGKSTVSAMMRELGLPVIDADEAARAVMRPGEEAYRQIVAAFGPGILRADGEIDRQKLGAIRFSDEQQRKVLNAIVGPEVLKKMLAEKEAHIRSGAKTVVLDIPLLFESGLTHWVDKVLVVYVDDDVQLRRLMARNGFTEEEALKRIRSQWPSAEKVKRADAVIDNNGTIEETRRQLLAILHQWDLLGKGGSGHHHHHH

SEQ ID NO: 3563 - DNA, 639 bp, synthetic construct
  misc_feature 1..639: note = Variant of 3'O-kinase
  source 1..639: mol_type = other DNA
atggcgtttaccattggtttaacaggagggatcgcagcgggcaaatcgactgtgagtgccatgatgcgtgaactgggtctgccggtcatcgatgctgacgaggcagcacgcgccgttatgcgtccaggcgaagaagcttatcgtcagattgtagctgcgttcggtccgggcattcttcgtgccgatggcgagatcgatcgccagaaactgggtgctatccgcttttcggacgaacaacaactgaaggtgctgaatgcgattgtaggtcctgcagtcctgaagaagatgctcgctgagaaagaagctcacatccgctcaggcgccaagacggttgtgctggatatcccgctgctgttcgaatccggattgacccattgggtcgacaaagtgctcgtggtgtacgtcgatgatgatgttcagttacgccgccttatggcacgtaacgggtttactgaagaagaagctctgaagcgcattcgttcacagtggcccagtgcggagaaagttaaacgtgcagacgcttggatcgacaataatggcacgattgaagaaacccgccgccagctgctggccattttacaccagtgggatctgctggagaagggtggctccggccaccatcatcaccatcactaatga

SEQ ID NO: 3564 - protein, 211 aa, synthetic construct
  REGION 1..211: note = Variant of 3'O-kinase
MAFTIGLTGGIAAGKSTVSAMMRELGLPVIDADEAARAVMRPGEEAYRQIVAAFGPGILRADGEIDRQKLGAIRFSDEQQLKVLNAIVGPAVLKKMLAEKEAHIRSGAKTVVLDIPLLFESGLTHWVDKVLVVYVDDDVQLRRLMARNGFTEEEALKRIRSQWPSAEKVKRADAWIDNNGTIEETRRQLLAILHQWDLLEKGGSGHHHHHH

SEQ ID NO: 3565 - DNA, 639 bp, synthetic construct
  misc_feature 1..639: note = Variant of 3'O-kinase
  source 1..639: mol_type = other DNA
atggcgtttaccattggtttaacaggagggatcgcagcgggcaaatcgactgtgagtgccatgatgcgtgaactgggtctgccggtcatcgatgctgacgaggcagcacgcgccgttatgcgtccaggcgaagaagcttatcgtcagattgtagctgcgttcggtccgggcattcttcgtgccgatggcgagatcgatcgccagaaactgggtgctatccgcttttcggacgaacaacaactgaaggtgctgaatgcgattgtaggtcctgcagtcctgaagaagatgctcgctgagaaagaagctcatatccgctcaggcgccaagacggttgtgctggatatcccgctgctgttcgaatccggattgacccattgggtcgacaaagtgctcgtggtgtacgtcgatgatgatgttcagttacgccgccttatggcacgtaacgggtttactgaagaagaagctctgaagcgcattcgttcacagtggcccagtgcggagaaagttaaacgtgcagacgctgtgatcgacaataatggcacgattgaagaaacccgccgccagctgctggccattttacaccagtgggatctgctgggtaagggtggctccggccaccatcatcaccatcactaatga

SEQ ID NO: 3566 - protein, 211 aa, synthetic construct
  REGION 1..211: note = Variant of 3'O-kinase
MAFTIGLTGGIAAGKSTVSAMMRELGLPVIDADEAARAVMRPGEEAYRQIVAAFGPGILRADGEIDRQKLGAIRFSDEQQLKVLNAIVGPAVLKKMLAEKEAHIRSGAKTVVLDIPLLFESGLTHWVDKVLVVYVDDDVQLRRLMARNGFTEEEALKRIRSQWPSAEKVKRADAVIDNNGTIEETRRQLLAILHQWDLLGKGGSGHHHHHH

SEQ ID NO: 3567 - DNA, 639 bp, synthetic construct
  misc_feature 1..639: note = Variant of 3'O-kinase
  source 1..639: mol_type = other DNA
atggcgtttaccattggtttaacaggagggatcgcagcgggcaaatcgactgtgagtgccatgatgcgtgaactgggtctgccggtcatcgatgctgacgaggcagcacgcgccgttatgcgtccaggcgaagaagcttatcgccagattgtagctgcgttcggtccgggcattcttcgtgccgatggcgagatcgatcgccagaaactgggtgctatccgcttttcggacgaacaacaactgaaggtgctgaatgcgattgtaggtcctgcagtcctgaagaagatgctcgctgagaaagaagctcacatccgctcaggcgccaagacggttgtgctggatatcccgctgctgttcgaatccggattgacccattgggtcgacaaagtgctcgtggtgtacgttgatgatgatgttcagttacgccgccttatggcacgtaacgggtttactgaagaagaagctctgaagcgcattcgttcacagtggcccagtgcggagaaagttaaacgtgcagacgcttggatcgacaataatggcacgattgaagaaacccgccgccagctgctggccattttacaccagtgggatctgctgaataagggtggctccggccaccatcatcaccatcactaatga

SEQ ID NO: 3568 - protein, 211 aa, synthetic construct
  REGION 1..211: note = Variant of 3'O-kinase
MAFTIGLTGGIAAGKSTVSAMMRELGLPVIDADEAARAVMRPGEEAYRQIVAAFGPGILRADGEIDRQKLGAIRFSDEQQLKVLNAIVGPAVLKKMLAEKEAHIRSGAKTVVLDIPLLFESGLTHWVDKVLVVYVDDDVQLRRLMARNGFTEEEALKRIRSQWPSAEKVKRADAWIDNNGTIEETRRQLLAILHQWDLLNKGGSGHHHHHH

SEQ ID NO: 3569 - DNA, 639 bp, synthetic construct
  misc_feature 1..639: note = Variant of 3'O-kinase
  source 1..639: mol_type = other DNA
atggcgtttaccattggtttaacaggagggatcgcagcgggcaaatcgactgtgagtgccatgatgcgtgaactgggtctgccggtcatcgatgctgacgaggcagcacgcgccgttatgcgtccaggcgaagaagcttatcgccagattgtagctgcgttcggtccgggcattcttcgtgccgatggcgagatcgatcgccagaaactgggtcatatccgcttttcggacgaacaacaacgtgaggtgctgaatgcgattgtgggtcctgaagtcctgaagaagatgctcgctgagaaagaagctcatatccgctcaggcgccaagacggttgtgctggatatcccgctgctgttcgaatccggattgacccattgggtcgacaaagtgctcgtggtgtacgtcgatgatgatgttcagttacgccgccttatggcacgtaacgggtttactgaagaagaagctctgaagcgcattcgttcacagtggcccagtgcagagaaagttaaacgtgcagacgctgtcatcgacaataatggcacgattgaagaaacccgccgccagctgctggccattttacaccagtgggatctgctgggtaagggtggctccggccaccatcatcaccatcactaatga

SEQ ID NO: 3570 - protein, 211 aa, synthetic construct
  REGION 1..211: note = Variant of 3'O-kinase
MAFTIGLTGGIAAGKSTVSAMMRELGLPVIDADEAARAVMRPGEEAYRQIVAAFGPGILRADGEIDRQKLGHIRFSDEQQREVLNAIVGPEVLKKMLAEKEAHIRSGAKTVVLDIPLLFESGLTHWVDKVLVVYVDDDVQLRRLMARNGFTEEEALKRIRSQWPSAEKVKRADAVIDNNGTIEETRRQLLAILHQWDLLGKGGSGHHHHHH

SEQ ID NO: 3571 - DNA, 639 bp, synthetic construct
  misc_feature 1..639: note = Variant of 3'O-kinase
  source 1..639: mol_type = other DNA
atggcgtttaccattggtttaacaggagggatcgcagcgggcaaatcgactgtgagtgccatgatgcgtgaactgggtctgccggtcatcgatgctgacgaggcagcacgcgccgttatgcgtccaggcgaagaagcttatcgccagattgtagctgcgttcggtccgggcattcttcgtgccgatggcgagatcgatcgccagaaactgggtcatatccgcttttcggacgaacaacaacgtacggtgctgaatgcgattctgggtcctgcagtcctgaagaagatgctcgctgagaaagaagctcatatccgctcaggcgccaagacggttgtgctggatatcccgctgctgttcgaatccggattgcagcattgggtcgacaaagtgctcgtggtgtacgtcgatgatgatgttcagttacgccgccttatggcacgtaacgggtttactgaagaagaagctctgaagcgcattcgttcacagtggcccagtgaagagaaagttaaacgtgcagacgctgtcatcgacaataatggcacgatcgaagaaacccgccgccagctgctggccattttacaccagtgggatctgctgggtaagggtggctccggccaccatcatcaccatcactaatga

SEQ ID NO: 3572 - protein, 211 aa, synthetic construct
  REGION 1..211: note = Variant of 3'O-kinase
MAFTIGLTGGIAAGKSTVSAMMRELGLPVIDADEAARAVMRPGEEAYRQIVAAFGPGILRADGEIDRQKLGHIRFSDEQQRTVLNAILGPAVLKKMLAEKEAHIRSGAKTVVLDIPLLFESGLQHWVDKVLVVYVDDDVQLRRLMARNGFTEEEALKRIRSQWPSEEKVKRADAVIDNNGTIEETRRQLLAILHQWDLLGKGGSGHHHHHH

SEQ ID NO: 3573 - DNA, 639 bp, synthetic construct
  misc_feature 1..639: note = Variant of 3'O-kinase
  source 1..639: mol_type = other DNA
atggcgtttaccattggtttaacaggagggatcgcagcgggcaaatcgactgtgagtgccatgatgcgtgaactgggtctgccggtcatcgatgctgacgaggcagcacgcgccgttatgcgtccaggcgaagaagcttatcatcagattgtagctgcgttcggtccgggcattcttcgtgccgatggcgagatcgatcgccagaaactgggtgctatccgcttttcggacgaacaacaacgcaaggtgctgaatgcgattgtaggtcctgcagtcctgaagaagatgctcgctgagaaagaagctcatatccgctcaggcgccaagacggttgtgctggatatcccgctgctgttcgaatccggattgacccattgggtcgacaaagtgctcgtggtgtacgtcgatgatgatgttcagttacgccgccttatggcacgtaacgggtttactgaagaagaagctctgaagcgcattcgttcacagtggcccagtgcggagaaagttaaacgtgcagacgctgtcatcgacaataatggcacgattgaagaaacccgccgccagctgctggccattttacaccagtgggatctgctgaataagggtggctccggccaccatcatcaccatcactaatga

SEQ ID NO: 3574 - protein, 211 aa, synthetic construct
  REGION 1..211: note = Variant of 3'O-kinase
MAFTIGLTGGIAAGKSTVSAMMRELGLPVIDADEAARAVMRPGEEAYHQIVAAFGPGILRADGEIDRQKLGAIRFSDEQQRKVLNAIVGPAVLKKMLAEKEAHIRSGAKTVVLDIPLLFESGLTHWVDKVLVVYVDDDVQLRRLMARNGFTEEEALKRIRSQWPSAEKVKRADAVIDNNGTIEETRRQLLAILHQWDLLNKGGSGHHHHHH

SEQ ID NO: 3575 - DNA, 639 bp, synthetic construct
  misc_feature 1..639: note = Variant of 3'O-kinase
  source 1..639: mol_type = other DNA
atggcgtttaccattggtttaacaggagggatcgcagcgggcaaatcgactgtgagtgccatgatgcgtgaactgggtctgccggtcatcgatgctgacgaggcagcacgcgccgttatgaagccaggcgaagaagcgtatcgccagattgtagctgcgttcggtccgggcattcttcgtgccgatggcgagatcgatcgccagaaactgggtgctatccgcttttcggacgaacaacaacgtaaggtgctgaatgcgattgtaggtcctgcagtcctgaagataatgctcgctgagaaagaagctcatatccgctcaggcgccaagacgattgtgctggatatcccgctgctgttcgaatccggattgacccattgggtcgacaaagtgctcgtggtgtacgtcgatgatgatgttcagttacgccgccttatggcacgtaacgggtttactgaagaagaagctctgaagcgcattcgttcacagtggcccagtgcggagaaagttaaacgtgcagacgctgtcatcgacaataatggcaatattgaagaaacccgccgccagctggtggacattttacaccagtgggatctgctgggtaagggtggctccggccaccatcatcaccatcactaatga

SEQ ID NO: 3576 - protein, 211 aa, synthetic construct
  REGION 1..211: note = Variant of 3'O-kinase
MAFTIGLTGGIAAGKSTVSAMMRELGLPVIDADEAARAVMKPGEEAYRQIVAAFGPGILRADGEIDRQKLGAIRFSDEQQRKVLNAIVGPAVLKIMLAEKEAHIRSGAKTIVLDIPLLFESGLTHWVDKVLVVYVDDDVQLRRLMARNGFTEEEALKRIRSQWPSAEKVKRADAVIDNNGNIEETRRQLVDILHQWDLLGKGGSGHHHHHH

SEQ ID NO: 3577 - DNA, 639 bp, synthetic construct
  misc_feature 1..639: note = Variant of 3'O-kinase
  source 1..639: mol_type = other DNA
atggcgtttaccattggtttaacaggagggatcgcagcgggcaaatcgactgtgagtgccatgatgcgtgaactgggtctgccggtcatcgatgctgacgaggcagcacgcgccgttatgcgtccaggcgaagaagcttatcgccagattgtagctgcgttcggtccgggcattcttcgtgccgatggcgagatcgatcgccagaaactgggtcatatccgcttttcggacgaacaacaacgtaaggtgctgaatgcgattgtaggtcctgcagtcctgaagaagatgctcgctgagaaagaagctcatatccgctcaggcgccaagacggttgtgctggatatcccgctgctgttcgaatccggattgacccattgggtcgacaaagtgctcgtggtgtacgtcgatgatgatgttcagttacgccgccttatggcacgtaacgggtttactgaagaagaagctctgaagcgcattcgttcacagtggcccagtgcagagaaagttaaacgtgcagacgctgtcatcgacaataatggcacggaggaagaaacccgccgccagctgctggccattttacaccagtgggatctgctgggtaagggtggctccggccaccatcatcaccatcactaatga

SEQ ID NO: 3578 - protein, 211 aa, synthetic construct
  REGION 1..211: note = Variant of 3'O-kinase
MAFTIGLTGGIAAGKSTVSAMMRELGLPVIDADEAARAVMRPGEEAYRQIVAAFGPGILRADGEIDRQKLGHIRFSDEQQRKVLNAIVGPAVLKKMLAEKEAHIRSGAKTVVLDIPLLFESGLTHWVDKVLVVYVDDDVQLRRLMARNGFTEEEALKRIRSQWPSAEKVKRADAVIDNNGTEEETRRQLLAILHQWDLLGKGGSGHHHHHH

SEQ ID NO: 3579 - DNA, 639 bp, synthetic construct
  misc_feature 1..639: note = Variant of 3'O-kinase
  source 1..639: mol_type = other DNA
atggcgtttaccattggtttaacaggagggatcgcagcgggcaaatcgactgtgagtgccatgatgcgtgaactgggtctgccggtcatcgatgctgacgaggcagcacgcgccgttatgcgtccaggcgaagaagcttatcgccagattgtagctgcgttcggtccgggcattcttcgtgccgatggcgagatcgatcgccagaaactgggtgcgatccgcttttcggacgaacaacaacgtaaggtgctgaatgcgattgtaggtcctgcagtcctgaagaagatgctcgctgagaaagaagctcatatccgctcaggcgccaagacggttgtgctggatatcccgctgctgttcgaatccggattgagccattgggtcgacaaagtgctcgtggtgtacgtcgatgatgatgttcagttacgccgccttatggcacgtaacgggtttactgaagaagaagctctgaagcgcattcgttcacagtggcccagtgcagagaaagttaaacgtgcagacgctgtcatcgacaataatggcacgattgaagaaacccgccgccagctgctggccattttacaccagtgggatctgctgggtaagggtggctccggccaccatcatcaccatcactaatga

SEQ ID NO: 3580 - protein, 211 aa, synthetic construct
  REGION 1..211: note = Variant of 3'O-kinase
MAFTIGLTGGIAAGKSTVSAMMRELGLPVIDADEAARAVMRPGEEAYRQIVAAFGPGILRADGEIDRQKLGAIRFSDEQQRKVLNAIVGPAVLKKMLAEKEAHIRSGAKTVVLDIPLLFESGLSHWVDKVLVVYVDDDVQLRRLMARNGFTEEEALKRIRSQWPSAEKVKRADAVIDNNGTIEETRRQLLAILHQWDLLGKGGSGHHHHHH

SEQ ID NO: 3581 - DNA, 639 bp, synthetic construct
  misc_feature 1..639: note = Variant of 3'O-kinase
  source 1..639: mol_type = other DNA
atggcgtttaccattggtttaacaggagggatcgcagcgggcaaatcgactgtgagtgccatgatgcgtgaactgggtctgccggtcatcgatgctgacgaggcagcacgcgccgttatgcgtccaggcgaagaaacgtatcgccagattgtagctgcgttcggtccgggcattcttcgtgccgatggcgagatcgatcgccagaaactgggtgctatccgcttttcggacgaacaacaacgtaagatgctgaatgcgattgtaggtcctgcagtcctgaagaaaatgctcgctgagaaagaagctcatatccgctcaggcgccaagacggttgtgctggatatcccgctgctgttcgaatccggattgacccattgggtcgacaaagtgctcgtggtgtacgtcgatgatgatgttcagttacgccgccttatggcacgtaacgggtttactgaagaagaagctctgaagcgcattcgttcacagtggcccagtgcggagaaagttaaacgtgcagacgctgtcatcgacaataatggcactattgaagaaacccgccgccagctggtggacattttacaccagtgggatctgctgggtaagggtggctccggccaccatcatcaccatcactaatga

SEQ ID NO: 3582 - protein, 211 aa, synthetic construct
  REGION 1..211: note = Variant of 3'O-kinase
MAFTIGLTGGIAAGKSTVSAMMRELGLPVIDADEAARAVMRPGEETYRQIVAAFGPGILRADGEIDRQKLGAIRFSDEQQRKMLNAIVGPAVLKKMLAEKEAHIRSGAKTVVLDIPLLFESGLTHWVDKVLVVYVDDDVQLRRLMARNGFTEEEALKRIRSQWPSAEKVKRADAVIDNNGTIEETRRQLVDILHQWDLLGKGGSGHHHHHH

SEQ ID NO: 3583 - DNA, 639 bp, synthetic construct
  misc_feature 1..639: note = Variant of 3'O-kinase
  source 1..639: mol_type = other DNA
atggcgtttaccattggtttaacaggagggatcgcagcgggcaaatcgactgtgagtgccatgatgcgtgaactgggtctgccggtcatcgatgctgacgaggcagcacgcgccgttatgcgtccaggcgaagaagcttatcgtcagattgtagctgcgttcggtccgggcattcttcgtgccgatggcgagatcgatcgccagaaactgggtgctatccgcttttcggacgaacaacaacgtaaggtgctgaatgcgattgtaggtcctgcagtcctgaagaagatgctcgctgagaaagaagctcatatccgctcaggcgccaagacggttgtgctggatatcccgctgctgttcgaatccggattgacccattgggtcgacaaagtgctcgtggtgtacgtcgatgatgatgttcagttacgccgccttatggcacgtaacgggtttactgaagaagaagctctgaagcgcattcgttcacagtggcccagtgcggagaaagttaaacgtgcagacgcttggatcgacaataatggcacgattgaagaaacccgccgccagctgctggccattttacaccagtgggatctgctgggtaagggtggctccggccaccatcatcaccatcactaatga

SEQ ID NO: 3584 - protein, 211 aa, synthetic construct
  REGION 1..211: note = Variant of 3'O-kinase
MAFTIGLTGGIAAGKSTVSAMMRELGLPVIDADEAARAVMRPGEEAYRQIVAAFGPGILRADGEIDRQKLGAIRFSDEQQRKVLNAIVGPAVLKKMLAEKEAHIRSGAKTVVLDIPLLFESGLTHWVDKVLVVYVDDDVQLRRLMARNGFTEEEALKRIRSQWPSAEKVKRADAWIDNNGTIEETRRQLLAILHQWDLLGKGGSGHHHHHH

SEQ ID NO: 3585 - DNA, 639 bp, synthetic construct
  misc_feature 1..639: note = Variant of 3'O-kinase
  source 1..639: mol_type = other DNA
atggcgtttaccattggtttaacaggagggatcgcagcgggcaaatcgactgtgagtgccatgatgcgtgaactgggtctgccggtcatcgatgctgacgaggcagcacgcgccgttatgcgtccaggcgaagaagcttatcgccagattgtagctgcgttcggtccgggcattcttcgtgccgatggcgagatcgatcgccagaaactgggtcatatccgcttttcggacgaacaacaacgtaaggtgctgaatgcgattgtaggtcctgcagtcctgaagaagatgctcgctgagaaagaagctcatatccgctcaggcgccaagacggttgtgctggatatcccgctgctgttcgaatccggattgacccattgggtcgacaaagtgctcgtggtgtacgtcgatgatgatgttcagttacgccgccttatggcacgtaacgggtttactgaagaagaagctctgaagcgcattcgttcacagtggcccagtgcagagaaagttaaacgtgcagacgctgtcatcgacaataatggcacgatcgaagaaacccgccgccagctgctggccattttacaccagtgggatctgctgggtaagggtggctccggccaccatcatcaccatcactaatga

SEQ ID NO: 3586 - protein, 211 aa, synthetic construct
  REGION 1..211: note = Variant of 3'O-kinase
MAFTIGLTGGIAAGKSTVSAMMRELGLPVIDADEAARAVMRPGEEAYRQIVAAFGPGILRADGEIDRQKLGHIRFSDEQQRKVLNAIVGPAVLKKMLAEKEAHIRSGAKTVVLDIPLLFESGLTHWVDKVLVVYVDDDVQLRRLMARNGFTEEEALKRIRSQWPSAEKVKRADAVIDNNGTIEETRRQLLAILHQWDLLGKGGSGHHHHHH

SEQ ID NO: 3587 - DNA, 639 bp, synthetic construct
  misc_feature 1..639: note = Variant of 3'O-kinase
  source 1..639: mol_type = other DNA
atggcgtttaccattggtttaacaggagggatcgcagcgggcaaatcgactgtgagtgccatgatgcgtgaactgggtctgccggtcatcgatgctgacgaggcagcacgcgccgttatgcgtccaggcgaagaagcttatcgccagattgtagctgcgttcggtccgggcattcttcgtgccgatggcgagatcgatcgccagaaactgggtcatatccgcttttcggacgaacaacaacgtaaggtgctgaatgcgattgtaggtcctgcagtcctgaagaagatgctcgctgagaaagaagctcatatccgctcaggcgccaagacggttgtgctggatatcccgctgctgttcgaatccggattgacccattgggtcgacaaagtgctcgtggtgtacgtcgatgatgatgttcagttacgccgccttatggcacgtaacgggtttactgaagaagaagctctgaagcgcattcgttcacagtggcccagtgaagagaaagttaaacgtgcagacgctgtcatcgacaataatggcacgattgaagaaacccgccgccagctgctggccattttacaccagtgggatctgctgggtaagggtggctccggccaccatcatcaccatcactaatga

SEQ ID NO: 3588 - protein, 211 aa, synthetic construct
  REGION 1..211: note = Variant of 3'O-kinase
MAFTIGLTGGIAAGKSTVSAMMRELGLPVIDADEAARAVMRPGEEAYRQIVAAFGPGILRADGEIDRQKLGHIRFSDEQQRKVLNAIVGPAVLKKMLAEKEAHIRSGAKTVVLDIPLLFESGLTHWVDKVLVVYVDDDVQLRRLMARNGFTEEEALKRIRSQWPSEEKVKRADAVIDNNGTIEETRRQLLAILHQWDLLGKGGSGHHHHHH

SEQ ID NO: 3589 - DNA, 639 bp, synthetic construct
  misc_feature 1..639: note = Variant of 3'O-kinase
  source 1..639: mol_type = other DNA
atggcgtttaccattggtttaacaggagggatcgcagcgggcaaatcgactgtgagtgccatgatgcgtgaactgggtctgccggtcatcgatgctgacgaggcagcacgcgccgttatgcgtccaggcgaagaagcttatcgccagattgtagctgcgttcggtccgggcattcttcgtgccgatggcgagatcgatcgccagaaactgggtgctatccgcttttcggacgaacaacaacgcaaggtgctgaatgcgattgtaggtcctgcagtcctgaagaagatgctcgctgagaaagaagctctgatccgctcaggcgccaagacggttgtgctggatatcccgctgctgttcgaatccggattgacccattgggtcgacaaagtgctcgtggtgtacgtcgatgatgatgttcagttacgccgccttatggcacgtaacgggtttactgaagaagaagctctgaagcgcattcgttcacagtggcccagtgcggagaaagttaaacgtgcagacgcttggatcgacaataatggcacgattgaagaaacccgccgccagctgctggccattttacaccagtgggatctgctggataagggtggctccggccaccatcatcaccatcactaatga

SEQ ID NO: 3590 - protein, 211 aa, synthetic construct
  REGION 1..211: note = Variant of 3'O-kinase
MAFTIGLTGGIAAGKSTVSAMMRELGLPVIDADEAARAVMRPGEEAYRQIVAAFGPGILRADGEIDRQKLGAIRFSDEQQRKVLNAIVGPAVLKKMLAEKEALIRSGAKTVVLDIPLLFESGLTHWVDKVLVVYVDDDVQLRRLMARNGFTEEEALKRIRSQWPSAEKVKRADAWIDNNGTIEETRRQLLAILHQWDLLDKGGSGHHHHHH

SEQ ID NO: 3591 - DNA, 639 bp, synthetic construct
  misc_feature 1..639: note = Variant of 3'O-kinase
  source 1..639: mol_type = other DNA
atggcgtttaccattggtttaacaggagggatcgcagcgggcaaatcgactgtgagtgccatgatgcgtgaactgggtctgccggtcatcgatgctgacgaggcagcacgcgccgttatgaagccaggcgaagaaacgtatcgccagattgtagctgcgttcggtccgggcattcttcgtgccgatggcgagatcgatcgccagaaactgggtgctatccgcttttcggacgaacaacaacgtaaggtgctgaattcgattgtaggtcctgcagtcctgaagattatgctcgctgagaaagaagctcatatccgctcaggcgccaagacgattgtgctggatatcccgctgctgttcgaatccggattgacccattgggtcgacaaagtgctcgtggtgtacgtcgatgatgatgttcagttacgccgccttatggcacgtaacgggtttactgaagaagaagctctgaagcgcattcgttcacagtggcccagtgcggagaaagttaaacgtgcagacgctgtcatcgacaataatggcactattgaagaaacccgccgccagctgctggccattttacaccagtgggatctgctgggtaagggtggctccggccaccatcatcaccatcactaatga

SEQ ID NO: 3592 - protein, 211 aa, synthetic construct
  REGION 1..211: note = Variant of 3'O-kinase
MAFTIGLTGGIAAGKSTVSAMMRELGLPVIDADEAARAVMKPGEETYRQIVAAFGPGILRADGEIDRQKLGAIRFSDEQQRKVLNSIVGPAVLKIMLAEKEAHIRSGAKTIVLDIPLLFESGLTHWVDKVLVVYVDDDVQLRRLMARNGFTEEEALKRIRSQWPSAEKVKRADAVIDNNGTIEETRRQLLAILHQWDLLGKGGSGHHHHHH

SEQ ID NO: 3593 - DNA, 639 bp, synthetic construct
  misc_feature 1..639: note = Variant of 3'O-kinase
  source 1..639: mol_type = other DNA
atggcgtttaccattggtttaacaggagggatcgcagcgggcaaatcgactgtgagtgccatgatgcgtgaactgggtctgccggtcatcgatgctgacgaggcagcacgcgccgttatgcgtccaggcgaagaagcttatcgccagattgtagctgcgttcggtccgggcattcttcgtgccgatggcgagatcgatcgccagaaactgggtgcgatccgcttttcggacgaacaacaacgtctggtgctgaatgcgattgtaggtcctgcagtcctgaagaagatgctcgctgagaaagaagctcatatccgctcaggcgccaagacggttgtgctggatatcccgctgctgttcgaatccggattgcagcattgggtcgacaaagtgctcgtggtgtacgtcgatgatgatgttcagttacgccgccttatggcacgtaacgggtttactgaagaagaagctctgaagcgcattcgttcacagtggcccagtctggagaaagttaaacgtgcagacgctgtcatcgacaataatggcacgattgaagaaacccgccgccagctgctggccattttacaccagtgggatctgctgggtaagggtggctccggccaccatcatcaccatcactaatga

SEQ ID NO: 3594 - protein, 211 aa, synthetic construct
  REGION 1..211: note = Variant of 3'O-kinase
MAFTIGLTGGIAAGKSTVSAMMRELGLPVIDADEAARAVMRPGEEAYRQIVAAFGPGILRADGEIDRQKLGAIRFSDEQQRLVLNAIVGPAVLKKMLAEKEAHIRSGAKTVVLDIPLLFESGLQHWVDKVLVVYVDDDVQLRRLMARNGFTEEEALKRIRSQWPSLEKVKRADAVIDNNGTIEETRRQLLAILHQWDLLGKGGSGHHHHHH

SEQ ID NO: 3595 - DNA, 639 bp, synthetic construct
  misc_feature 1..639: note = Variant of 3'O-kinase
  source 1..639: mol_type = other DNA
atggcgtttaccattggtttaacaggagggatcgcagcgggcaaatcgactgtgagtgccatgatgcgtgaactgggtctgccggtcatcgatgctgacgaggcagcacgcgccgttatgcgtccaggcgaagaagcttatcgccagattgtagctgcgttcggtccgggcattcttcgtgccgatggcgagatcgatcgccagaaactgggtcatatccgcttttcggacgaacaacaacgtctggtgctgaatgcgattgtaggtcctgcagtcctgaagaagatgctcgctgagaaagaagctcatatccgctcaggcgccaagacggttgtgctggatatcccgctgctgttcgaatccggattgacccattgggtcgacaaagtgctcgtggtgtacgtcgatgatgatgttcagttacgccgccttatggcacgtaacgggtttactgaagaagaagctctgaagcgcattcgttcacagtggcccagtatcgagaaagttaaacgtgcagacgctgtcatcgacaataatggcacgatcgaagaaacccgccgccagctgctggccattttacaccagtgggatctgctgggtaagggtggctccggccaccatcatcaccatcactaatga

SEQ ID NO: 3596 - protein, 211 aa, synthetic construct
  REGION 1..211: note = Variant of 3'O-kinase
MAFTIGLTGGIAAGKSTVSAMMRELGLPVIDADEAARAVMRPGEEAYRQIVAAFGPGILRADGEIDRQKLGHIRFSDEQQRLVLNAIVGPAVLKKMLAEKEAHIRSGAKTVVLDIPLLFESGLTHWVDKVLVVYVDDDVQLRRLMARNGFTEEEALKRIRSQWPSIEKVKRADAVIDNNGTIEETRRQLLAILHQWDLLGKGGSGHHHHHH

SEQ ID NO: 3597 - DNA, 639 bp, synthetic construct
  misc_feature 1..639: note = Variant of 3'O-kinase
  source 1..639: mol_type = other DNA
atggcgtttaccattggtttaacaggagggatcgcagcgggcaaatcgactgtgagtgccatgatgcgtgaactgggtctgccggtcatcgatgctgacgaggcagcacgcgccgttatgcgtccaggcgaagaagcttatcgccagattgtagctgcgttcggtccgggcattcttcgtgccgatggcgagatcgatcgccagaaactgggtgcgatccgcttttcggacgaacaacaacgtaaggtgctgaatgcgattgtaggtcctgcagtcctgaagaagatgctcgctgagaaagaagctcatatccgctcaggcgccaagacggttgtgctggatatcccgctgctgttcgaatccggattgacccattgggtcgacaaagtgctcgtggtgtacgtcgatgatgatgttcagttacgccgccttatggcacgtaacgggtttactgaagaagaagctctgaagcgcattcgttcacagtggcccagtctggagaaagttaaacgtgcagacgctgtcatcgacaataatggcacgattgaagaaacccgccgccagctgctggccattttacaccagtgggatctgctgggtaagggtggctccggccaccatcatcaccatcactaatga

SEQ ID NO: 3598 - protein, 211 aa, synthetic construct
  REGION 1..211: note = Variant of 3'O-kinase
MAFTIGLTGGIAAGKSTVSAMMRELGLPVIDADEAARAVMRPGEEAYRQIVAAFGPGILRADGEIDRQKLGAIRFSDEQQRKVLNAIVGPAVLKKMLAEKEAHIRSGAKTVVLDIPLLFESGLTHWVDKVLVVYVDDDVQLRRLMARNGFTEEEALKRIRSQWPSLEKVKRADAVIDNNGTIEETRRQLLAILHQWDLLGKGGSGHHHHHH

SEQ ID NO: 3599 - DNA, 639 bp, synthetic construct
  misc_feature 1..639: note = Variant of 3'O-kinase
  source 1..639: mol_type = other DNA
atggcgtttaccattggtttaacaggagggatcgcagcgggcaaatcgactgtgagtgccatgatgcgtgaactgggtctgccggtcatcgatgctgacgaggcagcacgcgccgttatgcgtccaggcgaagaaacgtatcgccagattgtagctgcgttcggtccgggcattcttcgtgccgatggcgagatcgatcgccagaaactgggtgctatccgcttttcggacgaacaacaacgtaaggtgctgaatgcgattgtaggtcctgcagtcctgaagaagatgctcgctgagaaagaagctcatatccgctcaggcgccaagacggttgtgctggatatcccgctgctgttcgaatccggattgacccattgggtcgacaaagtgctcgtggtgtacgtcgatgatgatgttcagttacgccgccttatggcacgtaacgggtttactgaagaagaagctctgaagcgcattcgttcacagtggcccagtgcggagaaagttaaacgtgcagacgctgtcatcgacaataatggcactattgaagaaacccgccgccagctggtggacattttacaccagtgggatctgctgggtaagggtggctccggccaccatcatcaccatcactaatga

SEQ ID NO: 3600 - protein, 211 aa, synthetic construct
  REGION 1..211: note = Variant of 3'O-kinase
MAFTIGLTGGIAAGKSTVSAMMRELGLPVIDADEAARAVMRPGEETYRQIVAAFGPGILRADGEIDRQKLGAIRFSDEQQRKVLNAIVGPAVLKKMLAEKEAHIRSGAKTVVLDIPLLFESGLTHWVDKVLVVYVDDDVQLRRLMARNGFTEEEALKRIRSQWPSAEKVKRADAVIDNNGTIEETRRQLVDILHQWDLLGKGGSGHHHHHH

SEQ ID NO: 3601 - DNA, 639 bp, synthetic construct
  misc_feature 1..639: note = Variant of 3'O-kinase
  source 1..639: mol_type = other DNA
atggcgtttaccattggtttaacaggagggatcgcagcgggcaaatcgactgtgagtgccatgatgcgtgaactgggtctgccggtcatcgatgctgacgaggcagcacgcgccgttatgaagccaggcgaagaagcgtatcgccagattgtagctgcgttcggtccgggcattcttcgtgccgatggcgagatcgatcgccagaaactgggtgctatccgcttttcggacgaacaacaacgtaaggtgctgaatgcgattgtaggtcctgcagtcctgaagaaaatgctcgctgagaaagaagctcatatccgctcaggcgccaagacggttgtgctggatatcccgctgctgttcgaatccggattgacccattgggtcgacaaagtgctcgtggtgtacgtcgatgatgatgttcagttacgccgccttatggcacgtaacgggtttactgaagaagaagctctgaagcgcattcgttcacagtggcccagtgcggagaaagttaaacgtgcagacgctgtcatcgacaataatggcactattgaagaaacccgccgccagctggtggccattttacaccagtgggatctgctgggtaagggtggctccggccaccatcatcaccatcactaatga

SEQ ID NO: 3602 - protein, 211 aa, synthetic construct
  REGION 1..211: note = Variant of 3'O-kinase
MAFTIGLTGGIAAGKSTVSAMMRELGLPVIDADEAARAVMKPGEEAYRQIVAAFGPGILRADGEIDRQKLGAIRFSDEQQRKVLNAIVGPAVLKKMLAEKEAHIRSGAKTVVLDIPLLFESGLTHWVDKVLVVYVDDDVQLRRLMARNGFTEEEALKRIRSQWPSAEKVKRADAVIDNNGTIEETRRQLVAILHQWDLLGKGGSGHHHHHH

SEQ ID NO: 3603 - DNA, 639 bp, synthetic construct
  misc_feature 1..639: note = Variant of 3'O-kinase
  source 1..639: mol_type = other DNA
atggcgtttaccattggtttaacaggagggatcgcagcgggcaaatcgactgtgagtgccatgatgcgtgaactgggtctgccggtcatcgatgctgacgaggcagcacgcgccgttatgcgtccaggcgaagaagcttatcgccagattgtagctgcgttcggtccgggcattcttcgtgccgatggcgagatcgatcgccagaaactgggtgcgatccgcttttcggacgaacaacaacgtaaggtgctgaatgcgattgtgggtcctgaagtcctgaagaagatgctcgctgagaaagaagctcatatccgctcaggcgccaagacggttgtgctggatatcccgctgctgttcgaatccggattgacccattgggtcgacaaagtgctcgtggtgtacgtcgatgatgatgttcagttacgccgccttatggcacgtaacgggtttactgaagaagaagctctgaagcgcattcgttcacagtggcccagtgaagagaaagttaaacgtgcagacgctgtcatcgacaataatggcacgattgaagaaacccgccgccagctgctggccattttacaccagtgggatctgctgggtaagggtggctccggccaccatcatcaccatcactaatga

SEQ ID NO: 3604 - protein, 211 aa, synthetic construct
  REGION 1..211: note = Variant of 3'O-kinase
MAFTIGLTGGIAAGKSTVSAMMRELGLPVIDADEAARAVMRPGEEAYRQIVAAFGPGILRADGEIDRQKLGAIRFSDEQQRKVLNAIVGPEVLKKMLAEKEAHIRSGAKTVVLDIPLLFESGLTHWVDKVLVVYVDDDVQLRRLMARNGFTEEEALKRIRSQWPSEEKVKRADAVIDNNGTIEETRRQLLAILHQWDLLGKGGSGHHHHHH

SEQ ID NO: 3605 - DNA, 639 bp, synthetic construct
  misc_feature 1..639: note = Variant of 3'O-kinase
  source 1..639: mol_type = other DNA
atggcgtttaccattggtttaacaggagggatcgcagcgggcaaatcgactgtgagtgccatgatgcgtgaactgggtctgccggtcatcgatgctgacgaggcagcacgcgccgttatgaagccaggcgaagaagcgtatcgccagattgtagctgcgttcggtccgggcattcttcgtgccgatggcgagatcgatcgccagaaactgggtgctatccgcttttcggacgaacaacaacgtaaggtgctgaattcgattgtaggtcctgcagtcctgaagaaaatgctcgctgagaaagaagctcatatccgctcaggcgccaagacggttgtgctggatatcccgctgctgttcgaatccggattgacccattgggtcgacaaagtgctcgtggtgtacgtcgatgatgatgttcagttacgccgccttatggcacgtaacgggtttactgaagaagaagctctgaagcgcattcgttcacagtggcccagtgcggagaaagttaaacgtgcagacgctgtcatcgacaataatggcaatattgaagaaacccgccgccagctggtggacattttacaccagtgggatctgctgggtaagggtggctccggccaccatcatcaccatcactaatga

SEQ ID NO: 3606 - protein, 211 aa, synthetic construct
  REGION 1..211: note = Variant of 3'O-kinase
MAFTIGLTGGIAAGKSTVSAMMRELGLPVIDADEAARAVMKPGEEAYRQIVAAFGPGILRADGEIDRQKLGAIRFSDEQQRKVLNSIVGPAVLKKMLAEKEAHIRSGAKTVVLDIPLLFESGLTHWVDKVLVVYVDDDVQLRRLMARNGFTEEEALKRIRSQWPSAEKVKRADAVIDNNGNIEETRRQLVDILHQWDLLGKGGSGHHHHHH

SEQ ID NO: 3607 - DNA, 639 bp, synthetic construct
  misc_feature 1..639: note = Variant of 3'O-kinase
  source 1..639: mol_type = other DNA
atggcgtttaccattggtttaacaggagggatcgcagcgggcaaatcgactgtgagtgccatgatgcgtgaactgggtctgccggtcatcgatgctgacgaggcagcacgcgccgttatgcgtccaggcgaagaaacgtatcgccagattgtagctgcgttcggtccgggcattcttcgtgccgatggcgagatcgatcgccagaaactgggtgctatccgcttttcggacgaacaacaacgtaaggtgctgaattcgattgtaggtcctgcagtcctgaagaaaatgctcgctgagaaagaagctcatatccgctcaggcgccaagacggttgtgctggatatcccgctgctgttcgaatccggattgacccattgggtcgacaaagtgctcgtggtgtacgtcgatgatgatgttcagttacgccgccttatggcacgtaacgggtttactgaagaagaagctctgaagcgcattcgttcacagtggcccagtgcggagaaagttaaacgtgcagacgctgtcatcgacaataatggcaatattgaagaaacccgccgccagctggtggacattttacaccagtgggatctgctgggtaagggtggctccggccaccatcatcaccatcactaatga

SEQ ID NO: 3608 - protein, 211 aa, synthetic construct
  REGION 1..211: note = Variant of 3'O-kinase
MAFTIGLTGGIAAGKSTVSAMMRELGLPVIDADEAARAVMRPGEETYRQIVAAFGPGILRADGEIDRQKLGAIRFSDEQQRKVLNSIVGPAVLKKMLAEKEAHIRSGAKTVVLDIPLLFESGLTHWVDKVLVVYVDDDVQLRRLMARNGFTEEEALKRIRSQWPSAEKVKRADAVIDNNGNIEETRRQLVDILHQWDLLGKGGSGHHHHHH

SEQ ID NO: 3609 - DNA, 639 bp, synthetic construct
  misc_feature 1..639: note = Variant of 3'O-kinase
  source 1..639: mol_type = other DNA
atggcgtttaccattggtttaacaggagggatcgcagcgggcaaatcgactgtgagtgccatgatgcgtgaactgggtctgccggtcatcgatgctgacgaggcagcacgcgccgttatgcgtccaggcgaagaagcttatcgccagattgtagctgcgttcggtccgggcattcttcgtgccgatggcgagatcgatcgccagaaactgggtgcgatccgcttttcggacgaacaacaacgtaaggtgctgaatgcgattctgggtcctgcagtcctgaagaagatgctcgctgagaaagaagctcatatccgctcaggcgccaagacggttgtgctggatatcccgctgctgttcgaatccggattgacccattgggtcgacaaagtgctcgtggtgtacgtcgatgatgatgttcagttacgccgccttatggcacgtaacgggtttactgaagaagaagctctgaagcgcattcgttcacagtggcccagtgaagagaaagttaaacgtgcagacgctgtcatcgacaataatggcacgattgaagaaacccgccgccagctgctggccattttacaccagtgggatctgctgggtaagggtggctccggccaccatcatcaccatcactaatga

SEQ ID NO: 3610 - protein, 211 aa, synthetic construct
  REGION 1..211: note = Variant of 3'O-kinase
MAFTIGLTGGIAAGKSTVSAMMRELGLPVIDADEAARAVMRPGEEAYRQIVAAFGPGILRADGEIDRQKLGAIRFSDEQQRKVLNAILGPAVLKKMLAEKEAHIRSGAKTVVLDIPLLFESGLTHWVDKVLVVYVDDDVQLRRLMARNGFTEEEALKRIRSQWPSEEKVKRADAVIDNNGTIEETRRQLLAILHQWDLLGKGGSGHHHHHH

SEQ ID NO: 3611 - DNA, 639 bp, synthetic construct
  misc_feature 1..639: note = Variant of 3'O-kinase
  source 1..639: mol_type = other DNA
atggcgtttaccattggtttaacaggagggatcgcagcgggcaaatcgactgtgagtgccatgatgcgtgaactgggtctgccggtcatcgatgctgacgaggcagcacgcgccgttatgaagccaggcgaagaaacgtatcgccagattgtagctgcgttcggtccgggcattcttcgtgccgatggcgagatcgatcgccagaaactgggtgctatccgcttttcggacgaacaacaacgtaaggtgctgaattcgattgtaggtcctgcagtcctgaagctgatgctcgctgagaaagaagctcatatccgctcaggcgccaagacggttgtgctggatatcccgctgctgttcgaatccggattgacccattgggtcgacaaagtgctcgtggtgtacgtcgatgatgatgttcagttacgccgccttatggcacgtaacgggtttactgaagaagaagctctgaagcgcattcgttcacagtggcccagtgcggagaaagttaaacgtgcagacgctgtcatcgacaataatggcacgattgaagaaacccgccgccagctgctggacattttacaccagtgggatctgctgggtaagggtggctccggccaccatcatcaccatcactaatga

SEQ ID NO: 3612 - protein, 211 aa, synthetic construct
  REGION 1..211: note = Variant of 3'O-kinase
MAFTIGLTGGIAAGKSTVSAMMRELGLPVIDADEAARAVMKPGEETYRQIVAAFGPGILRADGEIDRQKLGAIRFSDEQQRKVLNSIVGPAVLKLMLAEKEAHIRSGAKTVVLDIPLLFESGLTHWVDKVLVVYVDDDVQLRRLMARNGFTEEEALKRIRSQWPSAEKVKRADAVIDNNGTIEETRRQLLDILHQWDLLGKGGSGHHHHHH

SEQ ID NO: 3613 - DNA, 639 bp, synthetic construct
  misc_feature 1..639: note = Variant of 3'O-kinase
  source 1..639: mol_type = other DNA
atggcgtttaccattggtttaacaggagggatcgcagcgggcaaatcgactgtgagtgccatgatgcgtgaactgggtctgccggtcatcgatgctgacgaggcagcacgcgccgttatgcgtccaggcgaagaagcttatcgccagattgtagctgcgttcggtccgggcattcttcgtgccgatggcgagatcgatcgccagaaactgggtcatatccgcttttcggacgaacaacaacgtaaggtgctgaatgcgattgtaggtcctgcagtcctgaagaagatgctcgctgagaaagaagctcatatccgctcaggcgccaagacggttgtgctggatatcccgctgctgttcgaatccggattgcagcattgggtcgacaaagtgctcgtggtgtacgtcgatgatgatgttcagttacgccgccttatggcacgtaacgggtttactgaagaagaagctctgaagcgcattcgttcacagtggcccagtatcgagaaagttaaacgtgcagacgctgtcatcgacaataatggcacgattgaagaaacccgccgccagctgctggccattttacaccagtgggatctgctgggtaagggtggctccggccaccatcatcaccatcactaatga

SEQ ID NO: 3614 - protein, 211 aa, synthetic construct
  REGION 1..211: note = Variant of 3'O-kinase
MAFTIGLTGGIAAGKSTVSAMMRELGLPVIDADEAARAVMRPGEEAYRQIVAAFGPGILRADGEIDRQKLGHIRFSDEQQRKVLNAIVGPAVLKKMLAEKEAHIRSGAKTVVLDIPLLFESGLQHWVDKVLVVYVDDDVQLRRLMARNGFTEEEALKRIRSQWPSIEKVKRADAVIDNNGTIEETRRQLLAILHQWDLLGKGGSGHHHHHH

SEQ ID NO: 3615 - DNA, 639 bp, synthetic construct
  misc_feature 1..639: note = Variant of 3'O-kinase
  source 1..639: mol_type = other DNA
atggcgtttaccattggtttaacaggagggatcgcagcgggcaaatcgactgtgagtgccatgatgcgtgaactgggtctgccggtcatcgatgctgacgaggcagcacgcgccgttatgcgtccaggcgaagaagcttatcatcagattgtagctgcgttcggtccgggcattcttcgtgccgatggcgagatcgatcgccagaaactgggtgctatccgcttttcggacgaacaacaactgaaggtgctgaatgcgattgtaggtcctgcagtcctgaagaagatgctcgctgagaaagaagctctgatccgctcaggcgccaagacggttgtgctggatatcccgctgctgttcgaatccggattgacccattgggtcgacaaagtgctcgtggtgtacgttgatgatgatgttcagttacgccgccttatggcacgtaacgggtttactgaagaagaagctctgaagcgcattcgttcacagtggcccagtgcggagaaagttaaacgtgcagacgcttggatcgacaataatggcacgattgaagaaacccgccgccagctgctggccattttacaccagtgggatctgctgtgtaagggtggctccggccaccatcatcaccatcactaatga

SEQ ID NO: 3616 - protein, 211 aa, synthetic construct
  REGION 1..211: note = Variant of 3'O-kinase
MAFTIGLTGGIAAGKSTVSAMMRELGLPVIDADEAARAVMRPGEEAYHQIVAAFGPGILRADGEIDRQKLGAIRFSDEQQLKVLNAIVGPAVLKKMLAEKEALIRSGAKTVVLDIPLLFESGLTHWVDKVLVVYVDDDVQLRRLMARNGFTEEEALKRIRSQWPSAEKVKRADAWIDNNGTIEETRRQLLAILHQWDLLCKGGSGHHHHHH

SEQ ID NO: 3617 - DNA, 639 bp, synthetic construct
  misc_feature 1..639: note = Variant of 3'O-kinase
  source 1..639: mol_type = other DNA
atggcgtttaccattggtttaacaggagggatcgcagcgggcaaatcgactgtgagtgccatgatgcgtgaactgggtctgccggtcatcgatgctgacgaggcagcacgcgccgttatgcgtccaggcgaagaagcttatcgccagattgtagctgcgttcggtccgggcattcttcgtgccgatggcgagatcgatcgccagaaactgggtgctatccgcttttcggacgaacaacaacgtaaggtgctgaatgcgattgtaggtcctgcagtcctgaagaagatgctcgctgagaaagaagctcatatccgctcaggcgccaagacggttgtgctggatatcccgctgctgttcgaatccggattgacccatttggtcgacaaagtgctcgtggtgtacgtcgatgatgatgttcagttacgccgccttatggcacgtaacgggtttactgaagaagaagctctgaagcgcattcgttcacagtggcccagtgcggagaaagttaaacgtgcagacgctgtcatcgacaataatggcacgattgaagaaacccgccgccagctgctggccattttacaccagtgggatctgctgggtaagggtggctccggccaccatcatcaccatcactaatga

SEQ ID NO: 3618 - protein, 211 aa, synthetic construct
  REGION 1..211: note = Variant of 3'O-kinase
MAFTIGLTGGIAAGKSTVSAMMRELGLPVIDADEAARAVMRPGEEAYRQIVAAFGPGILRADGEIDRQKLGAIRFSDEQQRKVLNAIVGPAVLKKMLAEKEAHIRSGAKTVVLDIPLLFESGLTHLVDKVLVVYVDDDVQLRRLMARNGFTEEEALKRIRSQWPSAEKVKRADAVIDNNGTIEETRRQLLAILHQWDLLGKGGSGHHHHHH

SEQ ID NO: 3619 - DNA, 639 bp, synthetic construct
  misc_feature 1..639: note = Variant of 3'O-kinase
  source 1..639: mol_type = other DNA
atggcggtgaccattggtttaacaggagggatcgcagcgggcaaatcgactgtgagtgccatgatgcgtgaactgggtctgccggtcatcgatgctgacgaggcagcacgcgccgttatgcgtccaggcgaagaagcttatcgccagattgtagctgcgttcggtccgggcattcttcgtgccgatggcgagatcgatcgccagaaactgggtgctatccgcttttcggacgaacaacaacgtaaggtgctgaatgcgattgtaggtcctgcagtcctgaagaagatgctcgctgagaaagaagctcatatccgctcaggcgccaagacggttgtgctggatatcccgctgctgttcgaatccggattgacccattgggtcgacaaagtgctcgtggtgtacgtcgatgatgatgttcagttacgccgccttatggcacgtaacgggtttactgaagaagaagctctgaagcgcattcgttcacagtggcccagtgcggagaaagttaaacgtgcagacgctgtcatcgacaataatggcacgattgaagaaacccgccgccagctgctggccattttacaccagtgggatctgctgggtaagggtggctccggccaccatcatcaccatcactaatga

SEQ ID NO: 3620 - protein, 211 aa, synthetic construct
  REGION 1..211: note = Variant of 3'O-kinase
MAVTIGLTGGIAAGKSTVSAMMRELGLPVIDADEAARAVMRPGEEAYRQIVAAFGPGILRADGEIDRQKLGAIRFSDEQQRKVLNAIVGPAVLKKMLAEKEAHIRSGAKTVVLDIPLLFESGLTHWVDKVLVVYVDDDVQLRRLMARNGFTEEEALKRIRSQWPSAEKVKRADAVIDNNGTIEETRRQLLAILHQWDLLGKGGSGHHHHHH

SEQ ID NO: 3621 - DNA, 639 bp, synthetic construct
  misc_feature 1..639: note = Variant of 3'O-kinase
  source 1..639: mol_type = other DNA
atggcgtttaccattggtttaacaggagggatcgcagcgggcaaatcgactgtgagtgccatgatgcgtgaactgggtctgccggtcatcgatgctgacgaggcagcacgcgccgttatgcgtccaggcgaagaagcttatcgccagattgtagctgcgttcggtccgggcattcttcgtgaggatggcgagatcgatcgccagaaactgggtgctatccgcttttcggacgaacaacaacgtaaggtgctgaatgcgattgtaggtcctgcagtcctgaagaagatgctcgctgagaaagaagctcatatccgctcaggcgccaagacggttgtgctggatatcccgctgctgttcgaatccggattgacccattgggtcgacaaagtgctcgtggtgtacgtcgatgatgatgttcagttacgccgccttatggcacgtaacgggtttactgaagaagaagctctgaagcgcattcgttcacagtggcccagtgcggagaaagttaaacgtgcagacgctgtcatcgacaataatggcacgattgaagaaacccgccgccagctgctggccattttacaccagtgggatctgctgggtaagggtggctccggccaccatcatcaccatcactaatga

SEQ ID NO: 3622 - protein, 211 aa, synthetic construct
  REGION 1..211: note = Variant of 3'O-kinase
MAFTIGLTGGIAAGKSTVSAMMRELGLPVIDADEAARAVMRPGEEAYRQIVAAFGPGILREDGEIDRQKLGAIRFSDEQQRKVLNAIVGPAVLKKMLAEKEAHIRSGAKTVVLDIPLLFESGLTHWVDKVLVVYVDDDVQLRRLMARNGFTEEEALKRIRSQWPSAEKVKRADAVIDNNGTIEETRRQLLAILHQWDLLGKGGSGHHHHHH

SEQ ID NO: 3623 - DNA, 639 bp, synthetic construct
  misc_feature 1..639: note = Variant of 3'O-kinase
  source 1..639: mol_type = other DNA
atggcgtttaccattggtttaacaggagggatcgcagcgggcaaatcgactgtgagtgccatgatgcgtgaactgggtctgccggtcatcgatgctgacgaggcagcacgcgccgttatgcgtccaggcgaagaagcttatcgccagattgtagctgcgttcggtccgggcattcttcgtgccgatggcgagatcgatcgccagaaactgggtgctatccgcttttcggacgaacaacaacgtaaggtgctgaatgcgattgtaggtcctgcagtcctgaagaagatgctcgctgagaaagaagctcatatccgctcaggcgccaagacggttgtgctggatatcccgctgctgttcgaatccggattgacccattgggtcgacaaagtgctcgtggtgtacgtcgatgatgatgttcagttacgccgccttatggcacgtaacgggtttactgaagaagaagctctgaagcgcattcgttcacagtggcccagtgcggagaaagttaaaatggcagacgctgtcatcgacaataatggcacgattgaagaaacccgccgccagctgctggccattttacaccagtgggatctgctgggtaagggtggctccggccaccatcatcaccatcactaatga

SEQ ID NO: 3624 - protein, 211 aa, synthetic construct
  REGION 1..211: note = Variant of 3'O-kinase
MAFTIGLTGGIAAGKSTVSAMMRELGLPVIDADEAARAVMRPGEEAYRQIVAAFGPGILRADGEIDRQKLGAIRFSDEQQRKVLNAIVGPAVLKKMLAEKEAHIRSGAKTVVLDIPLLFESGLTHWVDKVLVVYVDDDVQLRRLMARNGFTEEEALKRIRSQWPSAEKVKMADAVIDNNGTIEETRRQLLAILHQWDLLGKGGSGHHHHHH

SEQ ID NO: 3625 - DNA, 639 bp, synthetic construct
  misc_feature 1..639: note = Variant of 3'O-kinase
  source 1..639: mol_type = other DNA
atggcgtttaccattggtttaacaggagggatcgcagcgggcaaatcgactgtgagtgccatgatgcgtgaactgggtctgccggtcatcgatgctgacgaggcagcacgcgccgttatgcgtccaggcgaagaagcttatcgccagattgtagctgcgttcggtccgggcattcttcgtgccgatggcgagatcgatcgccagaaactgggtgctatccgcttttcggacgaacaacaacgtaaggtgctgaatgcgattgtaggtcctgcagtcctgaagaagatgctcgctgagaaagaagctcatatccgctcaggcgccaagacggttgtgctggatatcccgctgctgttcgaatccggattgacccattgtgtcgacaaagtgctcgtggtgtacgtcgatgatgatgttcagttacgccgccttatggcacgtaacgggtttactgaagaagaagctctgaagcgcattcgttcacagtggcccagtgcggagaaagttaaacgtgcagacgctgtcatcgacaataatggcacgattgaagaaacccgccgccagctgctggccattttacaccagtgggatctgctgggtaagggtggctccggccaccatcatcaccatcactaatga

SEQ ID NO: 3626 - protein, 211 aa, synthetic construct
  REGION 1..211: note = Variant of 3'O-kinase
MAFTIGLTGGIAAGKSTVSAMMRELGLPVIDADEAARAVMRPGEEAYRQIVAAFGPGILRADGEIDRQKLGAIRFSDEQQRKVLNAIVGPAVLKKMLAEKEAHIRSGAKTVVLDIPLLFESGLTHCVDKVLVVYVDDDVQLRRLMARNGFTEEEALKRIRSQWPSAEKVKRADAVIDNNGTIEETRRQLLAILHQWDLLGKGGSGHHHHHH

SEQ ID NO: 3627 - DNA, 639 bp, synthetic construct
  misc_feature 1..639: note = Variant of 3'O-kinase
  source 1..639: mol_type = other DNA
atggcgtttaccattggtttaacaggagggatcgcagcgggcaaatcgactgtgagtgccatgatgcgtgaactgggtctgccggtcatcgatgctgacgaggcagcacgcgccgttatgcgtccaggcgaagaagcttatcgccagattgtagctgcgttcggtccgggcattcttcgtgccgatggcgagatcgatcgccagaaactgggtgctatccgcttttcggacgaacaacaacgtaaggtgctgaatgcgattgtaggtcctgcagtcctgaagaagatgctcgctgagaaagaagctcatatcaagtcaggcgccaagacggttgtgctggatatcccgctgctgttcgaatccggattgacccattgggtcgacaaagtgctcgtggtgtacgtcgatgatgatgttcagttacgccgccttatggcacgtaacgggtttactgaagaagaagctctgaagcgcattcgttcacagtggcccagtgcggagaaagttaaacgtgcagacgctgtcatcgacaataatggcacgattgaagaaacccgccgccagctgctggccattttacaccagtgggatctgctgggtaagggtggctccggccaccatcatcaccatcactaatga

SEQ ID NO: 3628 - protein, 211 aa, synthetic construct
  REGION 1..211: note = Variant of 3'O-kinase
MAFTIGLTGGIAAGKSTVSAMMRELGLPVIDADEAARAVMRPGEEAYRQIVAAFGPGILRADGEIDRQKLGAIRFSDEQQRKVLNAIVGPAVLKKMLAEKEAHIKSGAKTVVLDIPLLFESGLTHWVDKVLVVYVDDDVQLRRLMARNGFTEEEALKRIRSQWPSAEKVKRADAVIDNNGTIEETRRQLLAILHQWDLLGKGGSGHHHHHH

SEQ ID NO: 3629 - DNA, 639 bp, synthetic construct
  misc_feature 1..639: note = Variant of 3'O-kinase
  source 1..639: mol_type = other DNA
atggcgtttaccattggtttaacaggagggatcgcagcgggcaaatcgactgtgagtgccatgatgcgtgaactgggtctgccggtcatcgatgctgacgaggcagcacgcgccgttatgcgtccaggcgaagaagcttatcgccagattgtagctgcgttcggtccgggcattcttcgtgccgatggcgagatcgatcgccagaaactgggtgctatccgcttttcggacgaacaacaacgtaaggtgctgaatgcgattgtaggtcctgcagtcctgaagaagatgctcgctgagaaagaagctcatatccgctcaggcgccaagacggttgtgctggatatcccgctgctgttcgaatccggattgacccattgggtcgacaaagtgctcgtggtgtacgtcgatgatgatgttcagttaaagcgccttatggcacgtaacgggtttactgaagaagaagctctgaagcgcattcgttcacagtggcccagtgcggagaaagttaaacgtgcagacgctgtcatcgacaataatggcacgattgaagaaacccgccgccagctgctggccattttacaccagtgggatctgctgggtaagggtggctccggccaccatcatcaccatcactaatga

SEQ ID NO: 3630 - protein, 211 aa, synthetic construct
  REGION 1..211: note = Variant of 3'O-kinase
MAFTIGLTGGIAAGKSTVSAMMRELGLPVIDADEAARAVMRPGEEAYRQIVAAFGPGILRADGEIDRQKLGAIRFSDEQQRKVLNAIVGPAVLKKMLAEKEAHIRSGAKTVVLDIPLLFESGLTHWVDKVLVVYVDDDVQLKRLMARNGFTEEEALKRIRSQWPSAEKVKRADAVIDNNGTIEETRRQLLAILHQWDLLGKGGSGHHHHHH

SEQ ID NO: 3631 - DNA, 639 bp, synthetic construct
  misc_feature 1..639: note = Variant of 3'O-kinase
  source 1..639: mol_type = other DNA
atggcgtttaccattggtttaacaggagggatcgcagcgggcaaatcgactgtgagtgccatgatgcgtgaactgggtctgccggtcatcgatgctgacgaggcagcacgcgccgttatgcgtccaggcgaagaagcttatcgccagattgtagctgcgttcggtccgggcattcttcgtgccgatggcgagatcgatcgccagaaactgggtgctatccgcttttcggacgaacaacaacgtaaggtgctgaatgcgattgtaggtcctgcagtcctgaagaagatgctcgctgagaaagaagctcatatccgctcaggcgccaagacggttgtgctggatatcccgctgctgttcgaatccggattgacccatgtggtcgacaaagtgctcgtggtgtacgtcgatgatgatgttcagttacgccgccttatggcacgtaacgggtttactgaagaagaagctctgaagcgcattcgttcacagtggcccagtgcggagaaagttaaacgtgcagacgctgtcatcgacaataatggcacgattgaagaaacccgccgccagctgctggccattttacaccagtgggatctgctgggtaagggtggctccggccaccatcatcaccatcactaatga

SEQ ID NO: 3632 - protein, 211 aa, synthetic construct
  REGION 1..211: note = Variant of 3'O-kinase
MAFTIGLTGGIAAGKSTVSAMMRELGLPVIDADEAARAVMRPGEEAYRQIVAAFGPGILRADGEIDRQKLGAIRFSDEQQRKVLNAIVGPAVLKKMLAEKEAHIRSGAKTVVLDIPLLFESGLTHVVDKVLVVYVDDDVQLRRLMARNGFTEEEALKRIRSQWPSAEKVKRADAVIDNNGTIEETRRQLLAILHQWDLLGKGGSGHHHHHH

SEQ ID NO: 3633 - DNA, 639 bp, synthetic construct
  misc_feature 1..639: note = Variant of 3'O-kinase
  source 1..639: mol_type = other DNA
atggcgtttaccattggtttaacaggagggatcgcagcgggcaaatcgactgtgagtgccatgatgcgtgaactgggtctgccggtcatcgatgctgacgaggcagcacgcgccgttatgcgtccaggcgaagaagcttatcgccagattgtagctgcgttcggtccgggcattcttcgtgccgatggcgagatcgatcgccagaaactgggtgctatccgcttttcggacgaacaacaacgtaaggtgctgaatgcgattgtaggtcctgcagtcctgaagaagatgctcgctgagaaagaagctcatatccgctcaggcgccaagacggttgtgctggatatcccgctgctgttcgaatccggattgacccagtgggtcgacaaagtgctcgtggtgtacgtcgatgatgatgttcagttacgccgccttatggcacgtaacgggtttactgaagaagaagctctgaagcgcattcgttcacagtggcccagtgcggagaaagttaaacgtgcagacgctgtcatcgacaataatggcacgattgaagaaacccgccgccagctgctggccattttacaccagtgggatctgctgggtaagggtggctccggccaccatcatcaccatcactaatga

SEQ ID NO: 3634 - protein, 211 aa, synthetic construct
  REGION 1..211: note = Variant of 3'O-kinase
MAFTIGLTGGIAAGKSTVSAMMRELGLPVIDADEAARAVMRPGEEAYRQIVAAFGPGILRADGEIDRQKLGAIRFSDEQQRKVLNAIVGPAVLKKMLAEKEAHIRSGAKTVVLDIPLLFESGLTQWVDKVLVVYVDDDVQLRRLMARNGFTEEEALKRIRSQWPSAEKVKRADAVIDNNGTIEETRRQLLAILHQWDLLGKGGSGHHHHHH

SEQ ID NO: 3635 - DNA, 639 bp, synthetic construct
  misc_feature 1..639: note = Variant of 3'O-kinase
  source 1..639: mol_type = other DNA
atggcgtttaccattggtttaacaggagggatcgcagcgggcaaatcgactgtgagtgccatgatgcgtgaactgggtctgccggtcatcgatgctgacgaggcaaggcgcgccgttatgcgtccaggcgaagaagcttatcgccagattgtagctgcgttcggtccgggcattcttcgtgccgatggcgagatcgatcgccagaaactgggtgctatccgcttttcggacgaacaacaacgtaaggtgctgaatgcgattgtaggtcctgcagtcctgaagaagatgctcgctgagaaagaagctcatatccgctcaggcgccaagacggttgtgctggatatcccgctgctgttcgaatccggattgacccattgggtcgacaaagtgctcgtggtgtacgtcgatgatgatgttcagttacgccgccttatggcacgtaacgggtttactgaagaagaagctctgaagcgcattcgttcacagtggcccagtgcggagaaagttaaacgtgcagacgctgtcatcgacaataatggcacgattgaagaaacccgccgccagctgctggccattttacaccagtgggatctgctgggtaagggtggctccggccaccatcatcaccatcactaatga

SEQ ID NO: 3636 - protein, 211 aa, synthetic construct
  REGION 1..211: note = Variant of 3'O-kinase
MAFTIGLTGGIAAGKSTVSAMMRELGLPVIDADEARRAVMRPGEEAYRQIVAAFGPGILRADGEIDRQKLGAIRFSDEQQRKVLNAIVGPAVLKKMLAEKEAHIRSGAKTVVLDIPLLFESGLTHWVDKVLVVYVDDDVQLRRLMARNGFTEEEALKRIRSQWPSAEKVKRADAVIDNNGTIEETRRQLLAILHQWDLLGKGGSGHHHHHH

SEQ ID NO: 3637 - DNA, 639 bp, synthetic construct
  misc_feature 1..639: note = Variant of 3'O-kinase
  source 1..639: mol_type = other DNA
atggcgtttaccattggtttaacaggagggatcgcagcgggcaaatcgactgtgagtgccatgatgcgtgaactgggtctgccggtcatcgatgctgacgaggcagcacgcgccgttatgcgtccaggcgaagaagcttatcgccagattgtagctgcgttcggtccgggcattcttcgtgccgatggcgagatcgatcgccagaaactgggtgctatccgcttttcggacgaacaacaacgtaaggtgctgaatgcgattgtaggtcctgcagtcctgaagaagatgctcgctgagaaagaagctcatatccgctcaggcgccaagacggttgtgctggatatcccgctgctgttcgaatccggattgacccatgcggtcgacaaagtgctcgtggtgtacgtcgatgatgatgttcagttacgccgccttatggcacgtaacgggtttactgaagaagaagctctgaagcgcattcgttcacagtggcccagtgcggagaaagttaaacgtgcagacgctgtcatcgacaataatggcacgattgaagaaacccgccgccagctgctggccattttacaccagtgggatctgctgggtaagggtggctccggccaccatcatcaccatcactaatga

SEQ ID NO: 3638 - protein, 211 aa, synthetic construct
  REGION 1..211: note = Variant of 3'O-kinase
MAFTIGLTGGIAAGKSTVSAMMRELGLPVIDADEAARAVMRPGEEAYRQIVAAFGPGILRADGEIDRQKLGAIRFSDEQQRKVLNAIVGPAVLKKMLAEKEAHIRSGAKTVVLDIPLLFESGLTHAVDKVLVVYVDDDVQLRRLMARNGFTEEEALKRIRSQWPSAEKVKRADAVIDNNGTIEETRRQLLAILHQWDLLGKGGSGHHHHHH

SEQ ID NO: 3639 - DNA, 639 bp, synthetic construct
  misc_feature 1..639: note = Variant of 3'O-kinase
  source 1..639: mol_type = other DNA
atggcgtttaccattggtttaacaggagggatcgcagcgggcaaatcgactgtgagtgccatgatgcgtgaactgggtctgccggtcatcgatgctgacgaggcagcacgcgccgttatgcgtccaggcgaagaagcttatcgccagatggtagctgcgttcggtccgggcattcttcgtgccgatggcgagatcgatcgccagaaactgggtgctatccgcttttcggacgaacaacaacgtaaggtgctgaatgcgattgtaggtcctgcagtcctgaagaagatgctcgctgagaaagaagctcatatccgctcaggcgccaagacggttgtgctggatatcccgctgctgttcgaatccggattgacccattgggtcgacaaagtgctcgtggtgtacgtcgatgatgatgttcagttacgccgccttatggcacgtaacgggtttactgaagaagaagctctgaagcgcattcgttcacagtggcccagtgcggagaaagttaaacgtgcagacgctgtcatcgacaataatggcacgattgaagaaacccgccgccagctgctggccattttacaccagtgggatctgctgggtaagggtggctccggccaccatcatcaccatcactaatga

SEQ ID NO: 3640 - protein, 211 aa, synthetic construct
  REGION 1..211: note = Variant of 3'O-kinase
MAFTIGLTGGIAAGKSTVSAMMRELGLPVIDADEAARAVMRPGEEAYRQMVAAFGPGILRADGEIDRQKLGAIRFSDEQQRKVLNAIVGPAVLKKMLAEKEAHIRSGAKTVVLDIPLLFESGLTHWVDKVLVVYVDDDVQLRRLMARNGFTEEEALKRIRSQWPSAEKVKRADAVIDNNGTIEETRRQLLAILHQWDLLGKGGSGHHHHHH

SEQ ID NO: 3641 - DNA, 639 bp, synthetic construct
  misc_feature 1..639: note = Variant of 3'O-kinase
  source 1..639: mol_type = other DNA
atggcgtttaccattggtttaacaggagggatcgcagcgggcaaatcgactgtgagtgccatgatgcgtgaactgggtctgccggtcatcgatgctgacgaggcagcacgcgccgttatgcgtccaggcgaagaagcttatcgccagattgtagctgcgttcggtccgggcattcttcgtgccgatggcgagatcgatcgccagaaactgggtgctatccgcttttcggacgaacaacaacgtaaggtgctgcgggcgattgtaggtcctgcagtcctgaagaagatgctcgctgagaaagaagctcatatccgctcaggcgccaagacggttgtgctggatatcccgctgctgttcgaatccggattgacccattgggtcgacaaagtgctcgtggtgtacgtcgatgatgatgttcagttacgccgccttatggcacgtaacgggtttactgaagaagaagctctgaagcgcattcgttcacagtggcccagtgcggagaaagttaaacgtgcagacgctgtcatcgacaataatggcacgattgaagaaacccgccgccagctgctggccattttacaccagtgggatctgctgggtaagggtggctccggccaccatcatcaccatcactaatga

SEQ ID NO: 3642 - protein, 211 aa, synthetic construct
  REGION 1..211: note = Variant of 3'O-kinase
MAFTIGLTGGIAAGKSTVSAMMRELGLPVIDADEAARAVMRPGEEAYRQIVAAFGPGILRADGEIDRQKLGAIRFSDEQQRKVLRAIVGPAVLKKMLAEKEAHIRSGAKTVVLDIPLLFESGLTHWVDKVLVVYVDDDVQLRRLMARNGFTEEEALKRIRSQWPSAEKVKRADAVIDNNGTIEETRRQLLAILHQWDLLGKGGSGHHHHHH

SEQ ID NO: 3643 - DNA, 639 bp, synthetic construct
  misc_feature 1..639: note = Variant of 3'O-kinase
  source 1..639: mol_type = other DNA
atggcgtttaccattggtttaacaggagggatcgcagcgggcaaatcgactgtgagtgccatgatgcgtgaactgggtctgccggtcatcgatgctgacgaggcagcacgcgccgttatgcgtccaggcgaagaagcttatcgccagattgtagctgcgttcggtccgggcattcttcgtgccgatggcgagatcgatcgccagaaactgggtgctatccgcttttcggacgaacaacaacgtaaggtgctgcttgcgattgtaggtcctgcagtcctgaagaagatgctcgctgagaaagaagctcatatccgctcaggcgccaagacggttgtgctggatatcccgctgctgttcgaatccggattgacccattgggtcgacaaagtgctcgtggtgtacgtcgatgatgatgttcagttacgccgccttatggcacgtaacgggtttactgaagaagaagctctgaagcgcattcgttcacagtggcccagtgcggagaaagttaaacgtgcagacgctgtcatcgacaataatggcacgattgaagaaacccgccgccagctgctggccattttacaccagtgggatctgctgggtaagggtggctccggccaccatcatcaccatcactaatga

SEQ ID NO: 3644 - protein, 211 aa, synthetic construct
  REGION 1..211: note = Variant of 3'O-kinase
MAFTIGLTGGIAAGKSTVSAMMRELGLPVIDADEAARAVMRPGEEAYRQIVAAFGPGILRADGEIDRQKLGAIRFSDEQQRKVLLAIVGPAVLKKMLAEKEAHIRSGAKTVVLDIPLLFESGLTHWVDKVLVVYVDDDVQLRRLMARNGFTEEEALKRIRSQWPSAEKVKRADAVIDNNGTIEETRRQLLAILHQWDLLGKGGSGHHHHHH

SEQ ID NO: 3645 - DNA, 639 bp, synthetic construct
  misc_feature 1..639: note = Variant of 3'O-kinase
  source 1..639: mol_type = other DNA
atggcgtttaccattggtttaacaggagggatcgcagcgggcaaatcgactgtgagtgccatgatgcgtgaactgggtctgccggtcatcgatgctgacgaggcagcacgcgccgttatgcgtccaggcgaagaagcttatcgccagattgtagctgcgttcggtccgggcattcttcgtgccgatggcgagatcgatcgccagaaactgggtgctatccgcttttcggacgctcaacaacgtaaggtgctgaatgcgattgtaggtcctgcagtcctgaagaagatgctcgctgagaaagaagctcatatccgctcaggcgccaagacggttgtgctggatatcccgctgctgttcgaatccggattgacccattgggtcgacaaagtgctcgtggtgtacgtcgatgatgatgttcagttacgccgccttatggcacgtaacgggtttactgaagaagaagctctgaagcgcattcgttcacagtggcccagtgcggagaaagttaaacgtgcagacgctgtcatcgacaataatggcacgattgaagaaacccgccgccagctgctggccattttacaccagtgggatctgctgggtaagggtggctccggccaccatcatcaccatcactaatga

SEQ ID NO: 3646 - protein, 211 aa, synthetic construct
  REGION 1..211: note = Variant of 3'O-kinase
MAFTIGLTGGIAAGKSTVSAMMRELGLPVIDADEAARAVMRPGEEAYRQIVAAFGPGILRADGEIDRQKLGAIRFSDAQQRKVLNAIVGPAVLKKMLAEKEAHIRSGAKTVVLDIPLLFESGLTHWVDKVLVVYVDDDVQLRRLMARNGFTEEEALKRIRSQWPSAEKVKRADAVIDNNGTIEETRRQLLAILHQWDLLGKGGSGHHHHHH

SEQ ID NO: 3647 - DNA, 639 bp, synthetic construct
  misc_feature 1..639: note = Variant of 3'O-kinase
  source 1..639: mol_type = other DNA
atggcgtttaccattggtttaacaggagggatcgcagcgggcaaatcgactgtgagtgccatgatgcgtgaactgggtctgccggtcatcgatgctgacgaggcagcacgcgccgttatgcgtccaggcgaagaagcttatcgccagattgtagctgcgttcggtccgggcattcttcgtgccgatggcgagatcgatcgccagaaactgggtgctatccgcttttcggacgaacaacaacgtaaggtgctgaatgcgattgtaggtcctgcagtcctgaagaagatgctcgctgagaaagaagctcatatccgctcaggcgccaagacggttgtgctggatatcccgctgctgttcgaatccgcgttgacccattgggtcgacaaagtgctcgtggtgtacgtcgatgatgatgttcagttacgccgccttatggcacgtaacgggtttactgaagaagaagctctgaagcgcattcgttcacagtggcccagtgcggagaaagttaaacgtgcagacgctgtcatcgacaataatggcacgattgaagaaacccgccgccagctgctggccattttacaccagtgggatctgctgggtaagggtggctccggccaccatcatcaccatcactaatga

SEQ ID NO: 3648 - protein, 211 aa, synthetic construct
  REGION 1..211: note = Variant of 3'O-kinase
MAFTIGLTGGIAAGKSTVSAMMRELGLPVIDADEAARAVMRPGEEAYRQIVAAFGPGILRADGEIDRQKLGAIRFSDEQQRKVLNAIVGPAVLKKMLAEKEAHIRSGAKTVVLDIPLLFESALTHWVDKVLVVYVDDDVQLRRLMARNGFTEEEALKRIRSQWPSAEKVKRADAVIDNNGTIEETRRQLLAILHQWDLLGKGGSGHHHHHH

SEQ ID NO: 3649 - DNA, 639 bp, synthetic construct
  misc_feature 1..639: note = Variant of 3'O-kinase
  source 1..639: mol_type = other DNA
atggcgtttaccattggtttaacaggagggatcgcagcgggcaaatcgactgtgagtgccatgatgcgtgaactgggtctgccggtcatcgatgctgacgaggcagcacgcgccgttatgcgtccaggcgaagaagcttatcgccagattgtagctgcgttcggtccgggcattcttcgtgccgatggcgagatcgatcgccagaaactgggtgctatccgcttttcggacgaacaacaacgtaaggtgctgaatgcgattgtaggtcctgcagtcctgaagaagatgctcgctgagaaagaagctcatatccgctcaggcgccaagacggttgtgctggatatcccgctgctgttcgaatccggattgacccattgggtcgacaaagtgctcgtggtgtacgtcgatgatgatgttcagttacgccgccttatggcacgtaacgggtttactgaagaagaagctctgaagcgcattcgttcacagtggcccagtgcggagaaagttaaacgtgcagacgctgtcatcgacaataatggcacgattgaagaaacccgccgccagctgctggccattttacaccagtgggatctgctgggtaagggttgttccggccaccatcatcaccatcactaatga

SEQ ID NO: 3650 - protein, 211 aa, synthetic construct
  REGION 1..211: note = Variant of 3'O-kinase
MAFTIGLTGGIAAGKSTVSAMMRELGLPVIDADEAARAVMRPGEEAYRQIVAAFGPGILRADGEIDRQKLGAIRFSDEQQRKVLNAIVGPAVLKKMLAEKEAHIRSGAKTVVLDIPLLFESGLTHWVDKVLVVYVDDDVQLRRLMARNGFTEEEALKRIRSQWPSAEKVKRADAVIDNNGTIEETRRQLLAILHQWDLLGKGCSGHHHHHH

SEQ ID NO: 3651 - DNA, 639 bp, synthetic construct
  misc_feature 1..639: note = Variant of 3'O-kinase
  source 1..639: mol_type = other DNA
atggcgtttaccattggtttaacaggagggatcgcagcgggcaaatcgactgtgagtgccatgatgcgtgaactgggtctgccggtcatcgatgctgacgaggcagcacgcgccgttatgcgtccaggcgaagaagcttatcgccagattgtagctgcgttcggtccgggcattcttcgtgccgatggcgagatcgatcgccagaaactgggtgctatccgcttttcggacgaacaacaacgtaaggtgctgaatgcgattgtaggtcctgcagtcctgaagaagatgctcgctgagtgggaagctcatatccgctcaggcgccaagacggttgtgctggatatcccgctgctgttcgaatccggattgacccattgggtcgacaaagtgctcgtggtgtacgtcgatgatgatgttcagttacgccgccttatggcacgtaacgggtttactgaagaagaagctctgaagcgcattcgttcacagtggcccagtgcggagaaagttaaacgtgcagacgctgtcatcgacaataatggcacgattgaagaaacccgccgccagctgctggccattttacaccagtgggatctgctgggtaagggtggctccggccaccatcatcaccatcactaatga

SEQ ID NO: 3652 - protein, 211 aa, synthetic construct
  REGION 1..211: note = Variant of 3'O-kinase
MAFTIGLTGGIAAGKSTVSAMMRELGLPVIDADEAARAVMRPGEEAYRQIVAAFGPGILRADGEIDRQKLGAIRFSDEQQRKVLNAIVGPAVLKKMLAEWEAHIRSGAKTVVLDIPLLFESGLTHWVDKVLVVYVDDDVQLRRLMARNGFTEEEALKRIRSQWPSAEKVKRADAVIDNNGTIEETRRQLLAILHQWDLLGKGGSGHHHHHH

SEQ ID NO: 3653 - DNA, 639 bp, synthetic construct
  misc_feature 1..639: note = Variant of 3'O-kinase
  source 1..639: mol_type = other DNA
atggcgtttaccattggtttaacaggagggatcgcagcgggcaaatcgactgtgagtgccatgatgcgtgaactgggtctgccggtcatcgatgctgacgaggcagcacgcgccgttatgcgtccaggcgaagaagcttatcgccagattgtagctgcgttcggtccgggcattcttcgtgccgatggcgagatcgatcgccagaaactgggtgctatccgcttttcggacgaacaacaacgtaaggtgctggcggcgattgtaggtcctgcagtcctgaagaagatgctcgctgagaaagaagctcatatccgctcaggcgccaagacggttgtgctggatatcccgctgctgttcgaatccggattgacccattgggtcgacaaagtgctcgtggtgtacgtcgatgatgatgttcagttacgccgccttatggcacgtaacgggtttactgaagaagaagctctgaagcgcattcgttcacagtggcccagtgcggagaaagttaaacgtgcagacgctgtcatcgacaataatggcacgattgaagaaacccgccgccagctgctggccattttacaccagtgggatctgctgggtaagggtggctccggccaccatcatcaccatcactaatga

SEQ ID NO: 3654 - protein, 211 aa, synthetic construct
  REGION 1..211: note = Variant of 3'O-kinase
MAFTIGLTGGIAAGKSTVSAMMRELGLPVIDADEAARAVMRPGEEAYRQIVAAFGPGILRADGEIDRQKLGAIRFSDEQQRKVLAAIVGPAVLKKMLAEKEAHIRSGAKTVVLDIPLLFESGLTHWVDKVLVVYVDDDVQLRRLMARNGFTEEEALKRIRSQWPSAEKVKRADAVIDNNGTIEETRRQLLAILHQWDLLGKGGSGHHHHHH

SEQ ID NO: 3655 - DNA, 639 bp, synthetic construct
  misc_feature 1..639: note = Variant of 3'O-kinase
  source 1..639: mol_type = other DNA
atggcgtttaccattggtttaacaggagggatcgcagcgggcaaatcgactgtgagtgccatgatgcgtgaactgggtctgccggtcatcgatgctgacgaggcagcacgcgccgttatgcgtccaggcgaagaagcttatcgccagattgtagctgcgttcggtccgggcattcttcgtgccgatggcgagatcgatcgccagaaactgggtgctatccgcttttcggacgaacaacaacgtaaggtgctgaatgcgattgtaggtcctgcagtcctgaagaagatgctcgctgagaaagaagctcatatccgctcaggcgccaagacggttgtgctggatatcccgctgctgttcgaatccggattgacccattgggtcgacaaagtgctcgtggtgtacgtcgatgatgatgttcagttacgccgccttatggcacgtaacgggtttactgaagaagaagctctgaagcgcattcgttcacagtggcccagtgcggagaaagttaaacgtgcagacgctgtcatcgacaataatggcacgattgaagaaacccgccgccagctgctgtgtattttacaccagtgggatctgctgggtaagggtggctccggccaccatcatcaccatcactaatga

SEQ ID NO: 3656 - protein, 211 aa, synthetic construct
  REGION 1..211: note = Variant of 3'O-kinase
MAFTIGLTGGIAAGKSTVSAMMRELGLPVIDADEAARAVMRPGEEAYRQIVAAFGPGILRADGEIDRQKLGAIRFSDEQQRKVLNAIVGPAVLKKMLAEKEAHIRSGAKTVVLDIPLLFESGLTHWVDKVLVVYVDDDVQLRRLMARNGFTEEEALKRIRSQWPSAEKVKRADAVIDNNGTIEETRRQLLCILHQWDLLGKGGSGHHHHHH

SEQ ID NO: 3657 - DNA, 639 bp, synthetic construct
  misc_feature 1..639: note = Variant of 3'O-kinase
  source 1..639: mol_type = other DNA
atggcgtgtaccattggtttaacaggagggatcgcagcgggcaaatcgactgtgagtgccatgatgcgtgaactgggtctgccggtcatcgatgctgacgaggcagcacgcgccgttatgcgtccaggcgaagaagcttatcgccagattgtagctgcgttcggtccgggcattcttcgtgccgatggcgagatcgatcgccagaaactgggtgctatccgcttttcggacgaacaacaacgtaaggtgctgaatgcgattgtaggtcctgcagtcctgaagaagatgctcgctgagaaagaagctcatatccgctcaggcgccaagacggttgtgctggatatcccgctgctgttcgaatccggattgacccattgggtcgacaaagtgctcgtggtgtacgtcgatgatgatgttcagttacgccgccttatggcacgtaacgggtttactgaagaagaagctctgaagcgcattcgttcacagtggcccagtgcggagaaagttaaacgtgcagacgctgtcatcgacaataatggcacgattgaagaaacccgccgccagctgctggccattttacaccagtgggatctgctgggtaagggtggctccggccaccatcatcaccatcactaatga

SEQ ID NO: 3658 - protein, 211 aa, synthetic construct
  REGION 1..211: note = Variant of 3'O-kinase
MACTIGLTGGIAAGKSTVSAMMRELGLPVIDADEAARAVMRPGEEAYRQIVAAFGPGILRADGEIDRQKLGAIRFSDEQQRKVLNAIVGPAVLKKMLAEKEAHIRSGAKTVVLDIPLLFESGLTHWVDKVLVVYVDDDVQLRRLMARNGFTEEEALKRIRSQWPSAEKVKRADAVIDNNGTIEETRRQLLAILHQWDLLGKGGSGHHHHHH

SEQ ID NO: 3659 - DNA, 639 bp, synthetic construct
  misc_feature 1..639: note = Variant of 3'O-kinase
  source 1..639: mol_type = other DNA
atggcgtttaccattggtttaacaggagggatcgcagcgggcaaatcgactgtgagtgccatgatgcgtgaactgggtctgccggtcatcgatgctgacgaggcagcacgcgccgttatgcgtccaggcgaagaagcttatcgccagattgtagctgcgttcggtccgggcattcttcgtgccgatggcgagatcgatcgccagaaactgggtgctatccgcttttcggacgaacaacaacgtaaggtgctgaatgcgattgtaggtcctgcagtcctgaagaagatgctcgctgagaaagaagctcatatccgctcaggcgccaagacggttgtgctggatatcccgctgctgttcgaatccggattgacccattgggtcgacaaagtgctcgtggtgtacgtcgatgatgatgttcagttacgccgccttatggcacgtaacgggtttactgaagaagaagctctgaagcgcattcgttcacagtggcccagtgcggagaaagttaaacgtgcagacgctgtcatcgacaataatggcacgattgaagaaacccgccgccagctgctggccattttacaccagtgggatctgctgggtaagggtggcgcgggccaccatcatcaccatcactaatga

SEQ ID NO: 3660 - protein, 211 aa, synthetic construct
  REGION 1..211: note = Variant of 3'O-kinase
MAFTIGLTGGIAAGKSTVSAMMRELGLPVIDADEAARAVMRPGEEAYRQIVAAFGPGILRADGEIDRQKLGAIRFSDEQQRKVLNAIVGPAVLKKMLAEKEAHIRSGAKTVVLDIPLLFESGLTHWVDKVLVVYVDDDVQLRRLMARNGFTEEEALKRIRSQWPSAEKVKRADAVIDNNGTIEETRRQLLAILHQWDLLGKGGAGHHHHHH

SEQ ID NO: 3661 - DNA, 639 bp, synthetic construct
  misc_feature 1..639: note = Variant of 3'O-kinase
  source 1..639: mol_type = other DNA
atggcgtttaccattggtttaacaggagggatcgcagcgggcaaatcgactgtgagtgccatgatgcgtgaactgggtctgccggtcatcgatgctgacgaggcagcacgcgccgttatgcgtccaggcgaagaagcttatcgccagattgtagctgcgttcggtccgggcattcttcgtgccgatggcgagatcgatcgccagaaactgggtgctatccgcttttcggacgaacaacaacgtaaggtgctgaatgcgattgtaggtcctgcagtcctgaagaagatggcggctgagaaagaagctcatatccgctcaggcgccaagacggttgtgctggatatcccgctgctgttcgaatccggattgacccattgggtcgacaaagtgctcgtggtgtacgtcgatgatgatgttcagttacgccgccttatggcacgtaacgggtttactgaagaagaagctctgaagcgcattcgttcacagtggcccagtgcggagaaagttaaacgtgcagacgctgtcatcgacaataatggcacgattgaagaaacccgccgccagctgctggccattttacaccagtgggatctgctgggtaagggtggctccggccaccatcatcaccatcactaatga

SEQ ID NO: 3662 - protein, 211 aa, synthetic construct
  REGION 1..211: note = Variant of 3'O-kinase
MAFTIGLTGGIAAGKSTVSAMMRELGLPVIDADEAARAVMRPGEEAYRQIVAAFGPGILRADGEIDRQKLGAIRFSDEQQRKVLNAIVGPAVLKKMAAEKEAHIRSGAKTVVLDIPLLFESGLTHWVDKVLVVYVDDDVQLRRLMARNGFTEEEALKRIRSQWPSAEKVKRADAVIDNNGTIEETRRQLLAILHQWDLLGKGGSGHHHHHH

SEQ ID NO: 3663 - DNA, 639 bp, synthetic construct
  misc_feature 1..639: note = Variant of 3'O-kinase
  source 1..639: mol_type = other DNA
atggcgtttaccattggtttaacaggagggatcgcagcgggcaaatcgactgtgagtgccatgatgcgtgaactgggtctgccggtcatcgatggggacgaggcagcacgcgccgttatgcgtccaggcgaagaagcttatcgccagattgtagctgcgttcggtccgggcattcttcgtgccgatggcgagatcgatcgccagaaactgggtgctatccgcttttcggacgaacaacaacgtaaggtgctgaatgcgattgtaggtcctgcagtcctgaagaagatgctcgctgagaaagaagctcatatccgctcaggcgccaagacggttgtgctggatatcccgctgctgttcgaatccggattgacccattgggtcgacaaagtgctcgtggtgtacgtcgatgatgatgttcagttacgccgccttatggcacgtaacgggtttactgaagaagaagctctgaagcgcattcgttcacagtggcccagtgcggagaaagttaaacgtgcagacgctgtcatcgacaataatggcacgattgaagaaacccgccgccagctgctggccattttacaccagtgggatctgctgggtaagggtggctccggccaccatcatcaccatcactaatga

SEQ ID NO: 3664 - protein, 211 aa, synthetic construct
  REGION 1..211: note = Variant of 3'O-kinase
MAFTIGLTGGIAAGKSTVSAMMRELGLPVIDGDEAARAVMRPGEEAYRQIVAAFGPGILRADGEIDRQKLGAIRFSDEQQRKVLNAIVGPAVLKKMLAEKEAHIRSGAKTVVLDIPLLFESGLTHWVDKVLVVYVDDDVQLRRLMARNGFTEEEALKRIRSQWPSAEKVKRADAVIDNNGTIEETRRQLLAILHQWDLLGKGGSGHHHHHH

SEQ ID NO: 3665 - DNA, 639 bp, synthetic construct
  misc_feature 1..639: note = Variant of 3'O-kinase
  source 1..639: mol_type = other DNA
atggcggataccattggtttaacaggagggatcgcagcgggcaaatcgactgtgagtgccatgatgcgtgaactgggtctgccggtcatcgatgctgacgaggcagcacgcgccgttatgcgtccaggcgaagaagcttatcgccagattgtagctgcgttcggtccgggcattcttcgtgccgatggcgagatcgatcgccagaaactgggtgctatccgcttttcggacgaacaacaacgtaaggtgctgaatgcgattgtaggtcctgcagtcctgaagaagatgctcgctgagaaagaagctcatatccgctcaggcgccaagacggttgtgctggatatcccgctgctgttcgaatccggattgacccattgggtcgacaaagtgctcgtggtgtacgtcgatgatgatgttcagttacgccgccttatggcacgtaacgggtttactgaagaagaagctctgaagcgcattcgttcacagtggcccagtgcggagaaagttaaacgtgcagacgctgtcatcgacaataatggcacgattgaagaaacccgccgccagctgctggccattttacaccagtgggatctgctgggtaagggtggctccggccaccatcatcaccatcactaatga

SEQ ID NO: 3666 - protein, 211 aa, synthetic construct
  REGION 1..211: note = Variant of 3'O-kinase
MADTIGLTGGIAAGKSTVSAMMRELGLPVIDADEAARAVMRPGEEAYRQIVAAFGPGILRADGEIDRQKLGAIRFSDEQQRKVLNAIVGPAVLKKMLAEKEAHIRSGAKTVVLDIPLLFESGLTHWVDKVLVVYVDDDVQLRRLMARNGFTEEEALKRIRSQWPSAEKVKRADAVIDNNGTIEETRRQLLAILHQWDLLGKGGSGHHHHHH

SEQ ID NO: 3667 - DNA, 639 bp, synthetic construct
  misc_feature 1..639: note = Variant of 3'O-kinase
  source 1..639: mol_type = other DNA
atggcgtttaccattggtttaacaggagggatcgcagcgggcaaatcgactgtgagtgccatgatgcgtgaactgggtctgccggtcatcgatgctgacgaggcagcacgcgccgttatgcgtccaggcgaagaagcttatcgccagattgtagctgcgttcggtccgggcctgcttcgtgccgatggcgagatcgatcgccagaaactgggtgctatccgcttttcggacgaacaacaacgtaaggtgctgaatgcgattgtaggtcctgcagtcctgaagaagatgctcgctgagaaagaagctcatatccgctcaggcgccaagacggttgtgctggatatcccgctgctgttcgaatccggattgacccattgggtcgacaaagtgctcgtggtgtacgtcgatgatgatgttcagttacgccgccttatggcacgtaacgggtttactgaagaagaagctctgaagcgcattcgttcacagtggcccagtgcggagaaagttaaacgtgcagacgctgtcatcgacaataatggcacgattgaagaaacccgccgccagctgctggccattttacaccagtgggatctgctgggtaagggtggctccggccaccatcatcaccatcactaatga

SEQ ID NO: 3668 - protein, 211 aa, synthetic construct
  REGION 1..211: note = Variant of 3'O-kinase
MAFTIGLTGGIAAGKSTVSAMMRELGLPVIDADEAARAVMRPGEEAYRQIVAAFGPGLLRADGEIDRQKLGAIRFSDEQQRKVLNAIVGPAVLKKMLAEKEAHIRSGAKTVVLDIPLLFESGLTHWVDKVLVVYVDDDVQLRRLMARNGFTEEEALKRIRSQWPSAEKVKRADAVIDNNGTIEETRRQLLAILHQWDLLGKGGSGHHHHHH

SEQ ID NO: 3669 - DNA, 639 bp, synthetic construct
  misc_feature 1..639: note = Variant of 3'O-kinase
  source 1..639: mol_type = other DNA
atggcgtttaccattggtattacaggagggatcgcagcgggcaaatcgactgtgagtgccatgatgcgtgaactgggtctgccggtcatcgatgctgacgaggcagcacgcgccgttatgcgtccaggcgaagaagcttatcgccagattgtagctgcgttcggtccgggcattcttcgtgccgatggcgagatcgatcgccagaaactgggtgctatccgcttttcggacgaacaacaacgtaaggtgctgaatgcgattgtaggtcctgcagtcctgaagaagatgctcgctgagaaagaagctcatatccgctcaggcgccaagacggttgtgctggatatcccgctgctgttcgaatccggattgacccattgggtcgacaaagtgctcgtggtgtacgtcgatgatgatgttcagttacgccgccttatggcacgtaacgggtttactgaagaagaagctctgaagcgcattcgttcacagtggcccagtgcggagaaagttaaacgtgcagacgctgtcatcgacaataatggcacgattgaagaaacccgccgccagctgctggccattttacaccagtgggatctgctgggtaagggtggctccggccaccatcatcaccatcactaatga

SEQ ID NO: 3670 - protein, 211 aa, synthetic construct
  REGION 1..211: note = Variant of 3'O-kinase
MAFTIGITGGIAAGKSTVSAMMRELGLPVIDADEAARAVMRPGEEAYRQIVAAFGPGILRADGEIDRQKLGAIRFSDEQQRKVLNAIVGPAVLKKMLAEKEAHIRSGAKTVVLDIPLLFESGLTHWVDKVLVVYVDDDVQLRRLMARNGFTEEEALKRIRSQWPSAEKVKRADAVIDNNGTIEETRRQLLAILHQWDLLGKGGSGHHHHHH

SEQ ID NO: 3671 - DNA, 639 bp, synthetic construct
  misc_feature 1..639: note = Variant of 3'O-kinase
  source 1..639: mol_type = other DNA
atggcgtttaccattggtttaacaggagggatcgcagcgggcaaatcgactgtgagtgccatgatgcgtgaagcgggtctgccggtcatcgatgctgacgaggcagcacgcgccgttatgcgtccaggcgaagaagcttatcgccagattgtagctgcgttcggtccgggcattcttcgtgccgatggcgagatcgatcgccagaaactgggtgctatccgcttttcggacgaacaacaacgtaaggtgctgaatgcgattgtaggtcctgcagtcctgaagaagatgctcgctgagaaagaagctcatatccgctcaggcgccaagacggttgtgctggatatcccgctgctgttcgaatccggattgacccattgggtcgacaaagtgctcgtggtgtacgtcgatgatgatgttcagttacgccgccttatggcacgtaacgggtttactgaagaagaagctctgaagcgcattcgttcacagtggcccagtgcggagaaagttaaacgtgcagacgctgtcatcgacaataatggcacgattgaagaaacccgccgccagctgctggccattttacaccagtgggatctgctgggtaagggtggctccggccaccatcatcaccatcactaatga

SEQ ID NO: 3672 - protein, 211 aa, synthetic construct
  REGION 1..211: note = Variant of 3'O-kinase
MAFTIGLTGGIAAGKSTVSAMMREAGLPVIDADEAARAVMRPGEEAYRQIVAAFGPGILRADGEIDRQKLGAIRFSDEQQRKVLNAIVGPAVLKKMLAEKEAHIRSGAKTVVLDIPLLFESGLTHWVDKVLVVYVDDDVQLRRLMARNGFTEEEALKRIRSQWPSAEKVKRADAVIDNNGTIEETRRQLLAILHQWDLLGKGGSGHHHHHH

SEQ ID NO: 3673 - DNA, 639 bp, synthetic construct
  misc_feature 1..639: note = Variant of 3'O-kinase
  source 1..639: mol_type = other DNA
atgttgtttaccattggtttaacaggagggatcgcagcgggcaaatcgactgtgagtgccatgatgcgtgaactgggtctgccggtcatcgatgctgacgaggcagcacgcgccgttatgcgtccaggcgaagaagcttatcgccagattgtagctgcgttcggtccgggcattcttcgtgccgatggcgagatcgatcgccagaaactgggtgctatccgcttttcggacgaacaacaacgtaaggtgctgaatgcgattgtaggtcctgcagtcctgaagaagatgctcgctgagaaagaagctcatatccgctcaggcgccaagacggttgtgctggatatcccgctgctgttcgaatccggattgacccattgggtcgacaaagtgctcgtggtgtacgtcgatgatgatgttcagttacgccgccttatggcacgtaacgggtttactgaagaagaagctctgaagcgcattcgttcacagtggcccagtgcggagaaagttaaacgtgcagacgctgtcatcgacaataatggcacgattgaagaaacccgccgccagctgctggccattttacaccagtgggatctgctgggtaagggtggctccggccaccatcatcaccatcactaatga

SEQ ID NO: 3674 - protein, 211 aa, synthetic construct
  REGION 1..211: note = Variant of 3'O-kinase
MLFTIGLTGGIAAGKSTVSAMMRELGLPVIDADEAARAVMRPGEEAYRQIVAAFGPGILRADGEIDRQKLGAIRFSDEQQRKVLNAIVGPAVLKKMLAEKEAHIRSGAKTVVLDIPLLFESGLTHWVDKVLVVYVDDDVQLRRLMARNGFTEEEALKRIRSQWPSAEKVKRADAVIDNNGTIEETRRQLLAILHQWDLLGKGGSGHHHHHH

SEQ ID NO: 3675 - DNA, 639 bp, synthetic construct
  misc_feature 1..639: note = Variant of 3'O-kinase
  source 1..639: mol_type = other DNA
atggcgtttaccattggtttaacaggagggatcgcagcgggcaaatcgactgtgagtgccatgatgcgtgaactgggtctgccggtcatcgatgctgacgaggcagcacgcgccgttatgcgtccaggcgaagaagcttatcgccagattgtagctgcgttcggtccgggcattcttcgtgccgatggcgagatcgatcgccagaaactgggtgctatccgcttttcggacatgcaacaacgtaaggtgctgaatgcgattgtaggtcctgcagtcctgaagaagatgctcgctgagaaagaagctcatatccgctcaggcgccaagacggttgtgctggatatcccgctgctgttcgaatccggattgacccattgggtcgacaaagtgctcgtggtgtacgtcgatgatgatgttcagttacgccgccttatggcacgtaacgggtttactgaagaagaagctctgaagcgcattcgttcacagtggcccagtgcggagaaagttaaacgtgcagacgctgtcatcgacaataatggcacgattgaagaaacccgccgccagctgctggccattttacaccagtgggatctgctgggtaagggtggctccggccaccatcatcaccatcactaatga

SEQ ID NO: 3676 - protein, 211 aa, synthetic construct
  REGION 1..211: note = Variant of 3'O-kinase
MAFTIGLTGGIAAGKSTVSAMMRELGLPVIDADEAARAVMRPGEEAYRQIVAAFGPGILRADGEIDRQKLGAIRFSDMQQRKVLNAIVGPAVLKKMLAEKEAHIRSGAKTVVLDIPLLFESGLTHWVDKVLVVYVDDDVQLRRLMARNGFTEEEALKRIRSQWPSAEKVKRADAVIDNNGTIEETRRQLLAILHQWDLLGKGGSGHHHHHH

SEQ ID NO: 3677 - DNA, 639 bp, synthetic construct
  misc_feature 1..639: note = Variant of 3'O-kinase
  source 1..639: mol_type = other DNA
atggcgtttaccattggtttaacaggagggatcgcagcgggcaaatcgactgtgagtgccatgatgcgtgaactgggtctgccggtcatcgatgctgacgaggcagcacgcgccgttatgcgtccaggcgaagaagcttatcgccagattgtagctgcgttcggtccgggcattcttcgtgccgatggcgagatcgatcgccagaaactgggtgctatccgcttttcggacgaacaacaacgtaaggtgctgaatgcgattgtaggtcctgcagtcctgaagaagatgctcgctgagaaagaagctcatatccgctcaggcgccaagacggttgtgctggatatcccgctgctgttcgaatccggattgacccatggtgtcgacaaagtgctcgtggtgtacgtcgatgatgatgttcagttacgccgccttatggcacgtaacgggtttactgaagaagaagctctgaagcgcattcgttcacagtggcccagtgcggagaaagttaaacgtgcagacgctgtcatcgacaataatggcacgattgaagaaacccgccgccagctgctggccattttacaccagtgggatctgctgggtaagggtggctccggccaccatcatcaccatcactaatga

SEQ ID NO: 3678 - protein, 211 aa, synthetic construct
  REGION 1..211: note = Variant of 3'O-kinase
MAFTIGLTGGIAAGKSTVSAMMRELGLPVIDADEAARAVMRPGEEAYRQIVAAFGPGILRADGEIDRQKLGAIRFSDEQQRKVLNAIVGPAVLKKMLAEKEAHIRSGAKTVVLDIPLLFESGLTHGVDKVLVVYVDDDVQLRRLMARNGFTEEEALKRIRSQWPSAEKVKRADAVIDNNGTIEETRRQLLAILHQWDLLGKGGSGHHHHHH

SEQ ID NO: 3679 - DNA, 639 bp, synthetic construct
  misc_feature 1..639: note = Variant of 3'O-kinase
  source 1..639: mol_type = other DNA
atggcgtttaccattggtttaacaggagggatcgcagcgggcaaatcgactgtgagtgccatgatgcgtgaactgggtctgccggtcatcgatgctgacgaggcagcacgcgccgttatgcgtccaggcgaagaagcttatcgccagattgtagctgcgttcggtccgggcattcttcgtgccgatggcgagatcgatcgccagaaactgggtgctatccgcttttcggacgaacaacaacgtaaggtgctgaatgcgattgtaggtcctgcagtcctgaagaagatgctcgctgagaaagaagctcatatccgctcaggcgccaagacggttgtgctggatatcccgctgctgttcgaatccggattgacccattgggtcgacaaagtgctcgtggtgtacgtcgatgatgatgttcagttacgccgccttatggcacgtaacgggtttactgaagaagaagctctgaagcgcattcgttcacagtggcccagtgcggagaaagttgctcgtgcagacgctgtcatcgacaataatggcacgattgaagaaacccgccgccagctgctggccattttacaccagtgggatctgctgggtaagggtggctccggccaccatcatcaccatcactaatga

SEQ ID NO: 3680 - protein, 211 aa, synthetic construct
  REGION 1..211: note = Variant of 3'O-kinase
MAFTIGLTGGIAAGKSTVSAMMRELGLPVIDADEAARAVMRPGEEAYRQIVAAFGPGILRADGEIDRQKLGAIRFSDEQQRKVLNAIVGPAVLKKMLAEKEAHIRSGAKTVVLDIPLLFESGLTHWVDKVLVVYVDDDVQLRRLMARNGFTEEEALKRIRSQWPSAEKVARADAVIDNNGTIEETRRQLLAILHQWDLLGKGGSGHHHHHH

SEQ ID NO: 3681 - DNA, 639 bp, synthetic construct
  misc_feature 1..639: note = Variant of 3'O-kinase
  source 1..639: mol_type = other DNA
atggcgtttaccattggtttaacaggagggatcgcagcgggcaaatcgactgtgagtgccatgatgcgtgaactgggtctgccggtcatcgatgctgacgaggcagcacgcgccgttatgcgtccaggcgaagaagcttatcgccagattgtagctgcgttcggtccgggcattcttcgtgccgatggcgagatcgatcgccagaaactgggtgctatccgcttttcggacgaacaacaacgtaaggtgctgaatgcgattgtaggtcctgcagtcctgaagaagatgctcgctgagaaagaagctcatatccgctcaggcgccaagacggttgtgctggatatcccgctgctgttcgaatccggattgacccattgggtcgacaaagtgctcgtggtgtacgtcgatgatgatgttcagttacgccgccttatggcacgtaacgggtttactgaagaagaagctctgaagcgcattcgttcacagtggcccagtgcggagaaagttaaacgtgcagacgctgtcatcgacaataatggcacgattgaagaaacccgccgccagctgctggccattttacaccagtgggatctgctgggttgtggtggctccggccaccatcatcaccatcactaatga

SEQ ID NO: 3682 - protein, 211 aa, synthetic construct
  REGION 1..211: note = Variant of 3'O-kinase
MAFTIGLTGGIAAGKSTVSAMMRELGLPVIDADEAARAVMRPGEEAYRQIVAAFGPGILRADGEIDRQKLGAIRFSDEQQRKVLNAIVGPAVLKKMLAEKEAHIRSGAKTVVLDIPLLFESGLTHWVDKVLVVYVDDDVQLRRLMARNGFTEEEALKRIRSQWPSAEKVKRADAVIDNNGTIEETRRQLLAILHQWDLLGCGGSGHHHHHH

SEQ ID NO: 3683 - DNA, 639 bp, synthetic construct
  misc_feature 1..639: note = Variant of 3'O-kinase
  source 1..639: mol_type = other DNA
atggcgtttaccattggtttaacaggagggatcgcagcgggcaaatcgactgtgagtgccatgatgcgtgaactgggtctgactgtcatcgatgctgacgaggcagcacgcgccgttatgcgtccaggcgaagaagcttatcgccagattgtagctgcgttcggtccgggcattcttcgtgccgatggcgagatcgatcgccagaaactgggtgctatccgcttttcggacgaacaacaacgtaaggtgctgaatgcgattgtaggtcctgcagtcctgaagaagatgctcgctgagaaagaagctcatatccgctcaggcgccaagacggttgtgctggatatcccgctgctgttcgaatccggattgacccattgggtcgacaaagtgctcgtggtgtacgtcgatgatgatgttcagttacgccgccttatggcacgtaacgggtttactgaagaagaagctctgaagcgcattcgttcacagtggcccagtgcggagaaagttaaacgtgcagacgctgtcatcgacaataatggcacgattgaagaaacccgccgccagctgctggccattttacaccagtgggatctgctgggtaagggtggctccggccaccatcatcaccatcactaatga

SEQ ID NO: 3684 - protein, 211 aa, synthetic construct
  REGION 1..211: note = Variant of 3'O-kinase
MAFTIGLTGGIAAGKSTVSAMMRELGLTVIDADEAARAVMRPGEEAYRQIVAAFGPGILRADGEIDRQKLGAIRFSDEQQRKVLNAIVGPAVLKKMLAEKEAHIRSGAKTVVLDIPLLFESGLTHWVDKVLVVYVDDDVQLRRLMARNGFTEEEALKRIRSQWPSAEKVKRADAVIDNNGTIEETRRQLLAILHQWDLLGKGGSGHHHHHH

SEQ ID NO: 3685 - DNA, 639 bp, synthetic construct
  misc_feature 1..639: note = Variant of 3'O-kinase
  source 1..639: mol_type = other DNA
atggcgtttaccattggtttaacaggagggatcgcagcgggcaaatcgactgtgagtgccatgatgcgtgaactgggtctgccggtcatcgatgctgacgaggcagcacgcgccgttatgcgtccaggcgaagaagcttatcgccagattgtagctgcgttcggtccgggcattcttcgtgccgatggcgagatcgatcgccagaaactgggtgctatccgcttttcggacgaacaacaacgtaaggtgctgggggcgattgtaggtcctgcagtcctgaagaagatgctcgctgagaaagaagctcatatccgctcaggcgccaagacggttgtgctggatatcccgctgctgttcgaatccggattgacccattgggtcgacaaagtgctcgtggtgtacgtcgatgatgatgttcagttacgccgccttatggcacgtaacgggtttactgaagaagaagctctgaagcgcattcgttcacagtggcccagtgcggagaaagttaaacgtgcagacgctgtcatcgacaataatggcacgattgaagaaacccgccgccagctgctggccattttacaccagtgggatctgctgggtaagggtggctccggccaccatcatcaccatcactaatga

SEQ ID NO: 3686 - protein, 211 aa, synthetic construct
  REGION 1..211: note = Variant of 3'O-kinase
MAFTIGLTGGIAAGKSTVSAMMRELGLPVIDADEAARAVMRPGEEAYRQIVAAFGPGILRADGEIDRQKLGAIRFSDEQQRKVLGAIVGPAVLKKMLAEKEAHIRSGAKTVVLDIPLLFESGLTHWVDKVLVVYVDDDVQLRRLMARNGFTEEEALKRIRSQWPSAEKVKRADAVIDNNGTIEETRRQLLAILHQWDLLGKGGSGHHHHHH

SEQ ID NO: 3687 - DNA, 639 bp, synthetic construct
  misc_feature 1..639: note = Variant of 3'O-kinase
  source 1..639: mol_type = other DNA
atggcgtttaccattggtttaacaggagggatcgcagcgggcaaatcgactgtgagtgccatgatgcgtgaactgggtctgccggtcatcgatgctgacgaggcagcacgcgccgttatgcgtccaggcgaagaagcttatcgccagattctggctgcgttcggtccgggcattcttcgtgccgatggcgagatcgatcgccagaaactgggtgctatccgcttttcggacgaacaacaacgtaaggtgctgaatgcgattgtaggtcctgcagtcctgaagaagatgctcgctgagaaagaagctcatatccgctcaggcgccaagacggttgtgctggatatcccgctgctgttcgaatccggattgacccattgggtcgacaaagtgctcgtggtgtacgtcgatgatgatgttcagttacgccgccttatggcacgtaacgggtttactgaagaagaagctctgaagcgcattcgttcacagtggcccagtgcggagaaagttaaacgtgcagacgctgtcatcgacaataatggcacgattgaagaaacccgccgccagctgctggccattttacaccagtgggatctgctgggtaagggtggctccggccaccatcatcaccatcactaatga

SEQ ID NO: 3688 - protein, 211 aa, synthetic construct
  REGION 1..211: note = Variant of 3'O-kinase
MAFTIGLTGGIAAGKSTVSAMMRELGLPVIDADEAARAVMRPGEEAYRQILAAFGPGILRADGEIDRQKLGAIRFSDEQQRKVLNAIVGPAVLKKMLAEKEAHIRSGAKTVVLDIPLLFESGLTHWVDKVLVVYVDDDVQLRRLMARNGFTEEEALKRIRSQWPSAEKVKRADAVIDNNGTIEETRRQLLAILHQWDLLGKGGSGHHHHHH

SEQ ID NO: 3689 - DNA, 639 bp, synthetic construct
  misc_feature 1..639: note = Variant of 3'O-kinase
  source 1..639: mol_type = other DNA
atggcgaagaccattggtttaacaggagggatcgcagcgggcaaatcgactgtgagtgccatgatgcgtgaactgggtctgccggtcatcgatgctgacgaggcagcacgcgccgttatgcgtccaggcgaagaagcttatcgccagattgtagctgcgttcggtccgggcattcttcgtgccgatggcgagatcgatcgccagaaactgggtgctatccgcttttcggacgaacaacaacgtaaggtgctgaatgcgattgtaggtcctgcagtcctgaagaagatgctcgctgagaaagaagctcatatccgctcaggcgccaagacggttgtgctggatatcccgctgctgttcgaatccggattgacccattgggtcgacaaagtgctcgtggtgtacgtcgatgatgatgttcagttacgccgccttatggcacgtaacgggtttactgaagaagaagctctgaagcgcattcgttcacagtggcccagtgcggagaaagttaaacgtgcagacgctgtcatcgacaataatggcacgattgaagaaacccgccgccagctgctggccattttacaccagtgggatctgctgggtaagggtggctccggccaccatcatcaccatcactaatga

SEQ ID NO: 3690 - protein, 211 aa, synthetic construct
  REGION 1..211: note = Variant of 3'O-kinase
MAKTIGLTGGIAAGKSTVSAMMRELGLPVIDADEAARAVMRPGEEAYRQIVAAFGPGILRADGEIDRQKLGAIRFSDEQQRKVLNAIVGPAVLKKMLAEKEAHIRSGAKTVVLDIPLLFESGLTHWVDKVLVVYVDDDVQLRRLMARNGFTEEEALKRIRSQWPSAEKVKRADAVIDNNGTIEETRRQLLAILHQWDLLGKGGSGHHHHHH

SEQ ID NO: 3691 - DNA, 639 bp, synthetic construct
  misc_feature 1..639: note = Variant of 3'O-kinase
  source 1..639: mol_type = other DNA
atggcgtttaccattggtttaacaggagggatcgcagcgggcaaatcgactgtgagtgccatgatgcgtgaactgggtctgccggtcatcgatgctgacgaggcagcacgcgccgttatgcgtccaggctgtgaagcttatcgccagattgtagctgcgttcggtccgggcattcttcgtgccgatggcgagatcgatcgccagaaactgggtgctatccgcttttcggacgaacaacaacgtaaggtgctgaatgcgattgtaggtcctgcagtcctgaagaagatgctcgctgagaaagaagctcatatccgctcaggcgccaagacggttgtgctggatatcccgctgctgttcgaatccggattgacccattgggtcgacaaagtgctcgtggtgtacgtcgatgatgatgttcagttacgccgccttatggcacgtaacgggtttactgaagaagaagctctgaagcgcattcgttcacagtggcccagtgcggagaaagttaaacgtgcagacgctgtcatcgacaataatggcacgattgaagaaacccgccgccagctgctggccattttacaccagtgggatctgctgggtaagggtggctccggccaccatcatcaccatcactaatga

SEQ ID NO: 3692 - protein, 211 aa, synthetic construct
  REGION 1..211: note = Variant of 3'O-kinase
MAFTIGLTGGIAAGKSTVSAMMRELGLPVIDADEAARAVMRPGCEAYRQIVAAFGPGILRADGEIDRQKLGAIRFSDEQQRKVLNAIVGPAVLKKMLAEKEAHIRSGAKTVVLDIPLLFESGLTHWVDKVLVVYVDDDVQLRRLMARNGFTEEEALKRIRSQWPSAEKVKRADAVIDNNGTIEETRRQLLAILHQWDLLGKGGSGHHHHHH

SEQ ID NO: 3693 - DNA, 639 bp, synthetic construct
  misc_feature 1..639: note = Variant of 3'O-kinase
  source 1..639: mol_type = other DNA
atggcgtttaccattggtttaacaggagggatcgcagcgggcaaatcgactgtgagtgccatgatgcgtgaactgggtctgccggtcatcgatgctgacgaggcagcacgcgccgttatgcgtccaggcgaagaagcttatcgccagattgtagctgcgttcggtccggctattcttcgtgccgatggcgagatcgatcgccagaaactgggtgctatccgcttttcggacgaacaacaacgtaaggtgctgaatgcgattgtaggtcctgcagtcctgaagaagatgctcgctgagaaagaagctcatatccgctcaggcgccaagacggttgtgctggatatcccgctgctgttcgaatccggattgacccattgggtcgacaaagtgctcgtggtgtacgtcgatgatgatgttcagttacgccgccttatggcacgtaacgggtttactgaagaagaagctctgaagcgcattcgttcacagtggcccagtgcggagaaagttaaacgtgcagacgctgtcatcgacaataatggcacgattgaagaaacccgccgccagctgctggccattttacaccagtgggatctgctgggtaagggtggctccggccaccatcatcaccatcactaatga

SEQ ID NO: 3694 - protein, 211 aa, synthetic construct
  REGION 1..211: note = Variant of 3'O-kinase
MAFTIGLTGGIAAGKSTVSAMMRELGLPVIDADEAARAVMRPGEEAYRQIVAAFGPAILRADGEIDRQKLGAIRFSDEQQRKVLNAIVGPAVLKKMLAEKEAHIRSGAKTVVLDIPLLFESGLTHWVDKVLVVYVDDDVQLRRLMARNGFTEEEALKRIRSQWPSAEKVKRADAVIDNNGTIEETRRQLLAILHQWDLLGKGGSGHHHHHH

SEQ ID NO: 3695 - DNA, 639 bp, synthetic construct
  misc_feature 1..639: note = Variant of 3'O-kinase
  source 1..639: mol_type = other DNA
atggcgtttaccattggtttaacaggagggatcgcagcgggcaaatcgactgtgagtgccatgatgcgtgaactgggtctgccggtcatcgatgctgacgaggcagcacgcgccgttatgcgtccaggcgaagaagcttatcgccagattgtagctgcgttcggtccgggcattcttcgtgccgatggcgagatcgatcgccagaaactgggtgctatccgcttttcggacgaacaacaacgtaaggtgctgaatgcgattgtaggtcctgcagtcctgaagaagatgctcgctgagaaagaagctcatatccgctcaggcgccaagacggttgtgctggatatcccgctgctgttcgaactgggattgacccattgggtcgacaaagtgctcgtggtgtacgtcgatgatgatgttcagttacgccgccttatggcacgtaacgggtttactgaagaagaagctctgaagcgcattcgttcacagtggcccagtgcggagaaagttaaacgtgcagacgctgtcatcgacaataatggcacgattgaagaaacccgccgccagctgctggccattttacaccagtgggatctgctgggtaagggtggctccggccaccatcatcaccatcactaatga

SEQ ID NO: 3696 - protein, 211 aa, synthetic construct
  REGION 1..211: note = Variant of 3'O-kinase
MAFTIGLTGGIAAGKSTVSAMMRELGLPVIDADEAARAVMRPGEEAYRQIVAAFGPGILRADGEIDRQKLGAIRFSDEQQRKVLNAIVGPAVLKKMLAEKEAHIRSGAKTVVLDIPLLFELGLTHWVDKVLVVYVDDDVQLRRLMARNGFTEEEALKRIRSQWPSAEKVKRADAVIDNNGTIEETRRQLLAILHQWDLLGKGGSGHHHHHH

SEQ ID NO: 3697 - DNA, 639 bp, synthetic construct
  misc_feature 1..639: note = Variant of 3'O-kinase
  source 1..639: mol_type = other DNA
atggcgtttaccattggtttaacaggagggatcgcagcgggcaaatcgactgtgagtgccatgatgcgtgaactgggtctggttgtcatcgatgctgacgaggcagcacgcgccgttatgcgtccaggcgaagaagcttatcgccagattgtagctgcgttcggtccgggcattcttcgtgccgatggcgagatcgatcgccagaaactgggtgctatccgcttttcggacgaacaacaacgtaaggtgctgaatgcgattgtaggtcctgcagtcctgaagaagatgctcgctgagaaagaagctcatatccgctcaggcgccaagacggttgtgctggatatcccgctgctgttcgaatccggattgacccattgggtcgacaaagtgctcgtggtgtacgtcgatgatgatgttcagttacgccgccttatggcacgtaacgggtttactgaagaagaagctctgaagcgcattcgttcacagtggcccagtgcggagaaagttaaacgtgcagacgctgtcatcgacaataatggcacgattgaagaaacccgccgccagctgctggccattttacaccagtgggatctgctgggtaagggtggctccggccaccatcatcaccatcactaatga

SEQ ID NO: 3698 - protein, 211 aa, synthetic construct
  REGION 1..211: note = Variant of 3'O-kinase
MAFTIGLTGGIAAGKSTVSAMMRELGLVVIDADEAARAVMRPGEEAYRQIVAAFGPGILRADGEIDRQKLGAIRFSDEQQRKVLNAIVGPAVLKKMLAEKEAHIRSGAKTVVLDIPLLFESGLTHWVDKVLVVYVDDDVQLRRLMARNGFTEEEALKRIRSQWPSAEKVKRADAVIDNNGTIEETRRQLLAILHQWDLLGKGGSGHHHHHH

SEQ ID NO: 3699 - DNA, 639 bp, synthetic construct
  misc_feature 1..639: note = Variant of 3'O-kinase
  source 1..639: mol_type = other DNA
atggcgtttaccattggtatgacaggagggatcgcagcgggcaaatcgactgtgagtgccatgatgcgtgaactgggtctgccggtcatcgatgctgacgaggcagcacgcgccgttatgcgtccaggcgaagaagcttatcgccagattgtagctgcgttcggtccgggcattcttcgtgccgatggcgagatcgatcgccagaaactgggtgctatccgcttttcggacgaacaacaacgtaaggtgctgaatgcgattgtaggtcctgcagtcctgaagaagatgctcgctgagaaagaagctcatatccgctcaggcgccaagacggttgtgctggatatcccgctgctgttcgaatccggattgacccattgggtcgacaaagtgctcgtggtgtacgtcgatgatgatgttcagttacgccgccttatggcacgtaacgggtttactgaagaagaagctctgaagcgcattcgttcacagtggcccagtgcggagaaagttaaacgtgcagacgctgtcatcgacaataatggcacgattgaagaaacccgccgccagctgctggccattttacaccagtgggatctgctgggtaagggtggctccggccaccatcatcaccatcactaatga

SEQ ID NO: 3700 - protein, 211 aa, synthetic construct
  REGION 1..211: note = Variant of 3'O-kinase
MAFTIGMTGGIAAGKSTVSAMMRELGLPVIDADEAARAVMRPGEEAYRQIVAAFGPGILRADGEIDRQKLGAIRFSDEQQRKVLNAIVGPAVLKKMLAEKEAHIRSGAKTVVLDIPLLFESGLTHWVDKVLVVYVDDDVQLRRLMARNGFTEEEALKRIRSQWPSAEKVKRADAVIDNNGTIEETRRQLLAILHQWDLLGKGGSGHHHHHH

SEQ ID NO: 3701 - DNA, 639 bp, synthetic construct
  misc_feature 1..639: note = Variant of 3'O-kinase
  source 1..639: mol_type = other DNA
atggcgtttaccattggtttaacaggagggatcgcagcgggcaaatcgactgtgagtgccatgatgcgtgaactgggtctgccggtcatcgatgctgacgaggcagcacgcgccgttatgcgtccaggcgaagaagcttatcgcggtattgtagctgcgttcggtccgggcattcttcgtgccgatggcgagatcgatcgccagaaactgggtgctatccgcttttcggacgaacaacaacgtaaggtgctgaatgcgattgtaggtcctgcagtcctgaagaagatgctcgctgagaaagaagctcatatccgctcaggcgccaagacggttgtgctggatatcccgctgctgttcgaatccggattgacccattgggtcgacaaagtgctcgtggtgtacgtcgatgatgatgttcagttacgccgccttatggcacgtaacgggtttactgaagaagaagctctgaagcgcattcgttcacagtggcccagtgcggagaaagttaaacgtgcagacgctgtcatcgacaataatggcacgattgaagaaacccgccgccagctgctggccattttacaccagtgggatctgctgggtaagggtggctccggccaccatcatcaccatcactaatga

SEQ ID NO: 3702 - protein, 211 aa, synthetic construct
  REGION 1..211: note = Variant of 3'O-kinase
MAFTIGLTGGIAAGKSTVSAMMRELGLPVIDADEAARAVMRPGEEAYRGIVAAFGPGILRADGEIDRQKLGAIRFSDEQQRKVLNAIVGPAVLKKMLAEKEAHIRSGAKTVVLDIPLLFESGLTHWVDKVLVVYVDDDVQLRRLMARNGFTEEEALKRIRSQWPSAEKVKRADAVIDNNGTIEETRRQLLAILHQWDLLGKGGSGHHHHHH

SEQ ID NO: 3703 - DNA, 639 bp, synthetic construct
  misc_feature 1..639: note = Variant of 3'O-kinase
  source 1..639: mol_type = other DNA
atggcgtttaccattggtttaacaggagggatcgcagcgggcaaatcgactgtgagtgccatgatgcgtgaactgggtctgccggtcatcgatgctgacgaggcagcacgcgccgttatgcgtccaggcgaagaagcttatcgccagattgtagctgcgttcggtccgggcattcttcgtgccgatggcgagatcgatcgccagaaactgggtgctatccgcttttcggacgaacaacaacgtaaggtgctgaatgcgattgtaggtcctgcagtcctgaagaagatgctcgctgagaaagaagctcatatccgctcaggcgccaagacggttgtgctggatatcccgctgctgttcgaatccggattgacccggtgggtcgacaaagtgctcgtggtgtacgtcgatgatgatgttcagttacgccgccttatggcacgtaacgggtttactgaagaagaagctctgaagcgcattcgttcacagtggcccagtgcggagaaagttaaacgtgcagacgctgtcatcgacaataatggcacgattgaagaaacccgccgccagctgctggccattttacaccagtgggatctgctgggtaagggtggctccggccaccatcatcaccatcactaatga

SEQ ID NO: 3704 - protein, 211 aa, synthetic construct
  REGION 1..211: note = Variant of 3'O-kinase
MAFTIGLTGGIAAGKSTVSAMMRELGLPVIDADEAARAVMRPGEEAYRQIVAAFGPGILRADGEIDRQKLGAIRFSDEQQRKVLNAIVGPAVLKKMLAEKEAHIRSGAKTVVLDIPLLFESGLTRWVDKVLVVYVDDDVQLRRLMARNGFTEEEALKRIRSQWPSAEKVKRADAVIDNNGTIEETRRQLLAILHQWDLLGKGGSGHHHHHH

SEQ ID NO: 3705 - DNA, 639 bp, synthetic construct
  misc_feature 1..639: note = Variant of 3'O-kinase
  source 1..639: mol_type = other DNA
atggcgtttaccattggtttaacaggagggatcgcagcgggcaaatcgactgtgagtgccatgatgcgtgaactgggtctgccggtcatcgatgctgacgaggcagcacgcgccgttatgcgtccaggcgaagaagcttatcgccagattgtagctgcgttcggtccgggctgtcttcgtgccgatggcgagatcgatcgccagaaactgggtgctatccgcttttcggacgaacaacaacgtaaggtgctgaatgcgattgtaggtcctgcagtcctgaagaagatgctcgctgagaaagaagctcatatccgctcaggcgccaagacggttgtgctggatatcccgctgctgttcgaatccggattgacccattgggtcgacaaagtgctcgtggtgtacgtcgatgatgatgttcagttacgccgccttatggcacgtaacgggtttactgaagaagaagctctgaagcgcattcgttcacagtggcccagtgcggagaaagttaaacgtgcagacgctgtcatcgacaataatggcacgattgaagaaacccgccgccagctgctggccattttacaccagtgggatctgctgggtaagggtggctccggccaccatcatcaccatcactaatga

SEQ ID NO: 3706 - protein, 211 aa, synthetic construct
  REGION 1..211: note = Variant of 3'O-kinase
MAFTIGLTGGIAAGKSTVSAMMRELGLPVIDADEAARAVMRPGEEAYRQIVAAFGPGCLRADGEIDRQKLGAIRFSDEQQRKVLNAIVGPAVLKKMLAEKEAHIRSGAKTVVLDIPLLFESGLTHWVDKVLVVYVDDDVQLRRLMARNGFTEEEALKRIRSQWPSAEKVKRADAVIDNNGTIEETRRQLLAILHQWDLLGKGGSGHHHHHH

SEQ ID NO: 3707 - DNA, 639 bp, synthetic construct
  misc_feature 1..639: note = Variant of 3'O-kinase
  source 1..639: mol_type = other DNA
atggcgtttaccattggtttaacaggagggatcgcagcgggcaaatcgactgtgagtgccatgatgcgtgaactgggtctgccggtcatcgatgctgacgaggcagcacgcgccgttatgcgtccaggcgaagaagcttatcgccagattgtagctgcgttcggtccgggcattcttcgtgccgatgaggagatcgatcgccagaaactgggtgctatccgcttttcggacgaacaacaacgtaaggtgctgaatgcgattgtaggtcctgcagtcctgaagaagatgctcgctgagaaagaagctcatatccgctcaggcgccaagacggttgtgctggatatcccgctgctgttcgaatccggattgacccattgggtcgacaaagtgctcgtggtgtacgtcgatgatgatgttcagttacgccgccttatggcacgtaacgggtttactgaagaagaagctctgaagcgcattcgttcacagtggcccagtgcggagaaagttaaacgtgcagacgctgtcatcgacaataatggcacgattgaagaaacccgccgccagctgctggccattttacaccagtgggatctgctgggtaagggtggctccggccaccatcatcaccatcactaatga

SEQ ID NO: 3708 - protein, 211 aa, synthetic construct
  REGION 1..211: note = Variant of 3'O-kinase
MAFTIGLTGGIAAGKSTVSAMMRELGLPVIDADEAARAVMRPGEEAYRQIVAAFGPGILRADEEIDRQKLGAIRFSDEQQRKVLNAIVGPAVLKKMLAEKEAHIRSGAKTVVLDIPLLFESGLTHWVDKVLVVYVDDDVQLRRLMARNGFTEEEALKRIRSQWPSAEKVKRADAVIDNNGTIEETRRQLLAILHQWDLLGKGGSGHHHHHH

SEQ ID NO: 3709 - DNA, 639 bp, synthetic construct
  misc_feature 1..639: note = Variant of 3'O-kinase
  source 1..639: mol_type = other DNA
atggcgtttaccattggtttaacaggagggatcgcagcgggcaaatcgactgtgagtgccatggcgcgtgaactgggtctgccggtcatcgatgctgacgaggcagcacgcgccgttatgcgtccaggcgaagaagcttatcgccagattgtagctgcgttcggtccgggcattcttcgtgccgatggcgagatcgatcgccagaaactgggtgctatccgcttttcggacgaacaacaacgtaaggtgctgaatgcgattgtaggtcctgcagtcctgaagaagatgctcgctgagaaagaagctcatatccgctcaggcgccaagacggttgtgctggatatcccgctgctgttcgaatccggattgacccattgggtcgacaaagtgctcgtggtgtacgtcgatgatgatgttcagttacgccgccttatggcacgtaacgggtttactgaagaagaagctctgaagcgcattcgttcacagtggcccagtgcggagaaagttaaacgtgcagacgctgtcatcgacaataatggcacgattgaagaaacccgccgccagctgctggccattttacaccagtgggatctgctgggtaagggtggctccggccaccatcatcaccatcactaatga

SEQ ID NO: 3710 - protein, 211 aa, synthetic construct
  REGION 1..211: note = Variant of 3'O-kinase
MAFTIGLTGGIAAGKSTVSAMARELGLPVIDADEAARAVMRPGEEAYRQIVAAFGPGILRADGEIDRQKLGAIRFSDEQQRKVLNAIVGPAVLKKMLAEKEAHIRSGAKTVVLDIPLLFESGLTHWVDKVLVVYVDDDVQLRRLMARNGFTEEEALKRIRSQWPSAEKVKRADAVIDNNGTIEETRRQLLAILHQWDLLGKGGSGHHHHHH

SEQ ID NO: 3711 - DNA, 639 bp, synthetic construct
  misc_feature 1..639: note = Variant of 3'O-kinase
  source 1..639: mol_type = other DNA
atggcgtttaccattggtttaacaggagggatcgcagcgggcaaatcgactgtgagtgccatgatgcgtgaactgggtctgccggtcatcgatgctgacgaggcagcacgcgccgttatgcgtccaggcgaagaagcttatcgccagattgtagctgcgttcggtccgggcattcttcgtgccgatggcgagatcgatcgccagaaactgggtgctatccgcttttcggacgaacaacaacgtaaggtgctgaatgcgattgtaggtcctgcagtcctgaagaagatgctcgctgagaaagaagctcatatcgcttcaggcgccaagacggttgtgctggatatcccgctgctgttcgaatccggattgacccattgggtcgacaaagtgctcgtggtgtacgtcgatgatgatgttcagttacgccgccttatggcacgtaacgggtttactgaagaagaagctctgaagcgcattcgttcacagtggcccagtgcggagaaagttaaacgtgcagacgctgtcatcgacaataatggcacgattgaagaaacccgccgccagctgctggccattttacaccagtgggatctgctgggtaagggtggctccggccaccatcatcaccatcactaatga

SEQ ID NO: 3712 - protein, 211 aa, synthetic construct
  REGION 1..211: note = Variant of 3'O-kinase
MAFTIGLTGGIAAGKSTVSAMMRELGLPVIDADEAARAVMRPGEEAYRQIVAAFGPGILRADGEIDRQKLGAIRFSDEQQRKVLNAIVGPAVLKKMLAEKEAHIASGAKTVVLDIPLLFESGLTHWVDKVLVVYVDDDVQLRRLMARNGFTEEEALKRIRSQWPSAEKVKRADAVIDNNGTIEETRRQLLAILHQWDLLGKGGSGHHHHHH

SEQ ID NO: 3713 - DNA, 639 bp, synthetic construct
  misc_feature 1..639: note = Variant of 3'O-kinase
  source 1..639: mol_type = other DNA
atggcgtttaccattggtttaacaggagggatcgcagcgggcaaatcgactgtgagtgccatgatgcgtgaactgggtctgccggtcatcgatgctgacgagatggcacgcgccgttatgcgtccaggcgaagaagcttatcgccagattgtagctgcgttcggtccgggcattcttcgtgccgatggcgagatcgatcgccagaaactgggtgctatccgcttttcggacgaacaacaacgtaaggtgctgaatgcgattgtaggtcctgcagtcctgaagaagatgctcgctgagaaagaagctcatatccgctcaggcgccaagacggttgtgctggatatcccgctgctgttcgaatccggattgacccattgggtcgacaaagtgctcgtggtgtacgtcgatgatgatgttcagttacgccgccttatggcacgtaacgggtttactgaagaagaagctctgaagcgcattcgttcacagtggcccagtgcggagaaagttaaacgtgcagacgctgtcatcgacaataatggcacgattgaagaaacccgccgccagctgctggccattttacaccagtgggatctgctgggtaagggtggctccggccaccatcatcaccatcactaatga

SEQ ID NO: 3714 - protein, 211 aa, synthetic construct
  REGION 1..211: note = Variant of 3'O-kinase
MAFTIGLTGGIAAGKSTVSAMMRELGLPVIDADEMARAVMRPGEEAYRQIVAAFGPGILRADGEIDRQKLGAIRFSDEQQRKVLNAIVGPAVLKKMLAEKEAHIRSGAKTVVLDIPLLFESGLTHWVDKVLVVYVDDDVQLRRLMARNGFTEEEALKRIRSQWPSAEKVKRADAVIDNNGTIEETRRQLLAILHQWDLLGKGGSGHHHHHH

SEQ ID NO: 3715 - DNA, 639 bp, synthetic construct
  misc_feature 1..639: note = Variant of 3'O-kinase
  source 1..639: mol_type = other DNA
atggcgtttaccattggtttaacaggagggatcgcagcgggcaaatcgactgtgagtgccatgatgcgtgaactgggtctgccggtcatcgatgctgacgaggcagcacgcgccgttatgcgtccaggcgaagaagcttatcgccagattgtagctgcgttcggtccgggcattcttcgtgccgatggcgagatcgatcgccagaaactgggtgctatccgcttttcggacgaacaacaacgtaaggtgctgaatgcgattgtaggtcctgcagtcctgaagaagatgctcgctgagaaagaagctcatactcgctcaggcgccaagacggttgtgctggatatcccgctgctgttcgaatccggattgacccattgggtcgacaaagtgctcgtggtgtacgtcgatgatgatgttcagttacgccgccttatggcacgtaacgggtttactgaagaagaagctctgaagcgcattcgttcacagtggcccagtgcggagaaagttaaacgtgcagacgctgtcatcgacaataatggcacgattgaagaaacccgccgccagctgctggccattttacaccagtgggatctgctgggtaagggtggctccggccaccatcatcaccatcactaatga

SEQ ID NO: 3716 - protein, 211 aa, synthetic construct
  REGION 1..211: note = Variant of 3'O-kinase
MAFTIGLTGGIAAGKSTVSAMMRELGLPVIDADEAARAVMRPGEEAYRQIVAAFGPGILRADGEIDRQKLGAIRFSDEQQRKVLNAIVGPAVLKKMLAEKEAHTRSGAKTVVLDIPLLFESGLTHWVDKVLVVYVDDDVQLRRLMARNGFTEEEALKRIRSQWPSAEKVKRADAVIDNNGTIEETRRQLLAILHQWDLLGKGGSGHHHHHH

SEQ ID NO: 3717 - DNA, 639 bp, synthetic construct
  misc_feature 1..639: note = Variant of 3'O-kinase
  source 1..639: mol_type = other DNA
atggcgtttaccattggtttaacaggagggatcgcagcgggcaaatcgactgtgagtgccatgatgcgtgaactgggtctgccggtcatcgatgctgacgaggcagcacgcgccgttatgcgtccaggcgaagaagcttatcgccagattgtagctgcgttcggtccgggcattcttcgtgccgatggcgagatcgatcgccagaaactgggtgctatccgcttttcggacgaacaacaacgtaaggtgctgaatgcgattgtaggtcctgcagtcctgaagaagatgctcgctgagaaagaagctcatatccgctcaggcgccaagacggttgtgctggatatcccgctgctgttcgaatccggattgacccattgggtcgacaaagtgctcgtggtgtacgtcgatgatgatgttcagttacgccgccttatggcacgtaacgggtttactgaagaagaagctctgaagcgcattcgttcacagtggcccagtgcggagaaagttaaacgtgcagacgctgtcatcgacaataatggcacgattgaagaaacccgccgccagctgctggccattttacaccagtgggatctgctgggtaaggatggctccggccaccatcatcaccatcactaatga

SEQ ID NO: 3718 - protein, 211 aa, synthetic construct
  REGION 1..211: note = Variant of 3'O-kinase
MAFTIGLTGGIAAGKSTVSAMMRELGLPVIDADEAARAVMRPGEEAYRQIVAAFGPGILRADGEIDRQKLGAIRFSDEQQRKVLNAIVGPAVLKKMLAEKEAHIRSGAKTVVLDIPLLFESGLTHWVDKVLVVYVDDDVQLRRLMARNGFTEEEALKRIRSQWPSAEKVKRADAVIDNNGTIEETRRQLLAILHQWDLLGKDGSGHHHHHH

SEQ ID NO: 3719 - DNA, 639 bp, synthetic construct
  misc_feature 1..639: note = Variant of 3'O-kinase
  source 1..639: mol_type = other DNA
atggcgtttaccattggtttaacaggagggatcgcagcgggcaaatcgactgtgagtgccatgatgcgtgaactgggtctgccggtcatcgatgctgacgaggcagcacgcgccgttatgcgtccaggcgaagaagcttatcgccagattgtagctgcgttcggtccgggcattcttcgtgccgatggcgagatcgatcgccagaaactgggtgctatccgcttttcggacgaacaacaacgtaaggtgctgaatgcgattgtaggtcctgcagtcctgaagaagatgctcgctgagagggaagctcatatccgctcaggcgccaagacggttgtgctggatatcccgctgctgttcgaatccggattgacccattgggtcgacaaagtgctcgtggtgtacgtcgatgatgatgttcagttacgccgccttatggcacgtaacgggtttactgaagaagaagctctgaagcgcattcgttcacagtggcccagtgcggagaaagttaaacgtgcagacgctgtcatcgacaataatggcacgattgaagaaacccgccgccagctgctggccattttacaccagtgggatctgctgggtaagggtggctccggccaccatcatcaccatcactaatga

SEQ ID NO: 3720 - protein, 211 aa, synthetic construct
  REGION 1..211: note = Variant of 3'O-kinase
MAFTIGLTGGIAAGKSTVSAMMRELGLPVIDADEAARAVMRPGEEAYRQIVAAFGPGILRADGEIDRQKLGAIRFSDEQQRKVLNAIVGPAVLKKMLAEREAHIRSGAKTVVLDIPLLFESGLTHWVDKVLVVYVDDDVQLRRLMARNGFTEEEALKRIRSQWPSAEKVKRADAVIDNNGTIEETRRQLLAILHQWDLLGKGGSGHHHHHH

SEQ ID NO: 3721 - DNA, 639 bp, synthetic construct
  misc_feature 1..639: note = Variant of 3'O-kinase
  source 1..639: mol_type = other DNA
atggcgtttaccattggtttaacaggagggatcgcagcgggcaaatcgactgtgagtgccatgatgcgtgaactgggtctgccggtcatcgatgctgacgaggcagcacgcgccgttatgcgtccaggcgaagaagcttatcgccagattgtagctgcgttcggtccgggcattcttcgtgccgatggcgagatcgatcgccagaaactgggtgctatccgcttttcggacgaacaacaacgtaaggtgctgaatgcgattgtaggtcctgcagtcctgaagaagatgctcgctgagaaagaagctcatatccgctcaggcgccaagacggttgtgctggatatcccgctgctgttcgaatccggattgacccattgggtcgacaaagtgctcgtggtgtacgtcgatgatgatgttcagttacgccgccttatggcacgtaacgggtttactgaagaagaagctctgaagcgcattcgttcacagtggcccagtgcggataaagttaaacgtgcagacgctgtcatcgacaataatggcacgattgaagaaacccgccgccagctgctggccattttacaccagtgggatctgctgggtaagggtggctccggccaccatcatcaccatcactaatga

SEQ ID NO: 3722 - protein, 211 aa, synthetic construct
  REGION 1..211: note = Variant of 3'O-kinase
MAFTIGLTGGIAAGKSTVSAMMRELGLPVIDADEAARAVMRPGEEAYRQIVAAFGPGILRADGEIDRQKLGAIRFSDEQQRKVLNAIVGPAVLKKMLAEKEAHIRSGAKTVVLDIPLLFESGLTHWVDKVLVVYVDDDVQLRRLMARNGFTEEEALKRIRSQWPSADKVKRADAVIDNNGTIEETRRQLLAILHQWDLLGKGGSGHHHHHH

SEQ ID NO: 3723 - DNA, 639 bp, synthetic construct
  misc_feature 1..639: note = Variant of 3'O-kinase
  source 1..639: mol_type = other DNA
atggcgtttaccattggtttaacaggagggatcgcagcgggcaaatcgactgtgagtgccatgatgcgtgaactgggtctgccggtcatcgatgctgacgaggcagcacgcgccgttatgcgtccaggcgaagaagcttatcgccagattgtagctgcgttcggtccgggcattcttcgtgccgatggcgagatcgatcgccagaaactgggtgctatccgcttttcggacgaacaacaacgtaaggtgctgaatgcgattgtaggtcctgcagtcctgaagaagatgctcgctgagaaagaagctcatatccgctcaggcgccaagacggttgtgctggatatcccgctgctgttcgaatccggattgaccccgtgggtcgacaaagtgctcgtggtgtacgtcgatgatgatgttcagttacgccgccttatggcacgtaacgggtttactgaagaagaagctctgaagcgcattcgttcacagtggcccagtgcggagaaagttaaacgtgcagacgctgtcatcgacaataatggcacgattgaagaaacccgccgccagctgctggccattttacaccagtgggatctgctgggtaagggtggctccggccaccatcatcaccatcactaatga

SEQ ID NO: 3724 - protein, 211 aa, synthetic construct
  REGION 1..211: note = Variant of 3'O-kinase
MAFTIGLTGGIAAGKSTVSAMMRELGLPVIDADEAARAVMRPGEEAYRQIVAAFGPGILRADGEIDRQKLGAIRFSDEQQRKVLNAIVGPAVLKKMLAEKEAHIRSGAKTVVLDIPLLFESGLTPWVDKVLVVYVDDDVQLRRLMARNGFTEEEALKRIRSQWPSAEKVKRADAVIDNNGTIEETRRQLLAILHQWDLLGKGGSGHHHHHH

SEQ ID NO: 3725 - DNA, 639 bp, synthetic construct
  misc_feature 1..639: note = Variant of 3'O-kinase
  source 1..639: mol_type = other DNA
atggcgtttaccattggtttaacaggagggatcgcagcgggcaaatcgactgtgggtgccatgatgcgtgaactgggtctgccggtcatcgatgctgacgaggcagcacgcgccgttatgcgtccaggcgaagaagcttatcgccagattgtagctgcgttcggtccgggcattcttcgtgccgatggcgagatcgatcgccagaaactgggtgctatccgcttttcggacgaacaacaacgtaaggtgctgaatgcgattgtaggtcctgcagtcctgaagaagatgctcgctgagaaagaagctcatatccgctcaggcgccaagacggttgtgctggatatcccgctgctgttcgaatccggattgacccattgggtcgacaaagtgctcgtggtgtacgtcgatgatgatgttcagttacgccgccttatggcacgtaacgggtttactgaagaagaagctctgaagcgcattcgttcacagtggcccagtgcggagaaagttaaacgtgcagacgctgtcatcgacaataatggcacgattgaagaaacccgccgccagctgctggccattttacaccagtgggatctgctgggtaagggtggctccggccaccatcatcaccatcactaatga

SEQ ID NO: 3726 - protein, 211 aa, synthetic construct
  REGION 1..211: note = Variant of 3'O-kinase
MAFTIGLTGGIAAGKSTVGAMMRELGLPVIDADEAARAVMRPGEEAYRQIVAAFGPGILRADGEIDRQKLGAIRFSDEQQRKVLNAIVGPAVLKKMLAEKEAHIRSGAKTVVLDIPLLFESGLTHWVDKVLVVYVDDDVQLRRLMARNGFTEEEALKRIRSQWPSAEKVKRADAVIDNNGTIEETRRQLLAILHQWDLLGKGGSGHHHHHH

SEQ ID NO: 3727 - DNA, 639 bp, synthetic construct
  misc_feature 1..639: note = Variant of 3'O-kinase
  source 1..639: mol_type = other DNA
atggcgtttaccattggtttaacaggagggatcgcagcgggcaaatcgactgtgtgtgccatgatgcgtgaactgggtctgccggtcatcgatgctgacgaggcagcacgcgccgttatgcgtccaggcgaagaagcttatcgccagattgtagctgcgttcggtccgggcattcttcgtgccgatggcgagatcgatcgccagaaactgggtgctatccgcttttcggacgaacaacaacgtaaggtgctgaatgcgattgtaggtcctgcagtcctgaagaagatgctcgctgagaaagaagctcatatccgctcaggcgccaagacggttgtgctggatatcccgctgctgttcgaatccggattgacccattgggtcgacaaagtgctcgtggtgtacgtcgatgatgatgttcagttacgccgccttatggcacgtaacgggtttactgaagaagaagctctgaagcgcattcgttcacagtggcccagtgcggagaaagttaaacgtgcagacgctgtcatcgacaataatggcacgattgaagaaacccgccgccagctgctggccattttacaccagtgggatctgctgggtaagggtggctccggccaccatcatcaccatcactaatga

SEQ ID NO: 3728 - protein, 211 aa, synthetic construct
  REGION 1..211: note = Variant of 3'O-kinase
MAFTIGLTGGIAAGKSTVCAMMRELGLPVIDADEAARAVMRPGEEAYRQIVAAFGPGILRADGEIDRQKLGAIRFSDEQQRKVLNAIVGPAVLKKMLAEKEAHIRSGAKTVVLDIPLLFESGLTHWVDKVLVVYVDDDVQLRRLMARNGFTEEEALKRIRSQWPSAEKVKRADAVIDNNGTIEETRRQLLAILHQWDLLGKGGSGHHHHHH

SEQ ID NO: 3729 - DNA, 639 bp, synthetic construct
  misc_feature 1..639: note = Variant of 3'O-kinase
  source 1..639: mol_type = other DNA
atggcgtttaccattggtttaacaggagggatcgcagcgggcaaatcgactgtgagtgccatgatgcgtgaactgggtctgccggtcatcgattgggacgaggcagcacgcgccgttatgcgtccaggcgaagaagcttatcgccagattgtagctgcgttcggtccgggcattcttcgtgccgatggcgagatcgatcgccagaaactgggtgctatccgcttttcggacgaacaacaacgtaaggtgctgaatgcgattgtaggtcctgcagtcctgaagaagatgctcgctgagaaagaagctcatatccgctcaggcgccaagacggttgtgctggatatcccgctgctgttcgaatccggattgacccattgggtcgacaaagtgctcgtggtgtacgtcgatgatgatgttcagttacgccgccttatggcacgtaacgggtttactgaagaagaagctctgaagcgcattcgttcacagtggcccagtgcggagaaagttaaacgtgcagacgctgtcatcgacaataatggcacgattgaagaaacccgccgccagctgctggccattttacaccagtgggatctgctgggtaagggtggctccggccaccatcatcaccatcactaatga

SEQ ID NO: 3730 - protein, 211 aa, synthetic construct
  REGION 1..211: note = Variant of 3'O-kinase
MAFTIGLTGGIAAGKSTVSAMMRELGLPVIDWDEAARAVMRPGEEAYRQIVAAFGPGILRADGEIDRQKLGAIRFSDEQQRKVLNAIVGPAVLKKMLAEKEAHIRSGAKTVVLDIPLLFESGLTHWVDKVLVVYVDDDVQLRRLMARNGFTEEEALKRIRSQWPSAEKVKRADAVIDNNGTIEETRRQLLAILHQWDLLGKGGSGHHHHHH

SEQ ID NO: 3731 - DNA, 639 bp, synthetic construct
  misc_feature 1..639: note = Variant of 3'O-kinase
  source 1..639: mol_type = other DNA
atggcgtttaccattggtttaacaggagggatcgcagcgggcaaatcgactgtgagtgccatgatgcgtgaactgggtctgccggtcatcgatgctgacgaggcagcacgcgccgttatgcgtccaggcgaagaagcttatcgccagattgtagctgcgttcggtccgggcattcttcgtgccgatggcgagatcgatcgccagaaactgggtgctatccgcttttcgaatgaacaacaacgtaaggtgctgaatgcgattgtaggtcctgcagtcctgaagaagatgctcgctgagaaagaagctcatatccgctcaggcgccaagacggttgtgctggatatcccgctgctgttcgaatccggattgacccattgggtcgacaaagtgctcgtggtgtacgtcgatgatgatgttcagttacgccgccttatggcacgtaacgggtttactgaagaagaagctctgaagcgcattcgttcacagtggcccagtgcggagaaagttaaacgtgcagacgctgtcatcgacaataatggcacgattgaagaaacccgccgccagctgctggccattttacaccagtgggatctgctgggtaagggtggctccggccaccatcatcaccatcactaatga

SEQ ID NO: 3732 - protein, 211 aa, synthetic construct
  REGION 1..211: note = Variant of 3'O-kinase
MAFTIGLTGGIAAGKSTVSAMMRELGLPVIDADEAARAVMRPGEEAYRQIVAAFGPGILRADGEIDRQKLGAIRFSNEQQRKVLNAIVGPAVLKKMLAEKEAHIRSGAKTVVLDIPLLFESGLTHWVDKVLVVYVDDDVQLRRLMARNGFTEEEALKRIRSQWPSAEKVKRADAVIDNNGTIEETRRQLLAILHQWDLLGKGGSGHHHHHH

SEQ ID NO: 3733 - DNA, 639 bp, synthetic construct
  misc_feature 1..639: note = Variant of 3'O-kinase
  source 1..639: mol_type = other DNA
atggcgtttaccattggtttaacaggagggatcgcagcgggcaaatcgactgtgagtgccatgatgcgtgaactgggtctgccggtcatcgatgctgacgaggcagcacgcgccgttatgcgtccaggcgaagaagcttatcgccagattgtagctgcgttcggtccgggcattcttcgtgccgatggcgagatcgatcgccagaaactgggtgctatccgcttttcggacgaacaacaacgtaaggtgctgaatgcgattgtaggtcctgcagtcctgaagaagatgctcgctgagaaagaagctcatatccgctcaggcgccaagacggttgtgctggatatcccgctgctgttcgaatccggattgacctgttgggtcgacaaagtgctcgtggtgtacgtcgatgatgatgttcagttacgccgccttatggcacgtaacgggtttactgaagaagaagctctgaagcgcattcgttcacagtggcccagtgcggagaaagttaaacgtgcagacgctgtcatcgacaataatggcacgattgaagaaacccgccgccagctgctggccattttacaccagtgggatctgctgggtaagggtggctccggccaccatcatcaccatcactaatga

SEQ ID NO: 3734 - protein, 211 aa, synthetic construct
  REGION 1..211: note = Variant of 3'O-kinase
MAFTIGLTGGIAAGKSTVSAMMRELGLPVIDADEAARAVMRPGEEAYRQIVAAFGPGILRADGEIDRQKLGAIRFSDEQQRKVLNAIVGPAVLKKMLAEKEAHIRSGAKTVVLDIPLLFESGLTCWVDKVLVVYVDDDVQLRRLMARNGFTEEEALKRIRSQWPSAEKVKRADAVIDNNGTIEETRRQLLAILHQWDLLGKGGSGHHHHHH

SEQ ID NO: 3735 - DNA, 639 bp, synthetic construct
  misc_feature 1..639: note = Variant of 3'O-kinase
  source 1..639: mol_type = other DNA
atggcgtttaccattggtttaacaggagggatcgcagcgggcaaatcgactgtgagtgccatgatgcgtgaactgggtctgccggtcatcgatgctgacgaggcagcacgcgccgttatgcgtccaggcgaagaagcttatcgccagattgtagctgcgttcggtccgggcattcttcgtgccgatggcgagatcgatcgccagaaactgggtgctatccgcttttcggacgaacaacaacgtaaggtgctgaatgcgattgtaggtcctgcagtcctgaagaagatgctcgctgagaaagaagctcatatccgctcaggcgccaagacggttgtgctggatatcccgctgctgttcgaatccggattgacccattgggtcgacaaagtgctcgtggtgtacgtcgatgatgatgttcagttacgccgccttatggcacgtaacgggtttactgaagaagaagctctgaagcgcattcgttcacagtggcccagtgcggagaaagttaaacgtgcagacgctgtcatcgacaataatggcacgattgaagaaacccgccgccagctgctggccattttacaccagtgggatctgctgggtaagggtggcacgggccaccatcatcaccatcactaatga

SEQ ID NO: 3736 - protein, 211 aa, synthetic construct
  REGION 1..211: note = Variant of 3'O-kinase
MAFTIGLTGGIAAGKSTVSAMMRELGLPVIDADEAARAVMRPGEEAYRQIVAAFGPGILRADGEIDRQKLGAIRFSDEQQRKVLNAIVGPAVLKKMLAEKEAHIRSGAKTVVLDIPLLFESGLTHWVDKVLVVYVDDDVQLRRLMARNGFTEEEALKRIRSQWPSAEKVKRADAVIDNNGTIEETRRQLLAILHQWDLLGKGGTGHHHHHH

SEQ ID NO: 3737 - DNA, 639 bp, synthetic construct
  misc_feature 1..639: note = Variant of 3'O-kinase
  source 1..639: mol_type = other DNA
atggcgtttaccattggtttaacaggagggatcgcagcgggcaaatcgactgtgagtgccatgatgcgtgaactgggtctgccggtcatcgatgctgacgaggcagcacgcgccgttatgcgtccaggcgaagaagcttatcgccagattgtagctgcgttcggtccgggcattcttcgtgccgatggcgagatcgatcgccagaaactgggtgctatccgcttttcggacgaacaacaacgtaaggtgctgaatgcgattgtaggtcctgcagtcctgaagaagatgctcattgagaaagaagctcatatccgctcaggcgccaagacggttgtgctggatatcccgctgctgttcgaatccggattgacccattgggtcgacaaagtgctcgtggtgtacgtcgatgatgatgttcagttacgccgccttatggcacgtaacgggtttactgaagaagaagctctgaagcgcattcgttcacagtggcccagtgcggagaaagttaaacgtgcagacgctgtcatcgacaataatggcacgattgaagaaacccgccgccagctgctggccattttacaccagtgggatctgctgggtaagggtggctccggccaccatcatcaccatcactaatga

SEQ ID NO: 3738 - protein, 211 aa, synthetic construct
  REGION 1..211: note = Variant of 3'O-kinase
MAFTIGLTGGIAAGKSTVSAMMRELGLPVIDADEAARAVMRPGEEAYRQIVAAFGPGILRADGEIDRQKLGAIRFSDEQQRKVLNAIVGPAVLKKMLIEKEAHIRSGAKTVVLDIPLLFESGLTHWVDKVLVVYVDDDVQLRRLMARNGFTEEEALKRIRSQWPSAEKVKRADAVIDNNGTIEETRRQLLAILHQWDLLGKGGSGHHHHHH

SEQ ID NO: 3739 - DNA, 639 bp, synthetic construct
  misc_feature 1..639: note = Variant of 3'O-kinase
  source 1..639: mol_type = other DNA
atggcgtttaccattggtttaacaggagggatcgcagcgggcaaatcgactgtgagtgccatgatgcgtgaactgggtctgccggtcatcgatgctgacgaggcagcacgcgccgttatgcgtccaggcgaagaagcttatcgccagattgtagctgcgttcggtccgggcattcttcgtgccgatggcgagatcgatcgccagaaactgggtgctatccgcttttcggacgaacaacaacgtaaggtgctgaatgcgattgtaggtcctgcagtcctgaagaagatgctcgctgagaaagaagctcatatccgctcaggcgccaagacggttgtgctggatatcccgctgctgttcgaatccggattgacccattgggtcgacaaagtgctcgtggtgtacgtcgatgatgatgttcagttacgccgccttatggcacgtaacgggtttactgaagaagaagctctgaagcgcattcgttcacagtggcccagtgcggagaaagttaaacgtgcagacgctgtcatcgacaataatggcacgattgaagaaacccgccgccagctgctggccattttacaccagtgggatctgctgggtaagggtggccttggccaccatcatcaccatcactaatga

SEQ ID NO: 3740 - protein, 211 aa, synthetic construct
  REGION 1..211: note = Variant of 3'O-kinase
MAFTIGLTGGIAAGKSTVSAMMRELGLPVIDADEAARAVMRPGEEAYRQIVAAFGPGILRADGEIDRQKLGAIRFSDEQQRKVLNAIVGPAVLKKMLAEKEAHIRSGAKTVVLDIPLLFESGLTHWVDKVLVVYVDDDVQLRRLMARNGFTEEEALKRIRSQWPSAEKVKRADAVIDNNGTIEETRRQLLAILHQWDLLGKGGLGHHHHHH

SEQ ID NO: 3741 - DNA, 639 bp, synthetic construct
  misc_feature 1..639: note = Variant of 3'O-kinase
  source 1..639: mol_type = other DNA
atggcgtttaccattggtttaacaggagggatcgcagcgggcaaatcgactgtgagtgccatgatgcgtgaactgggtctgccgtgtatcgatgctgacgaggcagcacgcgccgttatgcgtccaggcgaagaagcttatcgccagattgtagctgcgttcggtccgggcattcttcgtgccgatggcgagatcgatcgccagaaactgggtgctatccgcttttcggacgaacaacaacgtaaggtgctgaatgcgattgtaggtcctgcagtcctgaagaagatgctcgctgagaaagaagctcatatccgctcaggcgccaagacggttgtgctggatatcccgctgctgttcgaatccggattgacccattgggtcgacaaagtgctcgtggtgtacgtcgatgatgatgttcagttacgccgccttatggcacgtaacgggtttactgaagaagaagctctgaagcgcattcgttcacagtggcccagtgcggagaaagttaaacgtgcagacgctgtcatcgacaataatggcacgattgaagaaacccgccgccagctgctggccattttacaccagtgggatctgctgggtaagggtggctccggccaccatcatcaccatcactaatga

SEQ ID NO: 3742 - protein, 211 aa, synthetic construct
  REGION 1..211: note = Variant of 3'O-kinase
MAFTIGLTGGIAAGKSTVSAMMRELGLPCIDADEAARAVMRPGEEAYRQIVAAFGPGILRADGEIDRQKLGAIRFSDEQQRKVLNAIVGPAVLKKMLAEKEAHIRSGAKTVVLDIPLLFESGLTHWVDKVLVVYVDDDVQLRRLMARNGFTEEEALKRIRSQWPSAEKVKRADAVIDNNGTIEETRRQLLAILHQWDLLGKGGSGHHHHHH

SEQ ID NO: 3743 - DNA, 639 bp, synthetic construct
  misc_feature 1..639: note = Variant of 3'O-kinase
  source 1..639: mol_type = other DNA
atggcgtttaccattggtttaacaggagggatcgcagcgggcaaatcgactgtgagtgccatgatgcgtgaactgggtctgccggtcatcgatgctgacgaggcagcacgcgccgttatgcgtccaggcgaagaagcttatcgccagattgtagctgcgttcggtccgggcattcttcgtgccgatggcgagatcgatcgccagaaactgggtgctatccgcttttcggacgaacaacaacgtaaggtgctgaatgcgattgtaggtcctgcagtcctgaagaagatgctcgctgagaaagaagctcatatccgctcaggcgccaagacggttgtgctggatatcccgctgctgttcgaatccggattgaccatgtgggtcgacaaagtgctcgtggtgtacgtcgatgatgatgttcagttacgccgccttatggcacgtaacgggtttactgaagaagaagctctgaagcgcattcgttcacagtggcccagtgcggagaaagttaaacgtgcagacgctgtcatcgacaataatggcacgattgaagaaacccgccgccagctgctggccattttacaccagtgggatctgctgggtaagggtggctccggccaccatcatcaccatcactaatga

SEQ ID NO: 3744 - protein, 211 aa, synthetic construct
  REGION 1..211: note = Variant of 3'O-kinase
MAFTIGLTGGIAAGKSTVSAMMRELGLPVIDADEAARAVMRPGEEAYRQIVAAFGPGILRADGEIDRQKLGAIRFSDEQQRKVLNAIVGPAVLKKMLAEKEAHIRSGAKTVVLDIPLLFESGLTMWVDKVLVVYVDDDVQLRRLMARNGFTEEEALKRIRSQWPSAEKVKRADAVIDNNGTIEETRRQLLAILHQWDLLGKGGSGHHHHHH

SEQ ID NO: 3745 - DNA, 639 bp, synthetic construct
  misc_feature 1..639: note = Variant of 3'O-kinase
  source 1..639: mol_type = other DNA
atggcgtttaccattggtttaacaggagggatcgcagcgggcaaatcgactgtgagtgccatgatgcgtgaactgggtctgccggtcatcgatgctgacgaggcagcacgcgccgttatgcgtccaggcgaagaagcttatcgccagattgtagctgcgttcggtccgggcattcttcgtgccgatggcgagatcgatcgccagaaactgggtgctatccgcttttcggacgaacaacaacgtaaggtgctgaatgcgattgtaggtcctgcagtcctgaagaagatgctcgctgagaaagaagctcatatccgctcaggcgccaagacggttgtgctggatatcccgctgctgttcgaatccggattgacccattgggtcgacaaagtgctcgtggtgtacgtcgcggatgatgttcagttacgccgccttatggcacgtaacgggtttactgaagaagaagctctgaagcgcattcgttcacagtggcccagtgcggagaaagttaaacgtgcagacgctgtcatcgacaataatggcacgattgaagaaacccgccgccagctgctggccattttacaccagtgggatctgctgggtaagggtggctccggccaccatcatcaccatcactaatga

SEQ ID NO: 3746 - protein, 211 aa, synthetic construct
  REGION 1..211: note = Variant of 3'O-kinase
MAFTIGLTGGIAAGKSTVSAMMRELGLPVIDADEAARAVMRPGEEAYRQIVAAFGPGILRADGEIDRQKLGAIRFSDEQQRKVLNAIVGPAVLKKMLAEKEAHIRSGAKTVVLDIPLLFESGLTHWVDKVLVVYVADDVQLRRLMARNGFTEEEALKRIRSQWPSAEKVKRADAVIDNNGTIEETRRQLLAILHQWDLLGKGGSGHHHHHH

SEQ ID NO: 3747 - DNA, 639 bp, synthetic construct
  misc_feature 1..639: note = Variant of 3'O-kinase
  source 1..639: mol_type = other DNA
atggcgtttaccattggtttaacaggagggatcgcagcgggcaaatcgactgtgagtgccatgatgcgtgaactgggtctgccggtcatcgatgctgacgaggcagcacgcgccgttatgcgtccaggcgaagaagcttatcgccagattgtagctgcgttcggtccgggcattcttcgtgccgatggcgagatcgatcgccagaaactgggtgctatccgcttttcggacgaacaacaacgtaaggtgctgaatgcgattgtaggtcctgcagtcctgaagaagatgctcgctgagaaagaagctcatatccgctcaggcgccaagacggttgtgctggatatcccgctgctgttcgaatccggattgacccattgggtcgacaaagtgctcgtggtgtacgtcgatgatgatgttcagttacgccgccttatggcacgtaacgggtttactgaagaagaagctctgaagcgcattcgttcacagtggcccagtgcggagaaagttaaacgtgcagacgctgtcatcgacaataatggcacgattgaagaaacccgccgccagctgctggccattttacaccagtgggatctgctgggtgctggtggctccggccaccatcatcaccatcactaatga

SEQ ID NO: 3748 - protein, 211 aa, synthetic construct
  REGION 1..211: note = Variant of 3'O-kinase
MAFTIGLTGGIAAGKSTVSAMMRELGLPVIDADEAARAVMRPGEEAYRQIVAAFGPGILRADGEIDRQKLGAIRFSDEQQRKVLNAIVGPAVLKKMLAEKEAHIRSGAKTVVLDIPLLFESGLTHWVDKVLVVYVDDDVQLRRLMARNGFTEEEALKRIRSQWPSAEKVKRADAVIDNNGTIEETRRQLLAILHQWDLLGAGGSGHHHHHH

SEQ ID NO: 3749 - DNA, 639 bp, synthetic construct
  misc_feature 1..639: note = Variant of 3'O-kinase
  source 1..639: mol_type = other DNA
atggcgtttaccattggtttaacaggagggatcgcagcgggcaaatcgactgtgagtgccatgatgcgtgaactgggtctgccggtcatcgatgctgacgaggcagcacgcgccgttatgcgtccaggcgaagaagcttatcgccatattgtagctgcgttcggtccgggcattcttcgtgccgatggcgagatcgatcgccagaaactgggtgctatccgcttttcggacgaacaacaacgtaaggtgctgaatgcgattgtaggtcctgcagtcctgaagaagatgctcgctgagaaagaagctcatatccgctcaggcgccaagacggttgtgctggatatcccgctgctgttcgaatccggattgacccattgggtcgacaaagtgctcgtggtgtacgtcgatgatgatgttcagttacgccgccttatggcacgtaacgggtttactgaagaagaagctctgaagcgcattcgttcacagtggcccagtgcggagaaagttaaacgtgcagacgctgtcatcgacaataatggcacgattgaagaaacccgccgccagctgctggccattttacaccagtgggatctgctgggtaagggtggctccggccaccatcatcaccatcactaatga

SEQ ID NO: 3750 - protein, 211 aa, synthetic construct
  REGION 1..211: note = Variant of 3'O-kinase
MAFTIGLTGGIAAGKSTVSAMMRELGLPVIDADEAARAVMRPGEEAYRHIVAAFGPGILRADGEIDRQKLGAIRFSDEQQRKVLNAIVGPAVLKKMLAEKEAHIRSGAKTVVLDIPLLFESGLTHWVDKVLVVYVDDDVQLRRLMARNGFTEEEALKRIRSQWPSAEKVKRADAVIDNNGTIEETRRQLLAILHQWDLLGKGGSGHHHHHH

SEQ ID NO: 3751 - DNA, 639 bp, synthetic construct
  misc_feature 1..639: note = Variant of 3'O-kinase
  source 1..639: mol_type = other DNA
atggcgtttaccattggtttaacaggagggatcgcagcgggcaaatcgactgtgagtgccatgatgcgtgaactgggtctgccggtcatcgatgctgacgaggcagcacgcgccgttatgcgtccaggcgaagaagcttatcgccagattgtagctgcgttcggtccgggcattcttcgtgccgatggcgagatcgatcgccagaaactgggtgctatccgcttttcggacgaacaacaacgtaaggtgctgaatgcgattgtaggtcctgcagtcctgaagaagatgaatgctgagaaagaagctcatatccgctcaggcgccaagacggttgtgctggatatcccgctgctgttcgaatccggattgacccattgggtcgacaaagtgctcgtggtgtacgtcgatgatgatgttcagttacgccgccttatggcacgtaacgggtttactgaagaagaagctctgaagcgcattcgttcacagtggcccagtgcggagaaagttaaacgtgcagacgctgtcatcgacaataatggcacgattgaagaaacccgccgccagctgctggccattttacaccagtgggatctgctgggtaagggtggctccggccaccatcatcaccatcactaatga

SEQ ID NO: 3752 - protein, 211 aa, synthetic construct
  REGION 1..211: note = Variant of 3'O-kinase
MAFTIGLTGGIAAGKSTVSAMMRELGLPVIDADEAARAVMRPGEEAYRQIVAAFGPGILRADGEIDRQKLGAIRFSDEQQRKVLNAIVGPAVLKKMNAEKEAHIRSGAKTVVLDIPLLFESGLTHWVDKVLVVYVDDDVQLRRLMARNGFTEEEALKRIRSQWPSAEKVKRADAVIDNNGTIEETRRQLLAILHQWDLLGKGGSGHHHHHH

SEQ ID NO: 3753 - DNA, 639 bp, synthetic construct
  misc_feature 1..639: note = Variant of 3'O-kinase
  source 1..639: mol_type = other DNA
atggcgtttaccattggtttaacaggagggatcgcagcgggcaaatcgactgtgagtgccatgatgcgtgaactgggtctgccggtcatcgatgctgacgaggcagcacgcgccgttatgcgtccaggcgaagaagcttatcgccagattgtagctgcgttcggtccgggcattcttcgtgccgatggcgagatcgatcgccagaaactgggtgctatccgcttttcggacgaacaacaacgtaaggtgctgaatgcgattgtaggtcctgcagtcctgaagaagatgctcgctgagaaagaagctcatatccgctcaggcgccaagacggttgtgctggatatcccgctgctgttcgaatccggattgacccattgggtcgacaaagtgctcgtggtgtacgtcgatgatgatgttcagttacgccgccttatggcacgtaacgggtttactgaagatgaagctctgaagcgcattcgttcacagtggcccagtgcggagaaagttaaacgtgcagacgctgtcatcgacaataatggcacgattgaagaaacccgccgccagctgctggccattttacaccagtgggatctgctgggtaagggtggctccggccaccatcatcaccatcactaatga

SEQ ID NO: 3754 - protein, 211 aa, synthetic construct
  REGION 1..211: note = Variant of 3'O-kinase
MAFTIGLTGGIAAGKSTVSAMMRELGLPVIDADEAARAVMRPGEEAYRQIVAAFGPGILRADGEIDRQKLGAIRFSDEQQRKVLNAIVGPAVLKKMLAEKEAHIRSGAKTVVLDIPLLFESGLTHWVDKVLVVYVDDDVQLRRLMARNGFTEDEALKRIRSQWPSAEKVKRADAVIDNNGTIEETRRQLLAILHQWDLLGKGGSGHHHHHH

SEQ ID NO: 3755 - DNA, 639 bp, synthetic construct
  misc_feature 1..639: note = Variant of 3'O-kinase
  source 1..639: mol_type = other DNA
atggcgtttaccattggtttaacaggagggatcgcagcgggcaaatcgactgtgagtgccatgatgcgtgaactgggtctgccggtcatcgatgctgacgaggcagcacgcgccgttatgcgtccaggcgaagaagcttatcgccagattgtagctgcgttcggtccgggcattcttcgtgccgatggcgagatcgatcgccagaaactgggtgctatccgcttttcggacgaacaacaacgtaaggtgctgaatgcgattgtaggtcctgcagtcctgaagaagatgctcgctgagaaagaagctcatatccgctcaggcgccaagacggttgtgctggatatcccgctgctgttcgaatccggattgacccattgggtcgacaaagtgctcgtggtgtacgtcgatgatgatgttcagttacgccgccttatggcacgtaacgggtttactgaagtggaagctctgaagcgcattcgttcacagtggcccagtgcggagaaagttaaacgtgcagacgctgtcatcgacaataatggcacgattgaagaaacccgccgccagctgctggccattttacaccagtgggatctgctgggtaagggtggctccggccaccatcatcaccatcactaatga

SEQ ID NO: 3756 - protein, 211 aa, synthetic construct
  REGION 1..211: note = Variant of 3'O-kinase
MAFTIGLTGGIAAGKSTVSAMMRELGLPVIDADEAARAVMRPGEEAYRQIVAAFGPGILRADGEIDRQKLGAIRFSDEQQRKVLNAIVGPAVLKKMLAEKEAHIRSGAKTVVLDIPLLFESGLTHWVDKVLVVYVDDDVQLRRLMARNGFTEVEALKRIRSQWPSAEKVKRADAVIDNNGTIEETRRQLLAILHQWDLLGKGGSGHHHHHH

SEQ ID NO: 3757 - DNA, 639 bp, synthetic construct
  misc_feature 1..639: note = Variant of 3'O-kinase
  source 1..639: mol_type = other DNA
atggcgctgaccattggtttaacaggagggatcgcagcgggcaaatcgactgtgagtgccatgatgcgtgaactgggtctgccggtcatcgatgctgacgaggcagcacgcgccgttatgcgtccaggcgaagaagcttatcgccagattgtagctgcgttcggtccgggcattcttcgtgccgatggcgagatcgatcgccagaaactgggtgctatccgcttttcggacgaacaacaacgtaaggtgctgaatgcgattgtaggtcctgcagtcctgaagaagatgctcgctgagaaagaagctcatatccgctcaggcgccaagacggttgtgctggatatcccgctgctgttcgaatccggattgacccattgggtcgacaaagtgctcgtggtgtacgtcgatgatgatgttcagttacgccgccttatggcacgtaacgggtttactgaagaagaagctctgaagcgcattcgttcacagtggcccagtgcggagaaagttaaacgtgcagacgctgtcatcgacaataatggcacgattgaagaaacccgccgccagctgctggccattttacaccagtgggatctgctgggtaagggtggctccggccaccatcatcaccatcactaatga

SEQ ID NO: 3758 - protein, 211 aa, synthetic construct
  REGION 1..211: note = Variant of 3'O-kinase
MALTIGLTGGIAAGKSTVSAMMRELGLPVIDADEAARAVMRPGEEAYRQIVAAFGPGILRADGEIDRQKLGAIRFSDEQQRKVLNAIVGPAVLKKMLAEKEAHIRSGAKTVVLDIPLLFESGLTHWVDKVLVVYVDDDVQLRRLMARNGFTEEEALKRIRSQWPSAEKVKRADAVIDNNGTIEETRRQLLAILHQWDLLGKGGSGHHHHHH

SEQ ID NO: 3759 - DNA, 639 bp, synthetic construct
  misc_feature 1..639: note = Variant of 3'O-kinase
  source 1..639: mol_type = other DNA
atggcgtttaccattggtttaacaggagggatcgcagcgggcaaatcgactgtgagtgccatgatgcgtgaactgggtctgccggtcatcgatgctgacgaggcagcacgcgccgttatgcgtccaggcgaagaagcttatcgcatgattgtagctgcgttcggtccgggcattcttcgtgccgatggcgagatcgatcgccagaaactgggtgctatccgcttttcggacgaacaacaacgtaaggtgctgaatgcgattgtaggtcctgcagtcctgaagaagatgctcgctgagaaagaagctcatatccgctcaggcgccaagacggttgtgctggatatcccgctgctgttcgaatccggattgacccattgggtcgacaaagtgctcgtggtgtacgtcgatgatgatgttcagttacgccgccttatggcacgtaacgggtttactgaagaagaagctctgaagcgcattcgttcacagtggcccagtgcggagaaagttaaacgtgcagacgctgtcatcgacaataatggcacgattgaagaaacccgccgccagctgctggccattttacaccagtgggatctgctgggtaagggtggctccggccaccatcatcaccatcactaatga

SEQ ID NO: 3760 - protein, 211 aa, synthetic construct
  REGION 1..211: note = Variant of 3'O-kinase
MAFTIGLTGGIAAGKSTVSAMMRELGLPVIDADEAARAVMRPGEEAYRMIVAAFGPGILRADGEIDRQKLGAIRFSDEQQRKVLNAIVGPAVLKKMLAEKEAHIRSGAKTVVLDIPLLFESGLTHWVDKVLVVYVDDDVQLRRLMARNGFTEEEALKRIRSQWPSAEKVKRADAVIDNNGTIEETRRQLLAILHQWDLLGKGGSGHHHHHH

SEQ ID NO: 3761 - DNA, 639 bp, synthetic construct
  misc_feature 1..639: note = Variant of 3'O-kinase
  source 1..639: mol_type = other DNA
atggcgtttaccattggtttaacaggagggatcgcagatggcaaatcgactgtgagtgccatgatgcgtgaactgggtctgccggtcatcgatgctgacgaggcagcacgcgccgttatgcgtccaggcgaagaagcttatcgccagattgtagctgcgttcggtccgggcattcttcgtgccgatggcgagatcgatcgccagaaactgggtgctatccgcttttcggacgaacaacaacgtaaggtgctgaatgcgattgtaggtcctgcagtcctgaagaagatgctcgctgagaaagaagctcatatccgctcaggcgccaagacggttgtgctggatatcccgctgctgttcgaatccggattgacccattgggtcgacaaagtgctcgtggtgtacgtcgatgatgatgttcagttacgccgccttatggcacgtaacgggtttactgaagaagaagctctgaagcgcattcgttcacagtggcccagtgcggagaaagttaaacgtgcagacgctgtcatcgacaataatggcacgattgaagaaacccgccgccagctgctggccattttacaccagtgggatctgctgggtaagggtggctccggccaccatcatcaccatcactaatga

SEQ ID NO: 3762 - protein, 211 aa, synthetic construct
  REGION 1..211: note = Variant of 3'O-kinase
MAFTIGLTGGIADGKSTVSAMMRELGLPVIDADEAARAVMRPGEEAYRQIVAAFGPGILRADGEIDRQKLGAIRFSDEQQRKVLNAIVGPAVLKKMLAEKEAHIRSGAKTVVLDIPLLFESGLTHWVDKVLVVYVDDDVQLRRLMARNGFTEEEALKRIRSQWPSAEKVKRADAVIDNNGTIEETRRQLLAILHQWDLLGKGGSGHHHHHH

SEQ ID NO: 3763 - DNA, 639 bp, synthetic construct
  misc_feature 1..639: note = Variant of 3'O-kinase
  source 1..639: mol_type = other DNA
atggcgtttaccattggtttaacaggagggatcgcagcgggcaaatcgactgtgagtgccatgatgcgtgaactgggtctgccggtcatcgatgctgacgaggcagcacgcgccgttatgcgtccaggcgaagaagcttatcgccagattgtagctgcgttcggtccgggcattcttcgtgccgatggcgagatcgatcgccagaaactgggtgctatccgcttttcggacgaacaacaacgtaaggtgctgaatgcgattgtaggtcctgcagtcctgaagaagatgctcgctgagaaagaagctcatatccgctcaggcgccaagacggttgtgctggatatcccgctgctgttcgaatccggattgacccattgggtcgacaaagtgctcgtggtgtacgtcgatgatgatgttcagttagatcgccttatggcacgtaacgggtttactgaagaagaagctctgaagcgcattcgttcacagtggcccagtgcggagaaagttaaacgtgcagacgctgtcatcgacaataatggcacgattgaagaaacccgccgccagctgctggccattttacaccagtgggatctgctgggtaagggtggctccggccaccatcatcaccatcactaatga

SEQ ID NO: 3764 - protein, 211 aa, synthetic construct
  REGION 1..211: note = Variant of 3'O-kinase
MAFTIGLTGGIAAGKSTVSAMMRELGLPVIDADEAARAVMRPGEEAYRQIVAAFGPGILRADGEIDRQKLGAIRFSDEQQRKVLNAIVGPAVLKKMLAEKEAHIRSGAKTVVLDIPLLFESGLTHWVDKVLVVYVDDDVQLDRLMARNGFTEEEALKRIRSQWPSAEKVKRADAVIDNNGTIEETRRQLLAILHQWDLLGKGGSGHHHHHH

SEQ ID NO: 3765 - DNA, 639 bp, synthetic construct
  misc_feature 1..639: note = Variant of 3'O-kinase
  source 1..639: mol_type = other DNA
atggcgtttaccattggtttaacaggagggatcgcagcgggcaaatcgactgtgagtgccatgatgcgtgaactgggtctgccggtcatcgatgctgacgaggcagcacgcgccgttatgcgtccaggcgaagaagcttatcgccagattgtagctaagttcggtccgggcattcttcgtgccgatggcgagatcgatcgccagaaactgggtgctatccgcttttcggacgaacaacaacgtaaggtgctgaatgcgattgtaggtcctgcagtcctgaagaagatgctcgctgagaaagaagctcatatccgctcaggcgccaagacggttgtgctggatatcccgctgctgttcgaatccggattgacccattgggtcgacaaagtgctcgtggtgtacgtcgatgatgatgttcagttacgccgccttatggcacgtaacgggtttactgaagaagaagctctgaagcgcattcgttcacagtggcccagtgcggagaaagttaaacgtgcagacgctgtcatcgacaataatggcacgattgaagaaacccgccgccagctgctggccattttacaccagtgggatctgctgggtaagggtggctccggccaccatcatcaccatcactaatga

SEQ ID NO: 3766 - protein, 211 aa, synthetic construct
  REGION 1..211: note = Variant of 3'O-kinase
MAFTIGLTGGIAAGKSTVSAMMRELGLPVIDADEAARAVMRPGEEAYRQIVAKFGPGILRADGEIDRQKLGAIRFSDEQQRKVLNAIVGPAVLKKMLAEKEAHIRSGAKTVVLDIPLLFESGLTHWVDKVLVVYVDDDVQLRRLMARNGFTEEEALKRIRSQWPSAEKVKRADAVIDNNGTIEETRRQLLAILHQWDLLGKGGSGHHHHHH

SEQ ID NO: 3767 - DNA, 639 bp, synthetic construct
  misc_feature 1..639: note = Variant of 3'O-kinase
  source 1..639: mol_type = other DNA
atggcgtttaccattggtttaacaggagggatcgcagcgggcaaatcgactgtgagtgccatgatgcgtgaactgggtctgccggtcatcgatgctgacgaggcagcacgcgccgttatgcgtccaggcgaagaagcttatcgccagattgtagctgcgttcggtccgggcattcttcgtgccgatggcgagatcgatcgccagaaactgggtgctatccgcttttcggacgaacaacaacgtaaggtgctgaatgcgattgtaggtcctgcagtcctgaagaagatgctcgctgagaaagaagctcatatcctttcaggcgccaagacggttgtgctggatatcccgctgctgttcgaatccggattgacccattgggtcgacaaagtgctcgtggtgtacgtcgatgatgatgttcagttacgccgccttatggcacgtaacgggtttactgaagaagaagctctgaagcgcattcgttcacagtggcccagtgcggagaaagttaaacgtgcagacgctgtcatcgacaataatggcacgattgaagaaacccgccgccagctgctggccattttacaccagtgggatctgctgggtaagggtggctccggccaccatcatcaccatcactaatga

SEQ ID NO: 3768 - protein, 211 aa, synthetic construct
  REGION 1..211: note = Variant of 3'O-kinase
MAFTIGLTGGIAAGKSTVSAMMRELGLPVIDADEAARAVMRPGEEAYRQIVAAFGPGILRADGEIDRQKLGAIRFSDEQQRKVLNAIVGPAVLKKMLAEKEAHILSGAKTVVLDIPLLFESGLTHWVDKVLVVYVDDDVQLRRLMARNGFTEEEALKRIRSQWPSAEKVKRADAVIDNNGTIEETRRQLLAILHQWDLLGKGGSGHHHHHH

SEQ ID NO: 3769 - DNA, 639 bp, synthetic construct
  misc_feature 1..639: note = Variant of 3'O-kinase
  source 1..639: mol_type = other DNA
atggcgtttaccattggtttaacaggagggatcgcagcgggcaaatcgactgtgagtgccatgatgcgtgaactgggtctgccggtcatcgatgctgacgaggcagcacgcgccgttatgcgtccaggcgaagaagcttatcgccagattgtagctgcgttcggtccgggcattcttcgtgccgatggcgagatcgatcgccagaaactgggtgctatccgcttttcggacgaacaacaacgtaaggtgctgaatgcgattgtaggtcctgcagtcctgaagaagatgctcgctgagaaagaagctcatatccgctcaggcgccaagacggttgtgctggatatcccgctgctgttcgaatccggattgacccattgggtcgacaaagtgctcgtggtgtacgtcgatgatgatgttcagttacgccgccttatggcacgtaacgggtttactgaagaagaagctctgaagcgcattcgttcacagtggcccagtgcggagaaagttccgcgtgcagacgctgtcatcgacaataatggcacgattgaagaaacccgccgccagctgctggccattttacaccagtgggatctgctgggtaagggtggctccggccaccatcatcaccatcactaatga

SEQ ID NO: 3770 - protein, 211 aa, synthetic construct
  REGION 1..211: note = Variant of 3'O-kinase
MAFTIGLTGGIAAGKSTVSAMMRELGLPVIDADEAARAVMRPGEEAYRQIVAAFGPGILRADGEIDRQKLGAIRFSDEQQRKVLNAIVGPAVLKKMLAEKEAHIRSGAKTVVLDIPLLFESGLTHWVDKVLVVYVDDDVQLRRLMARNGFTEEEALKRIRSQWPSAEKVPRADAVIDNNGTIEETRRQLLAILHQWDLLGKGGSGHHHHHH

SEQ ID NO: 3771 - DNA, 639 bp, synthetic construct
  misc_feature 1..639: note = Variant of 3'O-kinase
  source 1..639: mol_type = other DNA
atggcgtttaccattggtttaacaggagggatcgcagcgggcaaatcgactgtgagtgccatgatgcgtgaactgggtctgccggtcatcgatgctgacgaggcatcgcgcgccgttatgcgtccaggcgaagaagcttatcgccagattgtagctgcgttcggtccgggcattcttcgtgccgatggcgagatcgatcgccagaaactgggtgctatccgcttttcggacgaacaacaacgtaaggtgctgaatgcgattgtaggtcctgcagtcctgaagaagatgctcgctgagaaagaagctcatatccgctcaggcgccaagacggttgtgctggatatcccgctgctgttcgaatccggattgacccattgggtcgacaaagtgctcgtggtgtacgtcgatgatgatgttcagttacgccgccttatggcacgtaacgggtttactgaagaagaagctctgaagcgcattcgttcacagtggcccagtgcggagaaagttaaacgtgcagacgctgtcatcgacaataatggcacgattgaagaaacccgccgccagctgctggccattttacaccagtgggatctgctgggtaagggtggctccggccaccatcatcaccatcactaatga

SEQ ID NO: 3772 - protein, 211 aa, synthetic construct
  REGION 1..211: note = Variant of 3'O-kinase
MAFTIGLTGGIAAGKSTVSAMMRELGLPVIDADEASRAVMRPGEEAYRQIVAAFGPGILRADGEIDRQKLGAIRFSDEQQRKVLNAIVGPAVLKKMLAEKEAHIRSGAKTVVLDIPLLFESGLTHWVDKVLVVYVDDDVQLRRLMARNGFTEEEALKRIRSQWPSAEKVKRADAVIDNNGTIEETRRQLLAILHQWDLLGKGGSGHHHHHH

SEQ ID NO: 3773 - DNA, 639 bp, synthetic construct
  misc_feature 1..639: note = Variant of 3'O-kinase
  source 1..639: mol_type = other DNA
atggcgtttaccattggtttaacaggagggatcgcagcgggcaaatcgactgtgagtgccatgatgcgtgaactgggtctgccggtcatcgatgctgacgaggcaggtcgcgccgttatgcgtccaggcgaagaagcttatcgccagattgtagctgcgttcggtccgggcattcttcgtgccgatggcgagatcgatcgccagaaactgggtgctatccgcttttcggacgaacaacaacgtaaggtgctgaatgcgattgtaggtcctgcagtcctgaagaagatgctcgctgagaaagaagctcatatccgctcaggcgccaagacggttgtgctggatatcccgctgctgttcgaatccggattgacccattgggtcgacaaagtgctcgtggtgtacgtcgatgatgatgttcagttacgccgccttatggcacgtaacgggtttactgaagaagaagctctgaagcgcattcgttcacagtggcccagtgcggagaaagttaaacgtgcagacgctgtcatcgacaataatggcacgattgaagaaacccgccgccagctgctggccattttacaccagtgggatctgctgggtaagggtggctccggccaccatcatcaccatcactaatga

SEQ ID NO: 3774 - protein, 211 aa, synthetic construct
  REGION 1..211: note = Variant of 3'O-kinase
MAFTIGLTGGIAAGKSTVSAMMRELGLPVIDADEAGRAVMRPGEEAYRQIVAAFGPGILRADGEIDRQKLGAIRFSDEQQRKVLNAIVGPAVLKKMLAEKEAHIRSGAKTVVLDIPLLFESGLTHWVDKVLVVYVDDDVQLRRLMARNGFTEEEALKRIRSQWPSAEKVKRADAVIDNNGTIEETRRQLLAILHQWDLLGKGGSGHHHHHH

SEQ ID NO: 3775 - DNA, 639 bp, synthetic construct
  misc_feature 1..639: note = Variant of 3'O-kinase
  source 1..639: mol_type = other DNA
atggcgtttaccattggtttaacaggagggatcgcagcgggcaaatcgactgtgagtgccatgatgcgtgaactgggtctgccggtcatcgatgctgacgaggcagcacgcgccgttatgcgtccaggcgaagaagcttatcgccagattgtagctgcgttcggtccgggcattcttcgtgccgatggcgagatcgatcgccagaaactgggtgctatccgcttttcggacgaacaacaacgtaaggtgctgaatgcgattgtaggtcctgcagtcctgaagaagatgctcgctgagaaagaagctcatatccgctcaggcgccaagacggttgtgctggatatcccgctgctgttcgaatccggattgacccattgggtcgacaaagtgctcgtggtgtacgtcgatgatgatgttcagttacgccgccttatggcacgtaacgggtttactgaagaagaagctctgaagcgcattcgttcacagtggcccagtgcggagaaagttaaacgtgcagacgctgtcatcgacaataatggcacgattgaagaaacccgccgccagctgctggccattttacaccagtatgatctgctgggtaagggtggctccggccaccatcatcaccatcactaatga

SEQ ID NO: 3776 - protein, 211 aa, synthetic construct
  REGION 1..211: note = Variant of 3'O-kinase
MAFTIGLTGGIAAGKSTVSAMMRELGLPVIDADEAARAVMRPGEEAYRQIVAAFGPGILRADGEIDRQKLGAIRFSDEQQRKVLNAIVGPAVLKKMLAEKEAHIRSGAKTVVLDIPLLFESGLTHWVDKVLVVYVDDDVQLRRLMARNGFTEEEALKRIRSQWPSAEKVKRADAVIDNNGTIEETRRQLLAILHQYDLLGKGGSGHHHHHH

SEQ ID NO: 3777 - DNA, 639 bp, synthetic construct
  misc_feature 1..639: note = Variant of 3'O-kinase
  source 1..639: mol_type = other DNA
atggcgtttaccattggtttaacaggagggatcgcagcgggcaaatcgactgtgagtgccatgatgcgtgaactgggtctgccggtcatcgatgctgacgaggcagcacgcgccgttatgcgtccaggcgaagaagcttcgcgccagattgtagctgcgttcggtccgggcattcttcgtgccgatggcgagatcgatcgccagaaactgggtgctatccgcttttcggacgaacaacaacgtaaggtgctgaatgcgattgtaggtcctgcagtcctgaagaagatgctcgctgagaaagaagctcatatccgctcaggcgccaagacggttgtgctggatatcccgctgctgttcgaatccggattgacccattgggtcgacaaagtgctcgtggtgtacgtcgatgatgatgttcagttacgccgccttatggcacgtaacgggtttactgaagaagaagctctgaagcgcattcgttcacagtggcccagtgcggagaaagttaaacgtgcagacgctgtcatcgacaataatggcacgattgaagaaacccgccgccagctgctggccattttacaccagtgggatctgctgggtaagggtggctccggccaccatcatcaccatcactaatga

SEQ ID NO: 3778 - protein, 211 aa, synthetic construct
  REGION 1..211: note = Variant of 3'O-kinase
MAFTIGLTGGIAAGKSTVSAMMRELGLPVIDADEAARAVMRPGEEASRQIVAAFGPGILRADGEIDRQKLGAIRFSDEQQRKVLNAIVGPAVLKKMLAEKEAHIRSGAKTVVLDIPLLFESGLTHWVDKVLVVYVDDDVQLRRLMARNGFTEEEALKRIRSQWPSAEKVKRADAVIDNNGTIEETRRQLLAILHQWDLLGKGGSGHHHHHH

SEQ ID NO: 3779 - DNA, 639 bp, synthetic construct
  misc_feature 1..639: note = Variant of 3'O-kinase
  source 1..639: mol_type = other DNA
atggcgtttaccattggtttaacaggagggatcgcagcgggcaaatcgactgtgagtgccatgatgcgtgaactgggtctgccggtcatcgatgctgacgaggcagcacgcgccgttatgcgtccaggcgaagaagcttatcgccagattgtagctgcgttcggtccgggcattcttcgtgccgatggcgagatcgatcgccagaaactgggtgctatccgcttttcggacgaacaacaacgtaaggtgctgaatgcgattgtaggtcctgcagtcctgaagaagatgctcgctgagaaagaagctcatatccgctcaggcgccaagacggttgtgctggatatcccgctgctgttcgaatccggattgacccattgggtcgacaaagtgctcgtggtgtacgtcgatgatgatgttcagttacgccgccttatggcacgtaacgggtttactgaagaagaagctctgaagcgcattcgttcacagtggcccagtgcggagaaagttaaacgtgcagacgctgtcatcgacaataatggcacgattgaagaaacccgccgccagctgctggccattttacacccgtgggatctgctgggtaagggtggctccggccaccatcatcaccatcactaatga

SEQ ID NO: 3780 - protein, 211 aa, synthetic construct
  REGION 1..211: note = Variant of 3'O-kinase
MAFTIGLTGGIAAGKSTVSAMMRELGLPVIDADEAARAVMRPGEEAYRQIVAAFGPGILRADGEIDRQKLGAIRFSDEQQRKVLNAIVGPAVLKKMLAEKEAHIRSGAKTVVLDIPLLFESGLTHWVDKVLVVYVDDDVQLRRLMARNGFTEEEALKRIRSQWPSAEKVKRADAVIDNNGTIEETRRQLLAILHPWDLLGKGGSGHHHHHH

SEQ ID NO: 3781 - DNA, 639 bp, synthetic construct
  misc_feature 1..639: note = Variant of 3'O-kinase
  source 1..639: mol_type = other DNA
atggcgtttaccattggtttaacaggagggatcgcagcgggcaaatcgactgtgagtgccatgatgcgtgaactgggtctgccggtcatcgatgctgacgaggcagcacgcgccgttatgcgtccaggcgaagaagcttatcgccagattgtagctgcgttcggtccgggcattcttcgtgccgatggcgagatcgatcgccagaaactgggtgctatccgcttttcggacgaacaacaacgtaaggtgctgaatgcgattgtaggtcctgcagtcctgaagaagatgctcgctgagaaagaagctcatatccgctcaggcgccaagacggttgtgctggatatcccgctgctgttcgaatccggattgacccattgggtcgacaaagtgctcgtggtgtacgtcgatgatgatgttcagttacgccgccttatggcacgtaacgggtttactgaagaagaagctctgaagcgcattcgttcacagtggcccagtgcggagaaagttaaacgtgcatatgctgtcatcgacaataatggcacgattgaagaaacccgccgccagctgctggccattttacaccagtgggatctgctgggtaagggtggctccggccaccatcatcaccatcactaatga

SEQ ID NO: 3782 - protein, 211 aa, synthetic construct
  REGION 1..211: note = Variant of 3'O-kinase
MAFTIGLTGGIAAGKSTVSAMMRELGLPVIDADEAARAVMRPGEEAYRQIVAAFGPGILRADGEIDRQKLGAIRFSDEQQRKVLNAIVGPAVLKKMLAEKEAHIRSGAKTVVLDIPLLFESGLTHWVDKVLVVYVDDDVQLRRLMARNGFTEEEALKRIRSQWPSAEKVKRAYAVIDNNGTIEETRRQLLAILHQWDLLGKGGSGHHHHHH

SEQ ID NO: 3783 - DNA, 639 bp, synthetic construct
  misc_feature 1..639: note = Variant of 3'O-kinase
  source 1..639: mol_type = other DNA
atggcgtttaccattggtttaacaggagggatcgcagcgggcaaatcgactgtgagtgccatgatgcgtgaactgggtctgccggtcatcgatgctgacgaggcagcacgcgccgttatgcgtccaggcgaagaagcttatcgccagattgtagctgagttcggtccgggcattcttcgtgccgatggcgagatcgatcgccagaaactgggtgctatccgcttttcggacgaacaacaacgtaaggtgctgaatgcgattgtaggtcctgcagtcctgaagaagatgctcgctgagaaagaagctcatatccgctcaggcgccaagacggttgtgctggatatcccgctgctgttcgaatccggattgacccattgggtcgacaaagtgctcgtggtgtacgtcgatgatgatgttcagttacgccgccttatggcacgtaacgggtttactgaagaagaagctctgaagcgcattcgttcacagtggcccagtgcggagaaagttaaacgtgcagacgctgtcatcgacaataatggcacgattgaagaaacccgccgccagctgctggccattttacaccagtgggatctgctgggtaagggtggctccggccaccatcatcaccatcactaatga

SEQ ID NO: 3784 - protein, 211 aa, synthetic construct
  REGION 1..211: note = Variant of 3'O-kinase
MAFTIGLTGGIAAGKSTVSAMMRELGLPVIDADEAARAVMRPGEEAYRQIVAEFGPGILRADGEIDRQKLGAIRFSDEQQRKVLNAIVGPAVLKKMLAEKEAHIRSGAKTVVLDIPLLFESGLTHWVDKVLVVYVDDDVQLRRLMARNGFTEEEALKRIRSQWPSAEKVKRADAVIDNNGTIEETRRQLLAILHQWDLLGKGGSGHHHHHH

SEQ ID NO: 3785 - DNA, 639 bp, synthetic construct
  misc_feature 1..639: note = Variant of 3'O-kinase
  source 1..639: mol_type = other DNA
atggcgtttaccattggtttaacaggagggatcgcagcgggcaaatcgactgtgagtgccatgatgcgtgaactgggtctgccggtcatcgatgctgacgaggcagcacgcgccgttatgcgtccaggcgaagaagcttatcgccagattgtagctgcgttcggtccgggcattcttcgtgccgatggcgagatcgatcgccagaaactgggtgctatccgcttttcggacgaacaacaacgtaaggtgctgaatgcgattgtaggtcctgcagtcctgaagaagatgctcgctgagaaagaagctcatatccgctcaggcgccaagacggttgtgctggatatcccgctgctgttcgaatccggattgacccattgggtcgacaaagtgctcgtggtgtacgtcgatgatgatgttcagttacgccgccttatggcacgtaacgggtttactgaagaagaagctctgaagcgcattcgttcacagtggcccagtgcggagaaagttaaacgtgcagacgctgtcatcgacaataatggcacgattgaagaaacccgccgccagctgctggccattttacaccagtgggatctgtgtggtaagggtggctccggccaccatcatcaccatcactaatga

SEQ ID NO: 3786 - protein, 211 aa, synthetic construct
  REGION 1..211: note = Variant of 3'O-kinase
MAFTIGLTGGIAAGKSTVSAMMRELGLPVIDADEAARAVMRPGEEAYRQIVAAFGPGILRADGEIDRQKLGAIRFSDEQQRKVLNAIVGPAVLKKMLAEKEAHIRSGAKTVVLDIPLLFESGLTHWVDKVLVVYVDDDVQLRRLMARNGFTEEEALKRIRSQWPSAEKVKRADAVIDNNGTIEETRRQLLAILHQWDLCGKGGSGHHHHHH

SEQ ID NO: 3787 - DNA, 639 bp, synthetic construct
  misc_feature 1..639: note = Variant of 3'O-kinase
  source 1..639: mol_type = other DNA
atggcgtttaccattggtttaacaggagggatcgcagcgggcaaatcgactgtgagtgccatgatgcgtgaactgggtctgccggtcatcgatgctgacgaggcagcacgcgccgttatgcgtccaggcgaagaagcttatcgccagattgtagctgcgttcggtccgggcattcttcgtgccgatggcgagatcgatcgccagaaactgggtgctatccgcttttcggacgaaggtcaacgtaaggtgctgaatgcgattgtaggtcctgcagtcctgaagaagatgctcgctgagaaagaagctcatatccgctcaggcgccaagacggttgtgctggatatcccgctgctgttcgaatccggattgacccattgggtcgacaaagtgctcgtggtgtacgtcgatgatgatgttcagttacgccgccttatggcacgtaacgggtttactgaagaagaagctctgaagcgcattcgttcacagtggcccagtgcggagaaagttaaacgtgcagacgctgtcatcgacaataatggcacgattgaagaaacccgccgccagctgctggccattttacaccagtgggatctgctgggtaagggtggctccggccaccatcatcaccatcactaatga

SEQ ID NO: 3788 - protein, 211 aa, synthetic construct
  REGION 1..211: note = Variant of 3'O-kinase
MAFTIGLTGGIAAGKSTVSAMMRELGLPVIDADEAARAVMRPGEEAYRQIVAAFGPGILRADGEIDRQKLGAIRFSDEGQRKVLNAIVGPAVLKKMLAEKEAHIRSGAKTVVLDIPLLFESGLTHWVDKVLVVYVDDDVQLRRLMARNGFTEEEALKRIRSQWPSAEKVKRADAVIDNNGTIEETRRQLLAILHQWDLLGKGGSGHHHHHH

SEQ ID NO: 3789 - DNA, 639 bp, synthetic construct
  misc_feature 1..639: note = Variant of 3'O-kinase
  source 1..639: mol_type = other DNA
atggcgtttaccattggtttaacaggagggatcgcagcgggcaaatcgactgtgagtgccatgatgcgtgaactgggtctgccggtcatcgatgctgacgaggcagcacgcgccgttatgcgtccaggcgaagaagcttatcgctgtattgtagctgcgttcggtccgggcattcttcgtgccgatggcgagatcgatcgccagaaactgggtgctatccgcttttcggacgaacaacaacgtaaggtgctgaatgcgattgtaggtcctgcagtcctgaagaagatgctcgctgagaaagaagctcatatccgctcaggcgccaagacggttgtgctggatatcccgctgctgttcgaatccggattgacccattgggtcgacaaagtgctcgtggtgtacgtcgatgatgatgttcagttacgccgccttatggcacgtaacgggtttactgaagaagaagctctgaagcgcattcgttcacagtggcccagtgcggagaaagttaaacgtgcagacgctgtcatcgacaataatggcacgattgaagaaacccgccgccagctgctggccattttacaccagtgggatctgctgggtaagggtggctccggccaccatcatcaccatcactaatga

SEQ ID NO: 3790 - protein, 211 aa, synthetic construct
  REGION 1..211: note = Variant of 3'O-kinase
MAFTIGLTGGIAAGKSTVSAMMRELGLPVIDADEAARAVMRPGEEAYRCIVAAFGPGILRADGEIDRQKLGAIRFSDEQQRKVLNAIVGPAVLKKMLAEKEAHIRSGAKTVVLDIPLLFESGLTHWVDKVLVVYVDDDVQLRRLMARNGFTEEEALKRIRSQWPSAEKVKRADAVIDNNGTIEETRRQLLAILHQWDLLGKGGSGHHHHHH

SEQ ID NO: 3791 - DNA, 639 bp, synthetic construct
  misc_feature 1..639: note = Variant of 3'O-kinase
  source 1..639: mol_type = other DNA
atggcgtttaccattggtttaacaggagggatcgcagcgggcaaatcgactgtgagtgccatgatgcgtgaactgggtctggatgtcatcgatgctgacgaggcagcacgcgccgttatgcgtccaggcgaagaagcttatcgccagattgtagctgcgttcggtccgggcattcttcgtgccgatggcgagatcgatcgccagaaactgggtgctatccgcttttcggacgaacaacaacgtaaggtgctgaatgcgattgtaggtcctgcagtcctgaagaagatgctcgctgagaaagaagctcatatccgctcaggcgccaagacggttgtgctggatatcccgctgctgttcgaatccggattgacccattgggtcgacaaagtgctcgtggtgtacgtcgatgatgatgttcagttacgccgccttatggcacgtaacgggtttactgaagaagaagctctgaagcgcattcgttcacagtggcccagtgcggagaaagttaaacgtgcagacgctgtcatcgacaataatggcacgattgaagaaacccgccgccagctgctggccattttacaccagtgggatctgctgggtaagggtggctccggccaccatcatcaccatcactaatga

SEQ ID NO: 3792 - protein, 211 aa, synthetic construct
  REGION 1..211: note = Variant of 3'O-kinase
MAFTIGLTGGIAAGKSTVSAMMRELGLDVIDADEAARAVMRPGEEAYRQIVAAFGPGILRADGEIDRQKLGAIRFSDEQQRKVLNAIVGPAVLKKMLAEKEAHIRSGAKTVVLDIPLLFESGLTHWVDKVLVVYVDDDVQLRRLMARNGFTEEEALKRIRSQWPSAEKVKRADAVIDNNGTIEETRRQLLAILHQWDLLGKGGSGHHHHHH

SEQ ID NO: 3793 - DNA, 639 bp, synthetic construct
  misc_feature 1..639: note = Variant of 3'O-kinase
  source 1..639: mol_type = other DNA
atggcgtttaccattggtttaacaggagggatcgcagcgggcaaatcgactgtgagtgccatgatgcgtgaactgggtctgccggtcatcgatgctgacgaggcagcacgcgccgttatgcgtccaggcgaagaagcttatcgccagattgtagctgcgttcggtccgggcattcttcgtgccgatggcgagatcgatcgccagaaactgggtgctatccgcttttcggacgaacaacaacgtaaggtgctgaatgcgattgtaggtcctgcagtcctgaagaagatgctcgctgagaaagaagctcatatccgctcaggcgccaagacggttgtgctggatatcccgctgctgttcgaatccggattgacccattgggtcgacaaagtgctcgtggtgtacgtcgatgatgatgttcagttacgccgccttatggcacgtaacgggtttactgaagaagaagctctgaagcgcattcgttcacagtggcccagtgcggagaaagttaaacgtgcagacgctgtcatcgacaataatggcacgattgaagaaacccgccgccagctgctggccattttacaccagtgggatctgctgggtaagggtggctgtggccaccatcatcaccatcactaatga

SEQ ID NO: 3794 - protein, 211 aa, synthetic construct
  REGION 1..211: note = Variant of 3'O-kinase
MAFTIGLTGGIAAGKSTVSAMMRELGLPVIDADEAARAVMRPGEEAYRQIVAAFGPGILRADGEIDRQKLGAIRFSDEQQRKVLNAIVGPAVLKKMLAEKEAHIRSGAKTVVLDIPLLFESGLTHWVDKVLVVYVDDDVQLRRLMARNGFTEEEALKRIRSQWPSAEKVKRADAVIDNNGTIEETRRQLLAILHQWDLLGKGGCGHHHHHH

SEQ ID NO: 3795 - DNA, 639 bp, synthetic construct
  misc_feature 1..639: note = Variant of 3'O-kinase
  source 1..639: mol_type = other DNA
atggcgtttaccattggtttaacaggagggatcgcagcgggcaaatcgactgtgagtgccatgatgcgtgaactgggtctgccggtcatcgatgctgacgaggcagcacgcgccgttatgcgtccaggcgaagaagcttatcgccagattgtagctgcgttcggtccgggcattcttcgtgccgatggcgagatcgatcgccagaaactgggtgctatccgcttttcggacgaacaacaacgtaaggtgctgaatgcgattgtaggtcctgcagtcctgaagaagatgctcgctgagaaagaagctcatatccgctcaggcgcctctacggttgtgctggatatcccgctgctgttcgaatccggattgacccattgggtcgacaaagtgctcgtggtgtacgtcgatgatgatgttcagttacgccgccttatggcacgtaacgggtttactgaagaagaagctctgaagcgcattcgttcacagtggcccagtgcggagaaagttaaacgtgcagacgctgtcatcgacaataatggcacgattgaagaaacccgccgccagctgctggccattttacaccagtgggatctgctgggtaagggtggctccggccaccatcatcaccatcactaatga

SEQ ID NO: 3796 - protein, 211 aa, synthetic construct
  REGION 1..211: note = Variant of 3'O-kinase
MAFTIGLTGGIAAGKSTVSAMMRELGLPVIDADEAARAVMRPGEEAYRQIVAAFGPGILRADGEIDRQKLGAIRFSDEQQRKVLNAIVGPAVLKKMLAEKEAHIRSGASTVVLDIPLLFESGLTHWVDKVLVVYVDDDVQLRRLMARNGFTEEEALKRIRSQWPSAEKVKRADAVIDNNGTIEETRRQLLAILHQWDLLGKGGSGHHHHHH

SEQ ID NO: 3797 - DNA, 639 bp, synthetic construct
  misc_feature 1..639: note = Variant of 3'O-kinase
  source 1..639: mol_type = other DNA
atggcgtttaccattggtttaacaggagggatcgcagcgggcaaatcgactgtgagtgccatgatgcgtgaactgggtctgccggtcatcgatgctgacgaggcagcacgcgccgttatgcgtccaggcgaagaagcttatcgccagattgtagctgcgttcggtccgggcattcttcgtgccgatggcgagatcgatcgccagaaactgggtgctatccgcttttcggacgaacaacaacgtaaggtgctgaatgcgattgtaggtcctgcagtcctgaagaagatgctcgctgagaaagaagctcatatccgctcaggcgccaagacggttgtgctggatatcccgctgctgttcgaatccattttgacccattgggtcgacaaagtgctcgtggtgtacgtcgatgatgatgttcagttacgccgccttatggcacgtaacgggtttactgaagaagaagctctgaagcgcattcgttcacagtggcccagtgcggagaaagttaaacgtgcagacgctgtcatcgacaataatggcacgattgaagaaacccgccgccagctgctggccattttacaccagtgggatctgctgggtaagggtggctccggccaccatcatcaccatcactaatga

SEQ ID NO: 3798 - protein, 211 aa, synthetic construct
  REGION 1..211: note = Variant of 3'O-kinase
MAFTIGLTGGIAAGKSTVSAMMRELGLPVIDADEAARAVMRPGEEAYRQIVAAFGPGILRADGEIDRQKLGAIRFSDEQQRKVLNAIVGPAVLKKMLAEKEAHIRSGAKTVVLDIPLLFESILTHWVDKVLVVYVDDDVQLRRLMARNGFTEEEALKRIRSQWPSAEKVKRADAVIDNNGTIEETRRQLLAILHQWDLLGKGGSGHHHHHH

SEQ ID NO: 3799 - DNA, 639 bp, synthetic construct
  misc_feature 1..639: note = Variant of 3'O-kinase
  source 1..639: mol_type = other DNA
atggcgtttaccattggtttaacaggagggatcgcagcgggcaaatcgactgtgagtgccatgatgcgtgaaatgggtctgccggtcatcgatgctgacgaggcagcacgcgccgttatgcgtccaggcgaagaagcttatcgccagattgtagctgcgttcggtccgggcattcttcgtgccgatggcgagatcgatcgccagaaactgggtgctatccgcttttcggacgaacaacaacgtaaggtgctgaatgcgattgtaggtcctgcagtcctgaagaagatgctcgctgagaaagaagctcatatccgctcaggcgccaagacggttgtgctggatatcccgctgctgttcgaatccggattgacccattgggtcgacaaagtgctcgtggtgtacgtcgatgatgatgttcagttacgccgccttatggcacgtaacgggtttactgaagaagaagctctgaagcgcattcgttcacagtggcccagtgcggagaaagttaaacgtgcagacgctgtcatcgacaataatggcacgattgaagaaacccgccgccagctgctggccattttacaccagtgggatctgctgggtaagggtggctccggccaccatcatcaccatcactaatga

SEQ ID NO: 3800 - protein, 211 aa, synthetic construct
  REGION 1..211: note = Variant of 3'O-kinase
MAFTIGLTGGIAAGKSTVSAMMREMGLPVIDADEAARAVMRPGEEAYRQIVAAFGPGILRADGEIDRQKLGAIRFSDEQQRKVLNAIVGPAVLKKMLAEKEAHIRSGAKTVVLDIPLLFESGLTHWVDKVLVVYVDDDVQLRRLMARNGFTEEEALKRIRSQWPSAEKVKRADAVIDNNGTIEETRRQLLAILHQWDLLGKGGSGHHHHHH

SEQ ID NO: 3801 - DNA, 639 bp, synthetic construct
  misc_feature 1..639: note = Variant of 3'O-kinase
  source 1..639: mol_type = other DNA
atggcgtttaccattggtttaacaggagggatcgcagcgggcaaatcgactgtgagtgccatgatgcgtgaactgggtctgccggtcatcgatgctgacgaggcagcacgcgccgttatgcgtccaggcgaagaagcttatcgccagattgtagctgcgttcggtccgggcattcttcgtgccgatggcgagatcgatcgccagaaactgggtgctatccgcttttcggacgaacaacaacgtaaggtgctgaatgcgattgtaggtcctgcagtcctgaagaagatgctcgctgagaaagaagctcatatccgctcaggcgccaagacggttgtgctggatatcccgctgctgttcgaatccggattgacccattgggtcgacaaagtgctcgtggtgtacgtcgatgatgatgttcagttacgccgccttatggcacgtaacgggtttactgaagaagaagctctgaagcgcattcgttcacagtggcccagtgcggagaaagttaaatcggcagacgctgtcatcgacaataatggcacgattgaagaaacccgccgccagctgctggccattttacaccagtgggatctgctgggtaagggtggctccggccaccatcatcaccatcactaatga

SEQ ID NO: 3802 - protein, 211 aa, synthetic construct
  REGION 1..211: note = Variant of 3'O-kinase
MAFTIGLTGGIAAGKSTVSAMMRELGLPVIDADEAARAVMRPGEEAYRQIVAAFGPGILRADGEIDRQKLGAIRFSDEQQRKVLNAIVGPAVLKKMLAEKEAHIRSGAKTVVLDIPLLFESGLTHWVDKVLVVYVDDDVQLRRLMARNGFTEEEALKRIRSQWPSAEKVKSADAVIDNNGTIEETRRQLLAILHQWDLLGKGGSGHHHHHH

(The sequence listing continues in the following parts.)

1. A method of producing a nucleotide triphosphate with a phosphate group at the 3′ position of the sugar (NQP), the method comprising at least:
contacting a nucleoside diphosphate (NDP) with a nucleoside diphosphate kinase, a 3′-O-kinase, and a phosphate donor under reaction conditions such that a NTP with a phosphate group on the 3′ position of the sugar moiety (NQP) is produced.

2. The method of claim 1, wherein the NDP has at the 2′ position of the sugar moiety a H or OH.

3. The method of claim 2, wherein the NDP is ADP, GDP, UDP, CDP, or TDP, and wherein the NDP has at the 2′-position of the sugar moiety an OH, thereby resulting in corresponding product rATP, rGTP, rUTP, rCTP, or rTTP, respectively.

4. The method of claim 2, wherein the NDP is ADP, GDP, UDP, CDP, or TDP, and wherein the NDP has at the 2′-position of the sugar moiety a H, thereby by resulting in corresponding product dAMP, dGMP, dUMP, dCMP, or dTMP, respectively.

5. The method of claim 1, wherein the NDP is a modified NDP comprising a modified 2′-position, wherein the 2′-position of the sugar moiety is —O—CH₃, —O—CH₂CH₃, F, or Br.

6. The method of claim 1, wherein the NDP comprises a modified nucleobase, wherein the modified nucleobase is 5-bromo-uracil, 5-iodo-uracil, 6-mCEPh-purine, 6-phenylpyrrolocytidine, N2-alkyl 8-oxoguanosine, difluorotoluene, difluorobenzene, dichlorobenzene, imidazole, or benzimidazole.

7. The method of claim 1, wherein the NDP comprises a 5′-O-(1-thio(diphosphate) (NDPαS).

8. The method of claim 1, further comprising contacting a nucleoside monophosphate (NMP) with a nucleoside monophosphate kinase in presence of a phosphate donor NTP under suitable reaction conditions such that a product nucleoside diphosphate (NDP) is produced for reaction with the nucleoside diphosphate kinase and/or 3′-O-kinase.

9. The method of claim 8, wherein the NMP has at the 2′ position of the sugar moiety a H or OH.

10. The method of claim 9, wherein the NMP is AMP, GMP, UMP, CMP, or TMP, and wherein the NMP has at the 2′-position of the sugar moiety an OH, thereby by resulting in corresponding product rADP, rGDP, rUDP, rCDP, or rTDP, respectively.

11. The method of claim 9, wherein the NMP is AMP, GMP, UMP, CMP, or TMP, and wherein the NMP has at the 2′-position of the sugar moiety a H, thereby by resulting in corresponding product dADP, dGDP, dUDP, dCDP, or dTDP, respectively.

12. The method of claim 8, wherein the NMP is a modified NMP comprising a modified 2′-position of the sugar moiety, wherein the 2′-position of the sugar moiety is —O—CH₃, —O—CH₂CH₃, F, or Br.

13. The method of claim 8, wherein the NMP comprises a modified nucleobase, wherein the modified nucleobase is 5-bromo-uracil, 5-iodo-uracil, 6-mCEPh-purine, 6-phenylpyrrolocytidine, N2-alkyl 8-oxoguanosine, difluorotoluene, difluorobenzene, dichlorobenzene, imidazole, or benzimidazole.

14. The method of claim 8, wherein the NMP comprises a nucleoside 5′-O-thiophosphate (NMPαS).

15. The method of claim 8, wherein the phosphate donor NTP has the same nucleotide structure as the substrate NMP.

16. The method of claim 8, wherein the nucleoside monophosphate kinase is an adenylate kinase.

17. The method of claim 16, wherein the adenylate kinase is an adenylate kinase of an even-numbered SEQ ID NO. of SEQ ID NOs: 1206-2504, with or without amino acid residues 1-12.

18. The method of claim 8, further comprising contacting a nucleoside with a nucleoside kinase in presence of a phosphate donor NTP under reaction conditions such that a product nucleoside monophosphate (NMP) is produced.

19. The method of claim 18, wherein the nucleoside has at the 2′ position of the sugar moiety a H or OH.

20. The method of claim 19, wherein the nucleoside is adenosine (A), guanosine (G), uridine (U), cytidine (C), or thymidine (T), and wherein the nucleoside has at the 2′-position of the sugar moiety an OH, thereby by resulting in corresponding product rAMP, rGMP, rUMP, rCMP, or rTMP, respectively.

21. The method of claim 19, wherein the nucleoside is adenosine (A), guanosine (G), uridine (U), cytidine (C), or thymidine (T), and wherein the nucleoside has at the 2′-position of the sugar moiety a H, thereby by resulting in corresponding product dAMP, dGMP, dUMP, dCMP, or dTMP, respectively.

22. The method of claim 18, wherein the nucleoside is a modified nucleoside, wherein the 2′-position of the sugar moiety is —OCH₃, —OCH₂CH₃, F, or Br.

23. The method of claim 18, wherein the nucleoside comprises a modified nucleobase, wherein the modified nucleobase is 5-bromo-uracil, 5-iodo-uracil, 6-mCEPh-purine, 6-phenylpyrrolocytidine, N2-alkyl 8-oxoguanosine, difluorotoluene, difluorobenzene, dichlorobenzene, imidazole, or benzimidazole.

24. The method of claim 18, wherein the phosphate donor NTP is a nucleoside-5′-gamma thio-triphosphate (NTPγS) for producing NMP-5′-O-thiophosphate (NMPαS).

25. The method of claim 18, wherein the nucleoside kinase is an adenosine kinase.

26. The method of claim 25, wherein the adenosine kinase is an adenosine kinase of an even-numbered SEQ ID NO. of SEQ ID NOs: 66-1204, with or without amino acid residues 1-12.

27. The method of claim 1, wherein the nucleoside diphosphate kinase is an acetate kinase.

28. The method of claim 27, wherein the acetate kinase is an acetate kinase of an even-numbered SEQ ID NO. of SEQ ID NOs: 2506-3058, with or without amino acid residues 1-12.

29. The method of claim 1, wherein the 3′-O-kinase is a 3′-O-kinase of an even-numbered SEQ ID NO. of SEQ ID NOs: 3060-3370 and 3376-5126, with or without amino acid residues 202-211.

30. A method of producing a NTP with a phosphate group at the 3′ position of the sugar (NQP), the method comprising contacting a nucleoside with a nucleoside kinase, a nucleoside monophosphate kinase, nucleoside diphosphate kinase, and a 3′-O-kinase in presence of a phosphate donor under reaction conditions such that a product NTP with a phosphate group at the 3′ position of the sugar (NQP) is produced.

31. A method of producing a NTP with a phosphate group at the 3′ position of the sugar (NQP), the method comprising (i) contacting a nucleoside with a nucleoside kinase, a nucleotide monophosphate kinase, and a nucleoside diphosphate kinase in presence of a phosphate donor under reaction conditions such that a NTP is produced; and iii) contacting the NTP produced in (i) with a 3′-O-kinase enzyme under suitable reaction conditions, such that a NTP with a phosphate group at the 3′ position of the sugar (NQP) is produced.

32. A method of producing a NTP with a phosphate group at the 3′ position of the sugar (NQP), the method comprising (i) contacting a nucleoside with a nucleoside kinase, (ii) contacting the product of (i) with a nucleotide monophosphate kinase, (iii) contacting the product of (ii) with a nucleoside diphosphate kinase, and (iv) contacting the product of (iii) with a 3′-O-kinase enzyme, wherein (i), (ii), (iii) and (iv) are carried out in presence of a phosphate donor under reaction conditions such that a product NTP with a phosphate group at the 3′ position of the sugar (NQP) is produced.

33. The method of claim 30, wherein the nucleoside has at the 2′-position of the sugar moiety a H or OH.

34. The method of claim 33, wherein the nucleoside is adenosine (A), guanosine (G), uridine (U), cytidine (C), or thymidine (T), and wherein the nucleoside has at the 2′-position of the sugar moiety an OH, thereby by resulting in corresponding product rAQP, rGQP, rUQP, rCQP, or rTQP, respectively.

35. The method of claim 33, wherein the nucleoside is adenosine (A), guanosine (G), uridine (U), cytidine (C), or thymidine (T), and wherein the nucleoside has at the 2′-position of the sugar moiety a H, thereby by resulting in corresponding product dAQP, dGQP, dUQP, dCQP, or dTQP, respectively.

36. The method of claim 30, wherein the nucleoside comprises a modified 2′-position of the sugar moiety, wherein the 2′-position of the sugar moiety is —OCH₃, —OCH₂CH₃, F, or Br.

37. The method of claim 30, wherein the nucleoside comprises a modified nucleobase, wherein the modified nucleobase is 5-bromo-uracil, 5-iodo-uracil, 6-mCEPh-purine, 6-phenylpyrrolocytidine, N2-alkyl 8-oxoguanosine, difluorotoluene, difluorobenzene, dichlorobenzene, imidazole, or benzimidazole.

38. The method of claim 30, wherein the phosphate donor comprises phosphate donor NTP.

39. The method of claim 38, wherein the phosphate donor NTP is a nucleoside-5′-gamma thiotriphosphate (NTPγS).

40. The method of claim 30, wherein the nucleoside kinase is an adenosine kinase.

41. The method of claim 40, wherein the adenosine kinase is an adenosine kinase of an even-numbered SEQ ID NO. of SEQ ID NOs: 66-1204, with or without amino acid residues 1-12.

42. The method of claim 30, wherein the nucleoside monophosphate kinase is an adenylate kinase.

43. The method of claim 42, wherein the adenylate kinase is an adenylate kinase of an even-numbered SEQ ID NO. of SEQ ID NOs: 1206-2504, with or without amino acid residues 1-12.

44. The method of claim 30, wherein the nucleoside diphosphate kinase is an acetate kinase, and the phosphate donor includes acetyl phosphate.

45. The method of claim 44, wherein the acetate kinase is an acetate kinase of an even-numbered SEQ ID NO. of SEQ ID NOs: 2506-3058, with or without amino acid residues 1-12.

46. The method of claim 30, wherein the 3′-O′-kinase comprises a 3′-O′-kinase of an even-numbered SEQ ID NO. of SEQ ID NOs: 3060-3370 and 3376-5126, with or without amino acid residues 202-211.

47-70. (canceled)

71. A method of producing a nucleoside triphosphate (NTP), comprising contacting a nucleoside with a nucleoside kinase, a nucleoside monophosphate kinase, and a nucleoside diphosphate kinase in presence of a phosphate donor under reaction conditions such that NTP is produced.

72-86. (canceled)

87. The method of claim 1, further comprising a NTP regenerating system.

88. The method of claim 87, wherein the NTP regenerating system comprises creatine kinase, pyruvate kinase, polyphosphate kinase, and/or R-acetate-kinase.

89. The method of claim 88, wherein the NTP regenerating system is pyruvate kinase and substrate phosphoenolpyruvate.

90. The method of claim 88, wherein the NTP regenerating system is creatine kinase and substrate creatine phosphate.

91. The method of claim 88, wherein the NTP regenerating system is polyphosphate kinase and substrate polyphosphate.

92. The method of claim 88, wherein the NTP regenerating system is R-acetate kinase and the substrate acetyl phosphate.

93. The method of claim 92, wherein the R-acetate kinase is same or different than the acetate kinase of any one of claims 27, 28, 44, 45, 69, 70, 85, and 86.

94. The method of claim 92, further comprising pyruvate oxidase and substrate pyruvate and inorganic phosphate.

95. The method of claim 94, further comprising a catalase.
